United States Patent Application Publication US 2018/0305689 A1 - sequence listing, part 107

SEQ ID NO: 1560900 - DNA, 4001 bp, Homo sapiens
cgcacaacaaaagcccgggtcggctagcccagagacaaaccaaggcagggcatcctttggcccagcagggcaagtacaaaagggtgtggcttttctaagttctgaatgtcagcggaggggcagggagccccacactcctcccgacatgctaactccaagggccctaggacaccgtacaccttccatgctggctaagtctggggaaataatctggtgaagaaaacagaggcctgcctcaccgagcaagaaaggtgagggaatgcagaacagaatgggcaggcccggcgtggtggctcagcactttgggaggccgaggcgggcagatcacgaggtcaggagatcgagaccatcctggctaacacggtgaaaccccaactctactaaaaatacaaaaattatctgggtgtggcggtgtcccagctcctcgggaggctgaggcaggagaatcgtttgaactcaggaggcagaggttgcagtgagccgagattgcaccactgcacaccagcctggcgacagggcgagactctgtctcaagaaagaaaaaaaaagggcagcgccagggcctggaggcagggcaggacggcggagagggcgggatgtaagaacctgccttctgctcccacacaggaggggctggagctgctgtgaagggagaggccttggaggaggctcctgcagttgccggccgggtggaaagtcagggttacgagatgcccagaagggagtgcagcccgaccacagctcttatcgggcggaggctcacacaggttagcctccgtttccgacctccctgccccagcaactccaactagagacgcaggcacccccataacgacaggcgccgggcttccctcggcctggaaagctctccctggggtccccaaaacagacaccttctcttcatttagcccccgggagccctcccgccctcacactgccctcatgccagcatctggaacctcagtgttgactgaactgtggtgtgctcaagcttccagcatagaggtgcactcggcctggccaccacccctggcacacagcagcaacagccaaccccatctcggctgtacctcccgctgctgtgtgacctccggcaggtgactcagcacctccctcacaggctgttgtaagggaaatgtttgttatttgcatgttgcttagttcctggcatacagaaagtgccacctaaatgtttacataaataacaccataggtgctcaggaaatggtaccacgggctggcagacacccacagggacttcttgctgtcacctggcccaccctaaaaaagggtctccttccggaggtaagaggacttggcctctgctgtgagatggcagagaagcaggaaacacgttggggaggagggcaccccccagagatagaattccagggccattgtctgtgcagccacagagcaaacactcggcctttgttcccgggaccctgcgggaggggggcctcgggatgcccattccgccagtgtggcccgcaaacccgccggacaggtttggttctcctggcctcccggccccccgccaccccgttcacccgaagcctgggacccagccttcatccccagtgtctcccccgcccgagccagcagggcggctgggcctccccgcacgtgcacgggttcgaatcccgccgacgcaccgggtgccaggaccgagggtcagccctctccgcgcgcagcgggagcgcccaccccaggggcggaggcgcggacgtcctgccggggtaacccgcggccgcccccacctcccgggcccgcgtgactcacctcccaggccaggcggggcgggatggaggcgcgcgcgcggcccctccgcacagacttcctgctgccggggcgggggatgctggccccggctccccgggcctctcgcgacccccatccccctgggcctgggacgcggggacccccgagcctgggagggcgcgcgcagtgcggggcgcggagggaggtctggtcctcacgcgaggtccccgcctccagggtcctcggagggacgagggcgcgcagcctccgcgttcccctgcaaacttgcgcgcagccgggggcgtgtccgtcccgggagggtccccccaacacccgggtccccaaggctcttaccgaccagtaagcacagcacgtcgagcagcacgaagacccacctccgctgcatggtccccgcgacccccgacgccggtcccagcgcgtcccgtcgcgtcccggcccggccgcggagtcacgtggcgcggagcccgccccgcgcggagaggaggggaggggcgggaaggggaggaggggaggggcggggagggcacgaggggagaggtgaggaggggaggggaggggaggagggagggttaggggcggggaggggaggagggagggggaggggaggaggggagggctaggggcggggaggggaggggggagggggagggaagggaagaagggggggaggggaggagggaggggggacggcagcggcgggcaggggagcagcggggggggcggggcgcggcggacccgggaccgcgcggactctgcccccgcctggccgcggcgcccaaaagagcgggtggggcgagcgtgcgggcgccacggggacctcgtccgcccggagtcccggccctgacccgggctgtgcgggtctccgagcggcgtgaggtcctcagaggctggaggttccccgcgggtcgggccggcggagccccgggcggggacgtggagaaggaggacgagcagcggcgggaccggccccgcgggacggttcccgactttcctcctcagggagtggcagccgcgccgtgtgcgcctggaaactccgacagcaggaggcaccttaaagtggaaggggcgacgtggcttcatttcaggagtttcttttctcctaatactcaaaatcctggcgcgtccttggacccctggcacgttagaagctcgagttcctcggcacccaccttgcgacggcgtagggtgtccaggcgcagccctgtgcccaggcaccgttcctatcagcgcacttgctgtcccatttcacagaagagcacgggggcgccaggagctgggaaccccatgaaatggcgccggggtctgtgcccccaccaggtcgtggggagccctgagctgagggtgcctggggattgagggcacctgagccagggaaacccaggcccaagggacccacactgggtcctttcggctgggaccatccgggaggcctcaggagtgtcagacccacgtttccggagtccagccttgacctctgccactcacggtcacttaaatgggaagtggcaggcctggggtcagaaacaaggctgctgggccccagatccgctgccaccctgaccctcctctaaaacccgttcagcaccaccatcagccccctgccccagcaacaccaaaacagggtgcgtctcagcaactggacttcaactgggagctcctcgaccctgcttcccggatggtcagacacctgcacgtggggcaggggggcatcatgagggaactccaagggcaaggggctcttgggagacagcaaaggcacccagagtggtgctgggtgggaagacggtgcaagctgacctgtggccctccaagggcagggttgaggtgctcccttgctgcactcacggtggggtgggggggctctagctcccgtcggaattaggattgtgagggttctggtgcctagcatcaatgctacataaatgtagggttcagcgtcactactgcgctttcccccacacttcaccctgtctgcaaatgagtgaccactgctgtcagtgtagtcttgacagccaacgcacattttctcctaagatggagagggtgcaacatctactggagtcaaggaaaggcggtgttcttcattgagcacctactgtgtgctggggagcaagggagaggtcacttggaggggcctgccaaagtgggagcggggggaagacagtgggggctgtgggatggggccaagccaagagggagagacccaggagaggggtgga

SEQ ID NO: 1560901 - DNA, 4001 bp, Homo sapiens
tgcagtgagctgtgattgtgccagtgcactccagcctgggcaacagagaccttgtctcaaaataaataaataaataaatagaaagaaagaaatttgtatggcagcaggtagcttctagatctccttatgagcccaggccacagaatacatctggaggaggtgatgtgtgttcggctcattggcctgggagagtgtacttggagaaggggaactcatctgagcctcagggggcaatggagtgctagaaacatctcaacaagctgcatcttaggggaaagagtagagagtcctgaagcccgccacctggggtgacatgaggatgagacaggggtttggtagggccacaggagatgtgaagttgatggggcagagtgatgaggctgtgaagacctggttcctaaaagtgagacctgagaaactagatacctgctggggagggcagtggacagagctgggagcctggactcctgaatccttgtggaggtaaatgatgggggattggaaggtgagagcctgaggtcttgtttggagagagggttgaggcagacagcctcagtaaaagctggtgggcagtacggaagctggggtctgaactcctgggtccctgaggggataggagactgggaccaagacatttaggtccccaagtgggagtgtgaacagaagtcagagaactgcattgagaatcacattccgggtcccccaaaggaaaggagtcatggcgcctgagtccctcggggagcagatgctgggtgccaggaggctaagtctgtgtgtctgcagggcacagcggggttctaagcagagcaaacgctggggaacaggattcctaggtgctgacggggtgagggctaccacctggggccagcagaggtgtagacacggacaggcttcccgaacggggtgggagctgcatccccgggtgccatggtccccacggcgaccagaataggaaaattcagaagccctggatcctcagggagcagctggagtcccaggaacctggggtgccgaggacggggccacgagcctggccggcagaacccagaggctggggcgccctggtcggggagggcccgggtattcccgggtcaaaggcgcggcggggggatccccgcgccgcctgcgccccctccctggtggcggcggcaggaggtggggggaggcgaggctgccgagcgcgctgaccatggacagctccagagcgggcctgtgtccagggcggccgccgagcctgcctggaccgtgggacgcagccggctgtgcaagcccgaggctggcgacgggagacggagtgcgcgaagcggggacgatgcggacgcgtctggggagtctggcaccgccgcggcgggtgtctggagctcccaggacagggtcaggaagggggatctaggctctaggaggggtcccggggccggaccgggaaatccaagctcctgggccctggaggaggcgcgaggcggcggtgcgcccgggattctagggttcggtcggggactctgggcgccgggaggggcacgcctgagtccccggggttggggtgtgaaatctgggctcgggggtcccctgggatgaggaagggaatccgggatctcggggaggcgggggaggctcgccaaggggtccccagggtgggcgctgccaggagggccgggccgggctcttacctgcctggtccgcggcggctgcgggcggagctgggctgcaggagggacgtggggtggagtgggggggccgggcggggcccctggcagcggccggggcccggctctgtcgcttcggagccctggagccctgtctccgacgctcgcgcgggctccgcgtctctggctccggcttgggcgctggggacccccctccccctcacgctctcactgccttctacccccaaaatagccccctgcccctgtcaccgatcagcctccccccgcgaggccgcagccgccagatccaggggtgcccaccagcgccccccaaatcccaccttccccccaaaaaaattcctcctccctccccctccccccccacggctcccgggcggtcgtggcccctttaacaggagactgacagacggcgaagagcggccaatgggagagagcgtcggcgccggccggcgactagaccccgcctccacaccggccgggaggggtcgcgcgggcggagagcgagaggcggggcataaggcgcgtcgaccaataggcacgcggcgtgaggcggctggggcgggaggcggagcccggcagggggatgatgtcacctggagcgagtagcgcgcggcgtggaacgcgagtcgcgaccccggctcccggcagtggcgcgcactagccctcgcgccgcacgggacacgagggctgggcgggcagcgggatgaggctaaaggttggatttcaaggcgggggctgcttccggaaagacgcgctgtgtttggaaggtggagtgagcgcccggtgggcgagggcacctcattctgcacccctgcgcccgcctcgggaactgcacgcggcacccccacccgcgactcccacgcagacagtagtgcggcctgcagggttcccccggcggacgaggctaatggttcgctccgccccgcccacacagaggccgcccactggctccggctgcgtttcaggactctggaggaagggacttggccttcgccctcagacgctcttaagggtaggcagcgttgtcctcagttctgccccagcactcagacccagactgggtccctgcctccgccctccgccctcggactagtctcttggaagccggcctgtctccgccttcagacctagggagaggtcttaacctctgttctcagactctggaaaaggcttctcaacggcttggcctgacctcagctcctcgcattccctccacatctcaagacaccaacccagggatgcaggacagacacacagacactcagtgagggtcaaatatctttaaataaagtgccaggaacaataaatactgtacaggaagagagtgcacgtgaacgtccagatctgtggtttcaacctcgagactccaaggacctgcaaggggggtggacaagggacccgggatcagggaggctccgggtagacaagaggggcaggactggggttgcagaggcaagggcccaggtaagtgggctgagggatcccagccacagtaggttccgtatcttgggatggaaggaagctaagggctccccaggggatttggccaaactagcctggggtgagagcctgggccaagggtcaagggtcaggatcccagaggaggggccagggctggaagatccaggaagcactggcctggtttgggagcctggggttaaagggagcccgtggaggccccaggggtgtggtgacccaggggctcacgagtagctctgatgctgttggcgccggcgggcagagcgcatcttctcgaaccgggcctccatctcctccagcactcgcggtgtgtaacggacaaccagcttcaccgagccctgggccgccttcagcagctccaccgccttctcatgctgctcaccctcaacgctctgcagggcccaacacagacagctgagcctggggcccgctgccctcgtccagcccccactgggagatgggacccactgctagtgagcctggtgccagccctgagatgtcaatgcctcatgtcctcctcgtgggagtcattaactcctggttcagtgtcctcctccaaaacctcccaggattcccatgtcagggacagccccgtgttccctcagtccctggccaaacgtccagacccatctttgtggcctccctgcccacagcccactaatgtccgcccgccttgactccctcttttttgtccccacagccctgggccagctcaggccttgtcctcttttctctggactcttaccccagcctcctccctggcctggcttctaatctctcccctcagttcatctcccatagagtcccagagtggtccttctgcacctgcaagctgagtttatccctggctcacccctc

SEQ ID NO: 1560902 - DNA, 4001 bp, Homo sapiens
gagcagaggcacacagttctgagaaagagtcaagagttaggctgggcacagtggcgcacgcctgtaatcccagcactttgggagaccaaggcgggcggatcacttgaggccaggggttcgagaccagcctggacaacatcgtgaaaccccgtctatactaacaatacaaaaattagctgggtgtgattgtgcatgcctgtaatcccagctactcaggaggctgaggcaggagaatcgcttgaacccggaaggcagaggttgcagtgagccaagatcacgccactgcactccagcctaggagacagagcaagactccatctcaaaaaaaaaaagaaaaaaagaaaaagttatggcacagccttcactggccaaccacccctccagctgggcccccagagtctgctcaccagcgattctgcagcccagggctgcgtccagtgctagctccctcctgatcgcctcctcagaaggcctaggggccccagggaagcagaccaggatgcaggtcatgttgtccaggctgccctgaagccggtggagaaaaaggagcccggtgggggagagtccaaggcagagcttcccaacaatccccaggttcaagtcccccacttcattctacttatgcccatttctttcgcgtcccacccacctgccaatcctctcttactgggaccaaacccggtcctaggcgctcccaattgagagaacaatgccttttccctaaagctccgcccgctctgatgtttacctgctcttccaccttccagcactaatcaatacttccggcccggctcctacgacccagaatcgcccctttccaaaagaccacgccctttctcttaagtcccttccactaactctcccgtgcctcaaagcatccctcaggctccgcccctgtattttggccctgcccacttcaggccacgcccttcgcttgagtcctatcccctcctttgctagctttactcttgcctctctatcaaagccctcctccccaaaaccccgaggctctctccctctgctgcaccaagccccaaaggtaccacgccacgcccccaggaccttgcacagacacgtgtccaacagctgcgcgcagagaagctctggggccaggcccaagcggaggcgtgaagccaccagtcccgccagggcagcaccagacacagtgtcccagacgccatcagaggccaggagcatgaactcgtcctcagcctggcgtgccagtgcggccacctctggctccgcagaaacgagctgtagctcggggggcctccccggagcctccttgtaggtaaagtcgcccaacgctcgcgacacggccagagagccctcgacgcggcggcggcggatggtgccgccagcggcgtggatgcgctcgcgttcccggggtcgaaggggccggtggtcctctgtgctgaaggccacggcgccagcgcggctcagcaccgcgcgggagtcaccgcagtgcgccaggtacagaaaccgcggggagaccagcaacaccacggccgtgcagccgcccgtttccacgcggggccagagggagcgcaggcgctcgtcggcgctcaagaaggctcggcgcagcgcctcgcgcacgccctcgggctcgctaggctccgggcccagctcctggagcacatggcctggcaaatggcgtgcaccgaagcgggcagctcgagccccaccgtggccgtcgaggacggcaaacaaggcccagcccgggggcagaccaggtaacgaaagccaagtgcagtgagcatcctccatgcgcgcgcgccagccttgcgctgcgctcgccccgaagcgcaggcccccagacgcctcggcacccccgtgcggccgctgggcgcggcgcggcgctgtcaacagagaccgaggcccttcgggggccctgcgccccgcctcctcctcctcctcttcctccctcccctccttctccctctcctttttcttgcaagcggtccagaggagacgctgcagctggcgggccaggaccgccatccttcagccctgggatcaggaaggctccaccctgtacacctgcccgccccctccattaatcccctccgctgtgagattttaaaccatctaaatctccttcctgtcctttgacctgctctttaggcgggtcactagaaggaattacacttctgggtctcctgtttcctgcacctacaaagcggggtttgggatctgaatcaggaaaaaaaaagaaaaaagataatactgtaccagtggcaaactattacatagtactaatgtgtcacacactgttatacatcatcatctccagtttacatatggaagaagaaacagagtcacagaagtaaccggtgttccagggaaactaattctagaatctgtgttctcaacacaacactcagtccaagctcctcccacctcagtggtacagcccccagcctcaaaacctgtaaataccatacttggccgggcgcggtggctcacgcctataaccccagcacttagggaggccgaggcaggcggatcgcttaagcccaggagtttgagaccagcctgggaaacatagcgagaccccgtctctacaaaaattaacatttagccaggcgcggtggaacacacctgtgatcccagctactcaggaggcttaggtgggaggatcacctgagcccgggaggtcgaggctgcagtgagccgtgatcgtatcactgcactccagcctgggcaacagagcgagaccctgtctcaaaaagatatatatatatatatatatatatatatatatatatatatatacatattttttttttctttactgtttttagttcgacccctcccctctggggcttcgcttattttctcttccaggccccgcccatccaggattcaggcacacagctccagacccttctaattttcgcagacctggaatcgcctggaatccgaccccacccagttatatttgaataattccctgttgctttagccctgcccacgtttgagctcctccgcgtgccccaaaagtttctgaatcgtttcattcggccccctttctcgctccctctgcaaatctaggctcggaccctacctcagagcattagaatctttccaccccctcctcaatggcaccccgagcaccaccccaacccacccagggatccacgctctcatcctctctgccgtggctcgttcaccatcctctcccaagtccctcgccagactccaggcctccttccctcttcccctaaaggctgcgccctctgcgatctaggccccgcccttcaggccgctttcccctccttcctggctccgtagcccaccctcttggttccgcccctttagtaagaaggccacgcccctccgcctgatcctcggcgtttccccgcccctcaccctccctctggtaccgccccgcccgtcttctggccccgcccccggccgcgcgctgcagtgccttccccacctcggccccgcccgcccccgccgagccgagcaccagggcggcggcggcggcggcggcggcggcggcggctggagcagcccgggaggaggaggcggcgagaatggcagcggcgtcgtgggcgcggcggagatgagcgcccgcgaccccgggcccagggcggcacagccggagtgggcgggggtcccgatgcaggcccgaggggggccatggggcaggtcctgccggtcttcgcccactgcagtgagtagaggaagactggggcctggtgtgggccccagaggttcaggtggggtactccccggtgtcccctcggcgcttgcccgcaggagagccgggatggggggaggaggcataggagacaaaggaagctctcccctcccccgcgctctggcggcgacgggggtagcctgacccggaggacctggacgaaacagggcggaggtgagggggcactgagacagcaggcggggggcgcgctgcgctctgggacgtaccgcccggccccgcccgggagcgaggacgcgcgcggggagctgtcccctggctctggtgctggccg

SEQ ID NO: 1560903 - DNA, 4001 bp, Homo sapiens
aaccttagaggttctggcaaggagagagatggctccaggaaatgggggtgtgtcaccagataaggaatctgcctaacaggaggtgggggttagacccaatatcaggagactaggaaggaggaggcctaaggatggggcttttctgtcaccaatcctgtccctagtggccccactgtggggtggaggggacagataaaagtacccagaaccagagccacattaaccggccctgggaatataaggtggtcccagctcggggacacaggatccctggaggcagcaaacatgctgtcctgaagtggacataggggcccgggttggaggaagaagactagctgagctctcggacccctggaagatgccatgacagggggctggaagagctagcacagactagagaggtaaggggggtaggggagctgcccaaatgaaaggagtgagaggtgacccgaatccacaggagaacggggtgtccaggcaaagaaagcaagaggatggagaggtggctaaagccagggagacggggtactttggggttgtccagaaaaacggtgatgatgcaggcctacaagaaggggaggcgggacgcaagggagacatccgtcggagaaggccatcctaagaaacgagagatggcacaggccccagaaggagaaggaaaagggaacccagcgagtgaagacggcatggggttgggtgagggaggagagatgcccggagaggacccagacacggggaggatccgctcagaggacatcacgtggtgcagcgccgagaaggaagtgctccggaaagagcatccttgggcagcaacacagcagagagcaaggggaagagggagtggaggaagacggaacctgaaggaggcggcagggaaggatctgggccagccgtagaggtgacccaggccacaagctgcagacagaaagcggcacaggcccaggggagagaatgcaggtcagagaaagcaggacctgcctgggaaggggaaacagtgggccagaggcggcgcagaagccagtagagctcaaagtggtccggactcaggagagagacggcagcgttagagggcagagttccggcggcacagcaagggcactcgggggcgagaggagggcagcgcaaagtgacaatggccagggccaggcagatagaccagactgagctatgggagctggctcaggttcaggagagggcagggcagggaaggagacaaagtccaggaccggctggaggggctcaacatcggaagaggggaagtcgagggagggatggtaaggaggactgcatgggtcagcacaggctgccaaagccagggccagttaaagcgactccaatgcggaagagagtaggtcgaaggggaatggtaaggaggcctggggcagagtggtcagcacagagtggctaagcccagggccagttgaagcggctccaattcggaagtggggtggtcgaaggggaatggtaagggggactgggacggggtgtcagcatagggtggcaaagcccagggccaggaacgacggggcggatcgagactggcaacggggaaggaggatgccccaggtggcgcagcagagggtggacctggccccgggagacgccgggcggggggcgctgacctggtgcagggcgctgataccgtcggcgttggtggagtccagcacggcgcgggcgggcggcggcgcggcggggtcgagctcggcgccggggccagggtcggcggcgcgcagcatcagacgcgcctcgtccaggtcgccgcccgcacaggccgccaggaactcggcggcgcgctcgaagcggacggtgcgggcgcggcgctctccggggccaggctcggcgcccgcccgcgccccccactgccgcagctgctcccgtcgccgctcccgggcagccgccgccgccgcccccgggccagccgccgggccatcctctccggacatcgcaccgcccgcccgcccagcgagcgagcgagcgccgagccccaaccgccgccaccacccgcccgcccgcccgccccgggggccgccgggaactgccgctggccccccaccgccccaaggatctcccggtccccgcccggcgtgctgacgtcacggcgctgccccagggtgtgctgggcaggtcgcggggagcgctgggaaatggagtccattagcagaagtggcccttggccacttccaggagtcgctgtgccccgatgcacactgggaagtccgcagctccgaggcgcccagtggaaatcgccagatgagggcctcctccggggaatgctgggaaatggagtctacaggccggaggggtgccccacggcatactaggaagtgtgtagcaccgggtaaaggggatgaatagcagactgccccggggcagttaggaattcgactggacagccgcgtgggagggagtgcggggagaggcagagttgttttgttattgttgttttattttgttttctttgttttgagacggagtctcgctctgtcgccacgctggagttcagtggcgcgatatcggctcgctgcaacctccgcttcccaggttcaagcaattctggctcagtccccagagtagctgggataacaggcgcgcgccaccccgccctgctaatttttatatttttagtagagacgggatttcaccatgttggccatgatggtcttgatctcttgacctcatgatccgcccgcctcggcctgtaatcctgctgggatgacgagcgtaagccaccatgcccagctgggttttatttattttggtttttttcctgaccccttaactagaaataagctccacgagagcgggatcttttgtcttctgtgcactacttgtcctcggttcttagaacagaacctgagagaacctgatcgcaaatatttttggaatgaatgaatgaatgggttcaccagggcaccatgggaaactgagtccgcaacctagaagccatgaaagacagtccacttccaagcttccctgggtgacctcgcagggcatgctgggaaatgaaatttgcggtgaaaaggtcaggaccacgatcctagggcacgctgggaaatgtagcccacagggccacacccctaaaagcacagtggggtgcaaggcagggccccaaggcatttagggctcggggcaagagaaatccacactccactccctaatggtaatccctgagccacaccgagtaaaggaacccaagacacagtgtccacagggacagggctctcagagctttcactggcccgcgcttctcctgcgcccacccggacctcctgggaaccgcccaggccctcgcgcgctctcaaggcatgctgggattggtggtcccgggcaaggagttccagcaggtggggggcgaatcacctttcagcgggcccaagcgatgagcacaccttgatcttcaccttacggatcccgcgcccaactcaagattgggaaggtggctggcactttgtgacaggaagagtcccataaaaatcatacagaaaagggccaaaatcgggacagagactacagactgtttcccaagcgctgtgggagtttcccacccactctgaagtccttgggtttgcgcggagacgtaaactgcgcatcccacgaggcctgtttctttccctctctctttctcttttgttgttgttgttgctgctgctgttacgaaaatttttgtggttttattgtatcatgaggcattgaaacatccggcgactcaatgtctaggcggtgaggcagccgctttctccttcactttctttgggttaagtagagcaacttgtcagtagttttgtttttttttgttgttgttgttgtttttgagacggaggcttgctctgtcgcccaggctggagtgcagtggcgcgatgtcggctcactgcaagctctgcctcccgggttcaagcgattctcctgcctcagcctcctgagtagctgggactacaggcgtgctccaccacgcccggctaatttttgttttttagtagagacggggtttcaccatgttggcc

SEQ ID NO: 1560904 - DNA, 4001 bp, Homo sapiens
tggttaggcaggtctgacgcccaggttaatgacatgttgggttcgctcagcggcacagaggaggttggagatctgcctcggtgttttctctcctaccccgcccccatccccgagccgaaaagtcgggggagagccgggacacagcctccggagggaccccgggtacctgtcctgctccacttcaggaacccaggctccactatccctgccccacccttaattctgctcagagacctagaagatcggtcgagacagcagcttgaggctggcagggtggtcacccattccaccttgagccccaccagtctgagcctctcatttctgaccaagactcggggattcgaacccctatactacccaaagactcggcttcctagagccccccagttcgagggactcaggaattccagctccaacgtctccccgggatgaaggggtagaatccctccattccaagaattcaggcatccgaacccgctttccttccctccagtaaaacaggcaacggagtttccttctaaggatccaggtgtcggcgcgccccaaattccgccctgggacctggcgtccgagtcccctcccaatcctcccagggacgcgggtgttgggctttttcagggcctctggtccccaggagggtgaaactcacggatccgggcagatcctggcacctgggggcttcctccagctcgggctccggcttggggagcggagaacggggcggggcaggagctgggaacaggttagacgacgtgacttgggctggagggaggcgggtcccggtggggagggggagccaaggtcgcctcgagcaccttgggacttgtagtcccggagggacaggacgtagcccaagacgatcccatttggattcacccagagtccatttcacagacaggaagggcgaggcccagaagccgagagcgaccaggccagggagatacagaagagccgagacgcctgcctcgctgtggctggagactgactcctgagcccttgccccaccccttcaggcgcactatcccctttcctgatcagtatcccccagggtctctgagcccgaatctccccgtcgataaaaagcgcgggttggatcttcaaaggatgtcccagcaagagttcaaaatcttagtttggactacaacccccagcagcctccgcgaccgccctcgggcgactctttgcctcgggtcctgtgggaattgtagtcctggagcccgcaggggctgcaccccggtgtctctctcgcccacgcgaaggaaaccgtctggagatcctggataggggaaacatttccccttccccttgaccctccctccgctctggaaagcctctcccacctggggagaaggggtgccccaattctggagtaggatcctaaatcttggcagagggggcgggaagtggcgctgacacactggccaggaatgcagtcgggtcaccctgtctagccaccgtctcgcggctccaaccgccgcccaacgcggggcggccccagtgggaagggaagtgggtgcgtcccccaaatctgtgtccacgtgccgctgtttacacgctccctggggcagggaggagtcgccgatcaggtcccttcctgaaagtcatcgaggtttcccacgcatgagactaaacccccgagggcatctacaagtcccatttgatccacaaacgctacaccgtgcccagcaccactccacgcgtgtggggctcctgggtccgaggctccgccctcgagaaccacaagctcctccccctatgtttcccgctcccccggagtccagaagccccgcccctggctggaacttcacgccctccggacggattgcccctatttctccattttcccgcttctcccagtcaagttctgaacttgtgaggcatctgggcctccccagaagacatttaacacagaaagcacagccctactaactagtattcttacctgtctcttcaagaatttcagaccaatcgaccgtcctgtctctttaaggcttaggaagagcagtgtggctgcccctttaaggaggcgttgcaacaaaccatattggacagacgatgggggcgacccatcgggacccgacgggcctctgactccagcaatacagcgaatcagcggctttcgggaatacatttttcggaaaaagacttcttcctcggttttctgctctgcacacgttgaaattttccccagtttttcctgcagatcgggagtcgagcaatgcctacccccgcgctcccgcaccagttgggcgctcccggatgatgccctacccctttggatccacgtggtctgcaacctggtgcgagcagcccgggctacagggttgcctgaggtgtgggtcccaggatggaggagccccaggccggcggtgagggtgcgggttgacggggtgcggagggtgcgttggtggaaggagaaaggggcgtccgagagggttcgggcggaaaaggaggcgtacctgcaagcaggacttgcgaagagcgtgcattcccagtgggcgaacgggaattcgaacggagagagggttatcttgtggggggctacccgtggagagcaaggcgcccccaggggttggatcggtgaaattgaggtcgcccctggggaacaggtgggcagaaaggagaaaccaggttgaggggactggagtgctcacgaggttaagaccaatggaccgataggcgcgccctgcaagattggaccggcaaggaggtgtcagtcgaccccatttccccttctgctgcagatgctgctcggttctcttgtccccccaactttaccgcgaagcccccagcctcagagtcccctcgtttctccttggaggcgctgacgggtccagatacggagctgtggcttattcaggcccctgcagactttgccccagaatggtgagtggtcttgttgacggaaaagagggtcccggtccagaccccaagagcgggttcttgaatttgtcacaggaaagaattagaggtgagtcacagagcacagtgaaagaaacaagtttattggaaactactcctttacagagtagagtgtcctcagaaagcagggggagaaacccacagccctttgttagtatttctacttataagaaactataaggaactatagttaaacttggagtgtgcagataagctcactaaaggtaggggctattggtgttatccacgaccattaatcctgcaacctaagcttgctcatttatgttatatttaagtaatgggggctgcattcttaggacatttggacattctgcaggcttggtggaacatgttctgtatggccataaatattctgtaattataattggtggtcagcctgggatgtggttattttcaggccataagcatgaaccttgtaagtgcctagctactcactttaagatggagtcactctagtcatgttttattaaaaaccagaggccagccaggcgcagtggctggtgcctgtaatcccatcctttgggaggccgaggcgagcagatcacttgaggtcaggagttcaagaccagcctggccaacatagtgaaattgtctctactaaaaatacaaaaattggctgggcgtggtggcaggtgcctgtaatcccagctacttgagaggctgaggcaggagaatcgcttgaacccaggaggtggacattgcagtgagccgagatcatgccactgcactccagcctaggcaacagagcaagactctctcaaaaaaaaacaaaaaaaaaatcaaaaaaccttccctctcctgttccacttaagcctctgccctccctgtttctctctgtagcttcaatgggcggcatgtgcctctctctggctcccagatcgtcaagggcaaattggcaggcaagcggcaccgctatcgagtcctcagcagctgtccccaagctggagaagcgaccctgctggccccctcaacggaggcaggaggtggactcacctgtgcctcagccccccagggcaccctaaggatccttgagggtccccagcaatccctgtcaggga

SEQ ID NO: 1560905 - DNA, 4001 bp, Homo sapiens
ctctacttgggcttgttatttagcttctctgtgcctgtttcctcatgtggaccatgggaagaattaataccttcgcctcaaaggggtatgaggattgagtgacataatttataagccgtgattagaacaatgcagtgcgcgaaataaagttcacacatacaggattcataattaccagatgtccttggctgttcattataataacacagggtctggcaacagagtgaggggtccagactcaatgtaatttttttttcccctaaaagggccctttcaactctttctgagatcatacaagccctgagttttgacacccagggtctcaacttcctgagcccttgcctctcagagtcctaaatttcccctgtacattcctgagtctggccagtgatcaccctcagtcacttagggacgggagggctgggagagccctggaagattccagacagaagctggcaaaagcccagggtgtgggcaatatccactctccagcctccgtttctccactcgtaatgaggagtccttccctggggtcagcaaaccttattcaaagggagacctctcagtcacccaagattcctctagacaatgcgagctttcctacctacctacctaccagctctgagcttggtacacccagagccctgttttggcaaccacggttattatttttaatttcatttcaggttatcatcaaatgcccttcaagcccagacattgggaaacactcctctctcatcagatgctcgcctcccccattctgtttttaatcccccttcttaggacgcatgggggtggagagaacggggagatagacagagggaggtgcctggtcctgccctccccccgcctcaaggacagacagacacctccagaattagcctctgtccctcccttatctcccacaataccccaggtcagacagatgggcgtggaggtgacatttctcacctcagggtcagggcaaggagccctgaggcagaaggttagtcagaaaatctggcgggggcggatggaatcccgtcccccagagagctgcagaagaaggaggaggcagaatcctgaccctacaaactctactgcctgtgtgagctccaagcctcagtttaccccttcctctccgtgtaatggttaaatgcccggctatgcaaacctcccagaatccaatagccgctttccggaattctgccctgggttctagaactacctctgcaaacccagctgtttcccaccccataaggcaataggggagcccacctccgccagggggtgccctagggcggatgtcccttctctggttaggcaggtctgacgcccaggttaatgacatgttgggttcgctcagcggcacagaggaggttggagatctgcctcggtgttttctctcctaccccgcccccatccccgagccgaaaagtcgggggagagccgggacacagcctccggagggaccccgggtacctgtcctgctccacttcaggaacccaggctccactatccctgccccacccttaattctgctcagagacctagaagatcggtcgagacagcagcttgaggctggcagggtggtcacccattccaccttgagccccaccagtctgagcctctcatttctgaccaagactcggggattcgaacccctatactacccaaagactcggcttcctagagccccccagttcgagggactcaggaattccagctccaacgtctccccgggatgaaggggtagaatccctccattccaagaattcaggcatccgaacccgctttccttccctccagtaaaacaggcaacggagtttccttctaaggatccaggtgtcggcgcgccccaaattccgccctgggacctggcgtccgagtcccctcccaatcctcccagggacgcgggtgttgggctttttcagggcctctggtccccaggagggtgaaactcacggatccgggcagatcctggcacctgggggcttcctccagctcgggctccggcttggggagcggagaacggggcggggcaggagctgggaacaggttagacgacgtgacttgggctggagggaggcgggtcccggtggggagggggagccaaggtcgcctcgagcaccttgggacttgtagtcccggagggacaggacgtagcccaagacgatcccatttggattcacccagagtccatttcacagacaggaagggcgaggcccagaagccgagagcgaccaggccagggagatacagaagagccgagacgcctgcctcgctgtggctggagactgactcctgagcccttgccccaccccttcaggcgcactatcccctttcctgatcagtatcccccagggtctctgagcccgaatctccccgtcgataaaaagcgcgggttggatcttcaaaggatgtcccagcaagagttcaaaatcttagtttggactacaacccccagcagcctccgcgaccgccctcgggcgactctttgcctcgggtcctgtgggaattgtagtcctggagcccgcaggggctgcaccccggtgtctctctcgcccacgcgaaggaaaccgtctggagatcctggataggggaaacatttccccttccccttgaccctccctccgctctggaaagcctctcccacctggggagaaggggtgccccaattctggagtaggatcctaaatcttggcagagggggcgggaagtggcgctgacacactggccaggaatgcagtcgggtcaccctgtctagccaccgtctcgcggctccaaccgccgcccaacgcggggcggccccagtgggaagggaagtgggtgcgtcccccaaatctgtgtccacgtgccgctgtttacacgctccctggggcagggaggagtcgccgatcaggtcccttcctgaaagtcatcgaggtttcccacgcatgagactaaacccccgagggcatctacaagtcccatttgatccacaaacgctacaccgtgcccagcaccactccacgcgtgtggggctcctgggtccgaggctccgccctcgagaaccacaagctcctccccctatgtttcccgctcccccggagtccagaagccccgcccctggctggaacttcacgccctccggacggattgcccctatttctccattttcccgcttctcccagtcaagttctgaacttgtgaggcatctgggcctccccagaagacatttaacacagaaagcacagccctactaactagtattcttacctgtctcttcaagaatttcagaccaatcgaccgtcctgtctctttaaggcttaggaagagcagtgtggctgcccctttaaggaggcgttgcaacaaaccatattggacagacgatgggggcgacccatcgggacccgacgggcctctgactccagcaatacagcgaatcagcggctttcgggaatacatttttcggaaaaagacttcttcctcggttttctgctctgcacacgttgaaattttccccagtttttcctgcagatcgggagtcgagcaatgcctacccccgcgctcccgcaccagttgggcgctcccggatgatgccctacccctttggatccacgtggtctgcaacctggtgcgagcagcccgggctacagggttgcctgaggtgtgggtcccaggatggaggagccccaggccggcggtgagggtgcgggttgacggggtgcggagggtgcgttggtggaaggagaaaggggcgtccgagagggttcgggcggaaaaggaggcgtacctgcaagcaggacttgcgaagagcgtgcattcccagtgggcgaacgggaattcgaacggagagagggttatcttgtggggggctacccgtggagagcaaggcgcccccaggggttggatcggtgaaattgaggtcgcccctggggaacaggtgggcagaaaggagaaaccaggttgaggggactggagtgctcacgaggttaagaccaatggaccgataggcgcgccctgcaagattggaccggcaa

SEQ ID NO: 1560906 - DNA, 4001 bp, Homo sapiens
actgtgctcggccaatgaggccccacctctaaggaaaagaaaaaagaagtcactgaaagtgtgacttcaagcagaaactcaagtgatgaagtacctgtgtgtgtcaatacatgtagctgtggcttaggctcttgtgtgcctgtgagcagcggtgggttctgcagttgtatgtccacctgttcctatagcttacagttttttgtttgtttgtttgtttttgagacggagtttcgctcttgttgcccaggctggagggcaatggcgggatctcggctcaccgcaacctcctcctcccgggttcaagcgattctcctcccgagtagctgggattacaggcatgtgccaccacacccggctaattttgtattttttagtagagacgggatttctccatgttgatcaggctggtctcaaactcctgacctcaggtgatccgcccgcctcggcctcccaaagtgctgggattacaggcgtgagccaccgtgcccggtgcttacacagttttatgtctgggtgtagttataaattctgttgggttttgtttgtttttgagacacggtctcgctctgttgcccaggctggagtgcagtggtgcaatcttggctcactgtgaccttggcctctcaggctcaagcaatcctcccacctcagcctcctgaggagctgagattacaagtgcgtgcatgccaccacgcccggctaagttttaagatttttggtagagacaggttttccccatgttgcccaggctggtgttgaactcctgacgtcaagcaatcctcctgccccggcctcacaaaatgcgtgagccactgtgctgggccaatttctgttgttttatgtctttgagtggctgcggatcagcgcttgtgcttgaaggtggtcagttttttctttaggagataaggaagggccgtaacttgagtcattttgtgttccagtggggttgtgctgtgtctgcctacggctgtggcccatgccgctgtgtctgcgggtggctgtgactgtagcatatgttgaactgtaggtgacccccccccagcccccgcttgtgtccttgtgggtttgtgcatggctgttacttctgggctgtgtccgtgagtggctatagcttccttcactgtgcacatctgtgtctgcttttgcttcctttgccgtgggtctctgtgtggctgtatctcccctgtcaccatgtctgtgtttggctttatgacaccccccttcccccactctttctccagacgtggcggtttcagctcaacttagcctcctccctcctcatgctaaacccctggccctccacaggcgtttggacacatctctggagacccaagtctttgtgtgttgctctcggtgtgtccacaagcacaatgccatagagcacggatggccaggccaatgagtgcccggccctggggcgctcgtcctcttgtgcagaccaggctggccgtgcaccagcgagtgtgcaccgagaccccaagggcgtggggtctccgcgcccgggctctatctgtccccgaccacccccgagccctccccgggctcaccatgccgcggtacagctcctccaggcgcccgtcgatccacttctccacgtccagccgccgctgcagctcccgccggtcatacttgacggtgacgcgcgcgtgccgcttctgcagccccccgggactgccccctggcccgcgggcccgcgatggagactgcagcttgctcagcacgcgcttgcccagccgctgagctgccatcgcgctgctggacccagcctggccccgcgctgtgcgccttcgcctcgcgccccgggtgcttcttacgggccagggcggggctagccgggggcgggggctcgggctcgccgggaggtctgccccaccccggccgcctcaggcctcagtttccccgtctgcagtgcgagagtaggccgctgcgtcggcttgaggcacgcagtcgtgcgaagttgaggtatgggcggggacccagagtcccgggcgggtccctgcatcgggggctcccgggccgggatcctgtggggcgggggcctgggacagacactcgggacccggcctgtctgcgccctctggcggtggcggggtggggggctgttggtgcgggagcgcctgcgccgctgtcgctgtagaaggtcgagcggtcacttgttccttcgttcattcattcactcatccatccatttgtttgttcactcattccgttcaacgaatttttttttttttgagtcgatgtctctctttgtcgcccaggctggagtacaatggcgcgatctcggctcaccgcaacgtccgcctcccaggttcaagcgattctcctgcctcagcctccgaagtagctgggattacagggatgcaccacaacacccggctaatttttgtatttttagtagagacgggatttcgccatgttggccaggctggcctcgaactcctgacctcaagtgatctgcctgcctccgcctcccaaagtgctgggattacaggcgtgagccaccgccactggcccggttcaacgaatatctattaagtatccactctataccagacactgctttacgctccagggatagagcagggaacaaaacagacaaaaccagtcccacgcagttgacagttgtagccgggatacatgagaaacacagtaagtacggtattatacagtttattatcatataagtgctttggagaaatataaagcagagaaggagaaatggagtgagggtaaggttgcaattttagcgagggtggccagggaagtcccttacttcaaaacagtcttctcacttctaattataagcagcaataattatactctaaaatttaaatgtggctgggcgcagtggctcactcctgtaatcccagaactttgggaggccaaggagggtggatcacgaggtcaggagttcaagaccagcctggccaacatggtgaaactccatctctactaaaaatacaaaaattagctgggcctggtggcacatgcctgtaatcccagctactcggaaggctgaggcaggagaatcgcttgaacccgggaggtggaggttgcagtgagccaagatagcaccattgcactccagcctgggcaacaagagcgagactctgtctcaaaataaataaataaataaaataataataaataatttttttaaaaaggccaggcatggtggctcatgcctgtaatcccagcactttgagaggccgaggtgggcagatcacgaggtctggaattcaagaccagccaggccaacatgatgaaaccccatctttactaaaaatacaaaaaaaaaaaaaaaaaagccaggcgtagtggtgtgcacctgtaattgcagctactggggaggctgaggcaggaaaattgcttgaacccaggaggcagagattgcggtgagccaagatcgcaccactgcactccagcctgggtgacagagcaagactccatctcaaaaaaaaaaaaaaaaattgtagagacagggtctccctatgttgcctaggctgttctccaattcctgggctcaagcgatcctcccacctcggcctcccaaggtgctgggattataggcatgagccacctcactccaccagccagccataatgtaaaacttttgagtttcaaagaacatcatcaagaaagtgaagagacaacccatggaatgggaggaaaaaaattgcagtcatgaaactcataaggtgctgggacgagccaccacacctggccaaactatacactttaaaaaggtgagttgggccaggcacagtgactcacgcctgtaatcccagcactttgggagggcaaggcggatggatcatcggaggtcaagagttagagaccagcctggccaacatggtgaaaccccatctccactaaaaatacaaaaattagctgggcatgggggcacatgcctataatcccaactactcaggaggctgaggcaggagaatcgcttgaacctgggagggggatgttgcagtgagctgagatcatgccattgc

SEQ ID NO: 1560907 - DNA, 4001 bp, Homo sapiens
tcaagaagacacctgtagcaggagtggaagaggaagcctcagcttctccctcttcctcatctgatccagagtcactgtcctcatcttcttcctcatcttcctcttcctctgtgtcctctcctggccaatacacccaggccttcaggaaggcacttggtggggggatgcagggaggacactcagcttctccatccttctcagctgcccccaaagccttgacctcaccctcctcttcatcactgggttggcaccaccaggacttgagctggggcctctgggctggggctgaggattgcggccctggggcagcttctcctttcccagtttctttgtgtgccttttcctccttctcctcggacgcctctcctgaacgatactcccaggacctggggtcggagcctgaagatcggggggacacggaggtcttcctggctcctttacttctttctgttcttttatcctccgtggcttgattctcttcctcccctgggcaagacacccaagtgctgggcttggatcctggagacaaggcagaagtagaggttctgtgagcttctttctttacagcttcttcatcgtcctcctcctccacggctggacaacactcccggtgtgatggtggataagagaacttgttaactccctcctcttcagcaactccctcttcctcggctttctcctcccctgggttcttatcagaaccttgcagtgtccttatcagaaggctgggagacaggggagcacgctggccatctgcaaattgacttccctgccctctagggacactggttgcctctcgctcaccatacatgccatcatcatcatccaaaagtccccaggcttcaggaagggaactgctggttttcagccccagtgtttctctgtcctctccagggcctccactgtcttcagcctcctcttcagggcgtctgccccaaggggtatgggggattgccagaggagtcctagcttctccctccaggccagcttctaccagagctgctccttttactgcttccaccagccagggctctagaggtcccaggcccctcaggcggctccaggcgcggctgaggaggcccatcactggggacaggaggaagaaagggtgggcatccctccacggggtagcctgatggggtgcttggcctggggccatgtgtctgggctggaaaagggggagaaaaaaataaagtttaggggccatttagaggatggcatccgggcgtgactatgagtcatagcaacggaaatagtaacacaactattgtaaatagcaacgcgagagtcccaaattcctttctgatctcggccacgcccatctctgtcccttggctctgttcttatctctcaatagccaggagtctgagcccctagttctgccttagatccaagggtccaagcccccagccctctctttcttcagacgcagaactcccagtcccaagaaccaagaacaaaagtctttacttgcttcccttggcgacaaagtcatagtccctagctctctcattctgctgaagattgacaaatcaaaccctcacaccctcctccctcgcagactgaaacattctgacccgaccccctacttggcagatgattccttcacgggggacccaagaatctggcttccagatccctcctccctcaggctcaggactccaggctcccaaccccttctcctttctaaatccgggcccccagccccgtggggacccaggcgttccgaccccttactcaccggctgggagctgcgcgtcaccccgggggcaggagcgccggttcggtctgccagaagcgatcacaggtccggacggttagggaggccagcgcgttcatctcaccctcaggcgtcgggctccgagtaactcagagtatctccggctgcctcaagtgccgtggcgacaagcgggcgcggggtcgtgcagcgtcttgcataagatcaacaactgggatgggaaccgataagagcaacgaacacaatggccactaggcttttatagcctaccgcgcccggcgtgctgacgtcacgaagagaggcggggtttcgagaccgcaacccgaagggtgggaagtggaagtaagacaggacttctcgcggagattccagcttttgcaacgtcacggcggagtttccgagcgtgaccacgcccctccaacaaacgaactgtcaatcaaatgcgtggccctgcttcaacagcgagccagttctctctcagctcagggtcaatgccttcccaccccaatttatttatttatttagttagttattttgaggcggagttttgctcttgttgctcaggctggaatgcaaaggggcgatctcggctcaccgcaacctccgccttcggggttcaagcgattctcctgcctcagcatcccgagtatctgggattgcaggcatgtgccgccacgcccggctaattttgtatttgtttagtagagacgtagtttctccatgttggtcaggctggtctggaactcccgacgtcaggggatcctcccgccttggcctcccaaagtgctgggattgcaggcatgtgccgccacgcccggctaattttgtatttgtttagtagagacgtagtttctccatgttggtcaggctggtctggaactcccgacgtcaggggatcctcccgccttggcctcccaaagtgctgggattacaggcgtgagtcaccgcgcccggcctatttatttatttatttattcattatttatttttctgagacgggatttcaccatgtttgctaggctggtctcgaactcctgacctcaggtgttctgcctgccttggcctcccaaagtgctgggattgcaggcgtgagccaccactccaggcctatttatttatttgttattttttatttttttatttttttttgagatggagtctcgctctgtcaccgaggctggagtgcaatggcgtgatctcggctcactgcaacctccatcttccgggttcaagcgattctccctcttcagcctccgagtagctgggattacaggcacgcactaccacactcagctaattttttgtatttttagtagagacagtgtttcgccatgttgcccaggctgttctcgaactcctgagctcaggcagtctgcctgcctcggcttcccaaagtgttaggattataggcgtgagctactgcacccagcctatttattttttgagtaggcgtctcactctgtcgcccaggctggagttcagtggcgccatctcggttcactgcaacctccacctcctgggttccagcgattctcctgcctgagcctctggagtagctgggattacaggcatgtgccacaatgcctgggtaatttttgtatttttagtagagacagtgtttcgccatgttgaccaggcaggtctttttttttttttttttttttgagacggagtcttgctctgtcgcccaggctggagtgcagtggcacgatcttggctcactgcaagctcctcctccctggttctcgccattctcctgcctcagcctccctagtagctgggactacaggtgcccaccaccacgcccggctaattttttttgtattcttagtagagacggggtttttcaccgtgttaaccaggatggtctcgatctcctgaccttgtgatccacccgcctcggcctcccaaagtgctgggattacaggtgtgagccaccgcacccggccgaccaggctggtcttgaactcctgacctcaggtgatctgcccgccttggcttcccaaagtgctggaattacagttgtgatccactgtgcctggcctcctaccccaatttagcccacaggccccagcctagagtctcccattttcttttttttttcttttctttcttttttctttttctttctttttttttttttttttttgagacggtgtctcactctgtcacccaggctggagtgcaatggcatgatcttggctcactgcaacctccgcctcccgggttcaagcaattctcctgcctcagcctcctgagtagt

SEQ ID NO: 1560908 - DNA, 4001 bp, Homo sapiens
atgatggactccctgtgtgttcagtttccagttaccatgtttcccaccctcacatcaaagccaccaattcctccattgtccacagactggcaatagtttctccccttgcccagggccggcagatcagcttctacagaaccacggccaccacagccagtctgatccctcacttcatgggctccaccccaggagaactgacagacttctccagcacaaaatggactcaacactgccctgcatgtcccaagcgactttccactttcccagccctatggctccaacacactcctttcagctccaacactgacctgaccctctccagtgcgctggccctctctcccaacacttcaagtagccaactttttcatctctctcacctgctactggccagcaactccaatttctgacttgataacatcccccaattctttttttttttttctttgagccggagttttgctcttgtcacccaggctggagtacaatgtcgtgatcttagctcactgcaacctccacctcccgggttcaaacgattctccctgcctcagcctcttgagtagatgggattacaggtgtgcaccactatgcccggccaatttctgtatttttagtagagacggggtttccccatgttggccaggctggttttaaactcctgacctcaggtgatccacccaccttggcctcccaaagtgctgggattacacgcctgagccaatgcacccggccatcccccaattctttctcaggaaggaacaagaggacccttccgtagccatgtcccaaacatcctctgctcctgaatgactgacagccttccttctgcttctcttttttttggaggaggaggcggcggtaggcgttggcttttcttcttaataccacattgcagcaggcggcggtggctcacacctgtaatcccaacactctgggaggccaaggagggaggacagcttgaacccagaagtccgagaccagcctgggcaatgtagtgagaccttgtctcaataaaaaagaaaacataaaaaccacactgcctctttctccctcacccaaccacaaattgaccaccacctctgctcctcttctgggaccttatcttgactcctttttaccaagtcctctatagccacagtccaagtttatagtctccctctttccagccaagaaagtggccaacacgaccactccttgccccaaggcttgcagaccagcaacttaacctctttttacccccatagacccatcaaactctttcaactgccctttcaggcccagtgttgacccgctcctcctctcaactgctccttctctccttctctggtggaactacgaacgcaaaggctgccacactctacatctgacaaaacaccaaactttctttaattgctcatcgttttaaaccctaaaacgatcaccatctttgtctcgggtgggtggggtgcggcagaaaccagatacttttcaccttcccaactccatagccaccccctttctaacagactacggttctaaactgacgactgtccccttattcaccattaggtgcaatctattgaacgccacctcgagccgggccctgcaccgatccctcccgactcccgggtccctctcgagcccgcccccgcttcacccgcggtagctaccatgtctccaggggtctttgggctccactgctccagacacgatatcctcgtcggacgggaatgtgacgcgcttggctgcagccttgaggcgcccatcggcggggggcgacgcggggctgggagacccggcctcagctggggcctcttcaatgtcgccgtccgcgcccggcacgggcggcgcctcctgcggcgcgatctccatagccgccgccgcctcctcacgggggccccggggacatgccccgggccccggatttgtctctccgggtccgcccgccgtcccggggcatgggctccgccgccgcttcaggcgccgcctccgtccgctctcctagtggtcgtagtcgtcgccgccgggagcccaagcgcgcctccgccgagccccgcgcgcgcctgcccgttcgcagtcacactttcgctcgaggctggcgagcccgccgcttactataagaagcagaaaatcgatttcagcgacttgcacgtagagttgtcccgcgggtgacatgaagagagaaacaaagggcaggaagggccacggaaaaaagaaacgtgagcagcgaatctgcagagccggaactgcagactatgaggggcggggcgaagtagacgccgtctccaagagcagcgcgcaagcgcgaagctgagcccacgccttcctgccggagtccaaataacgaatattcagctcccgcacattcgtcaagagcccagggaatggagtgcatagaactgaaaacacctggcggggcgcggcggcacacgcctataatcccagcactttggaaggctgaggcgggaagatcgcttgagtccaggagttcgagaccagcctgggcaacatagcaaggccccgtctttacaaaaaatttaaaaattagcagggtctggttacaggagcctgtagttccagctacttgggaggtgggaagatcgcttgagcccggtaggttgaggctgcactgagctatgatcgcgcccctgcactccgacctggtagacagagccagaccctgtctcaacgaaaggaaagaaatgggccgggcgcggtggctcacgcctgtaatcccagcactttggaaggccgacacgggcggatcacgaggttaggagatcgagaccatcctggctaacacggtgaaaccccgtctctactaaaaatacaaaaaattagccgggcgtggtggcgggcgcctgtagtcccagctactcgggagcctgaggcacgagaatggtgtgaacccgggaggcggagcttttagtgagccgagatcgtgccactgcactccagcctgggcgacagagcaagactccgttcccccccccccaaaaaaaacaaaggaaataaatgaaaacattgaggctagactaactgatgaagagtggtaacggcatgaagaagtcgaaaagaaaggcggataggagctgcattcaatatatgagtgcagttgatggatgctgacagggatactctggagacgaagtctcggccccttcgctagtctctagtcctccatttgctcgctgcagttacatcaacagctctctgtatcggggtagagttgcataaaatacaacttaaattacaatgctaaaataaatatgagcccatgagcggtatcataggcctgattttaaaaaacaaaacctaggagaaggtagaaattccaaaggcgagagacgaatctgccaacctaaatcctgggtgacaaggctggtggatcaccgaggcaagaaagaaccagcgtgagctcaagccacacccctaggctcagacccaacgcttgacattcgccgccgcactttcgccacgcttgccgaagcgcacccggctaactagaggaggcggggctgaaaccataaaagggaactggggcggagcgagctgcgtcgtcgccaaggcaactcgagagctaagtccgggcctcggcggagccggcgctgcgaatggactgatggccgctgaggctgctcctggcgcggttcatcatcggccgccgcactttcgcgactgagacgaaacgacactcacctttacttaatggaaggcttcgcttacatcctgaacttaaaggaactacagaaagggacagaaactgctttctttttaaacaatgcgctgaaaggttactagtgataggaggcttagtgaagcgcgtgatgtgaacggccacgctgcaaggctggagagaaaagaggagggagtgaagttgcaccctgatcgcgaatcctcggccttttatcaggggcgccgccactcggggtccgaccattcgcctccaacgaggggacagcgaatctgctgtcgtgtgcagtccacagcaaccacaggtggggcaacaggaggagcgcttgggc

SEQ ID NO: 1560909 - DNA, 4001 bp, Homo sapiens
ctggatcctgtatagcaactggtgtctccactatatccccagcatcatatctcatacatggcatatatttactgaacaaaagaattcatacaaccgccctatgaactaggtaattaaccccattaaagagaagaggaaacaggcctagagagattaactaacttgcccttgtcaatcagtaacaagtggaagggccgggaatacaaccacaacctgtatgccaccagaaacagtgatataccaggaacctaggaggcgagacccacgtttggcaggttacccagtgcaccttgtccaattttataaatgggaaaacagacctaaagggaggatgggacctctttaatcaccactcccaataattacagctaatatttatcgagcccttacaacaggcctgacaccattctactttttatttgtgtcataattcgttcagtccctcacaagtccctccagcaagaccaggactacaattagcccatattttatggaacacagagacccaaagcggtgaagtaatttgcacaaggtcacacagcaggtgggaggtggacttgcagttctaactgttctcaatcccacaccagcccggctcagagccttgggtcacctcatcccataaccaggaatgttcatccgggctgggcgcggtggctcacgcctgtaattccaacactttgggaggccgaggcgggtggatcgcttgaggtcaagagttcccgaccaagcctggccaacatggtgaaaccccgtctctgctaaaaatacaaaaattagtcgggcgtggtggctcgcgccggtaatcgcagctaattagggagctgaggggcgaggatggtttgaacccggtatgcagaggttgcactgagccgagatcgcgccactgctccccagccccagcctgggcgacacagagactgtctcaaaaaaaagaaataaataaatgttcatctgcttagcaaatccctcaacccctatcctggtcaatgggaggatccggggagatggggaggcgggtttctacaacctaattcgctcctaaacttggctagtccccacctttggtgggggggtgtttttgcgtccccgtcctcttaggacacctaaaccaaaatgagaggcggaggaagagcaggaattaggatggcaggccttcgcctctcggtccccacttggcccagcagtcgaaacccagaaaacaaaaaaaccttcccaggtcccgacccacccggcggccctcccctacttggagcaagtcatgcgcgccccacatccccaagaggccattcagaggccgccgccaatcacggagtcctcctctctcccagacccagtccgcagaccccagccctggccacaacctcccaggaccgcggaccgccgcgcgcacagggcaggcccgggaccctcgaggctagcgctggcccccgccctccactgggccgacacccaatcgggagcgccgtctcaaggagtccgggcaaccggggagataagagacgcacgctgattggccgtcgcccccttccgccactcccagcgaacgctgagtcttctccgcgagggccgcccgtgcccccaggtacccctccgcgtcttccccaagtcccccgtagcctccggacctgaacgtcctcattgcggagttcgtctatgagcaccgcgatggggtacagcgagtcgtcgccgtcggccgccgccatcttggctccgtccctttcctgtcagactgcggccagcgctgtgctgaaacgtggggggggcaatgctgggagaagaaggaagggcgggcgtgggggcgcccgagccagtttacaggggctgctccacggccattggccgcgctacccagggctaagctcgcgtttctttggtccggacttgtgaagtcccgcccacttccgatttgccattggtcgagtgaacaagatttgactagtttgagcctaggagagggggaagaaagcggaagttagccgtgtcctagcgaccaagattgtacccgccctggtcgctgctaacaacgaccgagacgagcagtagtttctagccaatgaggggcgacatggggaggaggctaagcctgccctttcttgagtccccgggaaggcttctgcgcgtgcgtcggtggtaatacgtgacgtcctgtggggagctggagggtgtgcaggttttgggttaccaggccgtggttccgctggctggctggctggctctccgcgccgttgcgcggcaggaggagggagtgagactttgatttgtgcttgatttatgccaaggcccagagaagggagcgacttgcccttctctcttttttctttttctttcttttttttttttttttttttttacttttttaaagacagggtctcgctctgttgcccagactgtagtgcagtggcaggatcttggctcactgccgcctggacctccccgagctcaaatgatcctctcgcctcagcctgcagaaatagctgggactatcggcgcgcgccgctaggcccggccaatttttaaaaaaatgtttgtggagaccgagtctcactgtgttgagctcagttgccttgctgtttggatgaaacccaagcccctcgggctggtattcaataccctgtctaggcgcgtctcccatctgttttttaccttttatctgatgtcctggagaattacagctgcctgagcacttcttgcgttttcatgccagcaagcctccttgcccaagctgtgcgttctgctaggggtgcctttcatattcacttctgagatctctgcataaatgcctcccctttactccctttcctctctgtcttcaggctctgttctctaggcttccagagccacagaacccctctctctgtctctccagtcccatctatctctctgtctctccaatcccatctctctctctctctctctccaatccaatctctctctctgtctctcaatcccagagcctgggctgtgactatgtattcgaatttgtttcctccatagagtgggagcaggattggatctgactaatctctgtttttaacctcttcaacacagccctacccccccaccgcaatcttaggaccactctaactgagggagttgaatggggatgggaaggcctgggatgctctttcctcctttattctgctacttgaagggctaggctgagctagcactctgacagatctgaatacccacagcatctatttcttttttcttctttttctttttctttttttttttttgagacggagtctcgctctgttgcccaggctagaatgcaggggcccgatctcggcatactacagcctctgtctcctgggttcaaacaattatcctgtctcagcctccagagtacctgggattacaggcgcctaccacaacgcccggttaatttttgtatttttagtagagacggggtttcaccactttgggccaggctggtctcaaactcctgacctcagggtgatctgcctgccttggcttcccaaagtgctgggattacaggtgtgagccaccgcacccggccttttttttgaggcggagtttcgctcttgttgccccggctgaagtgcagtggctcaatctctgctcactgcaacctccacctctcgggttcaagcgattcttctgcctcagcctccggagtagctggaatttacaggcatgagccaccacgcccggctaattttgtatttttagtagagacggggtttcaccgtgttggctgtctttggtctcgaactcctgacctcaggtgatccgcccacttggacttcccagagcgctgggattacaggtgtgagccaccgtgcccggcccagcatctatttcaaatacccttacccactgcagttaggaaactgctgctcataaaagtggggatggggttgaatatttcagtcccagccctccctattcccaggactcctctcagccccaaggtctctgaggctagggatctttttagctatgcgtgcctgtcttggtgtcaggctgcttgg

SEQ ID NO: 1560910 - DNA, 4001 bp, Homo sapiens
cctcccattcactcttcagcacctcctggctgcatcacccccatcactccccaataactgctcctgtcaacatcactaccagcatccatggagccaaagccaatggccagtgcttgccttggcagcatcggactaaaggcaccagctccttgttctagaagcgctcccttctctcagccttcccgacacctttcctggcttcctttccacctcactaagtgctcctccttagcctcaccctcttccatttgggttctgtcctaagtcccccctctagaccctcttactagatgatctcatccattcccaaccatagtttgatcacacccaaattcttctccagtccagactggcccatttacttaatgtgtcttcttgtagggctgggcgtggtggctcatgcctgtaatcccagcactttgagaggccgagatgggcggatcacctgcggtcagaggttcgacaccagcctggccaacatggcgaaaccccatctctactaaaagtacaaaaattatctgggcatggtggtgtgcgtctataatcccagctactcgggaggctgaggcaggagaatcgcttgaaccagggaggcggaggttgcagtgagccgagattgcgccattgcactctagcctgggcaaaaagagcaaaactcccgtctcaaaaaaaaaaaaaaaaaaaaaattccaaactggtctttgtaatgactcacggagaccctgcatgatctggcctctgtcctaatctcatcttgttattggtctccccctaagtagccaaagccccagccatgccagtaccctttcattccccatcccagggcctttgcacaggctgctttacctccctggaacactcctctccagttctccctctgtgagtttcagcttaaacgcctcctgctcagtaaggccttcccccactaccctatctaaagtagcctccaacccttattctctacttcatcacactgctggtttgctttcaaagcactcatcacaatttaagtattttacttatttacatggtttttttttgtttttttttttttcatgtctggttcacctgcaaaattacaagctaaggacagggccacatctgtctcattcactgctatatccccaaagtcaagcacagtccttggcacataacaggtactcaataaatatttgttgaattaatgaatgaatgggtgccccacacttgactctcaatattctaagtgatactattcttaaggatccccacccttactcccaaggcccccaccatcacattccttttcctcgggtcagcccaaatctcctacttccttgttccccccatctaatgatccattccccacccccacgattgccttctctattggggctgtgccccctctaccccccacttggcggcacccaccccaggactccccatttggtagcgccatcaatcactcccccaccacatgtcactgcctggtagcgccctctacaggcctcacgtttggtagcgccctcattccagtccccctctcgccccacaattggtggcgccctcctcagtctctccactgagtagcacccgctccgcacgccactcctaggtatcactctccgaagccccctatgtcgctccttggcagcgccatcctgggcctccccacgcccggtcacttggtagtgtctgccccgcgcccaggctgcagctccgcgttgctatggttccgcgcgggcccggcacccctcagcctgggccactgtccaccctccctgccaggcgggcgcacctttgaagtagtcattggcctgagtcttgagctcctctgcccgcttcagagctccatcagccgggggttcgtcccgggggggctcagcacactcagtcctctcgccctccgccatcgccatgccgcaaagcgacccctaccctggcaacggccgccagcggcacccggccgaaccgtcgcgaaggagcgccgggtggccgccgccgctgccgcacaagtgtcgtaaagcgcgggccctgaaggcgcccttcacgcgcctgcgcaggtccctttcgccacagagcgcgcggaggacaaggtgaccagaggttccccagacggtacccctggtagagagagccaatagggaatgagagaaggggcgcgcggggaaacagacctggtgtggcctctcctcccaaagttaccgtgttccaaggctgtaaaaagtttctcggttctgaaagtgggatttccccgctgtcctctagggttggggggtgggttgtgaatgtcgctggcgggtgtggctgttttgcaaggcagcgccatgccctacgcggagccggacccgggcgtcgagccctattgtcgactacctgtgtgaccttgaacaaatcttcccttcctctctagggtctcagttacccatctctgaaaaattagtggtttctcaagccaaaaagggtccaaccttgagggtcagtgtttgagtttttaactgaaggcactctggatttcaagtcctgagcaaggcttagaagtgtgttgcaccatctcctttcttcctgtgttcagcttcccaaatcctgaatcttcaaataaactctcctgtttgtgtttttacagattctcttgtctgagatcacagcattgattgcatgcactctgcctccctccagtttacccttcacatttttttttttttttttttttttttgagagggagtctccctctgtcgcccaggctggagtgcagtggcgccatctaggctcactgcaacctccgcctcccggtttaagcgattcttctgcctcagcctcccaagtagctgggattacaggcgcccgccaccatgcccggctaatttttgtattttagtagaaacgggtttcaccacgttggccaggctggcctcgaactgccgacctcaagctatccgcccgcctcggcctcccaaagtgctgggattacaggcgtgagccaccgtgcccggccgagggatctttctaagacatgataaaaccatggcacactctcgctcccaggcttccatggccccagcacccttaggagaaaacccaaactcctgattaggagaccctgaatagtcttaacctcaggctgaatagtctaatatccagattccacccctttgccaatccccacccgccgtacacgcttccagtctgtcctttctaagccctcatgtagcactaagtcctgtaaggctctggatcccctcctggaagcacactcctaaacctatctatcccactcccaaacctcttgttagtccaaccccatctctcctactggcccccagcacaaccaacaatcaccctaaagggcagatattagtatcatctccattttacagataaagacacagacttgcagaggtgtttgacgaaggtcacaacaacataagaaggtgacagagccaggatcaggaatcccatctaattcctatgtccttcattgccactctactgcctctgtaggtgccagagcccatcttggtgggttagtaaatttttcttttgtttgttcgtattgtttgttttggggttgggggaaaaggagctgccatagtggatttgaattctggtttcgagtccagcggaatccttcctgacactgtgaccttgggcaagtgatcaccctcttctaagcctcagtttcaacctctgtaaagtggggataataattatccccatcatacaggattagaggagagttcgacaacatgagtacagcatttgtcagggagcctgacacagagtagtacttttatattcactccatcacaaatactcaaagtgggctgggtatggtagctcatgcctgtaatcgaagcactttgggaggccaaagcaggcagatcacttgaggtcagaagttcaagaccagcctggccaacatggcaaaaccccgtcactaccagaaatacaaaaatttagctgggcatgatggtgcgcacctatagtcccagttattagggaggttgaggcaggagaattg

SEQ ID NO: 1560911 - DNA, 4001 bp, Homo sapiens
taaagatcagagcgtctcccatcccgaatgggggaggtcccaaaggggatatcccagtagcataggaaagctggctaggggttcattcccaggggagctatggaagaaacctcccacagcatggtgctaacgaacagccactctgatttggcatctcctttggccaagttatagagtagagagagtttccagggctggggatggtagtcccacctccccactttgtctgtggctattctcagaggatatttctcccttgaggcactcctgatggttgtattcttgtgattacagcactttgggaggccaaggcaggcggatcacttgagctcaagagtttgagaccagcctggccaacatggtgaaaccctgtctttactaaaaatacaaaaattagccaagtgtagtggtgggtgcctgtagtcccaactacttgggaggctgaggcaggagaatcgcttaaacctgggaggcggaggttgtagtgagccaagatcatgccactgcactctagcctatgtgacagagcaagactccgtctcaaaaaaaatacagatcttgtgtgaactaacagaataagaactcacttgttaccgtgaggacagcaccaagtcattcatgagggatccacccctatgacccaaacacctcccaccaggccccacctccaacattggtgatcacattttaacatgagatttgagactgagtaacaagtgttaggattaaaggcatgagccaccgcgcccggccatcttctttacctctccactgtgtcagttttatttttctcttcttctctagacactttgttcctcaagatagggggcagagtgggaaaatgaccatagtcagaatctatgggaaggacccacccaaaaggaaaaggcttcttgtgcccaggctgcagatccaaaccccagggaaggactctcattggttcagtctccattctgttccaggtggagcataatgattggtccagcctgactcgtttgcccatctcttaaccatcaacatggtggggaggggacacgcaggagactgtcagctcctatcctaaacgggggagggggcaggggtgatcattttctgagctcctataaacaaagtttcagttctttttcctcctatggctggaacactggaataaggaaagaggtcgtctgtctggagaggctggttggggagtatggtctccccagcccagccaagctcaggtccctgcatacagcaggcgcctaattgatgcttatagcacgaatgactgaatgaataccccgttcccacaggctgtcctgggatggtcctaatttcacagaccctgagcggatcaagaatgaagcgggcccaggggtcccgcccaccggctgagtgcgtcttaggacgcagagacaagaccacggagggcggaacctctgagcgttaggtggcaccttggagaccccgccacctccaaaggcccagttaggggcggagcttctaaaccctagcattttggattgaaccatcgtccgtcggttaaaggggagagccgagaaagcccttctgcatttgtcgccagcctttttaccacctcctggccacagaaacgacgtatttgcttctctaacggcgacgccgtttcccccttcgcctcgttactcctcaaagccccacgcggccacagagttcagacttacccaccaccaccttgcagtggctcgccccagtttgacgcattgcagggaaggtcggaccaatgggcgccaagctctcatttccgccatgggccaggcccaatagtgacgcggctcacagagggacgcgtcacgcaccgccgagctgtgcccctccgccgaagaaagtgaagtgggcccgggaggcggggcgcgcggcgagggaaagtagtccggcgacgggagcgagcgcgcgcgcgcccggcggcaaacccaattcctgtgcagggtggggacgagagattcgcgggcccgtaggtgtggagcggggcgcggagggatccgtgggagccgcagtgcggcggcgcgcgggccgggtggggcggggccgagcgaggcggggcgcgcgcggcggccgttgagggaccgttggggcgggaggcggcggcggcggcggcgcgcgctgcgggcagtgagtgtggaggcgcggacgcgcggcggagctggaactgctgcagctgctgccgccgccggaggaaccttgatccccgtgctccggacaccccgggcctcgccatggtgagtgaggctggggggtcgccgaggctgcgggctctgaggcgggcttaacggggcaggacccctgagggggcgacagagcccagagtggggggcgtccgggcccggcgagagcctcgggacccttttctacccgcgttgtcgggggctgttgaacccagagcgggacgtctggatcaccagaggtttccagaagcgactttagcaccaaatgggatgtttaagtccacaaatgggtatctgagcccctaaaggggacatttgaaccccggatggaggatcgggaccctcagtgggacccctcaaaaggattttggacccaggatggggcgttgggtttcaggatggaggtgtttggaccccaggggacgaaataagaaagatgggctggggaggggagctattcgggccctgatgaaggcgtttggtcctgagaggatgcggggaacgggggacgaagggaggctgggctgctcctggatggggtggtggagggtagctgggcccgggcggggaggggcgacccctgggctcctgtggagcagaggagagggtcaaggatgggcggtcacttctacagatgagactcccgagggtgggggagggtgggggagggtggtctccagagcccagcactgcagaggaggaggagggtgaggtgcaagcttatgggaggaagagcctggggtgggtggcagcggagattagaagatactcttgaaggcttccgggacggagaaggatcagggtcgtggaggtggtgaaaagggatggtgagagtggggctcgccagtagtcgggggacagggacccttggggttaatttggaagtagctagaaaaggttccgaggttactagtgggttaagactgttgctctagaaagacagaatttttttaacggggtgggagtgttgtgtttgggtccaagagaagatggatttccaaggtgaggggtgggggaggacttgggcttgggtggttgggaggtgaggtggaaggagaaaatgaatggcagtcaggggggcctaggtttgggggtggatgtgggtagcaccctgccagtctccagggacaggccaggacaaagacggctcagtgtggatggggagtgggctgcagggcccggaggaagcttttctaccgtcctccttcctcaggaagaacgcggctgggtggaagacaccggggcagtgggagcaggtgggcggagctgttcgggcccctattgcgcactgaagcctcatgaaatggggatgggagatcaaagtttggggtgcctcgaatgagccagctttttcaagcctagaagcctcactctgtcgctgcccttttcaggccaagagcactgccttttcccagcaggagcgccggttttctcatgatccccagccccacgcaccatgctgcacctcgtcacttgtgccaaatgacagtgcagtacagtgtggcgtcagtgacaatcagatgcctattcccgtgccctcggggtgggggctgcagagcttgatcagagagtgcctctggggagaccccttgatcggcctgagggccacttgttccattcagggccctcgctgagcgtgtctgttaattcacagggctttgagagaaaaccagcagactagttctttcctactccctgccacccacaacacccacagccccaccaggctgagcctgggaaccgtgtgcagccatcctccctggcaaggctggggagaacaggcagccgctgctgtgtatcagatctcatacttgctga

SEQ ID NO: 1560912 - DNA, 4001 bp, Homo sapiens
acattagccaagcgtggtacaaaaacacaaaaattgagcaagcattgcaggacgtgcctgtagtcctagctacttaggaggctaaggtgggaaaatcacttgagtccaggagttcaaggctgggcaaacgagcaaaacccagtctcaaaatcatcaacatcaaaacagctactgattgcagagtgtcatgtgccttgcattctgccacaggcttctacaaaccctgcacttaatccctagatccaccctctgaggagagcagtctgctatccccacttacagacgaggaacaacttgtccaaggtctcgcttggcagaagccggactcggcctaggtctgtctggcaaaagatcctctaacaattagctggactgccttctcatgatcccaatcccagaactagagttaaaaaaaaaaaaaaaaaaaaagcataacattttcaacagcacaagcagctccaacagccatcccaccactagtaagcacacgtggccgggcgccgtgtctccatgtgtgttgtgcatgtatgtaaaccaagtcctcatcctgtgttatccaggcaatctcgagtccttgctgcatttgcagcgcacgctaacagttagaccctcgcccttgggctggatgaaatcccactgcagtttctctacaactgtgaacccagtaccgcacctgacagtctacgcagcttcctttcctgaaacatcttgcctttcaggcgggtgtctatggtcatgtctgtgtgtactacgagcgagcaagaaagaccccaaccagaggtcccattcgaggcctggataagcacgccgggcggaactactctgcccctcaccctcccaatacatctgcactcaggactccgaccttccttccttgacatatctgcacgtgctgctccttccccccccggaaggcccttcttcccactctccatctgtcacctcctactcatccttcctagacagaaaaagccgtccgtccagtcagtctcaccagtgcctcccgctctgtggccccctgcagctccctaagtcacctcgatcacgacacgcaggaattgtgactgtccggctctgcctttgtaccccctccagggaccggccccacctccagggcagggcctagggctgatgccccctcctcggtgcccagcgccaggctccctgcctgccctcagcaggcttcatctcactgaagcaggcccgagtggtggctgctccagagaagccccgctcccaggtccctcgcacaagaagccggaggcgggagagggtcggtcaaggtgaaaacaagccccgctcctccagtcctgagctccggggatctaaggaggctgcgccacggaagaggtggcggggcagagatcggggcgagagggaagggtgtaagcaggcaaagtccagggtaaccagggagaaagactcctggggggccggggaaccggccagagaggcaagagagcggagctgaggctcagggactggggagcgcagctgcagagagcgagtgggaaaaggccgagagcaagagactgagactagggtggcggcggagctgaggtgaagagattaagagactggggagggtcgagggggaagaaacggggtgccgtggagaggaaacccgaaggaaggagggaaaggatccgaagcagaaaagacccgcgggggtcccgagagggaaaagcctgaggggacgcggagaggggaagacgtgggcgcctggccctggagagagagggtcgggcgacgcgggccgctcacctgcgagggggggcggcggctcctcgcactcggggctcatcggggcgcccccccccgccccgccgccggcggctccggcccctgctgcggggcccggtgagtgggggcgggggcggcgtcggggactcgcgcaggcgccggggctcgcggggtccgcgcaggcgcccgcgggtcgtggggtcctcgcgcgccgggtcctgcagagttgagggggtcagcgccgggtggagttgccgacgggcggggggcgtcactagtccgcgtaggcacctccggggtccgcaggcgaggtgggcgtgcgggccgaggcgggttggcgagccgggtcgcgaggcccacgcaggcgcctcagccgggaagacgggggaagttgccccggtttccacagtccaaccgagcgccccacgggaggggaaggcgacctcctccgcggtccaaacgggccgcagagccgagcagcgaccgacggaagccgaggcctacttccttaaccaccccttccccaaagccgctcaatctccgggctctgcggccggcctcagggcctccgacgcccggctccctccgccactatcccacaatccccctagcgcaggacgacgcaggaggccccgccctcccgcggctgtgttggtgcgcaggtgcggggggcggggtgcacgcctgggcggtgcagtgcgcgtgcgcccgggcgctcccgacaccgcccactcttgaaccccgccgccgcagacgcgcttgcgcccgttggtgccaacggtctgccccggaataaacccagacagctcagtgagccgcagctgcgcaccggctccgttccaaggccccgtgaatattccgctccaggatttcccttcccactcgctccgtttggaaatccgttcgctgttctgtctcctctaatcatagtggagctttggctccagggtcgggctcttgcgaaatccagacctggttttcgctccagccaaagccaggcgccttcgttccgtccggctctcgcgcttagccgcctccgagcctcagaggccctcagtcgtttccgtctgctggcgatagtcccggccgggtcgctggtgttgccagttccgcccaaagcagcttctaatagcatcaactgaaagagacctcctagaccttgtgtctagattgatgaaggtccctctggctttgagcctcggtttccccaactttaatagctcccctctctacccatgttagaggcctactgtaaaaatcgtgtgggcgcgaggaacttttttgtttttgtttttgttttaagactccgaattggccgggcgcggtggcttacgcttgtaatcacaacactttaggaggcccgaggccggaggatggcatgagaccaggagttggagaccagcctgggcaacctagggagacccccgtctctacaaaagaaaatttaaaaaattagttgggcctggtggcccgcgcctgtggtctcagctattcgggaggctaaggcaggagaatcgcttgagccgaggctgcagtgagccggattgcaccactgcactccatcctaggagacagagcgagaacctgtctcaaaaacaaagggcccagcgtggtggctcacgcctgcctgtacttgagctcaggagttcaagaccccacgcctataatcccagcactttgggaggccgaggtgggcggattgcctgagctcaggagtttgagaccagcctgggcaacacagtgaaaccacgtgtctactaaaatacaaaaaatagccggacgtggcggtgtgcgcctgtaatcccagctactcaggaggctgaggcaggagaattacttgaacccgggaggtggatgttgcagtgagcccagatcaggccactgcactccagcctgggtgacagagcgagactccgtctcgagaaaaaaaaaaaaaaaaaaaaagagcaaattcacccctcctttgccctctttgttctattgagaccctcaatggattggataatgccagctcacactggggagggaagatctttattcagtctaccgattcaaatgctagtctcttccagaaataccctcatagacacacccataatgttttaccagctatctggacatcccttagcccagtcaacacctgaaatgaaccatcacagagaggcatttccttttctcttttttctatagagatgttttgtcttttacccagcatttggcttccttgttttctccacaatatgatggcatcattgcca

SEQ ID NO: 1560913 - DNA, 4001 bp, Homo sapiens
ctgtccctgacccaggacatgtctctgcaccacctgggtctctccttttcctcctcccagcctctgttctcatattttcttattagagaggccatccaaggccaccctatttgtttatttttattttttgagatggagtcttgctctgtcacccagactggagtgcaatggcgcgatctcggctcactgcaatctccacttcccaggttcaaatgattctcgtgcctcagccgcccaagtagctgggattacaggcactcgccaccacacctggctaatttttgtattttaactagagacagggtttcaccacgttggccaggctggtctcaaactcacgacctcaggtgatccaccctccacccgcctcagcctcccaaagtgctgggattacaggtgtgagccaccgtgcccaacctagaccaccctatttttctttctttcttttttttttttttttttgagacggagtctcactctgtcacccaggttggaatgcagtggtggaatctcgccatactgcaacctccgcctcctgggttcaagcgattctcagcctcctgagtagctgggatcacaggtgtctgccacgacgcctggctaattttttttgtatttttaatggaaacagggttttaccatgttggccaggctggtctcgaactcctgacctcaagtgatccacccacctcggcctcccaaagtgcatgagccatcacgcctggcctagaccaccctattttaaatggatcaccccatcccactactgccctgcattcagcatgcatgattttctccatcgtacccacccctacgtattatactattttacattgtttttaatgtgtcttgatttttttttttttttttttttgtctctctacaccacaacttccctcagttcctcagcctctgcaaggcagagacttggctcattcattgctgtcttcccagggcctggaacatggtaggtgctcagtaaatatttgctgaaataaacaatattcaggcagcacaaagacagccatgtactcagcctgaccatcaggaaaacacagagatgcctggagacggccatgcggtccctctcacaccgtctctgacatgcgggctgatggtcaggaatgctcacagttgacagtgcctgagaggattggtgcagacaccgtgggcacaggcgctgtctcctgcatacccagctgtcccagctgccctcctagctggccctgcaaccactcctcacagaggtaggcagattcacaagaaggccaggcctccttagtcctacaaacgcccctttcacctgtggtcaaggagattgggggagggaaagggcagaaacgtgtggcctttgcttcctgcgtgtgcctcactttccccatccagaggaccagagaccaggattgctccttggaaaggcagcaattcccacctggggcctgaagtgcccctgtcaaagccccgagtggtttgaaggaagtgctcccgggcgaccacagggctagataagtcagggttagcaggtcacaacttgggtgactggacgggggagggtcatgacccactttgtcaccccgcaggaaagcactgctctcaccccagcagcccgttcccacatggctgctcatgttgacctggggagacgggagttgtccccccggggagtcccatctgtccccctcgcagtcccaacctgagcgtgaacccccaggagcccgcgctgtcctggggtgtgcctggtggccgcctacctcgggtcctttttgccgacccttcccgtttcccagatgtctttcgcagccaccccccgcccccccgcccgcccctccacaggtggatcctatccttctgggaacatctgtgtcccttgcttcccagccagtgaggcacaggcctcttccagcactcaccatggctgcaggcaggtgatgggccatgggatgagtgggacccgagctggggccgctgccttcaggaagtgactgtggcttctgctccacggtcagcacacagggtgggggctgctagaggtggggcgggggagggcagaggaggaagggaaggaggtggggaggctccagtccgtctccagatcctgccagccacttctttttttttgagactgagtcttgctctgtcgcccaggctggagtgccatggtgccatctcggctcactgcaacctctgcctcccgggttcaggcaattcttttgcatcaacctcctgagtagctgggattacaggcgcgcaccaccgctcctggctacttttcgtatctttagtagagaaggggtttcaccatgttgggcaggctggtctcaaactcctgacctcaagggatcggtccgcctcggcctaccaaagtgctgggattacaggtgtgagccactgccccggcccctgctgggcacttctatttcgcttgaattcctgtcctgcctgctactgtcccaagcttggggcactggttgcccgcatgttcctaacatggtcactagtttctttcttttttttttttttttttttttttttgagacggggtatcactttgttgcccaggctggagtgtagtggcgcaatctcgactcactgcaacctccgcctcccaggttcaagcgattgtcctgcctcagtctcctgagtagctggaattacatgcatgtgccaccactgccggctaattttttgtatttttagtagagacggggtttcaccatgttggtcaggctggtctcaaactcccaacctcagatgatctgcccgcctcggcctcccaaagtgctgggactacaggcgtgagcaaccacgcctggccaactagtttcttactctctatagtccccatcattcctactactttggtgtccccatctctggactccagggaggactccatgccaggccctggtgacctcctgggctagagagccacaggatggggagatctcagcagatcaggggtacggacagctctggggtttaggaggctcctggggaggcccagaggcccaggacgtgggggcccatgtgaccgggtgaggcctctgctgtctgccctggttggctcatccgccttcctcatttcaacacttccatgaaatccaattcccggctctgagcaggactcacttgttctggggcagatatcacaggccatggatgtcccaggctgccgccctgggcagaaagcttagctggtacagcagatttgggggtcggtgggtgagtggtgtcaaaggccttgcacctgggccacgcacggtggctcacgcctgtaatcctaacactttgggaggctgaggcaggaggatcacttgagcccaggagttcaagaccagcttgggcaatgtagcaagactccatctctacaaaaaatataaaattagccaggtgtgatggtgcacgcctgtggtcccagctgcttgggaggctggggtgggagaatcacttgaaccctgaaggcggaggttgcagagtcaagatcacgccactgtactccatgctgggtgacagagagagactccatctcaaaaaaaaaaaaaaaaaaaggctttgcagttctggaggagtgagggggtctgaggacccgaggacacaccagattcccagaggttagaggtagtagagagaagaggaaccaggagacagagacaggggccaagagggggtgaaggcagtcacttgtggtgccgaggactggccagataaggacaagccctgaccacagagctcagcccacaggagatcagtaatctccgtcacggtagacaaagggagaaaacacctgctaagagagtagagagccctggttttcagtttgagcacatgttggaattgcctgaacagttaaaaaaaaaaaaaaaagaaccggcggttgggcagtgtggctcacgcctgtaatcccagcactttgggaggctgagtcgggtggatcacctgaggttgatcacctgaggttgggagttcaagaccagcctgggcaacatggagaaaccccatct

SEQ ID NO: 1560914 - DNA, 4001 bp, Homo sapiens
atccacggagcgtcccacaggcaaatcattaacagtgatctggcgaaggacacccttgccatcgatgataaagaggcccctgaagacatcagggttcccagtgaggagctgatagctcccactgccagagacaaggaagggactaccaaccacccgctgctagccacagggctgggggcagagaagacattgtacaggagtggtcccagcatcacaggaatggggggcagggcgctccctgagccgggctgagggtcccacagtacctgtaggcaatgccctcatctgttttcagcacgccgtaatcctcagacaagcgtctggtcacgtcagcaagcagggggatgttcagggggcccaagcctccctctttccggggggtgttgatcctgggagtaggggagacagagttggggcctcaggatgcctggcacagcagggtcctcaccctgtgggcccaatgtgataagcactggaggccggagataaggggctttagagtaggccgctgggagcctcacccaccccaccctgggttgggtgcaaggactgtatccccatggctgggaagactgagtttgagaggcacagctccagctaagtggcttcacatgtacttgtaacttgcagcatcacccagcagagagcctgtgttaagagtccccatcctcctctagctgtgtcatggggtacagcccttcacttcggtgaactggagtttccatcttcatgaaatagggcagcacagcctccctcctgggaactaagtacatagagtagatagagttgcatctgagttgcatctgcaactctatataccaggcaactagttgtcaaatgctaattactgtcatcatccttaaagacttgggcggcaatgtttccattattttcacgatggggaaacgcaggttccagaggttgagcaatggccacgaagccacactgctaggacctgagggtgtgagcttagctgcaacctccctctttggcccctgctcataccaagccaggtgggtgaactgagagtccaccgagacgcccagcacttcacagcccagcttgcggaagtcctctgcacggttgctgaacgcgatgatctcggtggggcacacaaaagtgaagtccagagggtagaaaaagaggaccacgtacttccctggggaggagggacacagaggagttagggcccagcttctctcatgcacggccccgcttctacctgggccccctccgggcggcgctcacctttgtagtccgacagcttcacctctttgaaggcgccatcaaccaccgctgtggccttgaagtcaggggctggctttccgatgcgcgcgttaccggaggccatgactgaaagctgagacccccgcccggtcagtgcgcccgggaagacactttgtcctcccaacccaaggtcgcgctgcgtgctgggccctatgactgagtcagcacggcggaggcgacagcactaaccctcaccctcccgggtacccggtctacgaggcccggaggctgccggagacccgctctcctgaccagagcacgagtgacccagccactgccaccagcaccccacgagcgagtcggccggagggcggtgtcgcaagcccccagcccagaaggagacagtgaggcccgcacgagcagggggcgggaagtcgggcgatcaggcctgcgctgcaaggctgtggcctcggtttcccccgcaaggacaaaggaggccactatagcggatggaaagcaaaggcggccagcactaaagtcaggatcgggccaaagcagcctgaagggggtcctcccgccaggtgcactccgggtgttcatacctgcgtgggcaaaggctagacgcacggacgatcacacgcgtggacccgcgttctcagcgccaagtgagccctgggccgcgaagccttttatgcccggcccgaaccaagacgtgcacggcgcgggggagggagcggacgagcggagcggtcgggtccactgcgcccgcaggtgcgggggagcgtgcggccgggtccatgcgcctgcgggcggcggggggagacgcgttgccttcggccgggaccactgcacctgcccgcgtgggtaatgcgcccgccgcagactccgcgcacgactccgcctgggagcgcgttgggggccgttggagtccagcatggcgcggaccccgggggcgctgctgctggcgcctctgctactcctgcagctggcgacccctgccctggtctaccaggactatcagtacttagggcagcagggcgaaggtgacagctgggagcagctgaggctgcagcatctaaagggtaacctcaggcggcggggatgacgatgcccaaaggctccccgttgccctacttctcctgctggctgcaaagggaccttcctcggcgggctgcaaatctccacccagctccgcactggaggcgtccccttgggctggttacttttctctaaggctcggtttactcttggatatattgaaatagatactgctttaaagcagctcccaggggaagagagggtgtgggcaggacactgaagctgtcactcggggataggtgccaggaagggcagagacagagaaagaagggggcgggcaagcttgggaaatcagagagggtccgattgcagaagacccgtgaccagtgcagcgagaacgacaagcgaaagtcccatatggaaagatttggggaaagaatgtccaaggaagagggaatagcaaatgccaaggtgaaaagtcctgaaggagaaatggaaagaggtcggtgaggtgtggcagagacatgggtgtgggagggtaggaggtgtcagaccttggtgagcggtgagttgggataagatcggagttgggataagatctgtctcataggggaaaggggcagattcagtaaagagccctttaaagtgatcacagtggccggcgcggtagctcacgcctataatcctagcactttgggaggctgaggtgggaggatcccttggtctcggagaccagaccagcctggcccacacagcaagactccatctctacaaaaaatattttaaaattagcctgacttgatggcccagcactttgggaggccgaggcgggaggactgcttgagcccaggaattcaagaccagcctgggcaacatggagagaccccctactctacaaaaataaataaataaataaaaataaaaaataaattagcctgccatggtggcatgcgcctgtagtcccagctactcaagaggctgatacaggaggaccatttgtgccaaggagtttgaagctgcagtgagccatgattatgcccttgcattccaacctgggtaacagagcaagatcttgtctcaaaataaataaattaaataaataaacaaactgatcataataaattggtttgtatatgctagcacagcaccgggagatttacttaccttcattatgtcaattatgccatttatcacttgacaaccctgctgtcaggtggcattgtgccttctaggtagggccatggtcacacccctgaagacagaagtcagcttcaaatggcgggcaccaaggatgttgtaggacactcacaactgggcaggctggcacagcctggaagtgtcaggttgtagttcctctggcccacttaccccgtatatgagcttggaaggttggcttgctgtctctgggtcttggtttccccacctgagactcgtggaaatattaaatgaggccaggcatggtggctggctcacacctgtaatcccagcactttgggaggctgagatgggagtatcacttgagcccaggagttccagaccagcctgggcaacatggtgaaacaccgtctctgcaaaaaatacaaaaaattagccaggcacagtggcatgtgcctgtagtcccagctacttggtaggccgaggtaggaggattgcttgagcccaggaggttgaggctgcagtgagctgtgactgcgccactgcactccagcctgggcgacagagcgagaccctgtctc

SEQ ID NO: 1560915 - DNA, 4001 bp, Homo sapiens
gatagccttgaaggttttccaggactgtcatctccccaactttcaactgagctaccgcaatatatagctgcctgcctctaccttccacctcccagctggcctcacctgctgggggcctgactcctccccccccggccaagtcccctccaagctcatgcccagaccttttttggacactacccacctgctcctctgtcatcaggcactcagctacaggcatttccctccccagcccccacccattggtgacatgtcaggcctcttcatgatcgctctgtgactctgagttctgctatttgaatccgtatgggaataaagttccctggctttcatacctttctgggagggggcattcaggaaactcagatgctggggtttgagaccaaaaactggccttccttttcgaccaatagttccgactatttctgggtaagtggacaggggatcccagctgccttccagctttcagactggagtgacaacaatttaagagctgtaaaaattgggaatggggttcaagaccatttctgatggtatttccagatagagaatctctttctctggctggctggaaaagaccaacctaatgtgtgggcaagtgggtgaaacaggtctctctctggctgagccctgggaatgatcagaatcactagacgtcaaagcaaatcactagacgtcacccattactctctttgactgcctcctcctccccagtgctctttctgaccatctcagttagaaccgaatgaacctcgctaaacccagacacttttcatcccaagccaggagtggtggaagaagccccagggactgggtgaatgacggagcctcagttgtgaaacgaccatttattgaggggccctccatggagcctagagctcactgcaagacaggaaatgagagggggctctgccaccacccccttaccccaacgcaggaaagaggatgcaatgaatcccaacaagaccagctcaaacttggctttggaagcactgaagcaattctctacgttcataaacagtctgctaccccagccagggacagacgcttgcttggaggacggagcacaagcagagcagcagaatgacagagtgacaggatgagagaggcagagggacccagaaagatcctgtcccccatgccaagtgacacagaagaaaaaaataatgctggaggtggctctgggaaatgttcagggggcaggatgggtttggaagggggggctgtgctaaggtgaagagggaaagggcaggagaaagatggcgggggctggaggggggaggggtgtggtcagcaagtggccaaggtccctgcgcggtggaggcagacagacctcatcgcattcccaaactggtagaaacctgggtcggggtcaggcagaggatcccataggtgagagaggtgagtgaggaagtggggggattagaatctgggaagaggggccaggaaaggagggggtaggctggtgacaggggcccatgtggggccccagcggtcatacgtgccatggttggcagtgacagctgggggggagcacggtctttgcagcatggggcggccctaggggaaggggacccctacagggggtactctgcgggcccgcgggccccagccttggacaggccggggcaaggggcgctggggggtaggcagagaggatgaggggccccgtagggggaggggccaggcgatgatggacaaggccagggctggcagcgcagggccaagatcggggtcacagcccgggcactcaccgctctcctgctcgctgcccttcttggcggcggcggcgttgcccatcgcggcggcggcggccggggccggtcccggagctgcggcgcggcgggtgctggctgcggccggcggccccggagcgcgctgggcggcggcggcggcggccctcgggctggctgcgctagctgcggcgccgcgacccccgcccagcccctgcttcccgcgtctctccgcgcccgcccgcccgggaacctcagcccaagatctctgccgctgtctgtgacgcccccgcagcccgccgctcattggcctaggccgccctgactgacggctcagcgccgcctcccattggccctcccgcgaccttcccgcgccactataggctctcagcctcgggacacgcaccgcggactctcggccattcactcgctcgcgaggccgcagctgggcgggcagacgcgtccgattggccgagacgctggactgggcccggggtccgccctgcgaggccgccgattggcggaggtgccgggtccgccaagccccccagcagaacgctcagtgtcaatccgggggtgagagggcggggcggagacgcagtctgcgggcccgggccggcggggcggggcggcggaggctggctggcggccgcgcagcgctccgaggctcaggaggcggccccggcgggcgcccggccggccccgcgcgcgccgcagtcccccgcccccgctcagtgcggcagcggctgtcggccagccggagttggcgccgcggcctgcccggcgcagccgctgtccacctgccagcgggggaggggcgcggccggcgcgcgggtcagaggtcgcccggccgccgccggcgtcattcataaggcctggcgctgggcggccgaggccaggcctgcttgggggccaggccgcggggcctcctgggttttcccagccgcactcaggaggatgccgggcccggcgcaaggggtggctgggaaggggcgctcagtgtccacccctttgctgggccctagccctgggctcctgccagtagtaagagctggcacccacttaacgctccttcgcaccacactcccatcgcgtaggtgctaccatcatcactcccattgcacagatgaggaatctggggtacagccaggcagattccctgctcctgttccccgtctgtatttcctgtctgggcaatgcgaagggaacctgccccttccttcaggatcctctttcagtacacacttagcagaggacagtcggggtttcccaactgcgacactactgacggtgaggctggatcattttctgctggggggtgtcttgtgcaccactgggtgttgagcaacatcccccgcctctacccactggatgccagtagcccctcctctatcttcctgctggctgtggcaaccgctgtctcctgacattggtgaatgtgctcttgcggggccgaactgctcctgattgagaagcacttaagagagggtcaggggaggggagaagccaggtcaccccgactcggaagggctagctgggcttaactacaagccgatctgctgcttcgacttgaatagcctccaccttctccagctgctgtctgcccccatgttcccagatcaaccacagttccagggagggagagtcagagcctttctgtgaactatggggaaatggctgaccactccgcctctggatggatagatacatggtaaggtttagtaaaatttaataaaagcattgctgtttgtgtgttgggatcacgatgttaatttcctgtgggtcaagggcaaagtctgaaaaatcactcattataatctatctgcaggacagctggtttaagttttgacaaagaaaaacccctcctggaacctcagtctggaatacaactgtagaaccaattaagactggagtaggaagctggaaagaagacgtgggacagccaacccactggacagggcaagaggccacttctgggggagagtggacaaagttgcttcagtccaccagagacaaaagcacaaacaatcattctaaatgaagtgcttttaattttcagaccaaacatttttaatataaaaacattttgataatatacaaacagcaatcacaacagcatccacatggcagcaaggggaccagggcacagagagggggagcgggctggggagggacagttttcagggtcccagttgcttccctggcttgaaatcaccctggtcctagcagaggacaggttaaggctgccagaggcagagggtccctgac

SEQ ID NO: 1560916 - DNA, 4001 bp, Homo sapiens
ggatgatgggggggaggggcaggtaacctcaatcaagaggccccacactcacctctgcttcctgtctcttccaggaaagggtagaataaagggtgggtgggatggggtgatctggcggccttctgccccctggccagggaggctcagggtgctggctgtggcttaggcccccggaaggtgcggtgcaggtagcccaggaaacgtacagccaggtgggcccagaggagcagctgcagccacagctggaaggtggtctccaagtccccaccctggctgctgcctgatcccagatccatccccagcccccttgggctctccctggaatcttccttttgctgagaaaccaggaaaacgcagagcctctaagtcagcttccttgggatggcctcaggggaccagggaggaggagctggttgccacagaagcttttaaaggtacctgctccaagctagccaaggtttgcagagggctcccttggcaggaggcaatgggaagattctcccgagggtgtccctctggctggcctgcgtgccccagggcggggcgataaaactaacttccctttccacggacttcactgctcccaggacgccaggccctgccttcctcagtgggcactggactgtgcagaggacagcgcctgatgtgcccagagcagtgcccactgggcagaggggaaagagttaaggttcaggatcaggcaacagccagagactccttaggggctaaagaggccccagagctcccttaattcgctgaaagaacagctggagagaaaggcttggggcggggggcgacaagagccaccctgcctcctcccctgaactccctttcaatgtggaacccccaaatcctgctatcctgagagagaaaatgggtatatctgactcttttgttttgctcctatgcgggggtggagaggggaaaggcatcccgggatgtccttggcctctctcaaaccttgccctgtgcttggctctactctcggccatgaaagtccaaaccggaaacgagcggctaaacccaggggtgggggagggggaggcagccttgaccatcttcctccttctttccagatcccaaaagaagcagagggtcagtggcagcctctttgagtgtgcccggcatccaggacccctgctagcaacaggaagtggcagaggatggtaacccagccagctgctggcctgtacagcctgccgccctgcccacatctcccacacggggggtgccagctctcactctggtccagattccatttgggttcatagggaaaactccttgacaccccttgaaaagccaggaccacagcagaaagcagaaatctagaaactcgccctgggaatggggaattgcaacagcagaatatcaatttgggcaaggggcttggggtctctctcggaaggagcccagccacagaacccccttcctccggacaacaatctcagaccttctgcccttttgaaatctggctgtcctgggaattctggggcaggaatgcccagcctgggctgggccccctactcgaggctggctgattcctccagtggagcctggattccctgctctgggcttacctaaatgacacaactctgagctggaccccaacactggctggaacgacccccattctgagctggaccccaacactgggatggctcatcctacagtctgagctgaaccccaacactgggatggaccactccaccacccctctctgagctggccccctgccgggtggaccatcctcccttgtctgaactgggccaccgatcccctctctcttccccaggccgcacagcccggggctgtacaggaggcgtttccagggccagccaggggttcacatccttcttctcttcgcctgtgccccagaccccgctgcagcccctccctgacttaaggggcagagtgtgcctaggaagttgctatagtaacaggactcagcctcaccatcgctggagttggaagccatcactcagtcctgttctcagggcaccggcactacggtggctgggaaggctcatgagacctgccgtgtctgttcggctgtctgtccccagaaccctgcctgcagggggagctagggagccgtggggtgggagcaggaagagaaacccaacccagaggccactgggtgtggaggagggacagatagggccctccgagtttctgtagacgcggttgcgctaaggggagagctgccttgataagacctcttgggcacccatacaactgccaaggcacagaaggtgtttggccgtcttaggcatccataggatgttacacggcactagttcttcccatctagggtcttcttggggggtgcttttctctctttgccaggatctgcttgtgtcctggggatcgggggctcccttttactagctctgccccttcccctgtgggccagctcccaggggtatcttcagccagtgccagccacgacctgagccccacttggctgtctgacctgggcgcctgccccctggggccgctgctccctctccattcttccaacttggccagagcctgggccttagtcttttttcttggccctctcagctctcccaatggctttgccatctttgggtgtagattcccccaactccactccagggttcattctggatccctggcctcttgggaggaggcggactctgtcctgccctggcacagagatggtaccacaggggactgcaggatgcttaactggtgcctcccaaggcctgggcattttcctgaccccagtcgggccggcgtctggcagatgaaatccaggtgccccctgcaggctggcctggctactgcccctgcccctgccccacccttctaagagggcaaattttgtctaactccatcctctcagaatcagagcgcctcaaagcaaagagggacttccttcctcatcttatttccttctctgggagcctctgggaggaagtacagcttcgggcgtttctcaacgtgtgacatagtcccattggcagaacatgacatgattttcgggatgtttcatttatctagttacactgtatttaatgcgtatcagagaaaatataactggcatggcaatcccatgatttcatttatattattgtttagaatgagctccaagtttacatctgaacacaagtgagtaaaacttttattattttaaattaagaaaatatgatagagtaaaaatctgggaggctgctgaaaaatgtcaaagtcggggaattctggggtccaagaagtttgctggtagatggatctggatgtgaatcctgcctctgtgacatcatctatgtcatggatgtcatttctaccagagggctcctttggaaaatttggataacagcccgttatgaaagtcaccagagtaggtatctctatccgcctggccatttagcctgtggcacagcctagatgcccaataaatagtagctctattttaccatgatcattcattcctgggtgtctgacctgtgctctgagagaatcagtggttccttccagagcctctgatctttttcttgggatcctttttcttgtgtggctttccaccccccaccacatgtgtctgatagccttgaaggttttccaggactgtcatctccccaactttcaactgagctaccgcaatatatagctgcctgcctctaccttccacctcccagctggcctcacctgctgggggcctgactcctccccccccggccaagtcccctccaagctcatgcccagaccttttttggacactacccacctgctcctctgtcatcaggcactcagctacaggcatttccctccccagcccccacccattggtgacatgtcaggcctcttcatgatcgctctgtgactctgagttctgctatttgaatccgtatgggaataaagttccctggctttcatacctttctgggagggggcattcaggaaactcagatgctggggtttgagaccaaaaactggccttccttttcgaccaatagttccgactatttctgggtaag

SEQ ID NO: 1560917 - DNA, 4001 bp, Homo sapiens
acactcgaaggtcacaaattcgtggcatcgtcgatgaaccacaaagctgcagactatagatgaaaatcatagagacacagacggaggcatggattagtccagcgggagaccccagcagacagaaaattggaaagagagagcggaactcggacactgagaaaaccagaaagagagggatctcaacacagagagtccaacagagagaaaatcggaggccagagagagaagcaggagacagaaacccaagagatgggctcagagtcagaaacagagacgcagagacttacagagagacacagagcacagagctcagggaagggagatggaaaaagagagaaagaaaataggatcccattgacaaacagacacaggcccacggacggagatcagaaagccaggagagaggcagacagattcaaagagcgaaaaccgaaatatcttcagacgcagcccaggaagcagcaacttgggcagaagtgagtctgggggcgctgctgccggcccgccccccaccctgactcactctgttctcagcagtagcagctggtgctcaaggactcgcccccctctcccgccccccagaactgccggccccgcccggcccccactcgcccattggtgaccccacccggcctgcccctgcctaggacggctggtgttgtcatggcgacggcagcctggggtgggggggggctctgactttgcatctccagccccctcccccttccccccttcagctccccttttccaaatctccatgttcccatggcaacagattctccaaatatctgtccccacctggagccggccgagggaggggcccccagcaccacctccgcggtggccccaccatcaaagctccctccccaccacaggctgtgtctctgccacaccccccgccccgggctcccccgcgcctctctggggaccagagaacacgtgtgtcaagcagcctcagctgtggggccccagcctccaccctcctgagggtcccaggagccccggtccccagctcttaccttgacattgcaggccctgctttccgatacccctggaagagtcagggatcctaggtcagtgcagaaaggggtacctggacccccaacctctgcgagccacagggggcctgcgctctctgaccctcctcccgcagggcccaggtgtccaagccccggccacctcctctttctagaacccagaaattttggcccccagcccttcttcccttagactggagttcagcccccagtttcttcctccttcagacccaggaatccaggctcccagccccccaggcccttcctccctcagacccaagactccaggacctctgtcctccagcctcctcctccctcggacccagcactccaggaaccagcctcctcctcactgaaacccaggagtcgaagctcccagcgttccctggccatcctagaacctgggagtcgggactacagccccctccttcttccttccacaggggtcggcgtgataggagtctgcacccctagtcccctcgtcccccagtcccccagcccccttccctcaccagatgaagtcggtgcagtggctgcagaaggtgggctgcttgaagaagcgagcggtgaacttgtggctcttgacttcgtggaccaccttctgcctcagggccccctttctgcaaaacaggggccggggtcccccctctgaatcgcctacgccggggcccagaccagccatggccccagaaacgtagcagggaccaggatcctgcctttcttgggggaaacaggtggaagggagaggagctggagactcgaaggatcaaaggagccacagggaaattccgaggtgggcaggagaggggcaaggcacctccaggtgcggagcgcgccaggcagggagcggcaccccgggcgcgccggctccgccagggggagcgggcgagtggggaggaagagccaaaggcaggggcgccggcagccggaggcacgggcggcggcggtgggagctccagctccggcacctgctgaaatgtgggagccccgggttgggggaggcgttgccaggacgaccgagagggcggggtttcggcttaaaggcgctcccctcccggagacacgggacaaatgtcctccctccccgccccccacacgtgcacacacccactccgggggctggctggagggaggggcatcctctgagcctggctcccccccaccaccctgcaatctgtcatcctgccccgcgttcctcccccactagggtgcctcgtgtgtcctgtgggcgccctggggtccctgtgtctgaccctgcccctctccttccttcaacaaactttatgctccacgctaggggtccagcagtggacaggcagggcgctaaggttctcactttctccgatgccggctgagtctttatttcctcccctggcctctccattatttgtgtagctctctgcctgcgtgtgtctttcttgtgacctctgtccctctccctctattcctggagcgagctttctcgatgtgtctctgtttctgcctctcagtggatctgttttcttttccctgtctccgagaaatgctgtttctatttctttctatttctctatttcctctgctgtgtgtctccatctgtatctgtcgccatctctgggtcttggtgtcgtggttcttctcggggtcttggtctgcctcactgtgaatcagtctccctctgtctctccctctacgtctgataaattcttccgcctctgtctccctgagtttgtttctttccctgtctttgtctctctggctctgtgaatctctattctctctcaggctgtgactctgtctccccctccctctgcaacttgatctctttgggagtccgtctctgtcttcctctctgggagtcactctctaaatgcttgcccctgtctctccctctctctcctcacctccacccgtctttataaatgcctttgtctctgtctctctcccttcctccggttctgcaactccgtctctgtttttgtttgtctcttcctatatctctctggttccatctgtttctctgtacttgtccctctctggctctgttgatctctctctctctctctgatgctaggggggtctctctcctgtctatgactcagtctctctctccctcttctcttctctgtctctgtccctttctctctgacccaatctctctccctcttctcttctctgtctctgtctctgtccctttctctctgacccaatctctatttgtctctctggctctatgaatctctttctgtttctggggatctccccgtccctctgtgtctgtgattcactctccctgtgtctctggctctctgaatctattcatctctctgactctctgaatctgtgtctctggctctatgaatgtctatgtctctctgactctgaatctgtgtctccggctctatgaatgtctctctatgtctctctgactccctgaatctgtgtctctggctctataaatctatgtctctctgactctgaatctctctgtgtctccggctctatgaatgtctctctatgtctctctgactctgaatctctctgtgtctctggctctatgaatctctatgtttctctgactctgaatctctctgtgtctctggctctatgaatgtctttctatgtctctctgactctctgaatctctgtgtctctggctctatgaatctctatgtctctatgaatctctgtgtctctggctctatgaatctctttctatgtctctctgactctccgaatccctctgtgtctctggctctatgaatctctctgtttgtctctttggctctgtgaatctctgtgattcaggctctctgaatctctctatatgtctatgaatctctctgtgtctctggctctatgaatgtctctctatgtctctctgactctctgaatctctgtgtctctggctctatgaatctttctatgtctctctgactctccgaatctgtgtctctggctctatgaatctctctgtttgtctcg

SEQ ID NO: 1560918 - DNA, 4001 bp, Homo sapiens
gaccatcctggctaacacagtgaaaccctgtatctactaaaaatacaaaaaaaaactagctgggcgtggtggtgggtgcctgtagtcccagctactcaggaggctgaggcaggagaacggtgtgaacccgggaggcggagcttgcagtgagccgagatggcgccactgcactccagcctgggaaacagagcaagactccgtctcaaaacaaaaacaaaaccaaagacacggtctcatccaggcacggtggctcacacctgtaaccccagcactttgggaggccaaggcaggaggatgacttgagcccaagagttccaggctgcagtgagctacgatcatgccactgtactccagcctcagcaacaaagcaagaccctgtctcttcaaaacacacaaaaacaaaaagccagggtctcccttcacctctgtctcctgctggattgctcttggccccaccctgtctcccacttctaggggtttgcccgtgttgacccctccatctgcagcaccttcgggattcaactgaaacctcacctccttggaggagccttctctgaccccgaggcttgggaggaggacgactctgggctcctccagctgcccggggccataacactgaccactgacttctgagcttgtttctgcccactcaaaggggagccagcagaggtagtatcttggtcacacagacagggcctggcactgagcagtgttcaataaacatctgatggatgaacagagaaaaggctcacctggctcgtcagagccatctttgcagtcgcaatagtcatcgttgacctgatcaaatgggatggtggccgaaccgtccaggcaggtgaaaggcttggactcatcgtagaagtgatgatctgcggggtacaggaagctcagcccagggcaggtaagcgccttctccaccaaataccacctctgtcctcccatccccaccagcggagcactaccgggaaactgagtcaaaaggctgtaaatgcctatccctaaggcccaatgttggcccctcccacctccagcctggcgggagggtgaacaggaggactcactggtgagggagacgccccggggcctcttgacctccacggcccagcacatgggtagcagcagcagcagcggcaacagcatctcaccagacgctctgaggcccgaaacgggttctgtgggaggaagcctacagcggggagatgcgctgtgtcttcacgctgcaggaagaaagcggatcccggtcagtgggagagggctacttccagccaattggattcctccatcgcttccaggcaatgaggcctcactttgtttccgatatgggggcgaggggcagcgatctccccaatcctggccagtctcactttgctcaaatcaatggcgaggatctcaagatctcaaaacctccgctccctgtgcccaattgtgacccaattcccgccaacagaccaaagggattaacagcctccgccgtccacacccacacatgcaccctccggttgccccctgtaagaaactgaggtgccctcccacccgctcgttcacacctacacgaggccggagcaaaggtcagtatccaccgcacccctcttgtccagcagccgcggttcctgctgcagaaagaaagcggaaatttctggaccccgtcacttccggtcgtacgttccgcaccgggaacggagactcagggtcgccatgttgggagaggcaggagtgggggcggtgccagagccgagacggccatcttgggcaggactgtgaaaccttagagaggatagttctgagggctagctcttaatggcggcgcagcgtacctccatcttgggagtggcggcttctcaagccggaaagaaagttcctgaaaaatgcccgcgaacccccaggggcgggataaggttgggggaggtagggaaacggaatgagcacgtgaccccaaagtgtccagaccctccgtcctgcggcgcggctctaccccgcccactgttgggaccgcccctctatgcagcctcagccaatgagaacgcagtgtcagccacggaacgcgggtgatctccatggaaacagtggagagagacggggaggcggttacctggcaaccgagagatgcggagcgcaaccacctagcggtcggaaagtgcatttttcagagccctaggaatccgagctgacggatccctgacaggggcgactgactcctagttatccccctaacccctaggggccttcagccccaaccccatcatgacatctcctctgtgcagggcggcctccgccaacgccctgcctcctcaggaccaggcttcgacgccctcttccagggtcaagggcagggaggcttcgggcaaacccagccacctccgaggcaagggcacagcccaggcgtggaccccaggccgttccaagggaggatccttccacagaggtgcagggaagccctctgtgcactctcaggtggctgagttacataaaaagatacaactgttaggtaagatggctccagagggtacagagggtcaggggtcaacagtgcccatccaatcttcatggtgtgacaaaggtatttctccagcatgagtctaggtaaaccgtttctgggcaaaaactcatacttagttcatgtttttccttctctgtctcttaaaacttctcatgggttcagaaccgactgaactgtacttcatactttcttgtaatttattttctctatttttttttttttttttggcagaatctcactctgttgccaggtgggagtgcagtggaacgatttcggctcactgcaacctccgcctcccgggttcaagcgattctcctgcctcagcctcttgagtagctgggactacaggcacacgccaccacgcctaactaatttttgtatttttagtacagagggatttcaccatattggccagggtggtctcaatctcttgacctcccaaactgctgggattacaggcgtgagcccgcctcggcctcccaaactgctgggattacaggcgtgagccactgcacccgcgtttttttttgttttgttttttgttttttgagacagggtcttgctctgtcgcctaggctggagagcagtggcatgatctcggctcactgcaacctctgcctccaaggttcaagcgattctcgagcctcagcctcctgactagctgggactataggtgcgtgccaccacacctaatttttatatttttagtagagactgggtttcaccatgttggccaggctggtctcgaactcctgatctcaagtgatccacggccttggctcccaaagtgctgggattacatgtgtgagccaccgcgcccagccttctttctttctgacagggtcttgctctgctgttgaggctggagtgtagtggttggataacagttcactgcagacttgacctcctaggctcaagcgatccttccacctcagcctcctgagtagctgggactacaggcatacaccactgtgcttggctaattttcttactttttgtagagatggggtctcactatgctgcccaggctggtctcaaactcctgggctcaagcaatccttcctcctcagcctcccaaagtgctggggttacaggcatgggccgctgcacctggcctgagcatagatttttagagccagattttctgggttggaatcctggctctgcataatagttgtccaaccttgggggactaagagtaacctaattgttctcagtttctcgatgtgtgaaatggggatagtaacagtacaacataggtacctgaaatgtgtaaagtgcttagaacagtgcctggcacatagcaaagtaccataaggtgtaaaccagtggttcttgttggaaaagggttggtttgccccacaggggccatttggcaatgtcctaagacattgagaccagcatggccaacacggtgaaacgctgtctctactaaaaatacaaaaaattagccgggcatggtggcatggatgtctgttgtgggtgtgtgtctgccactggcatc

SEQ ID NO: 1560919 - DNA, 4001 bp, Homo sapiens
ttgtacactgcacagccagggctcgaaataaagctctccagtgccgcctcctgcctcttctcactgaggcccttcaaaacagggtctccacctggcacgggggctcacacctgtaatcccagcactttgggaggccgaggcgggtgggtcacctgaggtgatgagtttgagaccagcctggccaacacgatgaaactccatctctactaaaaatacgaaaaattagccggatgtggtggcatgtgcctgtaatcccagctactcaggaggctgaggcaggagaatcgcttgaacccgggaggtggagactgcagtgagccaagatcatgccactgcactccagcctgggcgataagagtgaaactccatctcaaaaaaaaaaattaaaaacaaaacaaaacaaggccaggtacggtggctcacgcctgtaatcccaacactttgggaggccgaggcgggtggatcacaaggtgacgagatcgagaccatcctggctaacacagtgaaaccctgtatctactaaaaatacaaaaaaaaactagctgggcgtggtggtgggtgcctgtagtcccagctactcaggaggctgaggcaggagaacggtgtgaacccgggaggcggagcttgcagtgagccgagatggcgccactgcactccagcctgggaaacagagcaagactccgtctcaaaacaaaaacaaaaccaaagacacggtctcatccaggcacggtggctcacacctgtaaccccagcactttgggaggccaaggcaggaggatgacttgagcccaagagttccaggctgcagtgagctacgatcatgccactgtactccagcctcagcaacaaagcaagaccctgtctcttcaaaacacacaaaaacaaaaagccagggtctcccttcacctctgtctcctgctggattgctcttggccccaccctgtctcccacttctaggggtttgcccgtgttgacccctccatctgcagcaccttcgggattcaactgaaacctcacctccttggaggagccttctctgaccccgaggcttgggaggaggacgactctgggctcctccagctgcccggggccataacactgaccactgacttctgagcttgtttctgcccactcaaaggggagccagcagaggtagtatcttggtcacacagacagggcctggcactgagcagtgttcaataaacatctgatggatgaacagagaaaaggctcacctggctcgtcagagccatctttgcagtcgcaatagtcatcgttgacctgatcaaatgggatggtggccgaaccgtccaggcaggtgaaaggcttggactcatcgtagaagtgatgatctgcggggtacaggaagctcagcccagggcaggtaagcgccttctccaccaaataccacctctgtcctcccatccccaccagcggagcactaccgggaaactgagtcaaaaggctgtaaatgcctatccctaaggcccaatgttggcccctcccacctccagcctggcgggagggtgaacaggaggactcactggtgagggagacgccccggggcctcttgacctccacggcccagcacatgggtagcagcagcagcagcggcaacagcatctcaccagacgctctgaggcccgaaacgggttctgtgggaggaagcctacagcggggagatgcgctgtgtcttcacgctgcaggaagaaagcggatcccggtcagtgggagagggctacttccagccaattggattcctccatcgcttccaggcaatgaggcctcactttgtttccgatatgggggcgaggggcagcgatctccccaatcctggccagtctcactttgctcaaatcaatggcgaggatctcaagatctcaaaacctccgctccctgtgcccaattgtgacccaattcccgccaacagaccaaagggattaacagcctccgccgtccacacccacacatgcaccctccggttgccccctgtaagaaactgaggtgccctcccacccgctcgttcacacctacacgaggccggagcaaaggtcagtatccaccgcacccctcttgtccagcagccgcggttcctgctgcagaaagaaagcggaaatttctggaccccgtcacttccggtcgtacgttccgcaccgggaacggagactcagggtcgccatgttgggagaggcaggagtgggggcggtgccagagccgagacggccatcttgggcaggactgtgaaaccttagagaggatagttctgagggctagctcttaatggcggcgcagcgtacctccatcttgggagtggcggcttctcaagccggaaagaaagttcctgaaaaatgcccgcgaacccccaggggcgggataaggttgggggaggtagggaaacggaatgagcacgtgaccccaaagtgtccagaccctccgtcctgcggcgcggctctaccccgcccactgttgggaccgcccctctatgcagcctcagccaatgagaacgcagtgtcagccacggaacgcgggtgatctccatggaaacagtggagagagacggggaggcggttacctggcaaccgagagatgcggagcgcaaccacctagcggtcggaaagtgcatttttcagagccctaggaatccgagctgacggatccctgacaggggcgactgactcctagttatccccctaacccctaggggccttcagccccaaccccatcatgacatctcctctgtgcagggcggcctccgccaacgccctgcctcctcaggaccaggcttcgacgccctcttccagggtcaagggcagggaggcttcgggcaaacccagccacctccgaggcaagggcacagcccaggcgtggaccccaggccgttccaagggaggatccttccacagaggtgcagggaagccctctgtgcactctcaggtggctgagttacataaaaagatacaactgttaggtaagatggctccagagggtacagagggtcaggggtcaacagtgcccatccaatcttcatggtgtgacaaaggtatttctccagcatgagtctaggtaaaccgtttctgggcaaaaactcatacttagttcatgtttttccttctctgtctcttaaaacttctcatgggttcagaaccgactgaactgtacttcatactttcttgtaatttattttctctatttttttttttttttttggcagaatctcactctgttgccaggtgggagtgcagtggaacgatttcggctcactgcaacctccgcctcccgggttcaagcgattctcctgcctcagcctcttgagtagctgggactacaggcacacgccaccacgcctaactaatttttgtatttttagtacagagggatttcaccatattggccagggtggtctcaatctcttgacctcccaaactgctgggattacaggcgtgagcccgcctcggcctcccaaactgctgggattacaggcgtgagccactgcacccgcgtttttttttgttttgttttttgttttttgagacagggtcttgctctgtcgcctaggctggagagcagtggcatgatctcggctcactgcaacctctgcctccaaggttcaagcgattctcgagcctcagcctcctgactagctgggactataggtgcgtgccaccacacctaatttttatatttttagtagagactgggtttcaccatgttggccaggctggtctcgaactcctgatctcaagtgatccacggccttggctcccaaagtgctgggattacatgtgtgagccaccgcgcccagccttctttctttctgacagggtcttgctctgctgttgaggctggagtgtagtggttggataacagttcactgcagacttgacctcctaggctcaagcgatccttccacctcagcctcctgagtagctgggactacaggcatacaccactgtgcttggctaattttcttactttttgtagagatggggtctcactatgct

SEQ ID NO: 1560920 - DNA, 4001 bp, Homo sapiens
cacgggggctcacacctgtaatcccagcactttgggaggccgaggcgggtgggtcacctgaggtgatgagtttgagaccagcctggccaacacgatgaaactccatctctactaaaaatacgaaaaattagccggatgtggtggcatgtgcctgtaatcccagctactcaggaggctgaggcaggagaatcgcttgaacccgggaggtggagactgcagtgagccaagatcatgccactgcactccagcctgggcgataagagtgaaactccatctcaaaaaaaaaaattaaaaacaaaacaaaacaaggccaggtacggtggctcacgcctgtaatcccaacactttgggaggccgaggcgggtggatcacaaggtgacgagatcgagaccatcctggctaacacagtgaaaccctgtatctactaaaaatacaaaaaaaaactagctgggcgtggtggtgggtgcctgtagtcccagctactcaggaggctgaggcaggagaacggtgtgaacccgggaggcggagcttgcagtgagccgagatggcgccactgcactccagcctgggaaacagagcaagactccgtctcaaaacaaaaacaaaaccaaagacacggtctcatccaggcacggtggctcacacctgtaaccccagcactttgggaggccaaggcaggaggatgacttgagcccaagagttccaggctgcagtgagctacgatcatgccactgtactccagcctcagcaacaaagcaagaccctgtctcttcaaaacacacaaaaacaaaaagccagggtctcccttcacctctgtctcctgctggattgctcttggccccaccctgtctcccacttctaggggtttgcccgtgttgacccctccatctgcagcaccttcgggattcaactgaaacctcacctccttggaggagccttctctgaccccgaggcttgggaggaggacgactctgggctcctccagctgcccggggccataacactgaccactgacttctgagcttgtttctgcccactcaaaggggagccagcagaggtagtatcttggtcacacagacagggcctggcactgagcagtgttcaataaacatctgatggatgaacagagaaaaggctcacctggctcgtcagagccatctttgcagtcgcaatagtcatcgttgacctgatcaaatgggatggtggccgaaccgtccaggcaggtgaaaggcttggactcatcgtagaagtgatgatctgcggggtacaggaagctcagcccagggcaggtaagcgccttctccaccaaataccacctctgtcctcccatccccaccagcggagcactaccgggaaactgagtcaaaaggctgtaaatgcctatccctaaggcccaatgttggcccctcccacctccagcctggcgggagggtgaacaggaggactcactggtgagggagacgccccggggcctcttgacctccacggcccagcacatgggtagcagcagcagcagcggcaacagcatctcaccagacgctctgaggcccgaaacgggttctgtgggaggaagcctacagcggggagatgcgctgtgtcttcacgctgcaggaagaaagcggatcccggtcagtgggagagggctacttccagccaattggattcctccatcgcttccaggcaatgaggcctcactttgtttccgatatgggggcgaggggcagcgatctccccaatcctggccagtctcactttgctcaaatcaatggcgaggatctcaagatctcaaaacctccgctccctgtgcccaattgtgacccaattcccgccaacagaccaaagggattaacagcctccgccgtccacacccacacatgcaccctccggttgccccctgtaagaaactgaggtgccctcccacccgctcgttcacacctacacgaggccggagcaaaggtcagtatccaccgcacccctcttgtccagcagccgcggttcctgctgcagaaagaaagcggaaatttctggaccccgtcacttccggtcgtacgttccgcaccgggaacggagactcagggtcgccatgttgggagaggcaggagtgggggcggtgccagagccgagacggccatcttgggcaggactgtgaaaccttagagaggatagttctgagggctagctcttaatggcggcgcagcgtacctccatcttgggagtggcggcttctcaagccggaaagaaagttcctgaaaaatgcccgcgaacccccaggggcgggataaggttgggggaggtagggaaacggaatgagcacgtgaccccaaagtgtccagaccctccgtcctgcggcgcggctctaccccgcccactgttgggaccgcccctctatgcagcctcagccaatgagaacgcagtgtcagccacggaacgcgggtgatctccatggaaacagtggagagagacggggaggcggttacctggcaaccgagagatgcggagcgcaaccacctagcggtcggaaagtgcatttttcagagccctaggaatccgagctgacggatccctgacaggggcgactgactcctagttatccccctaacccctaggggccttcagccccaaccccatcatgacatctcctctgtgcagggcggcctccgccaacgccctgcctcctcaggaccaggcttcgacgccctcttccagggtcaagggcagggaggcttcgggcaaacccagccacctccgaggcaagggcacagcccaggcgtggaccccaggccgttccaagggaggatccttccacagaggtgcagggaagccctctgtgcactctcaggtggctgagttacataaaaagatacaactgttaggtaagatggctccagagggtacagagggtcaggggtcaacagtgcccatccaatcttcatggtgtgacaaaggtatttctccagcatgagtctaggtaaaccgtttctgggcaaaaactcatacttagttcatgtttttccttctctgtctcttaaaacttctcatgggttcagaaccgactgaactgtacttcatactttcttgtaatttattttctctatttttttttttttttttggcagaatctcactctgttgccaggtgggagtgcagtggaacgatttcggctcactgcaacctccgcctcccgggttcaagcgattctcctgcctcagcctcttgagtagctgggactacaggcacacgccaccacgcctaactaatttttgtatttttagtacagagggatttcaccatattggccagggtggtctcaatctcttgacctcccaaactgctgggattacaggcgtgagcccgcctcggcctcccaaactgctgggattacaggcgtgagccactgcacccgcgtttttttttgttttgttttttgttttttgagacagggtcttgctctgtcgcctaggctggagagcagtggcatgatctcggctcactgcaacctctgcctccaaggttcaagcgattctcgagcctcagcctcctgactagctgggactataggtgcgtgccaccacacctaatttttatatttttagtagagactgggtttcaccatgttggccaggctggtctcgaactcctgatctcaagtgatccacggccttggctcccaaagtgctgggattacatgtgtgagccaccgcgcccagccttctttctttctgacagggtcttgctctgctgttgaggctggagtgtagtggttggataacagttcactgcagacttgacctcctaggctcaagcgatccttccacctcagcctcctgagtagctgggactacaggcatacaccactgtgcttggctaattttcttactttttgtagagatggggtctcactatgctgcccaggctggtctcaaactcctgggctcaagcaatccttcctcctcagcctcccaaagtgctggggttacaggcatgggccgctgcacctggcc

SEQ ID NO: 1560921 - DNA, 4001 bp, Homo sapiens
tttaggatttcaataacctaaataagcggtaatctaatattttaatattctaggagtctgacaagctaggactgtgctctttgaattctttagcattcaaggacctcatccatccagcattctaaaattctaacattttaactttctaggattcaacaatctaggaatctaatattccagcattttaatgttttactatttcacaaacctagaattctaatatttgaacacgaacatgggggcaatttaattgcctaggatgcatattccaacaagttatgattctaatattctaacatttctacagtccagtactccaacacagaagcccactattcttttaacatttcacggtttagacgtggagttccacctggtttcctcttgccataacacccagctgcccaccctggggaccctggtgtccaaaattaagagtaggctaacagcactgtgactaggaaagggaatagagtccccagggtctgtaggagtgcctgcccctccacacatatctcaggcttaggggagggcagaattgggctccgagacctcacttgcccctggcagctaactcaagcacctgcacccacacatgtcaccggatcaccatggccagcccgggttcaatttctcctgtttccaccaaatgggaggcccgggatgggcctggacgtggaggtccgccgacatctgctgccccttcctcccctctctacacctggctggcccctcccttcctccctgtttgctgcagaaaacaacgacatgcagggacatgaaatttggggaggcctctggggcaccccacccctgcccagtcctctctcaaagggatggtggggagaggggcaatggaggggggcaatgccccctatccctccatcacccaaagctcaggtctccttcctccctcttccgcacaccaggccccagacccctctgccagcgccccctccttcaacctctccccgagctggatccagggagcctgcgccctcaccttctggtccacgatggaacaggccagctgcttcacatgagccagctcggaggcggcgggcaacagcacgaactcgcgggtcagcccgatctggatgtgaaaggagaccccggaacccggggccgggatctggggcagtagcggtggcggcgactgcagctctaggccgccggggggcggaggagaccccggcccgggagagccagggagcccggcgggataagagggggcggtggccatggggggaggccggggaccggccgcctggagcccacccgggacccggccggggggccccgggggaccctgggttctagatccgcgggatctcgtgagcaggtggtgggagagcggggatccgagaaaagatctggcaggcggaggggacctgaggatggcggggtcctgggaaggagagaaaggcactatagtgggtcagaggcccggaatccagggctcccagaagatcagaaaggagaaaagtagtgggttggaggtcccagcgattgagattccaagaagcctgagaggaaatctagtaggtcggggtcacagggatcaggagagcccgcgattcaaaggccccttccctagaggagggattgagaagggggcagagggaatcccaggatccagtgctccaagaagaggatcccactcagaaggcggcccgggggaattcaccttgggggtggagggcaggagtctctgagtcggggaccgagtggattccagagataaaggggttcgcagggacccgaccggccaggggatgggcagaggggtcccgagggccggagtgggtagaagggaatctcacgagtcgcagaagttggagaaaagttcggtcgggagccgtgaggaagggggcgttgccggagcggggttgggtggggggcagggagggtcgccaggcgccagtagctctttttccccctccaaagtttaagtcggcggcggcggcggcggcccaggaggaagtgtccggagcgacagtgcagtcgaccaatcggcgcgggcctcggcgacgtcagagaggggcggagcctgccgaggggccgggggcggaaggggagggtgggcccggggcctccgagttgggggctggacctccgcctccagggtccgggacaagggatggtgtgagggatggagggcaggcaggcgagaccagttccttccctgaacacagccaagcctggaaagttaacttttccctcggctggacagggaggggaaacactatcacccaccgccggtcgcaggcgtcgggcttggaggccactggccctttaaggaggggagccctctccggcaggcgtccggcgcccatggcaggggacgggtgggaaatcggtatcaggtcccggcccgctctctgggttcggcctctctgttctccgagcgtcacccctgccctccccgccgcgtcccagcccagggaagggggtgctgcagagcgtcccccggccccagcccatttaacacatggaaagaccgaggcctccagatgggtaggaaggggctcgccttaggtctgtctccagcgatggtgggcaaggtgcatggcgctaactggatgggtggggagggtccatccccccgcccaccccaaccccgccttaggatagtgtggggctgccccgagggaggacagcacacccataccacttcatagatgcagagtgtgtctcctggggatgtggagtacgtgtgcgtgtctttctctccatgtgactttgggtgagtggcttctctgtgagcctcagtccctccatctgttgggactgtaataggactgaccccacatgggatggtgggagccgatgccatggtatactggtgcctggaaacgcagcagttcagtaagaggtggttgtctctgataatacgcggaaaggggtggccacctccagcactcaggctttgatgggtgggcacacccattcagtcacccagcaagtatctgtgaggacctactgggtgctgggtgggccctgctgtaaaactccagccgctacaggggtcaggcttgatctctcctccccagctaataatcaaatagtggctaccatttagtttacacagaataagctgaagcctcagagaagcaaaacgtcttgcccaagatcccagagtgaagttgcttgagggaagctgccccacccacccctttgattgacaagtcaaggcctaggtttgagctctaagagaagggccacctgtctggctgggatgctggcaggactggaaatggcagggctggctgaggatgggggctgccagaagagcccctcttcctggtgtacggccgttgggggtagctgaggtcggtacagtatcgattctgtcaccacatccgggggctggggctgaggaaggaagtctgaggctggagtgaaaacccaaaccaccacctggggaactgcattgagcccagagggatgggcagggagcacaccacgtggagcccacgaaggctccccttggcgtcatctaagggcctcctgcccacctgcaccctttttcctgaagggcagatgactgtcccagcaaaacgctgccatgtcctgagtgtccagacagcggcctccatcctttctcgtatgttcactggggcctgctgggggactggggcacagccctttacaacccaggaactgggcattagtgccctgtggcagaggtgctaggattaccgaggacgcctggctggtaggtggtggaagcctcctcgagacaggagcagcggtcccctccgtctcatctggagcatgtggacacctgctccctctttttaaggctgtggacccagtgaaatgccatgtaaagcactcagtacagtagacgtggaccactgagaagggaaaggagggacgcatcaggacatgagccacgagggctcgggcacctgcggcacctcctcccagcatggaggagcctgcgccccaaagccatcatcctccactggcaggtgcagccttttccctccctgctc

SEQ ID NO: 1560922 - DNA, 4001 bp, Homo sapiens
acttaagatcagcagttcgagaccagcctggccaacaaggtgaaatcccgtctctactaaaaatacaaaaattagccacgtgtggtagcaggcgcctgtaatcccagctactcgggaggctgaggcaggagaatcgcttgaacccaggaggcagaggttgcagcaagctgagtttgcgccactgcactccagcctgggtgacagagcgagactccgtctaaaaaaacaaaaaataataaaaatgacaaaaacaaaacaaaactcaggtttaggggagagacaacaatgaagataaaaattcaagtgaggccagcttatgatatgaaagagtacttaaagcctgaacaaggtcactaaaggtgtaaatccagacttctgtcattcattcattgagccggtttcactgggcactgcagtatgccggagcagcagggaaggcagccatgaaaaaggcagctgcccccaccctcaagagggaccaagggccatagactgctctaaggtgctgagagcatgcccatctatactactggaatagtgagtggatgaactggcttctggctgtgtcttagaaaatcacctgggggcttttaaaaatactgatgtgcagattccatctcactttgcagagattctgatttaatttagcattttcgtggcaggagccatggacatcataacttttttttttctttttctactttttttcttttttagagatagggtctctctctgttgcccaggctggagtgcagtgacatgatcgtggctcactgcagcctcaaactcctaagctcaagaaatcctcccacctcagcctcccaagtagctgagactacagacgtgtgccacctcgcccggttaacttttttttttttttttttttttaagagatggggtctccttatgttgcccaggctggtctcaaactcctgggctccagcgatcctcccacctcagcctcccaaactgctgggattacaggtgtgagccactgcagctggcccattttttacctttatatttaagcataacacagtcagttacagatccaactccttcttctcctcttttcccccttctaactactgcacttgactagttttataaataaataagtataacatatgttcaggaaaggccgcacatcacaagtgcacagctcaatgaattttcaaactgtacaaagcgtgtcactagcatcctaatccataaatgaaagtttagaccagtccctaaagagcgccttcatgaccccactctgtaaccatcttccagaagcccccaactctccttatttttttttttcagagggagagaaaggggtagagatggaatctcactatgttgcccaggctgatctcgaactcctgggctcaagcgatccccccagctccagctcagcctcccaaagtgctgggatcacaggcgtgagccactacacccggcctctcctgacttctaactccccctaccctctcctcccccagatgccccgcccccacccgaggccccgcccccaggccggccaccacctctcacccgacagcaccacctccaccaggtcgccctcctggatgtctccggacgagcgcaccagctgcaggaggttggccgacgtggggtcatgtttgaaaagcaggatcttgtcgtaaaggccgtagaagccacactcagggaactgaggggcgggagagggatgtggcgacggaaaagctcagagccgccttcagcagcgggcggactgtgaccctcccagggcagggccggctgtttcccccggaaacgcagagaccccgcaggccctcgcttcctgcctgccccctcccaaccccagcgcgagccgggcaggatgccagcgccccaattgtacggggagggggcgccggcgtgggtttggtggctggaagggggagctggggtgggagggagagtggctccgggagcgtggacacctcgaattttccggaacctggcggaggtgggaggggatgctgaatgaacactccctcccctgtgcctcctccccaggctcacacacccgccccccagcttccttcctggatctgtctattgttgtcccagttacctggctccaggcccagcactggggtggggcgagctggaaggaggacttttcggggctcctgggaaagtgggggggggggccgggggacttggactcgagggcgctggagataaggagggcgcctgccacccaatgctcaaaggacccaggtgtctgggtcctcagctttgggggcctgggggcaggaaatgaaacctagtagaacagaaagtgaaactgccccggtggggcctcgggaaggaaggtaagcggccctaacacacctggacctggcagaaaaataaaactggggtgaagcctgagcggggcaggctggggacttgagcactggacaaagaagttcacccaagggacaatctgcccccgtacccccactgccaccagcttcccatgaagtgggctgagttggggtggtgagctgggcctgcgggattgaggcatttggtgggcaaaaccctatcagttctcactgctaagagagagtccacagaagaccaggactgccttggccctgaccccttgggaagtttttctctaagcttcagtttccttgtctgtagaatgggggagctggcccagttccccacgtttctctgatgcccaaaggattcatttccaggagtctgaaaagattctggaatttggatattttgggactccaacatgctcacattatagaattatacattctagattcctacctggtatcactatacattttaggatttcaataacctaaataagcggtaatctaatattttaatattctaggagtctgacaagctaggactgtgctctttgaattctttagcattcaaggacctcatccatccagcattctaaaattctaacattttaactttctaggattcaacaatctaggaatctaatattccagcattttaatgttttactatttcacaaacctagaattctaatatttgaacacgaacatgggggcaatttaattgcctaggatgcatattccaacaagttatgattctaatattctaacatttctacagtccagtactccaacacagaagcccactattcttttaacatttcacggtttagacgtggagttccacctggtttcctcttgccataacacccagctgcccaccctggggaccctggtgtccaaaattaagagtaggctaacagcactgtgactaggaaagggaatagagtccccagggtctgtaggagtgcctgcccctccacacatatctcaggcttaggggagggcagaattgggctccgagacctcacttgcccctggcagctaactcaagcacctgcacccacacatgtcaccggatcaccatggccagcccgggttcaatttctcctgtttccaccaaatgggaggcccgggatgggcctggacgtggaggtccgccgacatctgctgccccttcctcccctctctacacctggctggcccctcccttcctccctgtttgctgcagaaaacaacgacatgcagggacatgaaatttggggaggcctctggggcaccccacccctgcccagtcctctctcaaagggatggtggggagaggggcaatggaggggggcaatgccccctatccctccatcacccaaagctcaggtctccttcctccctcttccgcacaccaggccccagacccctctgccagcgccccctccttcaacctctccccgagctggatccagggagcctgcgccctcaccttctggtccacgatggaacaggccagctgcttcacatgagccagctcggaggcggcgggcaacagcacgaactcgcgggtcagcccgatctggatgtgaaaggagaccccggaacccggggccgggatctggggcagtagcggtggcggcgactgcagctctaggccgccggggggcggaggagaccccg

SEQ ID NO: 1560923 - DNA, 4001 bp, Homo sapiens
cggcactttgggaggccgaggcaggtgggtcacctgaggtcaggagtttgagaccagcctgaccaacatggtgaaaccctatctctactaaaaatacaaaaattagctgggcctggtggcgggtgcctgtaatcccagctactcaggaggctgaagcaggagaatcgcttgaacccgggaggcggaggttgcaatgagccgagatcaagccattgcactccagcctgggtgacagagtaagactccgtctcaaaaaaaaaaaaaaaaaaagtggcttggggagtcaggccatcgcccccattcagacacccatcccaggccctgaagacttccaggtgcggccaagcctgaggccacctctgggaaagttatttcctccatccatagagccccaggtgcaggagacagccaagagggtgggaagtcattacagtgacccctgggagctgcatcctgacagctgagagctgacctgcccctccagccaatgccataggtaaggggtggaaggacagaggccccatcagattacatctcttccagatgtgaccactatccaagtctccaagaagggccacgtcacaggccatgacctactaggctccaagcaccctccctccagctctcccaagctagcggggatgcctataagaagaaaggtgctgagggggtttcccactcgggcctatttctcaataccactgaaaactaccgccagacaaccccagccccagagggcttgaaacgcaagactgaaacctcccccacatggctgcacgagaaccaaacctcactcgaaaccatttcaggcacccactctcaggaccccagggctcaggaccctgcacagggcttcaggaagaaggaggtcatctcgcaccctcacaaagacccgggggagataaacggctccagtagggtaaagctctcagcctacatatttcccacaactccttcccagcggacataccctcctccctccgcccgccaggaagaaatccgaggggaggtgggcttcaggacacgccccatgaaaaagatgtccctcccacacacccagaaatggccacaagggggtgcacggcgcctattaatgggaaaatctctatctagatgccccaccaccacccagagggaggtcacaggggcatgccccatcccccaactcctaaagccctgggcgagggggagaattctgggaggggaaacggggtcggcgggggaccccattcttggttttcctccagtccctaacccagaacgcacaaaaccgggtccgatatcccaacagatgcccccggagctcggaaggaggttggtaaagggctgagaagcactgctcctcccaagagactccccacatcgtggagggccccaggtcgatcacaccccacggcgtgtgcccaggtccccggggaggagggctgggggcgtcaggagggtcggaccccctccccgcccccctgggcgcccctccccggccgggggcggggcctttgtcccgcacgtggagcccgccgggccactggactcggcacaccccctccccacccaccgcgcagcggccacgtgggggcctggccggaagcgcccccagccctcctccacgtgggaggggggataagaccctccgctaggccggatgccgaaggcccttggaagctagggagccgtcacctcaaacgatatccccggatgtggaacgtgcggcgcccccgtgtgcggcgggggacctccaaccccatatcgccaacttagagccctttccccaccacagaggcgtgaaacaccgacccaaagccgcctcccgcccacggcggcgctccaagcgctcacctccatgatgcagttcgcggcctcggctgccgccatcttcacccgcacctactcctcctccggccgccaagaccccccctttctcctcactcccccgggaccgccttataccagagggtccacggcccgcctaccgcgaccccgctggaagatttcattggcaatggaggcggcccgtctgagaataccgtctagtaattggctagagaatacgtccatcataggtcaggggtttgccaactctggcgtccagaatcccgccccctcaagtcgacccgggatggggaaaactgcccgtctattgcaagaagcgcgactggtgattgggcaaaatccaccaggaatgccctcccctttacacccagcaccgcctcaaagcttcccggggagccccgcgctaaaggggcgtcttgaaacacctgtccatcaccaaaacgacccgcctcctaatcgctgccattggtttatccggaagcgacgtcacgcagcctttggcccaccctcgccaagcggccggcctcaaggagaacacggcaattggcccacgggtagggaagaaggcggggcttcaggcaccaacgattggctcaaaggaattatcactcctcgtccactcggtggatcctcccaacccggggggagtctggaggaaaaagggagcttgtgctcattacctgggggaaaaacggaatcggtgagaggcccagagagaggaagggcatagctggggtcccgaagcaagtgaggaataggagtccgtcgtcaacacattaaatccctagcccttgacataatcattccaagttttttaaaaccatcaacccctctcaagccacttggtttttgccaagtccctccccctgccaggaacgcccacctctctttgtctggtcagcttctaaacgtgaatcagagcacagcttaggcaccacttcctccgggaagctttccttgatttgcagaaaaagttcctagttgaatgaagctgaatgcaaagggccgaatgcgtgggtcctgcccctcctctccccgatccctctacttccctctgctcacacttctctccaatcccggaatgagctcgctctttggtttctgggcctccgcgcaggctatactctctggcgtgccgctggcaaacgcctgagacttaaaatttacaatagggttcgggcgcgatggctcacgggtgtaattccagcactttaggaggcggaggcaggcggatcacttgacatcaggagttcgagaccagtctgggcaacatggtgaaacccccatttctattaaaaatacaaaaattacgccaggcggccgggcgcggtggctcacgcctgtaatcccagcattttgggagaccgaggcgggcggatcacaaggtcaggaggtcgagaccatcctggctaacatggtgaaacccccgtctctactaaaaatacaaaaaattagccgggcgtggaggcttaggcaggaggatggcgtgaacccgggaggcggagcttgcagtgagctgagatcgcgccactgcactccagcctgggtgacagagcgagactcttgtctcaaaaaaaaaaaaaaaaaaaatttggccgggcgcggtgactcacgcctgtaatcccagcattttggaaggctgaggtgggcggatcacaagctcaggagttcgagaccagcctagccaatatggtgaaacccccgtctctactaaaaaaacaaaaattagccgggtgtggtggtgggcgcctgtagtcccagctgctccagaggctgaggcaggagaatcacgtgaacccgggaggcagaggttgcagtgagctgagatggtgccactgcactccagcctaggcgacacagcgagactccatctcaaaaaataataaaataaataaaaataaaaataaaaaaattagccaggactggtggcacacgcctgtaatcccagctacttgggaggctgaggcaggagaatcgcttgagctcaggaggtggaggttgcagtgagccaggatgaagccattgcactccagctcgagcgacagaccgagactctaactttaaaaaaaaaaaaaaaaattgaaaagcatggcactaaacaaaccaagaaaaggacatttgtttccagtgtttgagctgaagcaagaggagcccagctgcaaatatgcaca

SEQ ID NO: 1560924 - DNA, 4001 bp, Homo sapiens
cccagaactttggggggctgaggctgggggattgcttgaggccatgagttagagaccaccctgtgcaatacagtaagacaaagagaaagagagagagagagagagaggagggaggagagagaaggaaggaaggaaggaataaaggaaggaaggaaggaagggagggagggagggaggggagagaaggaaaaagaaaagaaggaaggaaggagagagagcaaaagaggaagaggaaggaaggagagagagagaaagaaagaaaaaaagatggagtagggttgaaagagaatgtggagataaaaaggaattaatgattgaatgaacaaactaagaccccattggcctaatcagaacttacacccagccagctcacacccatgcagctgtgttgactgagaacacactgatgtacctccttctaattgataaacagcttctatcccaatccctcctctgagagcctccagcctccaggctcctccctgagaacccagatgaccctgattccatccatttcaaccatgcctgggagctacagctgcacttctgctggctgttccaagcctggaggtggccgtagcattttgaacatctggcgtgcggtgtggccgcatctaagtccaaggcactctgtccccgacagtcccgcttgagatccttacctgcccagagtccatagcttcagccagcctctcggggctcagctccaaggaggctcctggccttctgacccacgaggctagctccttctgaaatggggtggtaggcggggtggtgaggggagcccgatgggcagccgcgccctccccgcacccccgtctttgcactccttacacagagccgagtactggtcagcgccgtcaccttcagctgcatgaggctggcctcagccaggctggggggctccaggaggccccgtgacaggtccacacaccgcagcatagcaccgaggttcccctcataccacgcctcactgcccagccagcaggtgtcagggcccgaacagcaaagccccttcctgcgtcctcccagcctccctgggccctggctccctactcacccactcttggcagcagagtccggctcctcctcagtgggcactgccagcagtggtcggaggctgagggtccgcagctgctgcacgcagcccttcacctcctctgctgtctcaccagccacaaactgcccatagacggatgctcggagaaatgcgcctgagagccgggagcccaggagtcgccgagaccaggcctggagctgggtgacagggagcgagggctcagcgccaggctatgaggagcctccaggctggtcctcaggatcactgctcaccaacagcccgtgagtgacgagtgggggccaggcacacagccggagaaccagcaaggcccgtgtcagctctcctgtgcccttaaggtggaaggccccgccatcaaagctcagggactgccagcccctggaggggggaccagcttgggaacagagcacgtaacaggtccggagcatcctgggtccctggctgcctccacaccagggaaggttctctggaggcagcaagttcaccaactgccccttgcccagaccaggggcagtgactgattaactgggcaaagcctcaggatcacaggctccttgggggcaattaattattaacaaatggggacagagttcagagtaacggaaacgggaggtgaaccccagtaacagcccccaagaatgctcagcacaacagcctgcacttattaggtaaccaccatgtgctggggaaagcaggggctccggagcaaggatccctgggctcaggacaccgggctttgtgatccaggacaggctacttaatcacttttgtggcaattgcttcctcttaaaattggaaacgctgtagtgttattgaatacatttgaaaatacggttctcacgtttgtaatcccaacactttgggaggccaagaccgaggagtttgagactaccctgggcgacatagtgagaccccatctctacaaaaaatacaaaaattaactgtgtgtggtggcacacacctgtggtcctagctactcaggaggccgaggaaggtggatctcttgagcctgggaggtcaagggtgcagtgagctgtgattgtgccactgcactccaccctgggtgacaaagtgagactctgtcgccaaaaaaagaaaaaagaaaagacaaataacctatataacccagctgttccatgctaagtacatatcctagagaccttaaacatggacagcaggaaacatgtacaggaaagaatgttcagaggagcagtgtctgaactacccaaatgtccatcaaaaggagaatggatacatatatggtggtgtagttatgcaatggaatactatacagtaatgaaaaagaatggatactgatacacacaactgtgtggctgaatctcacaatgtcaagtgaaagaagccagacaccaaacagggcaagctgtattattcttttttttttttttttttttttttttttgagacacagtttcactcttgttgcccaggctagagtgcaatggcacaatctcagctcactgcaaccttcaccccccgggttcaagcgattctcttgcctcagcttccagagtagctgggattacaggcatgtgccaccacgccccactaattttgtatttttagtagagacagggtttctccatgttggtcagactggtcttgaactcccgacctcaggtgatctgcccgcctcagccttccaaagtgctgggattacaggcatgagccactgtggctggtctatacttttcaataaatataaaagcaaggaaagtgaaactgcagtaaaatgttgggaatacatgcgtgggtggtcaaactatgaggacaagaaaagtaaggacatgattatcacagaagtcagagaggtggttgattgtgggggatgggaggaattgtaatggggtagagggatatggggacttctatatcctattttctttttttaaaatggaaaccatatgtcttaatttttttgttttgttttgttagacgtatccttgctctgtcacccaggctggagtgcagtggtgcgatctcggctcactgcaacccccatctcccgggttcaagtgattcttctgctttagccccctgagtagctgggactacaggcacccaccaccacacctggctaatttttgtatttttgtagatatggggtttcaccatgttggccaggctggtcttgagctcctgacctcaagtgatccaccctacttgtcctcccaacatgctgggattacaggcgtgaagtcctaggtctttttttttttttttttttttttttgagacagagtcttactctgttgcccaggctggagtgcagtggcacgatctcggctcactacagcctctgcccccgggttcaagcaattatcctgcctcagcctcccgagtagctaggattacaggcgtctgccaccgcgcctggctaacttttgtgtttttagtagagtcacggtttcaccatcttggccaggctggtcttgaactcctgacctcatgatccacctgccttggcctcccaaagtgctgggattacaggtgtgagccactgtgcctggcagtggcttctaggtcctaggagtcctaggtcttaacatggatgatgattcatagttgttcacattgtaaggttttttttgttttgtttttgagacagagtcttgctctgtcttccaggctggagtgcagtggggtgatcactgctcactgcagcctcaaacttctgggctcaagcaatccccccacccaccacctccacctcccaagtagctgggattacaggtgcatgtgatcacaccgagggtaatttttaattgtttttttggtagagacagagtcttactatgctgcctaggctggtcttgaacccctggactcaagcagtcctctcaccttgggcctcccaaagtgttgggatttcaggcatgagccacggcacctggccctcaca

SEQ ID NO: 1560925 - DNA, 4001 bp, Homo sapiens
gcagtctagcaccagagttcttaacacacataaactgcctggtcctaaaagagtgctgcagaaacagctctggccatgatgattattactgcatgccttctccctccctctaacccaaagcctctttttcccccagggctgctggtacttacttggccaccacggagtccccgctgtcaatcagggtgggtgctggggaggcccacatctgtccctcagtggtgctgggcagggagggggtccctgaactggatggccaggactcctcaaacagctcaggggagttgggacctgtggctagagccttgggagcttgtgggagcctggatctctgagacctggatgggctcagggtctaagatcagggaagagcacaagaagaaaaagtgtgaggtctcatgggtcatccctgcaggggaaccaggacacacacaaagtctcagtccagaggggaggaaacacatcctgtaatgataacaacctagtgtgatgggggctcagatggggaatccaggtggtagagagggggacaagggcagggccgtggggaggggacaaggggctgtctcttaaatctctcatccctatctctcatcacatgtcttcctaccctctaaaggtcattctcttgctactgggctggcactcagcactctttgaggggtgtcctcaccttgggacaccaggtctggctctgggatggccagtagtggcttcgacccaggggcgcatctccaaagggactatcttgaatggagaaaactggcaggctgcaagaggaaagtggggttcaggcagcacgtggtttcgccgcagccctggggagggggacattagaggagggcagaaccagacaattcccatagattcctggaggagacggactgtcatttccatgaagcaccgttgcacattcaggatatcgacagtggaagggtgagtcctgggagcccgcccctggagcagtcttaacagggagcaactcaggaactgacagccggtggttctcaaccctggatccagtctaggaggggcttttcaacgttacaggcgcgcggttcccattccagaccaacagaatcagaatatctattagtggggctgggcctccgtgtcttttccgcagcgtcccaggtgattgcgaagtggagttcaggttaagaatcgcggctcgccgggcgtggtggctcacgcctgtaatcccagcactttgggattacaccgaggcgggtggatcacttgaggtcaggtgttcgagaccagccttactaacatggcgaaaccccgtctctactaaaaatataaaaaattagccaggcgcggtggcaggtgcctgtagtcccagctacctgggaggctgaggcatgagaattgctttaacccgggggcagaggttgcagtagccaagattgtgccactgcactccagtctgggccaacagagcgagagactctgtcttaaaaaaaaagaaagaaagaaagaaccgcggctggattatatcaccgagcatttcccatacattcctgggggacacgaaggcaaagggtagatggactacaagccccaggatccactgggctccgcctccgcgagaaagttcaaagacaacgcccaggcgtgtctgggggccatttcaaaatgaagaaattcagatctcaagcctttcttggacacctttagaggcaataattccttggggcccactcagagaggaacataagactcttaggggacccccgggatgctaacggctacggctggagaggccaacggctgtggagcatgttgggaattgtagttccagtgcggtggagccctagcgactccagaccgtatccagcccgtcctaggctgtgctgctctcgccgttggtcctccccagcctcctgtagtccctggaagagcgatcggcctcacctgcggtccatcccgcggctccctccgcgcttccggccgctctgctccttcacccaacaggccccgcgcgcatctccgtcgcttagcaacgccctatcagccccgcccctctctgtgcccgcgccggaggcgagcggcctccaaggcgaccaatgaaagagaggaaacagaagtacccggagggaggtgtttcaggattggctgggacgactgcctgcccgacagggcgtgtttgattggagaacctgccgagtgtagcagtaattggcaagaccgtgcaccaatgggaaggatctgaggctgggcttgcggttaggaggtgatctaaagtaccctcgcttaaaagtcccgctttttaagcgccttcttgctgcagaagtcctgtcccgaccccggtctaactaccattctttctgttgcaggggcagtggggcgggttggggggggggcgcgctctgccctctctctaaccgctattcctccatcagttgggccaatcagtccgtcccaacggtcatctaacttctttcttgctgcaggagcagctggttgcatcagttgccaggtctgggctcctggccgaggtagcgggatcaaaatgagctatttccagccccagcgcgcggcccccggggggccagcctgaactgttcatgctcgcgccccctggcctctgcgcaccagaggctgagtcagaggcacagaattaggcccggcctgccgggggactgggcccaaggtctggctgaggataagggtagggagggcctgttctatgtcctcctgacatcctggcggggctaccgcattctccaggaatctgctcctaaagacctccatctgcgtcatcctcagagctgccaggggggaggcagtggattaaagggactggaaactcttccgtgggcctcttgggtcctgggccccaatcaccacgctgtgctccccacacccgcaaggctccccctcctcagccttagtttcctcttctggaaattggggaatcttcatgtcaccttcttgacagcatttgccaggcatccagcaggcgcttaataaatggccaagtcattgtttgggtttctaaataaggctctcctaatggccgggtctggccacggtcccagtgtccctgggcagccctccgaggggccggcacagggcgcactataaatgagcggctgcgcacgcaggggcactgcaacgcggaggagcaggatggagatccctgtgcctgtgcagccgtcttggctgcgccgcgcctcggccccgttgcccggactttcggcgcccggacgcctctttgaccagcgcttcggcgaggggctgctggaggccgagctggctgcgctctgccccaccacgctcgccccctactacctgcgcgcacccagcgtggcgctgcccgtcgcccaggtgccaggcctggggaggggtgaactcgaccacttccattgccaggggtctggggcagcctggggtgggaacatgtgagagaatgttcgttggccttgggcggggtggagagtccgcagctccgaagggcttccggagtcaatgggaatctgaggcccgcacactgcagcgggtgggaggtccccgtcgctcttaggtggggggcggggtggggggctctcagctctccagagaatggaaggcctgggtcactctaaggggagtcttgcttactctgaaggaggctggtgatccgggaaatctggggaaaaggaggcgggcagtgactcctgaggggaaggaatgttcttagtctcggggaagagttgagagactgtgtgcggtggcccgatatctccagaagaggaggggagagggccctgcgacttgaggaagggttcccggccactctgaagtgggggaaggctaccagtagctgccgaggtcccgtgactcgagtgggagagtaggcagaggaccctggagacggggaaaggggcatcttggcgagtttggcggggctggcggagaagggacccggggctctgaggagggagctggggaatcagtgccctggggggcacgatgacttcggattcgctgacaccgggggagggcagaggttcctg

SEQ ID NO: 1560926 - DNA, 4001 bp, Homo sapiens
gacacacataccttgtacccagcaccactcctgtatgcctcccattcaaagttcccctttttaagcccctctccccagcctaaagcttgaaatggtcttctaaagacattagcttggccatttctcatctgcgagcatttgatcagtaaagctgctttactttcaccaccccccacttcctctgcctctgagtagcagaaacttgagttggttacattatcggtctcttcccgcctccaggtctttgtacaggagtcccttgtaactaaagtggccctttccttcactttgttttttcttttcttttcttttttttgagaccatgtcttgctctgtcacctaggctgcagtgcagtggcgccatcatagctcacggcagcctcgatcacctgggctcaagcgattctcccgcctcagcctcccgatagctgagatgacaggcacgcaccagcacgcccggctaatttttaaatttttctgtagagacagggtctcactgtgttgctcaggctggtctcaaactcctgggctcaagcgatcctttcgcctgggccacccaaagtgctgggattacaggagtgagccatggcgtctggctctcctcacttcttagtagcccagcatctcctcagccttcagctctcacgttccacctccctgacccacacgccccactctagactacaggaggttgctttgtgataacgtgtcccgcacgctctgcgtgtctacagtaaggcacttcacacatttgtgattaatgaagtaattatttgataaagcctgtctgccaggcatcaaccaaagctctaagagggtagcgaacaatttttgctccttccacatccccagggccacaccatggtaggcgcatattaagacttttgggtaaacaggctgtaaaaggccgggagcggtggctcatgcctgtaatcccagcactttgggaggcccaggcgggtggatcatctgaggtcaggagttggagaccagcctggccaacatagtgaaaccccgtctctactaaaaatacaaaaaactagccgggcgtggtggtgcgcgcctgtaatcccagctactcgggaggctgaggcaggagaatcgcttgaatccgggaggcggaggttgcagtgaaccgagatcgcgccactgcactccagcctgggcaacaagagcgaaactccgtctcagacaaaacaaacaaacaactggccaggcgcggtggatcatgcctgtaatcacagcactttgggaggccgaggcgggcggatcacgagatcaggagttcgagaccagcctgaccaacatggggaaaccccgtctctactaaaaatacaaaaattagtcaggggtggtggcgggcgcctgtaatcccagctactctggaggctgaggcagaagaatcgtttgaacccgggagacggaggttgcaatgagccgagatcgcgccactgctctccaacctgggcaacagaacgagactccgtctcaaaacaaacaaacaacaaaaaaacaaaaaccaagctgtaaagacccgcctttttcctcacacacttcttctcccagacccaggagcccagcctcccgctccccgtggtccccatcacactcacctctcctctccgcgcaccactgtttctagcgttagtcgctcaccgatgacgtctcactctcgcgccgttatagaggcaaagctactctctgattggtccccgctcgcgatgttcctggccgcatttgaaacaacaactttattagcacctggcactaggcggagagaggcggtaagccgcgaggaggaaagggactcacgtcccgctgtggaccgatcctgctaagcagagaatcgctgtggccggacgacggggcgtcgagacaagaagaaagacgttggcaactcagaggactggttgcggcgttagacaagaaagcaaggcctttaagcagggattcggggtggacgtgggggtgggccgaagcgaagccggaaacaggaaactacaactcccacaaggcctagggccacgtcccgccgtcctcggctgctgagcctgatgggacaagtagttttgcgaacggcttaacctacagattgaagaggtcggaagctctgaggcccggggcttccggaggtcgcggagatggaattggagcagagagaagggtatgtggctgagcccttgtgaaaaagtgcgaatcccagaaaacagtgcagctgcattgtgtgcaaccatatgagcttttacgctgaggtctgatgggggttgtagttcatgcaactgctttaccttagaacccttttatggactggggtcatcctgagggaggagaaggttaggggtttggactgctggatctgacagactaggaggttggaagccaggactcttgcgtctggttgagggttggggcttggactccctgggtccttggagagaaaaagtctggaggtctggactcttgcatcctgggaggagggggtcagggcttgaaccctgtgggtgctgcgaagggtgggttgcggacttggacttctgggtctgagggaggagggctgggagctggattctacggtctgagggaggaggggctgggggcctggattctaggatctcagggaggaggggttggggtctgggctcctggttcagtgggagaaggggctgggggtccaggatccagggcccctgagcctttccctgcctctcaggaccatggcagccgtgggctttgaggagttctcagcgccgccaggctcagagttggcgttgcctcccctatttggtggccacatcctggagagcgagctggagacggaagtggagtttgtgtcaggtggtctgggcggctcagggctccgggagcgagatgaagaggaagaggcagcccggggtcggcggcggcgccagcgggaattaaatcgcagaaagtaccaggcactaggtcggcgctgccgggagatcgagcaggtaggtgagtgcggatcccccggttttggggtcccctggcctaaactaccgccccccgcaatctctgcctttccacatgcccagcctttcttggcttgctgatatattcagtcatttagcttatatattcagtcatttagcatgcattatgtgtctggccctgtgccgggcccctggaagggccatctcccgtggagcttccctgacaacgcagatgggttctctgatgtctcccgggggcctctcaatgcgtggcaccgctcacaggtgaaagcccaagctcttcacatctcccatacccctgccaggattcactcctctcgactcattcattccgcctcttgagtgtctctggacccttctcctctcctccatccctatggctgccattgcaaactccagctgtctgggctgaatgactgcaatagcctccttgctgagaataaggatgggctgggcatggtggctcacgcttgtaatcctagcactgggaggctgaggcaggcggatcacctgaggttaggagttcgagaccagcctggccaacatggtgaaaccccatctctactaaaatacaaaaaaattagccaggtgtggtggtgcgcacctgtagtcgcagctactagggaggctgaggcatgagaattgcttgaacccggaaggcggaggttgcagtgagccaagatcatgctgctgtactccagcctgggtgacagagtgagactccgtctcaaaatcaatcaatcaatcaatgaggattaaacagcaggcagggctcagatcttggcaggccaggaacaccaggacaagaagtctggatatttttttttccttgagagtgaaggagccactgaagggtttcaaatgggggaggaacagcatcaggtctggatgcctgaaactctgaagacagttgtattagtctgcttggactcccagaacttatcacaaatagggtccctcaagcacagaaattcctgtctgacagttctggaggctagacatccaaggcaaggtgtcgacagggttgtg

SEQ ID NO: 1560927 - DNA, 4001 bp, Homo sapiens
cgaaaggggaggggcgaggcaggggcggacgaatccggcgagaaatgaagcagcgaccagcagcctcaaaggcaaccaatcagaggagacacagcaaggggcgggccacggcacgggccacggccaattaggaggggcggaactttcaacagccaatcagctgcctcggggggagggggagggccagcccaaagcggggcgggatgggggccgtacctgccgggtggtggttggtggcatagctttgcagtgggtggggggccgcataggcctggcggtgtaagatgtccgtctcggggtgcgaggtcctggagctgccataaaccaagctggggggaaaggggagacgtcagggggttcttccaagctgccttctgagaaggaagctcagaaaaccccccggggagttggggggacccttccagctgaccggggtggggggtgttaagctaaggaaccgtaggccctaaaggggagaacacaagggaatcggggtgctcaactaaagagccacagaaatggcccccactccagagcccgaataaagagagcccggatagtctcacgtttacaaacaggcatgctcagagacgagactaacacacagaagagggtccaaggcagagcaagcgtcttgatttgcaaatgagagccctcccccgtcgaccccacaaaccccccccagcccccgttccggcgacacaggctatggggccaacgccagaggtccacatggacgcctcctcttccgtagacacacgggaacacataggccctgaacttcatggggtggtgcagaacaagttgggagcaggaggaagatcggttcccaagcggcaacggtttggggggtggagagaagagggaataagacctggggaaagtaccaggtacaagtgtgaacaagaacaccgaccatccccgggggttgaggttcaaatgcatgggcccatgcaatgccaggtatgtgtgcaaacgggtatccaactcacccgtggggaagaaaagatatagacggaggaatcccacacggaaaatcctgacacacttggggttatgccctgctgggaaatccaggtgtgttgggggggaggtgctggggataggtgaagtgtgagggcgccacaccaataagcaacaggaaaggggcagattcacaggtgaacacgctgccagccacgcacgcacagggcccacgctcagacacacaaacacacacccgggaaacatccgactcttcccatgcaacggcaccagtccgtggccagactcaagagggcaaacgctccactccttgcgatcaactaggattctctgcctttgggggtgggggcattaaagggggcgtgtcccagacgcctgaccccctcccttacacacacacaaccccagcttaggaagggggcggggccccgtgcccactctgcgcgcggaattcttgggggggcgcctagtggcgcggcctcgcacagtcccggaacaataggacctgagagggggttcgcgccccccagatctgcgttctaattcttctcttcttcccacctttgcaagagcagtgcctggggcgcgggggggaggggtcaccaagccgggaatccaaggatggggggaagtccaggccttgcttcgccagtccctcccaccttcccaaggccttcccgtccgaaattgttttgcacccccattttcccgctgcaattctccctttgcatgccggagctggctttggcggagtttgcaatttgcaaactggggcggcggcgttgttacaaaccgaggaaggccgctcccttgcaagccggaggggagtttgcgatgcacgcgtcgccgggcgggcccggcccggcccggcccggcccggctgggctcccaccccttggcccccttctctaggccaccctcagctccttacctagctttcgctgacctctcgtaactccatcccgccccggcgccgagcgggtccccgaagccggcgctggggtagttcctgtccatgaattggccgcggtggaaattggggggagggggagggagggagggagggagggggcgcgcgcgcgctctcctccgccgccgctccctccgctgctgcttttttttccccccttttctctctctctttttttctttgcagccgccgaaggcccgggaaggccccgggcgggggagggagggggcaggggcggaggggcgggcaagggagggggtgcagtcgctgagccaaggaagggggaaggggggttccccctagaggagggaaggggggaggagggaccccgctgtctccgcctttgccccggcgcttgcgagagaaaagggggggcgcgcgctcgggagggggcgtcccgggcggccccggggtgggtgcaggcgctgggtgctcgctctctcgccgccgccgccgccgcctcctcctcctctgcgctcacggtgcagccatctttgcacaaggcggctgggggaggggggaggggaagggggggcgggcggcggggtgtctggctgcgctccgcttcctcccacaatcccgtgcaaatgcaaaaaaaaaaaaaaaaaaagggagagtgagagagagactgagcgcgagcagggcctgggggtgtagggcgcgtttgcacagaaaaccagttccgatgcgcccgggatcgcagttcatttcattattattttttgcattatttctgctttttttggtctcctttccgaagggtttttatttaggggaacagctcaactccagctccctgggtgcaatgcgagcctgcccgcaccgagcgcgcttgcaaatatgccccccgccctttccctgggttacgaagtgcccctgtaccgcacggggagtgcacgaagacacgcgtgtgcacaggcggggctctgcgtgtgcgtaccctgtggcactggagggggctgtcaggtcatatctgcccatacacaagatggcacagccggggctgggctcctgggtccgaatttccccgcgcgtctgcctaccacgggggcggaactgaccagtgccctcacggtcaggagagtgtgggggcccgtgaggggccaggacacgggaacacgttgccgaaaacatgtgtatatccatacgcggcggaaacgcgtgtgccagggcaggcctcgggccggatgacccctactcccaccattccccactccaagtccagcttcggcgtctatgaggcctagcggcttccggaatccggtatgaatcaggggcacggttcggagagccgggtctcgaaagcagctcttcagtgaggcctcctgaggctgcaagaggaaaggcacactagggagtcaaagatctggctgtttttctccccccttcaaccaggaccactccgaccgcccttggcgtctcagccaatccaggaccctctgggcacaggccccaccctcctatacggctccacacatacaacgctgggccacgcccctagaccattgcatggggccccgcccccgcactccaagccccgccccaggtaagaaggcccaaattccaagtcccgcccctgagcccaggttcctcctccaacgtgcccacccctctgcgccccgcccccgggcagaagccacgccccatacctggtgtaggggggtggaggtgcgtcgtgtaccccagaggctgccagcgcctgctcataggtggggaggcctgggggtgggggtgggggtggaggcaggggcgtcggtgggcccagagggttcaaaggactcagagggctaatgagcccggccctggggacagcaaaggtacagttagcagaggcaacttacaggatacctagactagggaggaagagaggggatctaggagacggagactcagggtgacactgggacagagctggaagggaggtggacttcagaaaaggagggtcaccttcagcctagccttacacacagaaaagcgcctcaaatgacaggcagctgcacacagacaggtagacacagaaatcagcaaccacagagacacactctta

SEQ ID NO: 1560928 - DNA, 4001 bp, Homo sapiens
aattttttttttttttttgtatatttagtagacacgtggtttcgccatgttggccaggctggttgacctcaagtgatccgaccatgtcagcctcccaaagtgctgggattacaggcatgagcctccatgctggcctccctcagactttaaaatcaagctattccacgatattccccaaacctaataagaaagtgattacctgtgtcttttctttctgcttgcccattcttcattatctttcagacccagctgagatactactcctaggaaacccatagtcctcagagtccttctcctcttcctccccagaggtccctgtctctccctcaaacacaactttgacacccctacacctctgtgtctggatctgtctccctaaacacattgggacaaggtcaggagctgacccactcatttactactcattcagcaagcacttgtggaataaccactgtgtgcccggcccagttccaggaaagtggattgaaaacataaacacaatgaataacactcatctctgtctcagtatcaatccacctcgaaggaatgaatacatgggaaggtcccacctggagtgaggctacaagaacatgaccaggacgtttagcagggagtgagccccccacctggtcccagagaagagggagatctgagaagacactgaggtctgagattaatttggggcagcgttgggggagaggcgcgaccctaggtggccttggctatggatgtaggtttcagagctcagacatacccagttggcctgtgggtttagagagagtgtagaggctgcagatctgcaagatgatctgccggagggacgccagactggacctgagccctggaggcgtctctaatttcctttctctttctgcaccttcttctaccctccaagcaggtcctatggtgtcttgaatgcaaagatatgtagtttatatgttatgccacgcgcgcgcacacacacacggtgttttgagtaggggtcctgtgatgtcttgaatgcaaagatatgtactttagatttcaacacacacacacacacacacacacacacacacacacacacacccacggtgttttgagtaggggaagcccacgagtagataggctcactaaagccctggcgcggccttagagtggctccttagaagggagcctcgaattttcacattttgtcatcttccttttctgtcccccacatcagtagaaaataggagcgtcccccccagccaggtgcattcgagccaccccttcaagggaatataagaatggactcgtccactcgctcccctccccccaccacgtgaatgggtcacccccccccccgcaacagtaggtggtcccttccgcacatttcactctgtacagcaaatggtttcttcccatttgctagacagagggctagattttccccgcccactctcgactcttcaggtagttcgcccctccccgtgaccggtgggtggtttctccctcctccccgcctcgggagctggatggtctcgcctctccctccccccaccccgtgccgggtgcgcggcctgggagtcagcggcccgagcgggaagcgccgggcgagcccactgtgcggccgtcgtgggggaagcgaaggttcctgattccacctacctcctaagtgaaggcttccgtccctggagaggaggcggcgccctgtatcggccttcgtcctccgcgggtgtgctagcgttgggacggtcctttgttgccgcgaggggtaggagtgggcgtggcggagccagctccgttcggaacactcccgggccgacccgactcgctcatcctgcaggagctgcggcgccaagatgagtggagaggagaacccagccagcaagcccacgccggtgcaggacgtacagggcgacgggcgctggatgtccctggtgagcgttcccacctgggatattgaggagtccgggggcgcggggggtggctcaggagaacggctggttcgtgccactctcactacctgattgggaaactgagggcagttgaggaggcgctgcctaagggagcagggcggggcgggccctggagcgtgcatgccattgactccctctcgcgcgctcccgcagcaccatcggttcgtggctgacagcaaagataaggaacccgaagtcgtcttcatcggggactccttggtccagctcatgcaccagtgcgaggtgagggcagtccctctccccctgccccatccagccctgtgtccatgctgacacatctggaccagaacccaggccaggtgaggtattatgagagtacccagattggcctcaggcagcccgaggctctgagaatcttggtgtaaggtgcaacattctattgagaaagaaatgtatgccttggttttatcagattggatttgtgtataatgtactaagacctaaaatgaggctttcctgccataggcttgcctaaagtgaggctctttcttgtttgctttaagtagtgcgcagccctgttgggtttacacaaagctatagtcactttacaggaagcgaagggcaactctaatggcactccacaaagaggactcaatcataataatatctttccacaaagcatgtccaactgtaatgggtttcatcaaaataagtttcaactgtaatgccattgattcaatgcatggctcaagcagactggattttcatgaagtgagtcttgcttctatggggcttggtttgttttgttggttggttggttggttggttggtttttgagacagggtcttgctctgtcacccaggctggcgtgcagtggtatgatctctgttcactgcaacctctgcctcctgggctcaagtgatcctcccaccttagtctccgagtagctgggactacaggtgcacatcaccatgcacctggctaatttttgtaatttttgtagagatggggttttgccctgttgcgcaggttggtcttgaactcctgggctcaagcagtccgcccacctcagcatgagcaacagagcctggggcttggtttaaagtgagagactctaggcagggtgtggtggcttacgcctgtaatcccagcactttgggaggccaaggcaggcggatgacctgaggccaggagttcgagaccaccctggccaacatggcgaaatcctgtctctactaaaaatacaaaaattagctgggcatggtggcacatgcctatagtcccagctacttggcaggctgaggcaggagaatcgccagaacctgggaagcagagattgcaatgagccgagatcgcactactgcactccagcctgggcaacaagagcaaaactccgtctcaaaaaataaataggctgggcaccatgggctcacgcctgtaatcccaccactttgggaggccgaggcaggtggatcacctgaggtcaggagttcgagaccagtctggcccacatggtgaaaccccatctctactaaaaatacaaaaaattagctggacgtggtggcgtacacctgtagtcccagctactcaggaggctgagacatgagaatcacttgaactagggaggcggaggttgcagtgagccgagatagtgccagtgcactccagcctgggtgacagagtgagactctgtctcaaaaataaaataactctgtctcaaaaatataaaataaaataaaataagtgagagactctaatagatttctataaagtgaggttcagccatgctggagtttgctccaggtaaaattttaagactgcttccatgaagtaaggttcttccataatggcatttggttaacacctggacagagggggatggtccatgcggacagtgcccttgtgcccctaccacttcttgcccacaccacttcttgcccacagatctggcgcgagctcttctctcctctgcatgcacttaactttggcattggtggtgacggcacacagcatgtactgtggcggctggagaatggggagctggaacacatccggcccaaggtgagcggggcttgggtggggctctaaaacatcttttgg

SEQ ID NO: 1560929 - DNA, 4001 bp, Homo sapiens
agaggagtctgatgttccagggctgggactcaaggagtttagggtgtcctgtgattccggggctcccctgctaagaggcctcactgtgaggccgggggcgctgccttgccagtccgcgggatgatggggtgaggggccaggcgtgcatctccagccccctccccatccccaaggcccccacgtggacatggagctgaaaggtcaaatgtgctttaatgcggggtggctcccaggtcctccctgggccccgggggagtggcgctggctgggcctgccggctgcctggccttccttcccggctttcccttcttggccgtcgaggcctttctcttgccagacagaatgggggccggggtgttggtggcagggggccccgggtggggcggctgctcctcgtcgagcgccttgaagttgaagaagtagtcaacgttggacacggtgtccaggatctcaggcacgctgtagtcaaaggacagcagctcctcgggcaggcacagcgagcggatgtcatcggctgagttcccaccactgctgtcaggcagggccggcccagggacctcgcacagggtaccctcaggctcagaggcgcctggcaggcagtcgaagagcttcatggcgtcctccagcagaaccttgtcaggcagtgccaaagctctggccgtcttgggggccttggccttgcctgctcccagcagggccccctccttgacctcggccaccttgagctcgctgaggcccggtgggtacaggggcaccccaggtcgggccccactgccctgcagctccttgacggggaaggccaggggttcgggcccagggaagtggccgaggtgaccctggaggtggctgtaggcgtctgggggcagtgtgggctctgcaggcagcgtgatgagtacagggggcggcttgttctccttggggggtgggggtggcagcggggccgggccttcctctaggggcggtaggggcagctccacgaaggcggcgggccctgcgtcccccacaaaacccagagcctctggcccggggccctcaggcgggaagtagggcaagagaaactggggccccccgggtgcctgctggtagtgggggtatggaggcagccccggggccttgaggtagggctgaggctccaggaggtagctgcctggggcggaggggacccccgctggccccccgctgcttgctgccagcttatacagggctgactggcccaggtcgggggtggtccactcgatccgatagatgcgggggtcgaagaagcacccgcatggggccatctggaaacctgtgggcggcaggcgggtgccctgagagcagctgctgcctgaggggcccagcccaagcctgggggcctgtttgggagatgccacaagaaccttgccattggggggcccctttgggggacgacatagatattgctttggggccctggctgggtgatggatgacacagagcttgtctttggggctcatctgggggacctgtgtgaagcatggggagcagaggccatgccttcaggctcccacttagggacggggcaggggcaagatgggcctgcacactcaaacccactcccagcctcgtcaagggctcaggggaggccggtacctgctggtggggctggaaacacctctttctctgggtctgggggatgatacaggttcaaggagcctgtggacaaaggtgcccaggtgggtagggcccttaggcgggtgggcccctgaaccctctccagcaggtgctcccacccacccgatcgtacccatagcgggaggaggctcggcacaggtgggagcaggctggttgcccagcacctcagccccctccagactctgcgggctgaaaccttcctggggagctgcaggggcacagaacggtttggggtgctgcatggggcagcggggggcccggtccagacaggccaggagggcggcagtgggagtgcaagtggcccaaccggagaacaggctgagaacctggtggggttctgtttgcctggttactcggggcagcgggttccagcctgcagcgcgcccactggttggggttctgggtgttgggggcaagcaggggcagacgttggcagacatggtcatcaccatgggagggaggattctgggccaggcctttgcctcttccagcaacacccccctaacagctttgaggccgcctcctccaggcaggctgccctgatccacacccacacaggctgaggccccccgggtcctcaacccgctaccttcttgggggtcaaggcctctctgggcaccagcagcacccagcttggggcagggcccatggaggcagctaagaggtttggggaaggtgggggccgaggaggggctgcttcagggtcacagaaaggcctggattttaaaagaataaaatttattgtactctcctcgccccagggtgcccctgggaaagcctgaggctacttgtacgcgttggccttgtgcttcggcaagaaggcgaagctggggggcactggcccaaggagcatctcgctgtgggagagcaggtggaaagcgaggtcaggcccaggacctgcaaagtaccctccgtgaccccgggcccccgactgcagctccccaactccagcccacccaggcacctgatgcggatccagtcggctgccttctggctggccatcagcgtctccaggtagtcgcggcccaggtagtagggcggccgctcgttgatcctctgtgggagccgctccagcagccccacgggcacgtacctgcggcgggtgggcgggcaggacaggcttgagtcagctctaaccagccgcggcccacgcgccgcccaccccagccagccccggtgcccaccggcacaggaaggacagccactcgagcagaaagcgccgggtcttctccacgccctgcgtgtccgagccccagtgctccaggccgtagttggtgaagtcccgcaggatgtccaggcgctcggacgacgagatgtcccagtgccgctgctccttgatctccgtgaagagccacggcttgagcagggcgccactgtgggacgggtgacgatcagtgggcccagccaccagcctgcctgggatcgtgtggcctctgcttccatggcctggcctgagccggagcccagaccacaaaacctacaagcctagtaagcctcccagctgcatgcacacaaccttcaaagcacaggactttcttttgttttttctgagacggagtctggctctgtcgcccaggctggggtgcagtggtaagatctcggctcactgttcaacctccgtctcccaggttcaggcaattgtcctgcctcagcctccctagtagttgggattacaggcgtgtaccactacacctggctaatttttgtatttttaatagagatgtttcaccatgttggtcaggctagtcttgaacctccgacctcaaatgatcggcgtgccttggcctcccaaagtgctgggattacaggcgtgagccacacacctggccaaagcccaggactttcaacccacaatcatcagatcccacagcagcagcaatttccagtcccctctgccgcaacgcagctgcaactcctgacatcgctctctgctcctcccatcttgggaccaacagcccaccacagaacaggggtgggtgacggcgtgttgggttcagggcactgctgctgtgcatgaagctggatctctaacatccctgggcacttaccgggcaatcatgatcccggtgacaccagtctgcatggcgcggttggcatcctcaaatgacaagatgtccccatttcctgaggagacagaggctggggtctcagggagacatgggcaggtgggaccctggagttctgctcaccagcccttcaggagttttggctgacccagtggctcccatcagggtggtacgagggggtcccaagtgggaaggcgaacagcccagaggtgtgagtgaccaagggtggtaggggagagggaggtggcttcccggaacacccaccgaacaggggcatggggc

SEQ ID NO: 1560930 - DNA, 4001 bp, Homo sapiens
gcgcaggagccctgggtgttccgcgggctgagggcccagaacgggctggggaggagagaggggtggcgctggagctcagggagcgcgaggccggcctctggagacccccaccggcgctgggccgcctcctggcagccgggcttggctcggtggtactgtgctccgaggcgctgctcactgatttccgggggccctctgtcgggggccgtggccgggcactcggagctggccgggggagccccacctcggtgcccgcagcccgggaccgacgggccatggccggggacggggttcctggggtaggcccggaagtgtctggagaaaaagtagaaggccaagggtcaccgatacctctgaggcggctccccttgctgcccaggaaccccactcttctccaggtcacgtacctctccgtgccccagcgctgagggcactccttttgggagcctctgtagcttttcctctggccacagtttcctccgctgagatccggagtcccttctggccaagagggcctggcctggagacagaaggggccacgctcaggcctaggtctttgtttggcttcccaagtctctattttcccatctgtgaaatgggcatgtgccctctctgaggaccaataatggctttcacccaatttgtgcccagtgacctgcaagtgctcccgcgccccaactcgtgtaaaataaaaggttccagactctgtgacgctaaccctggcttaggagactgggggagagggagcaggttacctggtggtcccgctggcacgccctgggctagaaacagggcctgggctggtgttcttggcaggaggagctctctcccctctcccagaggctgggggcctggaggctgcggggagaaggccgagtcacaggtgccccggagaggtggcagtggaggtgagactggacaggtattggaagggggagggaagatgggggcggagctgaggaaggaggctggggtaccagggtttcgggaacttgtcccagcactccgcgttggtcccgctcggggagcagactcgggaatagtggccccgccgatgccccccgctcgctctgccagaggctttcgccccactgctcccgcagctcccagaactcggagggctgcgggagttactgggggagggggtcgaggagagcctgggggcctgggggtcagaagtccaggagcgcgagcagccggcgtccgcgcggcggcccctgccttcgccttgtctctcttgttgtccatcttgcacctgaagagacaaaccggtccgcatcccaggttctggacagctacgccgcctccagagacctggaccctgctacctcactgccctttcgcagcatcgccacccatggacactcaaacctcggcctcggcttccatccgctcggctcccacgcacctacacccactcgccagccccactgctcctcgctgtccccaagtcccaccccccaccgcttttccctaaagcgaagaggccctgcccgccccagcccaccgcctcccccgcctcggctccaattcaggaccgatctccacgcccctgccccttgccccttcagggactcagaccgccagcctcgagagcgggggactgccacgggctcaggatgtcgcatccctccagacccggagcgcacgcccgggtctccccgccagcccccatcggcctcccctggcctccccgagggatgcctgcacctgccgggaggcagagcggccccgctgcccgcgaacgggctccgggagacaaagagccgcgtcccgggcccgacccctcccccagccgggcctggcccgcgcccagcctctccacctgctcgcgtcgcgctcacctccgcctccggcctccggccgctcctcacagagtcgcctggggtggggcccgggccggagcgacgcggtggccgccagcggcgaggaggcgaggggagggggctgcgggctgcggcgccgggggagccgagccggtcccgcccctcggccgcgggcgggagagccgggggcgcgcgctcgatccggacccgggagcgcggccggcggaagcgcgccgagggggatgggggagaagcgcgctttggagagaagggtggcttctctgcggtccgggggaagcctgtttccccagctgcgcctgaggaacccagatagtcaacggttgggactgggggagcaaatccctggggtcctccactgtccttcccaacacatacacctgccccgacccccaccacaaccacctggcaccaaggaccgcctggacgcggataggctgggccctggcaaccaggaggcgggaccaccgcgcctctggcccacacaccaatccggccgctcggtggccctggcactatccagtccttcgcgtctgcgaaagctaggccgcccagggtctctggggggcagccgccctccgccccacacccgaaggtgttccccagacgccaggaaaccccttatctggttggggggtcgagggactgctaagagaatgctgccctgggaatttcaggatgcaaggtagaccccagattttggggaagataaagaaaggaataggagggagagcgacaggagacacagtatattctgtgagaggtgacccagccgtctgcagggtagagcacgcccaccctccacaccctcccagctaacgggatgtcaagtcagcccagacttcctggcagagctgggcttccgggggacaaggttctgtcgacctagcaggtgtcaaaacaagtgcataaggccgggcgcggtggctcacacctgtaatcccactgctttgggaggctgaggcgggcggatcacttgagctcaggagttcgagaccagtctggccaacatggcgaaaccctgtctctaccaaaaaatacaaaaattagccgggcatgctggcgagcacctgtaatcccagctactcgagaggctgaggcaggagaatcgcttgaacccgggaggcggaggttacagtgagccgagattgcgccactgcacttcagcctgggcgacagagtgagactctgtctcaaaaacaaaaacaaacaaaaaaacaaaaacacaagttcatgaaggacgcagaagatcctttacaagggtcccagcccagccggagcgagtgggaggtgtcctgttgctgacttcagccagggcaggggcctcggtggagagcggtgctccaggactgtggcatgaagagggtgggagcctgagggtggaaatggccattcctcagctccctctccttataagaagagtctgggccgggcatggtggctcaggcctgtaatcccagtactttgggaggccgaggtgggcggatcacaaagtcaggagatcgagaccatcctggctaacacggtgaaaccttgtctctactaaaaatacaaaaaattaaacgggcgtggtggtgggcgcctgtagtcccagctactcgggaggctgagtatggcctgagtatggctgagaatggcgtgaacccaggaggcagagcttgcagtgagccgaaatcgtgccactgtattccagcctgggcgacagtgcaagactctgtcacacatgcacaaaaaaagagtctggccttgtcacctctgtcggccaagtcccctcctcatatggcctccatgagctttccgcctggatgtcgcatccctccagacttacagccactttttaccccattccaggaaaccagcgccctgtgccccactgctaaccccatcgcaagctcatatgcacagttcactccctcctggaaatcagggggcctccatgcacaggaaacagataatgcaacttggcatcgggtgaactggggttggggggtagggacgttgcgcccatttgaggttgcagaaatggaaggcagagaaaaatgacagagctgaatgccatgctttgacctccagattggatcatcctaggccttatcttctccctcagtctagcaatgatcacccgtgtgaaccccttgtggcatgacaccagcctgg

SEQ ID NO: 1560931 - DNA, 4001 bp, Homo sapiens
ggatgccacttcccccaaacactcaccttggtctgtctcctcactgggtgaagtatccaggcaggtggttaatgccatatatagcagcagcagagaggggtggcccctcatattttccagacacctagaaccaggtttgttacagctgacaagggccttagtccctgggtaatgaggcagtgcctctctgactggcctctgtggtccacgaatggcaataatagcagccacttacacagcctgtattctgtgccagatactgtttacctatataaactcattttacttttttttttttttgacatggagtctcgctctgtcagccaggctggagtgcagtggcacagtctcagctcactgcaacctctgtgtcctgggttcaagcgattctcgtgcctcagcctaccaagtagctgggattacaggcatgcgccaccacacccgctaattttcttttttttttgagacagagtctcgctctgtcacccaggctagagtgcattggtgtgatctccgctcactgcacactccaccccccaggttcatgccattctcctgcctcagcctcccgagtagctgggactacaggtgccggccaccatgcccggctaatttttttgtatttttagtagagatggggtttcactgtgttagtcaggatggtctcgatctcctgacctcgtgatctgcccgcctcagcctcccaaagtgaattttcatatttttagtagagatggggtttcaccatgttggccaggctggtcttgaattcctgacctcaagtgatctgcctgcctcagcctcccaaagtgctggtgctgggattacaggcgtgagccactgtgcccggcctcaactcattttacttttcacaggagtcatacaaaaattagccaggcgtggttgtgggcgcctgtaatcccaactacttgggaggctgagccagaataatcacttgaaaggggagacagaggttgcagtgagccgagactgtgccactgcactccagcctgggtgacagagcgagattccatgtcaaaaacaaaacaaaacaaaacttttcacaggagtttttttttttttttttttttagacagagtctcgctctgtcacccaggctggagtgcagtggcgctatctcagctcactgtgacctctgcctcctgggttcaagcgattctcctgactcagcctcccgggtagttgagattacaggtgcgcaccaccacgcctggctaattttttgtatttttagtagagatggggtttcaccatgttggccaggctggtctcaaactcctgacctcaagtgatccacccgcctcggcctcccaaagtgctgggattacaggtgtgagccactgcgcccgaccaggagtcctattattatccccagtatagagaacaggaaactgaggcacagagaggtaatatagcttgccgaaggtcacacagtgtgcaagtgtgagagccaggatttcagtgaaggcagtgtccgccagagaagaaagcaaggagcaggcagcttatctttctttccccactgtgtctacagcacctgacacagatgcttataaacatgtccactggtgatctggagtcttcccttcctggtaatttccacttgtgcctctttctgtgctcattgtcacatccacccacagacaacaaagattacgagagaggcagaggcaggggattagttatattattgggtctagggacctaagtgggcaggggccctggactcctgggcctaggagccccaaacttctgggtctcggaggggcggggagccaggatgcctgggtccccaagccaggctcttcctccagggacattcacttacctgcccagaaatgtgagcactgccccttcctctttaatcgagaactccttggccagctacagccagctgtgaaaggggacagggaagaggggaggggataaggaggaggggcgccccactcccggtaaccaggcctgatccccgtttctggcaggtgggcggaacttgccattacctgccctgggcgggactcaggtaagggacaaagtatttaaagggaccttgggataaaggacttaaaggccagagctccatgaggaagccaaggtgtcgaataccatgggatacctgggggattagattcgaccctcctcctccctcccgacccctacccgctctggctctcccctgggagttcgtctgtccgagctagaaaaattaatatctaggtctctaggtatctagaaactagcgggaacgatatgccttagtccctgggacagctgggcagtgccgcagtaaatccctgtttcctgagagcgacttgaacggctttgattttcaatttcccaatggctctgtctgtaaaatgggagcgtagttgtctcttctcaattgttttaagatgcagcaagaaaagtggatgatatatttgggaaagtgggcttcccgatctctaggggaagtgattagtccttaaatttgggcttggagagactcaaaacctgggaaccaagcaggaaaaaacgatctccctgggaaatgcctcgtacatagtaagcgttccccatattcccaccagtttcaatatccggaactttcgattagctactcacgtttccggagagagaaagagaagagaggacttgagcaagccaggcgaggcacttccgcaactaggggcagctctacttccggtgccttctgctgggcggaagtgggcggagcggagggggaaaatagtgctcctttccggtgtcggggcacagttgaagaagcgaccgagggactgggagtcgttagtgaggtgagttcgaggcggtgcaggaagagtgttgctgggatcgctttcctgcgggctagaggcctggggtcttgagggagactggggcaagattttggattcccgattccctgtcaatcattattaatacagctgtccgggcgccccaagtttgaagctgaactacactctgctggaggtggccaaccgtccatcgggcagttctctctctctttgtctctctctctcactataaactcagtcaagtggtagctagcatcggccagttctcctgagagttacagttctgctgtagatgatggctatttgctggtggtcccaagggaaggagtggactgggattgctgggggtctaaggagtgggagttgaggagggagaactcctttcctggcctcagtttctcagactgtggtgggacggcgggcgatactagattgtgcagtcatccatcgccaccttctcttcacctttttgacagccccttccctttcggggttggtgcagggattcacgttttcttgtgtggagcttcggggtcaggcagtcatggattcccattctgattgtgctgctaattctgtgaacttggggcttgaacggtccttgaggcagtttgatgttaatgttttcttacgaaaatgttcaaacttatataaaagtgagagaagaatacaggaattcctgtcacccaaatcaccaatgattatttttgccatacttgctgtatttttttaaacttaaagagattaaaacaaatcgtaggcatcatgacacttaaggattgtcaaaagacaaaattgcaacacatttagtgagaagatcttaattggcatttattcgtgaatctacaatcaaacaacatctaattatggaaaatagcgtgagtgttccgatgagctgagcagaggttgttttcagagacaaagggctgagaaaatcagaaacggaaaacaaaaagctagttgattaaattgattaacttgattaaatttctaagttaaaggttaaagtagaggggacttcctttatcaggtgggctaaaactgggttgtttggggatttggctattatctctctcctgatatctcagaagatcagatatcaacttagttttggcttggaagcatggaactttagcatgagtgtctccattttggtttggtctgttgaacctagtgcaggagctc

SEQ ID NO: 1560932 - DNA, 4001 bp, Homo sapiens
ctatgaaatggaggcccagtaatccatttaatgctcacgccggccccgtgataatattaggttggtgcaaaagtaattgcacgaaaaaaattaaatggcaaaaaccacaattaacttttttttttccgacagaatctcactctttcccctaggctggagtgcagtggtgccatctcggctcactgccacctccacctcctgggttcaagtgattctcctacctcagcctcccgagtagctggggatacgtacagccacttgctaccatgcccaactaattttcgtattttttttttgagacagagtctcgctctgtcccccaggctggagtgcagtggcgcgatctcggctcactgaaagcgccgcctcccgggttcacgccattctcctgcctcagcctcctgggtagctgggactacaggcgcctgccaccacatccggctaatttttttgtatttttagtagagatggggtttcactgtattagccaggatggtctcgatctcctgacctcgtgatcctcctgcctcggcctcccaaagtgctgggattacaggcatgagccaccgcacccagcctaattttcgtatttttagtagagacagagtttcaccatgttggccaggctggtctcatactcctgacctcaaacaatccaccgtgtcccaacgtgagggggactgcaggctggcgggggagctggggacactgcagcccaggaccaacctatcccgtgcctggtgggggctcctgcaggaggggacccacccaccctggccccaatatacattttaatagttattataacaatatgtttaaaacgaggcagggcatggcggctcacacctgcaatcccagcactttgggaggcagaggcgggtggatcatttgaagtcaggagttcgagaccagcctggccaacatggtgaaatccagtctctactaaaaatgcaaaaattagccaggtgtggtggtgggcgcctgtgatcccagctactcgggaagctgaggcaggagaatcgcttgagcccgggaggtggaggttgcagtgagccgagattgcaccgttgcactccagcctggggaaccgagactgcctcaaaaaaaaaaaagaacatagtgacagttacagtaacagaatatgtacttgttgcgcctgttgcttcttctgtgcttcttttgcctccctgccttatcctcctgttttccctttgttgccctttaaatccagcccctgctgagactccccctcctgcaggagccacggcgcccccagctcccccaccagcctggagtccccctcatgtcgggatacggtgtccagaaagaaggggcccgacaggtgagctcacctgtggctgaagcagtgggcggccgagaccacccagcgggctcgcagcaggaagcctccgcagtgatgttggcccccgaagcgcacggatgccatgtagggcctggagtggggggtcacctcgtggcccccgatgatctgggccccccaggagcctgctggagggacggcctgagtcagggacgaggcgggaggaacggatgacggggctggggtcagggcagggggagaagtagcggccaagacagagacagggggtgagattagagacggagagacccagagagctggagacagagcccagacaagccccccagatgcgctgggaggggctcccgagcccgggagatccagggctgggctgggcagagaccccggccggatttccatccatttccagcagaggcagccacgggggctcggcagatggagcaggtggagctctccccagggttctcccgggactgggggttcccgggtgtggcccccgtacggggacttggcgggggcctgggtggggatcccggggggctcctcaccggggggcttcacgggcagcatcagggcggtggccacagtcagcagaggacgtccccagcccctcaacccgagccccatggcagacgcaggctggcgtctccccgcagaggtcttcgggccgtggctcccaccctcagccaacggccggaaagggggagcctggctgtggcctgtggtcgggaggccccaccagcaacgcctggagcccaggcgggcgtttctgagaaatcgatggtctcaggtggtggctggtaataatcatgttgataataatcattgtcccctagtccggaaacagggagaggaggagacagctctggggctgcaagtgacctcgggaaggcaattgacccttctgtgcctcagtttacccagcctccacgtggcccagcatgtgtggggagctttccgaggaaccgaggtcacagcggcactcgagacccgcagctcgcctccggcccccaccccgcaaaccccagtcttcccatctccaaacccagggccgacctcagggctgtggggacagcgaggaaggccggtctcctgggaagctctgatgatttctgcctttattttattttatttttataggtggggttttgctatgttgcccaggctggtctcgaactcctgggctccagcgatcctccctcctcggccttccaaagtgctgagatcacagaagacagccactgcacctggcagatttctgcctttattcagcagttattgagtgcctagtgtataccagacctcatgctaggaggtgaggatgaggcagtgaccgcaccccagcctgtagcactgacgttctgtgggatccggagtccagtgggacatggctgtacatgggggtcttcaccttttttttcttttctttttttttttgagatggagtcttgctcttgttgcccaggctagagtggaatggcaccatctcggctcaccgcaacctctacctcccgggttcgagtgattctcgttcctcagcctcccgagtaactggaactacaggcgcccgccaccacagccggctaattttgtttctgtatttttagtagagacggggtttcaccatattagccaggatggtctcgatctcctgacctcatgatccgcccgcctcggcctcccaaagtgctgggattacaggcatgagccacggtgcccggcctttttttttttttttttttttttgagaaggaatcttgctcttgttgcccaggctagagtgcagtggcgcgatcttggctcaccgcaacctctgtctcctgagttcaagggattctccttcctcagcctcctgagtaactgggattacaggtgcccaccaccacgccccgctaaatttgtgtgtttagtagagacggagtttctccatgttggtcaggctggtctcgaactcccgacctcaggtgatccacctgcctcagcctcccaaagtgctgggatgacaggcctgagccaccgcgcccagcccggcaggtcttcacctttcagtgggagcgttcttagtggcaaagttcaggtcgtaaattgcagctcacacagccgggtgatggcgttcacggcagtggctagcagtggggtgctcgtcagcgcttaataatgaacaggctggggccgggtgcagtggctcacgcctataatcctagcactttgggaggccgaggcaggtggatcacctgaggtcaggagttcaagaccagcctggccaacatagtgaaaccccgtctctacttaaagtaccaaaattagtcaggcgtggtggcaggtgcctgtaatcccagctacttgggaggctgaggcaggagaatcgcttgaaccgggaggtggaggtggcagtgagccaagattgcaccattgcactccagcctgggtgacagagcgagacaccatctcaaaaaaaaaaaaaaaaaaaaagtcatcattgaacgctccagacctgtgttttaccaaatgtaaagtgttctcaataaagaatgaagtgaaatgaagcaacaggaaatgcgtggaaaggaaggtatgaaaaggccccacaacgaactcgggctctgcgagatgcgggcggcctctggaagctaaaaaacggcaggaaacgaattttctc

SEQ ID NO: 1560933 - DNA, 4001 bp, Homo sapiens
ctgagatcacaccactgcactccagcctgggcaacagagcaagaccctgtctctaaaacaaaatttaaaaaaatgtttttaaagaagcagaaaaattggtcgggtgcggttggcccacgcctgtaatcccaatactttgggaggccgaggtgggtggatcacctgaggtcaagagatggagaccatcctggccaacatggtgaaaccctgtctctactaaaaatacaaacattagctgggcgtggtggcacgtgcctgtagtcccagctactccggaggttgacgcaggagaatcgcttgaacccaggaagcggaggttgtggtgagccaagatcgccccactgcactccagcctggcaacagaatgacactccgtctcaaaaaaaaaaaaaaaaaaaattagccaggtgtggtggttcgcacctgtaatctcagctgcctgggaggctgaggcaggagaatcgcttgaacccaggaggcacaggttgcagtgagccgagatcacaccactgcactccagcctgggcaacagagtgagattctgtctcaaaaaaaaaaaaaaaaaaaaaaaatcctgggcgcagtggctcatgcctgagtgagaccccatctcaaaaaaacaaaacaaaacaaaataaaaaaaaagaagcaaaaaaaaaaaaaaaaatcagccaacaaagagacccattttgcagatgaacaaactgaggcattgaaaatccccctcaggtcaggagttcgagaccagcctgaccaacgtggtgaaaccccatctctactaaaaatacaaaaactagccaggtgtggtggtgtgtgcttgtaatcccagctactcaagaggcggaggcaggagaatcatttgaccccaggaggctgaggctgcagtaaactgagattgcaccactgcactccagcctgggcgacagagcaagattccgtttcaaaaaagaaaaaaaaagggccaggcgcggtggctcacgcctgtaatcccagcactttgggaggctgaggcaggcggatcacgaagtcaggagatcgagaccatcctggctaacaccttgaaaccccgtctctacaaaaattacaaaaaattatccaggcatggtggtgggcgcctgtagtcccagctactcgggaggctgaggcaggagaaaggcgtgaacccgggaggctgagcttgcagtgagccgagatcgcgccactgcactccagcctgggcgacagggcgagactccgtctcaaaaaaaaaaaaaagaaaaagaaaaagaaaatcaccctcaggatagggacctgagggggcccatgctctcttcttcccctgattccagcatcactaactcctcgaccctttcactcactcactcattcattcattcactcattcattcgttcactcattcactcattcactcattcattcactcattcactcattcattcactcactcattgattcattcactcattcattcgttcactcattcactcattcactcattcattcactcactcattgattcattcactcattcatttgttcactcattcactcactcactcattcattcactcattcattcattcatgcatattcactgagcatttgctgaaggctgggtgctgtccaggaattcgcctgttactagctaattcccaaaacagctcctcaggagggaagggctgggttttgcccgttttacagataggcaactgagtcaaatggccagggctcccccttgcccttgtcctccccacccctgcaagcgttggtcccgagcagtgagtggagtctcccctgaccctgcctcagtttccccagctgtgccagaagggctttggatggacctcgtggtggatatttccccacaatccaccggggcctggaggctggatggatgggcacgtggctcactcaccgctcagcagcaaggccagcagcacggacgccagggcagggctggggggccggtgagccatggtggggtccagggtgcacccacggtcaagctcctcttatagcccaatgccagaggccgttgagttgcccaatgcccaggctgggtccccacttcctccttttgccttgggagcctgggagtcagaacggactccggggaggaggtgggggctttgggctcaaggtcccaacctttgtgggggcggggaggctggctgtcacccacccaagtcgggggtccctggccaggtgggcaacatggccacagccctcagagcaacacatgcccacgtgccacccacaaggagacgcctccctgacgaggtccctgtggccccagcaaagccggccgtggcaggtgtgtcccgtgggtgggtgagctggaaacggacagacagcaggacgtagcaggggacaggatgcagagctcgggaaggcagggccccaccacgagtgccctcagtgcctcacctgaggccccagcgaacatcctcctgccagttttgtctgggggttttcttccccctttaaggccaggattctcaatcaagaggtgattctgcccccaggggaccctgggcgaggtctgaggacacctgtggctgtcacgaaaggggagctcctggcatggagtgggtggaggccaaggatgatgcctagcaccctgcagtgcccaggacgggcctgccccagagaaggatccagccccgatgtccacagggcccaggggagagaccagtgttcattatttggggaaaaaaatggccaggtgcggtgcctcacacctgtaatcccagcactttgggaggccgaggcgggtggatcgcctgaggtcaggagttcaagaccagcctggccaacatagtgaaaccccatctctactaaaaatacaaaaattagctgcgcgtgttggcgggcgcctgtagtcccagctactcaggaggctgaggcaggagaatcacttgagcctgggaggcgaaggttgcagggagccaagatcgtgccactgcactccagcctgggcaacagagcaagactccatctcaaaacataaataaataaaaataaaaaataaaaaatccagtctgccccctgctcacaccggacaccagaataaactcccgatggggcgtacggcataaacccgggggaccccagctcccgggactcgcctcctctctccctcccactcagggtgtggatttcaatgtgtgcagcctcctgggacctcagcagggcagaggatcatgggactcagagtctcttggggtctgtggaatcctctaaccctggggtgattctgcccccaggggtccctgtgtgaggcctggagacatccgtggttgtcacgacttggagggagctcctggcagggccctgcagtgcccaggatggccccgccgcagagacaaatccagcccccatgtctgcagtgccggaaacgggggaaagccgaggacagaggataaaattatttatttataactgaacggtttaaacctacagtgaaatggagagaagcactgaatgaacttggaggccaaaaagaaaaaaagctttttaacgtttcatttggaaaggatttcacgcttacagaagtccaaagggtccaaactccctccccgctccccaaactccctcccccggcctccctcccccagcttccctaaattctgtcctcttgctcaaccctccaggctgtgatcgaagccagggcgcgaaagttgattccaaatggccccctctgccccagccccctgagtatcaccagccaccctttgctgggtcctgggtacacaagccacccatcttcagatgtcagggtctcctccagcgggcgcagtccctctgccctccctcagcccttgggaccattgaggagagctggtggtcactctgcagagcgtccctccgtggggatggtcctgggtggcctcaggactcaatggagggagtcccgggcgtggcgtgtgtctgtctcaggccccccacgtcgaagcccatggcttcggcctgtctcgtgctgatggtaataaccttgacc

SEQ ID NO: 1560934 - DNA, 4001 bp, Homo sapiens
acttgagcccaggtgtgaaagcgaactcagttcccttacccaggactgatacacagcacagagtcctgagctggggacacgagaagcctgaaccttgtaggtggtagtagagggggtctcctgggtcatcagctctctgtcccaggcccgtggctgtgagggtcatgcccggagcctggcacaggaagttcaggcggggcagggacaagagagagtgccctccttcttcgtccctgcctggacaggcacccagcccaggttatatttagcccaactgtgctcttcctgagccacgtacccagcccctggggtaaggtgggggcagcttcggaaggaaacccacagagaggactctgtgttcccagctctgcctatcccactaggcaggggaaagaggggtggggaggctcctggggagggtccctgccttgtgttagaggcagatccactgggaccaggcagacactccagatgccagcagcctatttcttgggtagttactgtggcatgaccctggcatatgccagaactttcagaatccccagggtccccatttcttgagcacctactgtgtgctaagatccttcctgtcttggctccttaaatctttgtaacatctccctggagtgggtacaactgagatatccatttcagatgcgacttatgcccttcagagcagctgggagcgaggggttgtcattcggaggctgctgagggatcggctgagggcattgcccttctggccctctttccctggtgactgccaccaacttcacttgggaaccctgcctgctcagagcctcagctttcccccgccaccagcgtgatctctcatagcaatgggggtcaggggttgggctgactcatccagacctctaaacattatctgaggccacctagggggtcagggggagttaaggcagtggcctctggctgcctcggttagtccctgctccagcacttcccaggtgtgaggacttgggcaagatccttcatctctggggcctcagtttctccatctgtaaaatggagccaataagaaaggctttgaagatttgtgagagaacagcaggtgcttagaatatccctcctgtatagtaaatgcttgattaatataaactcgtctctgacagcaacagggagagtatggagggagggagctgtgcttctcacagtgttgcacatccaacctttgctcctcagtggcccccactttctctgctaccaaaggggagctttggctgagagacaaaacccagctcaggcaccagcctcccaacaggatccatgctgcctccctagcaccctactccagggacccaccccaggcctcctgccccagctctggtgtttgttagtttgttttttggagacagggtctccctctgtcactgagactggagtgcagaggtgtgatcacggctcactgcagccccaacctcctgggcccaacccaatctcccatctcagcctccagagtagctggaaccacaggcatgcaccaccatgcccagctaattaaaaaaaatttttttttgttttgtagagatgggggcctctctatgtggcccaggctggtctcgaactcctgggcttaagcagtcctgccgcctcagcctcccaaagtgctgggattataggcatgagccaccatgcctggctgccctagctctttaaaagcagcaactcatttactcggcaccagccctgtgaggtggcctccagacatcagcccattttagagatggggaaacagaggcacaaaggatgaagtatcttgcccaaggctgcacagccagaaaggagaggaaaggggatttgaaccaccagctccaaagtctatacctttaacacctacaccacacggcttcctgagcccccaggccccctcccagcacctcccgggaccctgaacctcattcccacagtgtctcagcctggccagggaagggaccggccggctgatctcttaccgctgagcctccagacacctcgagagctcctggtcccgtctgtcagccctagccctaggctgggggggaaaaggaatggggaggggggaggagagagagaccccagccattggctgcgggggtgtgacgtcaccagagggtgggtggtggagaaacaaacatccccctcctccagctacatctatccccaaggggtgggggccacgggacagccaccagccgcctctctcttgcctgggccgagatctctgccatgagctcagcttcaaggatttgcacgttggcttcctcgacttggagaatcaggaccccaccccagccccactgtttcctggctccaggacccgggcctggccaactgcctctactgtaaactcctttcactccctctccctgtcaacttgggttcaaatcgcagcgcgaccacttcctcgctgggtgacctgctgccagtcacagcttctctttgcggatagtaagagtacccaccttatggggctgtggtgaagattaaacgagttaaaagagactgaaaatgtaagacaatgccgggcacataatgagggttactaataagtatttggtattatttttcacacaaattaggtggctggctcatcttgctggggggttttggccccttttcagtaaggctgggcacaggggacccccagttctctgtctaatggagttactgtttagggggacacctatcacatactaagtaccatgctcagtgctgaagccctgcttttgaatcaagggtgtaaaatgggctccttatgctccccacccttttttttgagacaaggtctcactctgttgcccaggctggagtgcagtggtgtgatcatggctcactgcagcctccacctcctgggctcaagcaatcctcccgactgagccccctcaaatagctgggaccacaggtatgcatcatcatgcccagctaatttttgtattttttgtaatggcaaagtttcaccatgttgcccaggctggtctcgaactcctgggctcaagcgatcttcccacttcggcctcccaaagttctgggattacaggcgtgagccaccgcgtccagctatgcccaatttatagctatgtggccaggaggtggtgaagctgaggtccaacccctgttctcctggaccacaaaaaccctgctacactcttctgccccttccactttgcagaccagaaggctcagagaaggtaagtgactctcccaatatcaccatagcaggtcattggcaggggtccagagttgaacccagacctgcccgactcccaagccaaagctaccaggcctcacccccaacccctggaccctggtccagcccccagcctgccctgactcaccagaccccggggggcggcacagggagcacaggtacccccacatgccacttgaacccacccggctgctgcctcggaagctcgtcgctctctgaacccaggccccaggcctgggctgggctgaggctgggggattacccccaaagcgcatgtcagcagcttctgccccattgtccagccaggcacagacaccaagccctggcctctgtcggcaccctcgcccctcacaccagcctgggtggcccctctgcagacctgtcccccatctcacaccagagggttggggcctacttcagagggcgtgggggaccaggccaggatggcaggatcccggaatgctgggggcctccctcccttctctctgaaatgccccctgcccactctcagccaccggggaaggcaggaatgtgctgagctctgggaaatgccttccaggcctggcagcaaccaagcattggggtgtggccagaagccagccagagccctcctcccaggaggggtagaagggatggtatggtcggggctcccgatgggcctgaggagaccctcacttcattgcagtctctctccttcattgattcacgcaaacattcttttgttcctatattcattcaacaaacactcacaagccctgtttagtggtaggtcttttgctgggcacaggggaca

SEQ ID NO: 1560935 - DNA, 4001 bp, Homo sapiens
acataggaatatcaaggtggtgattgaattttaaataagatggatggtcaaggaaggattctctgagaaagctcttgactatttttatttttgcagacaacacttccttcagaaaacgggaaacttccatttgtcacacgtcttggtccagataaatcccaggaagtagcatcgtgatctacacttctgatgagaatactgcagcccacagtaggaaagttatatttttgaattcacgactaccagtacaggataacagcccctagaaatggaagcactaggccgatcctaccactgcactccagcctggctgacagagcaagactctgtctcaaaaaaaaaaaaaaaaaagaaaaaagaaaaagaaatggaagcactattcctttcttagtttctcatctaatagtttcctgagcaggaaagttcctagttcagaagattatgagtagtatgcactgtaaaaaatgtacatcatgtctaaatactaagcctcgtacaaagctctcaacagatgtttttaaatattaataatcatttatgcctcaacctctaaaagatcccaggaagtcagtatcgaaagttagggtcctttattgggggatgtcagcagagaacgtgggacatgaaaacaagtcttaggagtttgagaaggggctcccaggacaggctcctctgctttaaggagcctgtcctgggagaataagcagggccccagtatgtgcagaagttgtcagggggtgcccaggggtatggtgaaggagaggtagtccccaagggcaccccagcggggccggtagatctggaagatggtgatccaggaggtgagcactatcacccagaagaggaagcccacagctgagcgccagacatctgtcatgggaaacagaagctggaagggttggcctccggctgctctccagacttccctagaccagccttcccttctcacccagagccccaacattttggatcctccattgtcccttcccaccaagattccccgcttccccctctcccctgccactggcctccctcctctgtgctctagactcacagcctttgatttggctctgttctgtgtaggctgggacaaggaaggcctctcggaagaaccagaagatgttgaccaaccagagaaaaggcaggaaagcaaacccccctagggagaaagaaaaacaaacaaacaaaccccaaaacctcataaggcaatgaagatcttctccaactcccaccgagatctatttggaagaaactctcccacacccaagttcaaatggagatttctgttgtcagggactcaggaatctggctcctctttgggatccaggaatctgattcctcaaccatctctttcacaggacccaagagtccaggccctcaatccccctcctctcttgggatccagaaattgaggccccagcttcctcattcctcaggacccaggccctccccactcaaatccaggagtcggcgttcgcaggtccttcatctcttagacttaagaatccaggccccgaggccctcttccctcgggtgctctagtccagtcccctctcttctcctgggaccctagcgatctgccttacccaggtagtacttccggcacaggttcaatttctcctcattggacactcgctccaggttcatagctgcgctggggccgggtcgtcccaagggtctgcggggcaagacccaagccttgaccctaagtaacagatgcaaggatcacgaacaaccacgcccctattagaacaaatcagagataaatgtaaaggtcggtttgctgaaagcagggcatccccacccccactagtaagctggctggattaaagagctctttatatttactagggtgggcgaaacgacccccaactcaccaggagagctcacttcctccggctggggtgccttagctactttcagttatggacgtttgcgcgagacgccccaggtttccctggagattgtagtcttctttgggcgaggcaacactgcacgcatgcgctgttaaaagaactcctaccggggagtctatggggagggcgcgcgcctcccacgcgcaagcgccctggggcgtttccgagcgcttggtaagcgcctggagagggcaacgaactacacttcccagtgctcctaagcaacggaagtgacgtaagagcagccagacctggagggcttgggtaaaaatggctgaatatttagcttcgatattcgggactgagaaggacaagtgagaacgggcgctgggagtggactctcggggggtcggggccggggtactggggtcctgggtggtggggcggtgtttctggggtgcccagcttccccggccctcggttcacctttgtctttgcaccttttccagggttaactgctctttttactttaagatcggggtctgccggcacggggaccggtgctcccggcttcacaacaagccgacattcagccaggtgagacccggcacggagcctcgggggttaacggctccctggcccttccccttctggggccgtcgtcaccatgtcccgcctattccgggttcctgagtccctccccaccgcccggctttttttctcattggacctttctgcaggctcctcccaccggtcttcgtgccgttttcccgggaacttggtcgcgcccccatgcgtacaggctacacacggcggctgttcatctttgccagtcccttccatcccgctgttcatccttgccagtcccctccatcccttttctggtttcttaggggcaaaggatcgccgatgcactcatgatgcttaggctggggtgtaaggttccacccccaaccttcatgcctcactctctgttcatgcagccctgccctctgagctcaggccccgccccttttaaattctgtgcagaccatagtgctgctcaacctgtaccggaatccacagaacacagcccaaactgcagacggatcacactgtgagtaagggaccaggcctgggggcaaggtgaacagcccccagtaggctacactctgattccaccctgcccgcccccaccccaggtcatgtgagtgacgtggaggtgcaggagcactatgatagcttcttcgaggtgagggttggtaggggcagatggggtttcttgtgggagctcagctgagttcctccccgtcttccacaggaggtgttcacagaactgcaggagaagtatggggagattgaagagatgaatgtgtgcgacaaccttggggaccacctcgtgggcaacgtctatgtcaaggtgcttgctgccccccacttagggcccagaagtggaggcgtttcaatgcctgatggtggccactgtaggctctcagcttgaatttcatcactaaatccagtccagccccagagcgggtagtgagtcccctgaagatctctgagttctcctgctgaccctgactgacatttcctgcagttccggagggaggaggatggagagcgggccgtggctgaactcagtaaccgctggttcaacgggcaggctgtgcacggtgagctgtctcctgtcactgacttccgggagtcatgctgtcgccagtatgagatggggtatggtagttcaagggtgggatgggcacttggaatcccagactttgaatgcgtggtaggggctgtcagtgacaatggcttcctccatctctctaccctctatgcagggaatgtacccgaggtggcttctgcaacttcatgcatctgcggcccatttcccagaacctccagaggcagctctatgggcggggacccaggcgcaggtacctcaggaccagcctgctatgtctcctcatgtcctaaggcccctatatcctcagatgagcctaaccctaagccccagtaaccacgttcccaagaatcttttttttttttttttttttttgagatggagcctcactctgttgcccaggctggagtgcattggcaccatcttggttcatggcaacttccgcctcccgggttcaagcaattctctgcctcagcctcccaaat

SEQ ID NO: 1560936 - DNA, 4001 bp, Homo sapiens
ggatgcaggaaaggaattctgatctgttgaaatttgtctcctctgtgtgtgtcctgcactaaatgcccaaatcccagcatgggacataacgcagtgagtgacacaggcagagtccaggcctgacaatcctgtgtgtgtgaagtagaagtgacccctgtcccccaacacccagggatcatgtggaatcacttacggtgtaaggtgaaggtgaaacgtccagttactcctctagtcccatcatctccctttatgatgtgtaaggtgtaggatcctgcgtcctcccgggtgacattctggatcagcagggatgcattggaatatgctgtttctcgtccactatatgcaggcccatatataattatttcaccgtctactacatatgatgtaatgtaatggtagaggtccctcatttgccctttgtaccagatgtagccggtaagattctggggcaaattgtggacaagtagaagaacatccttcccctcggaaactttggttggctcggcttcaatcgtgacttgggcagtggtgggcaggttccagaagtttaaaagtgatgctaggaggtggagagaacatcagtcaatattgagacctatgtattggtgtgaaaacatggggccctgggtcctgagaaggtctcttcagtcctcagccttgacaacacagacacacacacacatacaaacacacacacacacacacacacaaaagcggcatgtgtgattgtgtgtgtgtatgtgtgtgtgtcctactgtcctactaggtcaaggtcagcagcatgacgcccattccttcaacacttctgacgttggcatttttctgtttggaatcctcttccccaggggtccgcatggccccctccacaatgccctcaggtcctgcttacatcagggcatcgttagacttctttcctgatgcctgcttcagagaccctgggtcttccctttctgacctttccctgctctgctccctccagggttcttgtcaacacctgacctcacattctagatctctttgcatgtctgtcttcccccccatgacagcgtgagctccgtgaagacagggacttttgtgatcttggttgcaccccagtgcctggaacaggctgcagactcctgtagatgtgagagttctcagggccctccatgccctgggtgttttttttcccccaattgttgaggtttcttgctgaggacagtgtttcctgccctgtttatatttttatttgaggtgtcatctgctatagttattattatcatttttcaaaatatggtggcccctgatgattaatcaggaaaacagaacacttaagattttcctacctcttaccaattccggtccaatacgactttcctgttttgacccctgtccctctctggtgtattttcccctatccaggctccaacagagccttctttcctttttttcttttttctttttttttttttgagatggagtcttgtactgtcgcccaggctggcatgcggtggtgctatctcagctatctgcaacttctgcctcccgggttcacgtgattctcctgcctcagcctcccgagtagctaggattataggagcacaccaccatacctggttaaatttttgtattttcagtacagacagggcttcactgtgttggccagactgatcttgaacttctgatctcatgatccacccacctcagactcccaaagtgctggcttctttcattttttagaaccccatcctctccaggagaccccatccagtcactctgcttcctcctcctgtcctctcccaggaagttctctcctcacctgtgagcaggagccccttccatttgatgcgctgtgtgcagggaggggctgagagggttcccatggtctctgctgcttgtgtgttctcctctgtggagataagcctaggatccagaaactctctgagcacggctgtcagctgtgctgtccttcctctttctgtgctgagcctcttcccagggcaggagcaattctcaagctcatgggcagggtcaggcccaggacacctctctgtcccctcctctctaagtcctgcctccttgtccctccttctgtttctccttttgtctgtgtttcaggtccctgggaattgtggcggcctctgcctttttcagcagtgattctttcaccaaacctcaagacacactttgtgcagacacacagacacacacacacacacacacacacacacacacagaagagatacacacagacccacacagtcagacacataccctgcaggttgggcaagaacagtcctgggcctcagcctcctggtgtccccatggctctgggtcggggtgcaaattaacgccctttggcctctttcatccccatcaggctctccccttcagtgcaggaggctggagctgtaccaggtccctgtcagaatgatgccccattgtgctgtgggtgagctgtgtgttgcctggtgagagggacccttcctttctctaatcatgtctagcttggctgcagcttccaaggatggacattcaggacctgggtgtcccagaggaaactgtcctttctggcggtgtgcagggtgaatctctcatgcctcttgggaggagaggcctgtgctggttgctcagtgggggctgtgagtcccatagtcaaagggacagttctctgtcagtctatggctccctggggtctggcggctgagctggagctcatagtttctcatgttcttcctgaccatctttgatgtcctctcttctctgcccagctgactgtcctgtggtcaccacaccttccctgtggtggtgcaggaggaagtggggagttacccaggaaccctgcgggacatggctcattgagatgcgggagggggagcctgggacagagcaggggttcagagctggagagattcatcccaacttactccgtggccatgatgggctcagccctccatatgctgacatacccaggggtctgtcctgatggttttgacctggccaagctgctgtgtgtagaggaggaacaggcagtggccagagagcctgtctggagggacattgctctcacctgagagggcgggtgggggtgagttgtgttctgagatcaaagagcaataacattccccttcttcccgcaagcacacaggagaggtctgtcttcccaagggacagctggtgttaggtggccacatcccggatggtgcctgtgtgtgaccatcacacgcgctctgagcccccagggtgcagcgggcaggcaggtcacagggtgcctggctgattcccggggaggctgtgggccctcaggcagccgctgttctgtgtcagcgctaggcttggcctgggatgccccagagaacaggacagatggagcaggggtgggcatttagggagcagtgccagaaagagttgatgaggatggagggaggtcacgaggggaaagcacccggtgtggcatcgcgtgcaccagcgctgccctgggagatgcctttagctgggcccagggaaggagcaggtgtgtggggaggagctacctgcagggggagtggtgttaggttggcggccgccaggtcagggaggagctgacagtgtccgtgtggggagcatggagggcgctgaggacttgggcagaagtgaccctgtagagggtggacactgctgggctgtgggttccgctgagtgaggttggcatcccctgggaagactccaggctgggagggactctgtccccctctggtggacagggagggaagtgtgaacggcagcaattccaggccaggatgcatgttttattccacgtggatctgcacagttcacacgaggtcacacctgtgttatgttacagccccatcaccttccagccccgtgagtcccagtctctgtggctctatgttcactgttctccctctttcacaatcagatgtcccaaatgcagatttttgtcaccttctgtgagtttgtgtttgtgtgcagtaggcggcactgtgtataccctgggggcagtgatgtctggggctgagcac

SEQ ID NO: 1560937 - DNA, 4001 bp, Homo sapiens
tgagtccccccatcagactgtccttcctctgcagcgagtgtctgcagggtctggatgcaggaaaggaattctgatctgttgaaatttgtctcctctgtgtgtgtcctgcactaaatgcccaaatcccagcatgggacataacgcagtgagtgacacaggcagagtccaggcctgacaatcctgtgtgtgtgaagtagaagtgacccctgtcccccaacacccagggatcatgtggaatcacttacggtgtaaggtgaaggtgaaacgtccagttactcctctagtcccatcatctccctttatgatgtgtaaggtgtaggatcctgcgtcctcccgggtgacattctggatcagcagggatgcattggaatatgctgtttctcgtccactatatgcaggcccatatataattatttcaccgtctactacatatgatgtaatgtaatggtagaggtccctcatttgccctttgtaccagatgtagccggtaagattctggggcaaattgtggacaagtagaagaacatccttcccctcggaaactttggttggctcggcttcaatcgtgacttgggcagtggtgggcaggttccagaagtttaaaagtgatgctaggaggtggagagaacatcagtcaatattgagacctatgtattggtgtgaaaacatggggccctgggtcctgagaaggtctcttcagtcctcagccttgacaacacagacacacacacacatacaaacacacacacacacacacacacaaaagcggcatgtgtgattgtgtgtgtgtatgtgtgtgtgtcctactgtcctactaggtcaaggtcagcagcatgacgcccattccttcaacacttctgacgttggcatttttctgtttggaatcctcttccccaggggtccgcatggccccctccacaatgccctcaggtcctgcttacatcagggcatcgttagacttctttcctgatgcctgcttcagagaccctgggtcttccctttctgacctttccctgctctgctccctccagggttcttgtcaacacctgacctcacattctagatctctttgcatgtctgtcttcccccccatgacagcgtgagctccgtgaagacagggacttttgtgatcttggttgcaccccagtgcctggaacaggctgcagactcctgtagatgtgagagttctcagggccctccatgccctgggtgttttttttcccccaattgttgaggtttcttgctgaggacagtgtttcctgccctgtttatatttttatttgaggtgtcatctgctatagttattattatcatttttcaaaatatggtggcccctgatgattaatcaggaaaacagaacacttaagattttcctacctcttaccaattccggtccaatacgactttcctgttttgacccctgtccctctctggtgtattttcccctatccaggctccaacagagccttctttcctttttttcttttttctttttttttttttgagatggagtcttgtactgtcgcccaggctggcatgcggtggtgctatctcagctatctgcaacttctgcctcccgggttcacgtgattctcctgcctcagcctcccgagtagctaggattataggagcacaccaccatacctggttaaatttttgtattttcagtacagacagggcttcactgtgttggccagactgatcttgaacttctgatctcatgatccacccacctcagactcccaaagtgctggcttctttcattttttagaaccccatcctctccaggagaccccatccagtcactctgcttcctcctcctgtcctctcccaggaagttctctcctcacctgtgagcaggagccccttccatttgatgcgctgtgtgcagggaggggctgagagggttcccatggtctctgctgcttgtgtgttctcctctgtggagataagcctaggatccagaaactctctgagcacggctgtcagctgtgctgtccttcctctttctgtgctgagcctcttcccagggcaggagcaattctcaagctcatgggcagggtcaggcccaggacacctctctgtcccctcctctctaagtcctgcctccttgtccctccttctgtttctccttttgtctgtgtttcaggtccctgggaattgtggcggcctctgcctttttcagcagtgattctttcaccaaacctcaagacacactttgtgcagacacacagacacacacacacacacacacacacacacacacagaagagatacacacagacccacacagtcagacacataccctgcaggttgggcaagaacagtcctgggcctcagcctcctggtgtccccatggctctgggtcggggtgcaaattaacgccctttggcctctttcatccccatcaggctctccccttcagtgcaggaggctggagctgtaccaggtccctgtcagaatgatgccccattgtgctgtgggtgagctgtgtgttgcctggtgagagggacccttcctttctctaatcatgtctagcttggctgcagcttccaaggatggacattcaggacctgggtgtcccagaggaaactgtcctttctggcggtgtgcagggtgaatctctcatgcctcttgggaggagaggcctgtgctggttgctcagtgggggctgtgagtcccatagtcaaagggacagttctctgtcagtctatggctccctggggtctggcggctgagctggagctcatagtttctcatgttcttcctgaccatctttgatgtcctctcttctctgcccagctgactgtcctgtggtcaccacaccttccctgtggtggtgcaggaggaagtggggagttacccaggaaccctgcgggacatggctcattgagatgcgggagggggagcctgggacagagcaggggttcagagctggagagattcatcccaacttactccgtggccatgatgggctcagccctccatatgctgacatacccaggggtctgtcctgatggttttgacctggccaagctgctgtgtgtagaggaggaacaggcagtggccagagagcctgtctggagggacattgctctcacctgagagggcgggtgggggtgagttgtgttctgagatcaaagagcaataacattccccttcttcccgcaagcacacaggagaggtctgtcttcccaagggacagctggtgttaggtggccacatcccggatggtgcctgtgtgtgaccatcacacgcgctctgagcccccagggtgcagcgggcaggcaggtcacagggtgcctggctgattcccggggaggctgtgggccctcaggcagccgctgttctgtgtcagcgctaggcttggcctgggatgccccagagaacaggacagatggagcaggggtgggcatttagggagcagtgccagaaagagttgatgaggatggagggaggtcacgaggggaaagcacccggtgtggcatcgcgtgcaccagcgctgccctgggagatgcctttagctgggcccagggaaggagcaggtgtgtggggaggagctacctgcagggggagtggtgttaggttggcggccgccaggtcagggaggagctgacagtgtccgtgtggggagcatggagggcgctgaggacttgggcagaagtgaccctgtagagggtggacactgctgggctgtgggttccgctgagtgaggttggcatcccctgggaagactccaggctgggagggactctgtccccctctggtggacagggagggaagtgtgaacggcagcaattccaggccaggatgcatgttttattccacgtggatctgcacagttcacacgaggtcacacctgtgttatgttacagccccatcaccttccagccccgtgagtcccagtctctgtggctctatgttcactgttctccctctttcacaatcagatgtcccaaatgcagatttttgtcaccttctgtgagtttgtgtttgtgtgc

SEQ ID NO: 1560938 - DNA, 4001 bp, Homo sapiens
cgagtgtctgcagggtctggatgcgggaaaggaattctgatctgttgaaatttgtctcctctgtgtgtgtcctgcactaaatgcccaaaccccagcatgggacataatgcagagagggacacaggcaatgtccaggcctgacaatcctgtgtgtgtgatgtagaagtgacccctgtcccccaacacccagggatcatgtggaatcacttacggtataaggtgaaggtgaaatatccagttactcctctagtcccatcacctcgctttatgatgtgtaaggtgtaggatcctgcgtcctcccgggtgacattctggatcagcagggatgcattggaatatactgtttctcgtccactgtatgccggtccatatataattatttgaccgtctactacatatgatgtaatgtaatggtagaggtccctgatttgccctttgtaccagatgtagccagtaagattctggggcaaattgtggacaagtagaagaacatccttcccctcggacactttgggtggctgggcttcaatcatgacttgggcagtggtaggcaagttccagaagtttaaaagtaatgctaggaggtggagagagcatcagtcaatattgagacctatgtattggggtgaaaagatggggccctgagtcctgagaaggtctcttcaatcctcagccttgaagacacacacacacacacacacacacatacaaacatacacacacagaaaaggggcatgtgtgtttgtgtatgtgtatgtgtgtgtgttctactgtcctactaggtcaaggtcagcagcatgacccccattccttcaacacttctgaccttggcatttttctgtttggaatcctcttccccaggggtccgcatggccccctccacactgccctcaggtcctgctcacatcagggcatccttagacttctttcctgacacctccttcagggactctgggtcttccctttctgacctttccctgctctgctccctccagggttcttgtcaacacctgacctcacattctagatctctttgcatgtctgacttcctccccatggcagcatgagctccgtgaggacagggacttttgtgatcttggttgcaccccagtgcctggaacaggctgcagactcctgtagatgtgagagttctcagggccgtccacgccctgggtgtttttttttttttccccaattgttgaggttttttattgaggacagtgtttcatgccctgtttatttttatttgtagtgtcatctgatatagttattattatcatttttcaaaatgtggtggcccctgatgattaatcaggaaaacagaacacctgtttcctacctcttaccaattccggttcaatgtgactttcctgttttgacccctgtccctcttgggtgtattttcccctatccaggcatcaacagggccttctttcctttttttttttttttttctctttttttttttttttttttttttgagatggagtctcgtactgtcacccagcctggcgtgcagtggcactatctcagctcactgcaacttccgccaccctggttcacgtgattctcctgccttggcctcctgagtagctaggattacaggagcacaccaccatacctggttaattttttgtacttttagaagagacagggcttcactctgttggctggactgatcttgaactcctgatctcgtgatccacccacctcagcctccctaaatgctggcttttttattttttagaaccccaggagcctctccaggagaccccatccagtcactctgcttcctcctcctgtcctctcccaggaagttctctcctcacctgtgagcaggagccccttccatttgatgtgctctgtgcagggaggggctgagaggggccccatgatctctgctgcgtgcatgttctcctctgtggagatgagcctaggatccagaagcttccagagcacggctgtcagctgtgctgtccttcctccttctgcgctgagactcttcccggtggaaggagcacttctcaagctcatgggcagggtcaggccgaggacacctctctgtcccctcctctctcagccctgcctccttgtccctccttctgtttttccttttgtctgtgtttcaggtccctgggaattgtggaggcctctgcctttttcagcagtgattctttcaccaaacctcaatacacactttgtgcggacacacacatacacacacacacagaagagacacacacagacccacacagtcagacacataccctgcaggttgggcaagcagagtcctgggcctcagcctcctgctgtccccattgctcttggtcggggtgcacattcacaccctttgccctctttcatccccgtctggctctccccttcagtgcaggaggctggagctgcaccaggtccctgtcagagtgacaccccattgtgctgtgggtgagctgtgtgttgcctggtgagagggacccttcttttctccaatcgtgtctagcttggctgcagcttccaaggatggacattgaggacctgggtttcccagaggaaactgtccttcctggaggtgtgcagggtgaatctttcatgcctcctgggaggagaggcctgtgctggttgctcagtgggggctgtgagtcccatagtcaaagggaaagttctcggtcactctgtgactccatggggtctggcagctgagctggagctcttggtttctcatgttcttcctgacaatctttgatgtcctttcttctctgccgagctgattgtcctgtggtcaccacaccttccccgtggtggtgcaggaggaagtggggagttacccaggaatcccgcgggacatgacttattgagacgcaggaggaggagcctgggacagagcaggggttcagagctggagagattcatcccgacttactccgtggccatgatgggctcagccctccatgtgctgagatacccaggggtctgtcctgagggttttgacctggccaagctgctgtgtgtagaggaggaacaggcagtggccagagatcctgtctggagggacgtagctcacacctgagagggcgggtgggggtgagttgtgttctgggagcaaagagcaataacaccccccttctccccgcaagcacacgggagacgtctgtcttcccaagagacagctgggggtaggtggccacatcccggatggtgcctgtgtgtgaccatcacacgcgctctgagccctccggggttcagtgagcaggcaggtcacagggtgcctggctgattcccggtgaggctgtgggccctcaggcagccgctattctgtgtcagcgctaagcttggcctgggatgccccagtgaacaggacagatggagcaggggtgggcatttagggagcagtgacagaaagagttgatgttgatggagggaggtcacgaggggaaagcgcccagtgtggcatcgcgtgcaccagcgctgccctgggagatgcctttagctgggcccagggaaggagcaggtgtgtggggcaggaactacctgtagggggagtggtgttaggttggtggcccccaggtcagggaggagctgacagagaccctgtggggagcatggagggcgctgaggacttagtccgaagtgaccctggtgagggtggaccctgctgggctgtgggttccgctgagggcggttggcatcccttgggaagactccaggccgggagggactctgtcgccttctggtggacagggagggaagtgtgaacggcagcaatcccaggccaggctgcatgttttattctacgtggatctgcacacttcacacaaggtcacacatatgttatgttatagctccttcaccttccagccccgtgagtcccagtctgtgtggctctacgttcactgttctccctctttcacgatcagatatcccaaacgcagatgtttgtcactttctgtgagtttgtgtttgtgtgcagtaggcggcactgtgtataccctgggggcagtgat

SEQ ID NO: 1560939 - DNA, 4001 bp, Homo sapiens
tgcactaaatgcccaaaccccagcatgggacataatgcagagagggacacaggcacagtctaggcctgacaatcctgtgtgtgtgaagtagaaatgacccctgtcccccaacacccagggatcatgtggaatcacttacggtataaggtgaaggtgaaatatccagttactcctctagtcccatcacctcgctttatgatgtgtaaggtgtaggatcctgcgtcctcccgggtgacattctggatcagcagggatgcattggaatatgctgtttctcgtccactatatgcaggcccatatataattatttgaccgtctactacatatgatgtaatgtaatggtagaggtccctgatttgccctttgtaccagatgtagccagtaagattctggggcaaattgtggacaagtagaagaacatccttcccctcggaaacttttggtggctgggcttcaatcgtgacttgggcagtggtgggcaggttccagaagtttaaaagtgatgctaggaggtggagagagcatcagacaatattgagacctatgtattggggtgaaaagatggggccctgggtcctgaggaggtctcttcaatcctcagccttgaagacacacacacacacacacacacacacacacacacacacacacacacacaaaaggggcatgtgtgtttgtatgtgtgtatgtgtgtgtgtactactgtcctactaggtcaaggtcagcagcatgacccccattccttcaccacttgtgaccttggcatttttctgtttggaatcctcttccccaggggtccgcatgaccccatcaggtcctgctcacatcagggtatcctaagacttctttcctgacacctccttcagagaccctgggtcttccctttctgacctttccctgctctgctccctaaagggttcttgttaacagctgacctcacattctagatctctttgtatgtctgtcttcctccccatgacagcatgagctcagtgaggacagggacttttgtgatcttggttgcaccccagtgcctggaacaggctgcagactcctgtagatgtgagacttctcagggccctccacacccttggtgtttttttttttctcccccaattgttgaggttttttgctgaggacagtgtttcacgtcctgcttatatttttatttgaagtgtcatctgatatagttattattatcatttttcaaaatgtggcccctgatgattaatcaggaaaacagaacacttaagattttcctacctcttaccaattccagttcaatgtgattttcctgttttgacccctgtccctctctggtatattttcccctatccaggctccaacagagccttctttccttttatttctttcttctctcttttttttttttttttttttttttttttttttttttgagacggagtctcgtactgtcgcccaggctggtatgcagtggcgctatctcggcacgctgcaacttctgcctcctgggttcacgtgattctcctgccacagcctcctgagtagctggaattacaggaacacacgacaatacctggttaattttttgtatttttagtagagacagggctacactgtgttggccagactgaccttgaactcctgatctcgtgatccacccacctcagcctccctaagtgctggcttctttcattttttagaaccccatcctctccaggagaccccatccagtcactcttcttcctcctcctgtcctctcccaggaagttctctcctcacctgtgaccaggagccccttccatttgatgtgctctgtgcagggaggggctgagaggggccccatggtctctgctgcctgtgtgttctcctctgtggagatgagcctaggatccagaaacttcctgagcacggctgtcagctgtgctgtccttcctccttctgcactgagcctcttcctggggcagcagcaattcccaggctcatgggtggggtcaggcccaggacacctctctgtcccctcctctctcagtcctgcctccttgtccctccttctgttttccttttgtctgtgtttcaggtccctggggattgtggaggcctctgcctttttcagcagtgattctttcaccaaacctcaacacacactttgtgcagacacacacacacacacacacacacacacacacaaaagagacacacaccgacccacacagtgacacacataccctgcaggttgggcaaggacagtcctgggcctcagcctcctgctgtccccatggccctgggtcggggtacacattcacgacctttgccctctttcatccccatctggctctccccttcagtgcaggaggctggagctgcaccaggtccctgtcacagtgatgtcccattgtgctgtgggtgagctgtgtgttgcctggtgagagggacccttcctttctctaatcgtgtctagcttggctgcagcttccaagaatggacattcaggacctgggtgtcctagaggaaactgtcctttctggaggtgtgcagggtgaatctctcatgcctcttggtaggagaggcctgtgctggttgctcagtgggggctgtgagtcccgtagtcaaggggaagttctcggtcactctctgactccctggggtttggctgctgagctggtgctcagggtttctcatgttcttcctgaccatctttgatgtcctctcttctctgcccagctgattgtcctgtggtcaccacaccttccccgtggtggtgcaggaggaagtggggagttacccaggaaccccgcgggacatggcttgttgagacgcaggagggggaacctgggacagagcaggggttcagagctggagagattcatcccgacttactccgtggccatgatgggctcagccctccatgtgctgacatacccaggggtctgtcctgagggttttgacctggccaagctgctgtgtgtagaggaggaacaggcagtggccagagatcctgtctggagggacattgctcacacctgagagggcaggtgggggtgagttgtgttctgggagcaaagagcaataacacccctcatctccccgcaaggacacaagagaggtctgtcttcccaagggacagctgggggcaggtggccccatcccggatggtacctgtgtgtgaccatcacatgcgctctgagccccgcgcggtgcagcgggcagggaggtcacagggtgcctggctgattcccggggaggctgtgggccctcaggcagccgctgttctgtgtcagctctaggcttggcctgggatgccccagagaacaggacagatggagcaggggtgggcatttagggagcagtgacagaaagagttgatgaggatggagggaggtcaggaggggaaagctcccagtgtagtgtcgcgtgcaccagcgctgccctgggagatgcctttagctgggcccagggaaggagcaggtgtgtggggcaggagctccctgcagagggagtggtgttaggttggcggcagccaaggcagggaggagctgacagagtccgtgtggggagcatggagggcgctgaggacttaggcccaagtgaccctggtgagggtggacactgctgggctgtgggttccgctgagggaggttggcatcccctgggaaggctccaggctgggagggactctgtcgccctcttgtggacagggagggaagtgtgaacggcagcaatcccaggccaggctgcatgttttattccatgtggatctgcacacttcacacgaggtcacacatatgttatgttacagctccttcaccttccagccccgtgagtcccagtctgtgtgactctacgttcactgttctccctctttcacaatcagatgtccgaaacgcagatttttgtcaccttctgtgagtttgtgtttgtgtgcagtaggcggcactgtgtataccctgggggcagtgatgtctggggctgagcactggacatgggcttgggagcagaagagggagcagcagggtggg

SEQ ID NO: 1560940 - DNA, 4001 bp, Homo sapiens
cgagtgtctgcagggtctggatgcgggaaaggaattctgatctgttgaaatttgtctcttctgtgtgtgtcctgcactaaatgcccaaaccccagcatgggacataatgcagagagggacacaggcacaatccaggcctgacaatcctttgtgtgtgaagtaaagaccccatcccccaacacccagtgatcacgtggagtcactcacggtataaggtgaaggtgaaatgtccagtttctcctctagtcccatcacctcgctttacgatgtgtaaggtgtaggatcctgcgtcctcccgggtgacattctggatcagcagggatgcattggaatatactgtttctcgtccactgtatgcaggcccatatataattatttgaccatctactacgtatgatgtaatgtaatggtagaggtccttcatttgccctttgtaccagatgtagccagcaagattctggggcaaattgtggacaagtagaagaacgtccttccccttggaaactttggttggctcggcttcaatcgtgacttgggcagtggtaggcaagttccagaagtttaaaagtaatgctaggaggtggagagagcatcagtcaatattgagacctatgcattggggtgaaaagatgtggccctgggtcctgagaaggtctcttcaatcctcagctttgaagagacacacacacacacatacaaacacacacacacacacaaaaggggcatgtgtatatgtgtttgtgtcctactctcctactaggtgaaggtcagcaacatgacccccattccttcaacacttctgaccttggcatttttctgtttggaatcctcttccccaggggtccgcacggccccctccacactgccctcaggtcctgctcacatcagggcatccttagacttctttcctgacgcctccttcagagaccctgggtcttccctttctgacctttccctgctctgctccctccagggttcttctcaacacctgacctcacattctagaactctttgcatgtctgtcttcccccccatgacagcgtgagctccgtgaggacagggacttttgtgatcttctttgcaccccagtgcctggaacaggctgcagactcctgtagatgtgagagttctcagggccctccatgccctgggtgttttttcttcccccagttgttgaggtttttttgctgaggacagtgtttcatgccctgcttatatttttatttgaagtgtcatctgatatagttattattatcatttttcaaaatgtggtggcccctgatgattaatcaggaaaacagaacacttaagattttcctacctcttaccaattctggttcctgtgactttcctgttttgacccctgtccctcttgggtgtattttcccctatccaggctccaacagagacttctttcctttttttcttttttctttccattcttttttttttttgagacggagtcttgtactgtcgcccaggctggcgtgcagtggcactatctcggctcactgcaatttcttcctcccgggttcacgtgattctcctgcctcagcctcccgggtagctaggattactggagcacaccacaatatctggttaaatttttgtatttttagtagagacagggcttcactgtgttggccagactgatcttgaactcctgatctcgtgatccaccctcctcagcctccctaagtgctggcttcttttattttttagaaccccaggagtctctccaggagaccccatccagtcactctgcttcctcctcctgtcctctcccaggaagttctctcctcacctgtgagcaggagccccttccaggtgatgcgctgtgtgcagggaggggctgagaggggccccatggtctctgctgcctgcgtgttctcctctgtggagctgagcctaggatccagaaacttcctgagcatggctctcagctgtgctgtccttcctccttctgcgctgagcctcttcccggggcaggagcacttctcaggttcatgggcggggtcaggcccaggacacctctctgtcccctcctctctcagtcctgcctccttgtccctcctgtttttccttttgtctgtgtttcaggtccctgggaattgtggaggcctctgcctttttcagcagtgattctttcaccaagcctcatcacacactttgtgcagacacacacacacacagacacacacagaagagacacacacagacccacacagtcagaaacataccctgcaggttgggcaagcagagtcctgggcctcagcctcctgctgtccccatggctctgggtcggggtgcacattcatgccctttggcctctttcatccccatctggctctccccttcagtgcaggaggctggagctgaaccaggtccctgtcacagtgacaccccattgtgctgtgggtgagctgtgtgttgcctgatgagagggaaccttcctttttctaatcgtgtctagcttggctgcagcttccaaggatggacattcaggacctgggtgtcccagaggaaactgtccttcctggaggtgtgcaggatgaatctctcatgcctcttgtgaggagaggcctgtgctggttgctcagtggggggctgtgagtcccatagtcaaagggacagttctcggtcactctatggctccctggggtctggcggctgagctggagctcatggtttctcatgttcttcctgaccatctttgatgtcctctcttctctgcccagcttattgtcctgtggtcaccacaccttccccgtggtggtgcaggaggaagtggggagttacccaggaaccccgggggacatggctcattgagatgcaggagggggagcctgggacagagcaggggttcagagctggagagattcatcccaacttactctgtggccatgatgggctcagccatccatgtgccgacatacccaggggtctgtcctgaggtttttgacctggccaagctgctgtgtgtagaggaggaacaggtagtggccagagagcctgtctggagggacgttgctcacacctgagtgggcgtgtgggggtgagttgtgttctgggagcaaagagcaataacatcccccttctcccagcaagcacacaggagaggtctgtcttcccaagggacagctgggggtaggtggccacatcccggatggtgcctgtgtgtgagcatcacacgtgctctgagccccccggggtgcagggagcaggcaggacacagggtgcctggctgattcccggggaggctgtgggccctcaggcagccactgttctgtgtcagtgctaggcttggcctgggatgccccagagaacaggacagatggagcaggggcaggcatttagggagcagtgacagaacgagttgatgaggatggagggaggccacgaggggaaagcacccagtgtagtgtcgcgtgcaccagcactgccctgggagatgcctttagctgggcccagggaaggagcaggtgtgtggggaggagctccctgcagggggagtggtgttaggttggcggcccccaggtcagggaggagctgacagagtccgtgtggggagcatggagggcgctgaggacttgggccgaagtgaccctggtgagggtggaccctgctgggctgtgggttccgttgagggcggttggcatcccctgggaaggctccaggctgggagggactctgtccccctctggtggacagggagggaaatgtgaacggcagcaatcccaggccaggctgcatgttttattccacatggatctgcacacttcacacgaggtcacacatatgttatgttatagctccttcaccttccagccccgtgagtcccagtctgtgtggctctatgttcactgttctccctctttcacaatcagatgtcccaaatgcagatttttgtcaccttctgtgagtttgtgtttgtgtgcagtaggcagcactgtgtataccctgggggcagtgatgtctggggctgagcagtgcacatgggc

SEQ ID NO: 1560941 - DNA, 4001 bp, Homo sapiens
gacttaatgcagagagggacacaggcagagtccaggcctgagaatcctgtgtgtgtgaagtagaagtgacccctgtcccccaacacccagggatcatgtggaatcactcacggtgtaaggtgaaggtgaaatgtccagttactcctccagtcccatcgcgtcgctttatgatgtgtaaggtgtaggatcctgcatcctcctgcgtgacattctggatcagcagggatgcattggaatatactctttctcttccactgtatgcaggcccatatataattctttgaccgtctactacatatgatgtaatgtaatggtagaggtatgtcatttgccctttgtaccaaatgtagccagcaagattctggggcaaattgtggacaagtagaagaacatccttcccctcagaaactttgggtggctgggcttcaatcgtgacttgggcagttgtgggcggattccagaagtttaaaagtgatgctaggaggtacagagagcatcagttaatattgagacctatgtattggggtgaaaagatgggtcctgagaaggtctcttcaatcctcagccttgaagacacacaaacacacacatacaaacacatacacacactaaaggggcgtgagtgtatgtgtgtgtgtcctactgtcccactaggtcaagatcagcagcatgacccccattccttcaacacttctgaccttggcatttttctttttggattcctcttccccaggggtccgcacggccccctccacactgccctcaggtcctgctcacatcagggcatccttagacttctttcctgatacctccttcagagaccctgggtcttccctttctgacctttccctgctctcctccctccagggttcttgtcaacacctgatctcacattctagatcacttagcatgtctgtcttccccccacgatgactgtgtgagctccgtgaggacagggacttttgtgatcttggttgcaccccagtacctggaacaggcggcagactcctgtagatgtgagagttctcagggtctccaccctctggatgtttctttttccccccaattgttgaggtttcttgctgaggacagtgtttcatgtcctgcttatattttcatttgaagtgtcatctgatatagttattgttatcatttttcaaaatatggtggcccctgatgattaatcaggaaaacagaacacttaagattttcctaccacttaccaattccgcttcaatgtgactttcctattttgaccctctggtgtattttcccctatccaggctccaacagagccttctttcccttttcttcttttttctttttttccttttttcttttttttttttttgagacggagtctcgtcctgtcacccaggctggtgtgcagtagtgctatcttggctagctgcaacttctgcctcgtgggtgcacgtgattctcctgccacagcctcctgagtagctatgattacaggagcacaccactatacctggttaattttttgtgtttttagtagagacagggcttcacagtgttggccagactgatcttgaactcctgatctcctgatccacccaactcagcctcccaaagtgctggcttctttcatttttcagaaccccatcctctccaggagaccccatccagtcactctgcttcctcctcctgtcctctcccaggaagttctctcctcacctgtgagcaggacccccttccaggtgatgcgctgtgtgcagggaggggctgagaggggccccatggtctctgctgcttgtgtgttctcctctgtggagataagcctaggatccagaagcttcctgagtacggctgtcagctgtgctgtccttcctccttctgtgctgagcctcctcccggggcaggagcatttctcaagctcgtgggcggggtcaggcccaggacacctctctgtcccctcctctctcagttctgcctccttgtccctcctgtttttccttttgtctgtgtttcaggtccctgggaattgtggaggcctctgcatttttcagcagtgattctttcaccaaacctcaacacacactttgtgcagatgcacacacacacacacacacacagaagagacacacacgacccacatggtcacacacataccctgcaggttaggcaagcagagtcctgggcctcagcctcctgctgtccccatggctctggggtagggtgcacattcacgccctttaccctcttccttcctcatctggctctccccttcagtgcaggagctgcacaaggttcccgtcacagtgacgtcccattgtgctgtgggtgagctctgtgttgtctggtaagagggacccttcctttctctaatcgtgtctagcttggctgcagcttccaaggatgaacattcagtacctgggtttcccagaggaaactatccatcctggaggtgtgcagggtgaatctctcaggcctcttgggaggagaggcctgtgctgattgctcagtgggggctgtgaatcccagagtcaaagggacagttctcggtcactctgtgtctccctggggtctggcggctgagctggagctcagggtttctcatgttctccctgaccacctttgatgtcctctcttctctgcccagctgattgtcctgtggtcaccacaccttccccgtggtggtgcaggaggaagtggggagttacccaggaaccccgcgggacatggcttgttgagacgcaggagggggagcctgggacagagcaggggttcagagctggagagattcatcccgacttactccgtggccatgatgggctcagccctccctgtgctgacatacccaggggtctgtcctgagggttttgacctggccaagctgctctctgtagaggaggaacaggcagtggccagagagcctgtctggagggaccttgctcacacctgagagggcgggtgggggtgagttgtgttctgggagcaaagaaaaataacaccccccttctccccacaagcacacaggagaggtctgtcttcccaagggacagctggtggcaggtggccacatcccggatggtgcctgtgtgtgaccatcacacgctctctgcgccccctgggctgcagtgggcaggcaggacacagggtgcctggctgattcccggggaggctgtgggccctcaggcagccgctgttctgtgtcagcgctaggcttggcctgggatgccccagagaacaggacagatggagcaggggcgggcatttagggagcagtgacagaaagagttgatgaggatggagggaggtcacgaggggaaagcgtccagtgtggcgtcgcgtgcaccatcgctgcccgggagatgcctttagctgggcccagggaaggagcaggtgtgtggggcaggagctacctgcagagggagtggtgttaggttggcggctgcgggtcaggaaggagctgacagagtccgtgttgggagcatggagggctctgaagacttgggccgaagtgaccctggtgagggtggaccctgctgggctgtgggttccgctgagggaggttggcatcccctaggaaggctccaggctgggaaggactctgtcgccctctggtggacagggagggaagtgtgaacggcagcaatcccaggccaggctgcatgttttattccatgtggatctgcacactttacatgaggtcacacatatgttatgttacagctccatcaccttccagccccttgagtcccagtctgtgtgactctacgttcactgttctccctctttcacaatcagatgtcccaaatgcagatttttgtcaccttctgtgagtttgtgtttgtgtgcagtaggcagcactgtgtataccctgggggcagtgatgtctggggctgagcagtgcacgtgggcttgggagcagaagagggagcagcagggtgggaagatcaatatcggggggcagggacaagtcattttctttttctcactcccagggaccagaacccaggattctgactccagggcac

SEQ ID NO: 1560942 - DNA, 4001 bp, Homo sapiens
tgagtccccccatcagactgtccttcctctgcagcgagtgtctgcagggtctggatgcgggaaaggaattctgatctgttgaaatttgtctcctctgtgtgtgtcctgcactaaatgcccaaaccgcagcatgggacataatgcagagagggacacaggcacagtgcaggcctgacaatcctgtgtgtgtgaagtagaaatgacccctgtcccccaacacccagggatcatgtggaatcactcacggtataagttgaaggtgaaatatccagttactcctctagtcctatcacctcgctttatgatgtgtaaggtgtaggatcctgcgtcttcccgggtgacattctggatcagcagggatgcattggaatatactgtttctcgtccagtgtatgcaggcccatatatatttatttgaccgtctactacatatgatgtaatgtaatggtagaggtccatcagttgtcctttgtaccagatgtagccagcaagattctgaggcaaattgtggacaagtagaagaacatccttcccctcggaaactttgggtggcagggcttcaatcgtgacttgagcagtgataggcaggttccagaagtttaaaagtgatgctaggaggtggagaaagcaccagtcaatattgagacctgtgtattggggtgaaaagatggagccctgggtcctgagaaggtctcttcaatcctcagccttgaagacacacacacacacaaacacacacacacacaaaaggtgcatgttagtttgtgtgtgtgtatgtgtgtgtgtcctactgtcctactaggtcaaggtcagcagcgtgacccctattccttcaacacttctgaccttggcatttttgtatggaatcctcttccccaggggtccacacggcacccccccccccccacactgccctcaggtcctgctcacatcagggcatccttagacttctttcctgacacgtccttcagagaccctgggtcttccctttctgacctttccctgctctgctccctccagggttcttgtcaacacctgacctcacattctagatctctttgcatgtctgtcttcctccccatgacagcgtgagctctgtgaggacagggacttttgtgatcttggttgcaccccagtgcctggaacaggctgcagactcctgcagatgtgagagttctcagggccctccacacccttggtgttttattttcccccaattgttgaggattttgctgaggacagtgtttcatgtcctgcttatacttttattagaagtgtcatctgatatagttattattatcatttttcaaaatgtcgtggccctcttaccaattccggttcaatatgactttccagttttgacctctgtccctctctggtgtattttaccctatccaggctccaacagagacttctttccttttttttcttttttcttttttttctttttatttttttgagacagagtctcgtactgtcacccaggctggcgtgcagtggtgctatctcggctcgctgcaacttctgcctcccgggttcatgtgattttcctgcctcagcctccagagtagctaggattccaagagcacaccaccatacctggttaattttttgtatttttagtagagacagggcttcactgtgttggcaggactgaccttgaactcctgatctcataatccacccacctcatcctcccaaagtgctggcttcttttattttttagaaccccatcctctccaggagacccaatccagtcactcttcttcctcctcctgtcctctcccaggaagttctctcctcacctgtgagcaggagccccttccaggtgatgtgctgtgtgcagggaggggctgagaggggccccatggtctctgcgcctgcgtgttctcctctgtggagctgagcctaggatccagaaacttcctgagcacggctgtaggctgtgctgtccttcctccttctgtgctgagcctctctccagggcaggagcacttctcaggctcatgggtggggtcaggcccaggacacctctctgtcccctcctctctcagtcctgcctccttgtccctccttctgtttttccttttgtctgtgtttcaggtccctgggaattgtggaggcctctgcatttttcagcagtgattctttcaccaaacctcaaccacactttgtgcagacacacacacacagaagagacacacacagacccacacagtcacacacataccccgcaggttgggcaagcagagtcctgggcctcagcctcctgctgtccccatggctctgggtcgggatgcacattcacgccctttgccctctttcatccccatctggctctccccttcagtgcaggaggctgaagctgcaacgggtccctgtcacagtgacaccccattgtgctgtgggtgagctgtgtgttgcctggtgagagggacccttcctttctctaatcgtgtctagcttggctgcagcttccaaggatggaccttcaggacctgggtgtcccagaggaaactgtccttcctggaggtgtgcagggtgaatctctcatgcctcttgggaggagaggcctgtgctggttgctcagtgggggctgtgagtcccagagtcaagaggacagttcttcatcactctatggctccctggggtctggcagctgagctggagctcagggtttctcatgttctccctgaccatctttgatgtcctctcttctctgcccagctgactgtcctggggtcaccacaccttccccgttgtggtgcaggaggaagtggggagttacccaggaaccccgcgggacatggctcgttgagacgcaggagggggagcctgggacagagcaggggttcagagctggagagattcatcccgacttactccgtggccatgatgggctcagccctccatgtgctgacatacccaggggtctgtcctgagggttttgacctggccaagctgctctctgtagaggaggaacaggcattggccagagatcctgtctggagggacgttgctcacacctgagagggcgggtgggggtgagttgtgttctgagagcaaagagcaataacacccctcatctccccgcaagcacacaagagaggtctgtcttcccaagggacagctggtggcaggtggccacatcccggatggtgcctgtgtgtgaccatcacacgctctctgcgccccctgggctgcagcaggcaggcaggacacagggtgcctggcttattcccggggaggctgtgggccctcaggcagccactgttctgtgtcaacactaggcttggcctgggatgccccagagaacaggacagatggagcaggggcgggcatttagggagcagtgacagaaagagttgatgaggatggagggaggtcacgaggggaaagagctcagcgtggcgtcgcgtgcaccagcgctgccctgggagatgcctttagctgggcccagggaaggagcaggtgtgtggggctggagctacctacagagggagtggtgttaggttggcggccgccaggtcagagaggagctgacagagtccatgtggggagcatggagggcgctgaggacttgggccgaattgaccctggtgagggtggacccttctgggctgtgggttctaatgagggacgttggcatcccctgggaaggctccaggctgggagggactctgtcgtcctctggtggacagggagggaagtgtgaacggcagcaatcccaggccaggctgcatgttttattccacatggatctgcacacttcacacgaggtcacacttacgttatgttacagctccttcaccttccagccccgtgagtcccagtctgtgtggctctacgttcactgttctccctctttcacaatcagatgtcccaaatgcagatttttgtcaccttctgtgagtttgtgtttgtgtgcagtaggcagcactgtgtataccctgggggcagtgatgtctggggctgagcactgcagttgggcttgggagcag

SEQ ID NO: 1560943 - DNA, 4001 bp, Homo sapiens
agggtctggatgcgggaaaggaattctgatctgttgaaatgtgtctcctctgtgtgtgtcctgcactaaatgcccaaaccccagcatgggacataatgcagagagtgacacaggcagagtccaggcctgacaattctgtgtgtgtgaagtagaaatgacccctgccccccaacacccagggatcatgcggaatcactcacagtataaggtgacagtgaaatatccagttactcctccagtcccatcgcctcgctttatgatgtgtaaggtgtaggatcctgcatcctcctgtgtgacattctggatcagcagggatgcattggaatatactgtttctcgtccactgtaggcaggcccatatataatttgaccgtgtactacatatgatgtaatgtaatggtagaggtccgtcatttgccctttgtaccagatgtagccagtaagattctggggcaaattgtggacaagtagaagaacatccttcccctcggaaactttgggtggcttggcttcaattattacttgggcagtggtgggcaggttccagaagtttaaaagtgatgctaggaggtagagacagcatcagttaatatttggacctatgtattggggtgaaaagatggggccctgtgtcctgagaaggtctcttcaatcatcagccttgaagatatgcacacacacacatacaaacacacacacacaaaagggcatgtgtgtttgtgtgtgtgtatgtgtgtgtgtcctactgtcctactaggtcaaggtcagcagcatgacccccattccttcaacactcctgaccttggcatttttctgtttgcaatcctcttccccaggggtccgcacggccccctccacactgccctcaggtcctgctcacatcagggcatccttagacttctttcctgatgcctgcttcagagaccctgggtcttccctttctgacctttccctgctctgctccctctagggttcttgtcaacacctgacctcacattctatatctctttgcatgtctgtcttcctccccatgagagtgtgagctctgtgaggacagagacttttgtcatgttggttgcaccccagtgcctggaacaggatgcagactcctgtagatgtgagagttctcagggccctccatgccctgggtgttttttttcccccaattgttgaggttttttgctgaggaaagtgtttcatgccctggttacatttttatttgaggtgtcatctgatatagtcattattatcatttttcaaaatgtggtggcccctgatgattaatcaggaaaacagaacacttaagattttactacctcttaccaattccggttcaatgtgactttcctattttgacccctgtccctctctggtgtattttcccctatccaggctccaacagagccttctttccctttttttctttcttctttttattcttttttttttttttttttgaaatggagtctcgtactgtcacccaggctggcgtgcagtggtgctgtctcggctagctgcaacttctgcctcctgggttcatgtgattatcctgcctcagcctcccgaaagctgggattacaggagcacaccaccatacttggttaattttttgtattttttggtagagacacgtctacactgtgttggccagactgatcttgaactcctgatctcgtgatccacccacctcagcctccctaagtgctggcttcttttattttttagaaccccatcctctccaggataccccatccagtcactctgcttcctcctcctgtcctctcccaggaagtcctctcctcacctgtgagcaggagccccttccaggtgatgtgctgagtgcagggaggggctgagaggggtcccatggtctctgctgtctgtgtgttctcccctgtggagatgagcctaggatccagagacttcctgagcagggctgtcaggtgtgctgtccttcctccttctgtgctgagcctcttcccagggcagaagcacttctcaggctcatgggcggggtcaggcccaggacacctctctgtcccctcctctctcagtcctgcctccttgtccctccttctgtttttccttttgtctgtgtttcaggtccctgggaattgtggaggcctctgcctttttcagcagtgattctttcaccaaacctcaacacacactttgtgcagacacacacacacacacacacacacacacacacagacccacacagtgacacacataccctgcaggttgggcgaggacagtcctgggcctcagcctcctgctgtccccatggctctgggtcggggtgcacattcatgccatttgccctctttcatccccatctggctctccccttcagtgcaggaggctggagctgcaccaggtccctttcacagtgatgtcccattgtgctgtgggtgagctgtgtgttgcctggtgagagggacccttcctttttctaatcgtgtctagcttggctgcagcttccaaggatggtcattcaggacctgggtgtcccagaggaaactgtccttcctggaggtgtgcagggtgaatctctcatgcctcttgggaggagaggcctgtgcctgttgctcagtggtggctgtgagtcccatagtcaaagggaaagttctcggtcactgtatgactccgtggggtccggtggctgagctggagctcatggtttctcatgttcttcctgaccatctttgatgtcctctcttctctgcccagctgattgtcctgtggtcaccacagcttctccgtggtggtgcagaaggaagtgaggagttaaacaggaacccggtgggacatggctcgttgagacgcaggagggggagcctgggtcggagcagagtttcagagctggagagattcatcccgaccaactccgtggcaatgttgggcagagcctttcatgtgttgacatacccaggggtctgtcctgagggtttttgacctggccaagctgctgtgtgtagaggaggaacaggcagtggccagagatcctgtctggagggacgttgctcacacctgagcgggcgggtggggggtgagttgtgttctgggagcaaagagcaataacatcccccttctccccgcaagcacacaggagaggtctgtcttcccaagggacagctggggataggtggccacacctcggatggtgcctgtgtgtgaccatcacacgcgctctgagccccgtggggtgcagcgtgcaggcaggtcacagggtgcctggctgattcccggtgaggctgtgggccctcaggcagccgctattctgtgtcagcgctaagcttggcctgggatgccccagggaacaggacagatggagcaggggcgggcatttagggagcggtgacagaaagagttgatgaggatggagggaggtcacgaggggaaagcgcccagtgtggcatcgcgtgcaccagcgctgccctgggagatgcctttagctgggcccagggaaggagcaggtgtgtggggcaggagctacctgcagagggcgtggtgttaggttggtggcccccaggtcagggaggagctgacagagtccgtgtggggagcatggagggcgctgaggacttaggccgaagtgaccctggtgagggtggacactgctgggctgtgggttccgctgagggaggttggcttcccctgggaaggctccaggctgggagggactcggtcaccctctggtggacagggagggaagtgtgaacggcagcaatcccaggccaggctgcatgttttattccacgtggatctgcacacttcacacgaggtaacacgtatgttatgttacagctccttcaccttccagccccgtgagacccagtctttgtggctgtacgttcactgttctccctctttcacagtcagatgtcccaaaggcagatttttgtcacctttgtgagtttgtgtttgtgtgcagtaggtggcactgtgtataccctgggagcagtgatgtctggggctgagcagtgcacgtgggcttg

SEQ ID NO: 1560944 - DNA, 4001 bp, Homo sapiens
tccttcctctgcagcaagtttctgcagggtctggatgtgagaaaggaattctgatctgttgaaatttgtctcctctgtgtgtttcctgcaataaatgcccaaaccccagcatgggacataatgcagagagggacacaggcacagtccaggcctgacaattctgtgtgtgtgaagtagaaatgacccctgccccccaacacccagggaccatgtggaatcactcacggtataaggtgaaggtgaaacgtccagttactcctccagtcccatcacctcgctttatgatgtgtaaagtgtaggatcctgtgtcttcctgggtgacattctggatcagcagggatgcattggaatatactgtttctcgtccactgtatgcaggcccatatttaattatttgaccgtctactatatatgatgtaacataatggtagaggtccctgatttgtcctttgtaccagatgtagccagtaagattctggggcaaattgtggacaagtagaagaacatccttcccctcggaaacttttggtggctgggcttcaatcgtgacttgggctgtggtgggcgggttccagaagtttaaaagtgatgctaggaggtggagagagcatcagtcaatattgagacctatgtgttgggttgaaaagatgggcccctgggtcctgagaaggtctcttcaatcctcagccttgaagacacacacacacacacacacacacacacacacacacacacaaacacacacacacacatataaaaggggcatgtgtgtttctgtgtgtgtcctactgtcctactaggtcaaggtcagcagcatgacccccattccttcaacactcctgactttggcatttttctgtttggaatcctcttccccaggggtccgcacggccccctccacactgccctcaggttctgctcacatcagggcatccttagacttctttcctgacacctccttcagagaacctgggtctttcctttttgacctttccctgctctgctccctccagggttcttgtcaacacctgatctcacattctagatctctttgcatgtctgtcttcctccccatgacagcatgagctccgtgaggacagggacttttgtgatcttggtcgcaccccagtgcctggaacaggctgcagactcctgtagatgtgagagttctcaggggcctccatgccctgggtgttttttttcctcccaattgttgaggttttttgctgaggacagtgtttcatgccctgcttatatttttatttcaagtgtcatctgatatagttattattttcatttttcaaaatgtggtgacccctgaggattaatcagaaaaacagaacacttaagattttcctacctcttaccaattccggttcaatgtgactttcctattttgacccctgtccctctctggtgtattttcccctatccaggctccaacagagccttctttccttttttttcttttttcctttttttcttttgggacggagtctcatactgtcacccaggctggcatgcagtggtgctatctcggctagctgcaacttctgcctcccgggttcatgtgattctcctgcctcagcctcctgagtagctaggattacaggagcacaccaccatacctggttaattttttgtatttttagtacagacagggctacattgtgttggccagactgatcttgaactcctgatctcttgatccacccacctcagcctcccaaagtgctggcttcttttattttttagaaccccatcctctctaggagaccccatccagtcactctgcttccttttcctgtcctctcccaggaagttctctcctcacctgtgagcaggagccctttccaggttatatgctgtgtgcagggaggggctgagaggggccccatggtctctgctccctgcgtgttctcctctgtggagatgagcctaggatccagaatcttcctgagcacggctgtcagctgtgctgtccttcctccttctgcactgagcctcttcccggggcaggagcacttctcaagctcatgggtggggtcaggcccaggacacctctctgtcccctcctctctcagttctgcctccttgtccctccttctgtttttccttttgtctgtgtttcaggtccctgggaattgtggagccctctgcctttttcagcagtgattctttcaccaaacctcaacacacactttgtgcagacacacacacacacacacacacatacacacacacacacacacacagaagagacacacacagacccacagagtcacacacataccctgcaggttgggcaagcgcagtcctgggcctcagcctcctgctctccgcatggctctggttaggggtgcacattcacgccctttggcctctttcatccccatctggctctcccctgcagtgcaggaggctgaagctgcaccaggtccctgtcacagtgatgccccattgtgctgtgtgtgaactgtgtgtttcctggtgagagggacccttcctttctctaatcgtatctagcttggctgcagcttccaaggatggacgttcaggacctgggtgtcccagaggaaactgtccttcctagaggtgtgcagggtgaatctctcatgcctcttgggaggagaggcctgtgctgattgctcagtgggggctgtaagtcccatagtcaaagagagagttctcggtcactctttggctccctggggtctggcggctgagctggagctcaggatttctcgtgttcttcctgaccatctttgatgtcctctcttatgtgcccagctgattgtcctgtggtcaccacaccttccctgtggtggtgcaggtggcagtgaagagttacccaggaaacccgcgggacatggctcgttgagacacaggagggggagcctgggacagagcaggggttcagagctggagagattcatcctgacttactccgtggccatgatgggctcagccctccatgtgccgacatacccaggggtctgtcctgagggttttgacctggccaagctgctgtgtgtagaggaggaacaggcagtggccagagatcctgtctgcagggacgttgctcacgcctgagatggtgggtgggggtgggttgtgttctgtgtgcaaagagcaataacacccccctttccccgcaagcacacaggagaggactgtcttcccaagggacagctgggggtaggtggccacatcccagatggtgcctgtgtgtgaccatcacacacgatctaagccaccaggggttcagcgggcaggcaggtcacagggtgcctggctgattcccggggaggctgtgggcccttaggcagccgctgatctgtgtcagctctaggcttcacctgcgaagccccagagaacaggacagatggagcaggggtgggcatttagggagcagtgacagaaagagttgatgaggatggagggagttcacgaggggaaagcgcccagtgtggcgttgcgtgcaccagagctgccctgggagatgcctttagctgggcccagggaaggagcaggtgtgcggggaggagctacctgcagggggagtggtgttaggttggtggctgccaggtcagggaggagctgacagagtccatgtggggaacatggagggcgcgctgaggacttgagccgaagtgaccccggtgagggtggaccctgctgggctgtgggttccgctgagggaggttggcatcccctgggaaggctccaggctgggagggactctgtcaccctctgttggacagggagggaagtgtgaacggcagcaatcccaggccaggctgcatgttttattccatgtggatctgcacacttcacacgagatcacacatatgttatgttacagctccttcaccttccagccccgtgagtcccagtctctgtggctctacgttcactgttctccctctttcacaatcagatgtcccaaacgcagatttttgtcaccttctgtgagtttgtgtttgtgtgcagtaggcggc

SEQ ID NO: 1560945 - DNA, 4001 bp, Homo sapiens
ccatcagactgtccttcctctgcagcgagtgtctgcagggtctggatgcgggaaaggaattctgatctgttgaaatttgtctcctctgtgtgtgtcctgcactaaatgcccaaaccccagcatgggacataatgcagagagggacacaggcaatgtccaggcctgacaatcctgtgtgtgtgaagtagaagtgacccctgtcccccaacacccagggatcatgtggaatcactcacgatataaggtgaaggtgaaatgtccagttactcctctattctcatcacctcccattatgatgtgtaaggtgtaggatcctgcgtcttcctgggtgacattctggatcagcagggatgcattggaatatattgtttctcgtccactgtatgcaggcccatatataattatttgaccgtctactacatatgatgtaatgtaatggtagaggtccctgatttgccctttgtaccagatgtagccagtaagattctggggcaaattgtggacaagtagaagaacatccttcccctcagaaactttggttggctgggcttcaatcgtgacttgggcagtcgtgggtgggttccagaagtttaaaagtgatgctaggaggtggagagagcatcagtcaatattgagagctatgtattggtgtgaaaacatggggccctgggtcctgagaagttctcttcagtcctcagccttgaagacacagacacacacacatacaaacacacgcacacacacacacaaaagcggcatgtgtgtctgtgtgtgtgtatgtgtgtgtgtcctactatcctactaggtcaaggtcagccccatgacccccattccttcaacacttctgaccttggcatttttctgtttgcaatcctcttccccaggggtccgcatggccccctccacactgccctcaggtcctgctcacatcagggcatccttagatttctttcctgacacctccttcagataccctgggtcttccctttctgacctttccctgctctgctccctccagggttcttctcaacacctgaccttacattctagatctctttgcatgtctgtcttcccctccatgacagcgtgagctccatgaggacagggatttttgtgatcttggttgcaccccagtgcccagaacaggctgcagactcctgtagatgtgagagttctcagggccctccacgcccttggtgtttttttttccccccaattgttgaggtttcttgctgaggacagtgtttcatgccctgtgtatatttttatgtgaagtgtcatctgatacagttattattatcatatttcaaaatgtggtggcccctgatgattaatcaggaaaacagaacacaagattttcctacctcttaccaattctggttcctgtgactttcctgttttgacccctgtccctctctggtgtatttccccctatccaggctccaatagagccttctttcctttttctcttttttctctttttttttttttgagatggagtctcatactgtctcccaggctggcgtgcgatggcactatctcagctagctgcaacttctgcctcctgggttcacgtgattcttctgcctcagcctcccgagtagctaggattagaggagcacaccacaatatctggttaaatttttgtatttttagtagagacagggcttcactgtgttggccagactgatcttgaactcctgatctcatgatccacctgcctcagcctcccaaagtgctggcttctttcattttttagtaccccatactctcaaggagaccccatccagtcactctgcttcctcctcctgtcctctcccaggaggttctctcctcacctgtgagcaggagccccttccaggtgatgcgctgtgtgcagggaggggctgagaggagccccatggtctctgctgtctgtgtgttctcctctgtggagatgagcctaggatccagaagcttcctgagcacagctctcagcagtgctgtcctgcctccttctgcgctgagcttcttcccggggcaggagcacctctcaggttcatgggcggggtcaggcccaggacacctctctgtcccctcctctctcagtcctgcctccttgtccctcctgtttttccttttgtctgtgtttcaggtccctgggaattgtggaggcctctgcctttttcagcagtgattctttcaccaaacctcaacacacactttgtgcagacacacacacacacacacacacacacacacacacacacacacacacacacacacacagaaggacacacacagacctacacagtcagaaacataccctgcaggttgggcaagcagagtcctgggcctcagcctcctgctgtccccatggctctgggtcggggtgcacattcatgccctttggcctctttcatccccatctggctctccccttcagtgcaggaggctggagctgcaccaggtccctgtcacagtgacaccccattgtgctgtgggtgagctgtgtgttgcctggtgagagggacccttcctttctctaatcgtgtctagcttggctgcagcttccaaggatggacactcaggacctgggtgtcccagaggaaactgtccttcctggaggtgtgcagggtgaatctctcatgtctcttgggaggagaggcctgtgctggttgctcagtgggggctgtgagtcccatagtcaaagggacagttctcggtcactctgtgactccgtggggtctggccactgagctggagctcagggtttctcatgttcttcctgaccatctttgatgtcctctcttctctgcccagctgattgtcctgtggtcaccacaccttccccgtggtggtgcaggaggaagtggggagtcacccaggaaccccaagggagatggctcgttgagacgcaagagggtgtgcctgggacagagcaggggttcagagctggagagattcatcttgacttactccgtggccatgatgggctcagccctccatgtgccgacatacccaggggtctgtcctgagggttttgacctggccaagctgctgtgtgtagaggaggaacaggcagtggccagagagcctgtctggagggaccttgctcacacctgagggggcgtgtgggggtgagttgtgttctgggagcaaagagcaataacatcccgcttctccctgcaagcgcacaggagaggtctgccttcccaagggacagctggggcaggtggccacatcccggatggtgcctgtgtgtgaccatcacacgcactctgagcaccccgtggtgcagcgggcaggcaggtcatagggtgcctggctgattcccggggaggctgtgggcccttaggcagctgctgttctgtgtcagtgctaggcttggcctgggatgccccagagaacaggatagatggggcaggggcgggcatttagggagcagtgacagaaagagttgatgaggatggagggaggccacgaggggaaagcgcctagtgtggcgtcgcgtgcaccagcgctgccctgggagatgcctttagctgggcccagggaaggagcaggtgtgtggggaggagctccctgcagagggagtggtgttaggttggcggccaccaggtcagggtggagctggcagagtccgtgtggggagcatggagggcgctgaggacttgggccgaagtgaccctggtgagggtggaccctgctgggctgtgggttccgctgagtgaggttggcatcccctgggaaggctccaggctgggagggactctgtccccctctggtggacagggagggaagtgtgaacggcagcaatcccaggccaggctgcatgttttattccacatggatctgcacacttcacacgaggtcacacatatgttatgttacagctccttcaccttccagccccgtgagtcccagtctgtgtggctctatgttcactgttctccctctttcacaatcagatgtcccaaacgcagatttttgtcaccttctgtgagtttgtgtttgtgtgc

SEQ ID NO: 1560946 - DNA, 4001 bp, Homo sapiens
cctctgcagcgagtgtctgcagggtctggatgcgggaaaggaattctgatctgttgaaatttgtctcctctgtgtgtgtcctgcactaaatgcccaaaccccagcatgggacataatgcagagagtgacacaggcagagtccaggcctgacaatcctgtgtgtgtgaagtagaaatgaccccttccccccaacacccagggatcatgtggaatcactcacagtataaggtgaaggtgaaatgtcgaatttcttctctagtctcatcacctcgctttatgatgtgtaaggtgtaggttcctgcatccttccgggtgacattctggatcagcagggatgcgttggaatatactgtttctcttccactgtatgcaggcccatatataattattttaccatcaactatatacgatataatgtaatggtagaggtccgtcatttcccctttgtaccagaagtagccaggaagattctggggcaaattgtggacaagtagaagaacatccttcccctcagaaactttgggtggctgggcttcaatcgtgacttcggcagtggtgggcgggttccagaagtttaaaagtgatgctaggagggggagacagcatcagttaatattgagacctatgtattgtggtgaaaagatggggccctgggtcctgagaaggtctcttccatcctcagccttgaagatacacacacgcacacatacaaacaaacacacacaaaaaacgggcatgtgtgtttgtgtatgtgtatgtgtgtgtgtcctactgtcctactaggtcaaggtcagcagcatgacccccattccttcaacacttctgaccttggcatttttctgtttggaatcctcttccccaggggtccacacggccccctccacactgccctcaggtcctgctcacatcagggcatccttagacttctttcctgacacctccttcagagaccctgggtcttccctttctgacctttccctgctctgctccctccagggttcttgtcaacacctgatctcacattctacatctcttcgcatgtctgtcttcctccccatgacagcgtgagctccgtgaggacagggacttttgtgatcctggttgcaccccagtgcctgggacaggctgcagactcctgtagatgtgagagttctcagggccctccatgccctgggtgtttttttttcccccaattgttgaggttttttgctgaggatagtgtttcatgtcctgcttatatttttatttgaagtgtcatctgatatagttattattatcatttttcaaaatgtggtggccccggatgattaatcaggaaaacagaacacttaagattttcctacctcttaccaattccggttcaatgtgactttcctcttttgacccctgtccctctctggtgtattttcccctatccaggctgcaacagagccttctttcctttttttcttttttttttgagacggagtctcgtactgtcgcccaggctggcgtgcagtggcggtatctcggctagctgcaacttctgcctcccgggttcacatgattctcccacctcagcctcccgagtagctaggattacaggagtacaccaccatacctggttaattttttatatttttaggagagactgggcttcactgcattggccggactgatcttgaactcctgatctcgtgatccacccacctcagcctccctaagagctggcttcttttattttacaaccccatcctctccaggagaccccatccagtcactccgcttcctccccctgtcctctcccaggaagttctctcctcacctgtgagcaggagccccttccaggtgatgcgctgtgtgcaggaaggggctgggaggggccccatggtctctgctgcctgtgtgttctcctctgtggagatgagcctgggatccagaagctgtctgagcacggctgtcagctgtgctgtccttcctccttctgtgctgagcctcttcccggggcaggagcacttctcaagctcatgggcggggtcagtcccaggacacctctctgtccccttctctctcagtcctgcctccttgtccctccttctgtttttccttttgtctgtgtttcaggtccctgggagttgtggaggcctctgcctttttcagcagtgattctttcaccaaacctcaacacacactttgtgcagacacacacacacacacacacacacacacacacacacagaagagacacacacagacccacacagtcaggcacataccctgcaggttgggcaagcacagtcctgggcctcagcctcctgctgtccccatggctctgggttggggtgcacattcatgccttttaccctctttcatccccatctggctctccccttcagtgcaggaggctggagatgcaccaggtccctgtcacagtgacaccccattgtgctgtgggtgagctgtgtgttgcctggtgagagggacccttcctttctctaatcgtgtcaagcttgactgcagcttccaaggatggactttcaggacctgggtgtcccagaggaaactgtccttcctggaggtgtgcagggtgaatctctcatgcctcttaggaggagaggcctgtgctggttgctcagtgggggctgtgagtcccatagtcaaagggacagttctctgtcagtctatggctccctggggtctggcggctgagctggagctcagggtttctcatgttctccctgaccatctttgatgtcctctcttctctgcccagctgattgtcctgtggtcaccacaccttccccgtggtggtgcaggaggaagtggggagttacccaggaaccccgcgggacatggctcattgagacgcaggagggggagcctgggacagagcaggggttcagagctggagagattcatcccgacttactccgtggccatgatgggctcagccctccatgtgctgacacacccaggggtctgtcctgagggttttgacctggccaagctgctgtctgtagaggaggaacaggcagtgaccagagaggctctctggagggacgttgctcacacctgagagggcgggtgggggtgagttgtgttctgggagcaaagagcaataacaccgcccttctccacgcaagtacacaggagaggtctgtcttcccaagggacagctgggggtaggtggccacatcccggatggtacctgtgaatgaccatcacacgctctctgagccccctggggtgcagggggcaggcaggtgacagggtgcctggctgattcccggggaggctgtgggccctcaggcagccgctgttctgtgtcggcgctaggcttggcctgggaagccccagagaacaggacagatggagcaggggcaggcatttagggagcagtgacagaaagagttgatgaggatggagagagttcacgaggggaaagcgcccagtgtggcgtcgcgtgcaccagcgctgccctgggagatgcctttagctgggcccagggaaggagcaggtgtgtggggcaggagctccctgcagagggagtggtgttaggttggcggccgccaggtcagggaggaactgacagagtccgtgtggggagcatggagggtgctgaggacttgggccgaagtgaccctggtgagggtggaccctgctgggctgtgggttccgctgagggaggttggcatcccctgggaaggctccaggctgggagggactctgtcgccctctggtggacagggagggaagtgtgaacggcagcaatcccaggccaggctgcatgttttattccacttcacacgaggtcacacatatgttatgttacagctccttcaccttccagccccgtgagtcccagtctctgtggctctacgttcactgttatccctctttcacaatcagatgtcccaaacgcagatttttgtcaccttctgtgagtttgtgtttgtgtgcagtaggcaacactgtgaataccctgggggcagtgatgcctggggctgagcactgcacatggg

SEQ ID NO: 1560947 - DNA, 4001 bp, Homo sapiens
cggagggtgaggcgggtggatcgcctgaggtcaggagttcaagaccagactggccaacatggtgaaaccctgtctctactaataatacaaaaattagccagacttggtggtccatgcctgtaatcccagctacttgggaggctgagacaggagaatcgtgtgaacctgggaggtggaggttgcagtgagccgagatcatgccattgcactccagcctggacaagagcaaaactctgtctcaaaacaaaaaacaaacaaacaaaaaaaacatagatatacatatatatatgtgtatatatatatatatgtatgtatttctacctttcgatcagtcaaaatactctgaagaacattgcactgcactgccctgccttgtttgctgctgcctagcacatggtaggaaatagttgttaagtggacagatgaatgaatgaggtgtccttagcacacctgtggtagagcccacgatggctgtattctgatccacagcctccagaaattgtccgatgaccagcgggatgctttggattcgcttcacctcctcctgggcatggagaaattcctttttcaggttcttttgctcatctttgatgtattcctcctgcacctccaggaactccagctcttgctgcagcttctgcgagcagagaggggacagaaggggatggctccagacttgctgatccagagagtggtggaaagtggggaagagtatgagatgtcaggtcctgtgcaaggtctgggttgggggtcgaatgtaccttgtagcggctgtacaggtcctccaggtcctcaggctcagggcccaggaaggacaggccggtctggggccgggacacggacagtgctgggatctcatcctagacgaaaggggataactcacattggaagaagacagtcctctcatgaaagcttcccaacttcactaatgtttgttcccctccccacttcaccctgatgtcacttagcccctaacagacccctgatatcttaagaccctctaaatagatcctggaaaccttttggccacctaaacaagctctttatgtcaacttgcccctcaaacagatcttatgttatcatataccactcataacatgtccccagtgtcacacaacccccaactaggatctaaacgtcacatcaactccttatcagacccaaatgccacccaatccccttcaagaggttcctaatgtcacatggctctcctagataggctgttaaagtgactgcgccttcaacgagtcccaacattccccagtttcccctcaaagatcccttatgtcacagtctcctaactcaccttagacctaaatatcactcaggcaagccacagataatacttaactacccgccccattacccccatcagcaaagccctgaacatcagtcagccccgcagcccagacccggggatcactcggccgcacggcgggatcccatatatcactcaccgcctgacccaatcccaacgccgggccaccgacctcactaagcactaccggccagggttcgaaatcaatccgtctcaaagacccactaacgtcactcactcccccagccccgctttctgagccttacctcctaccatcactcggccacccagacaggccttcgaatggcacaaagctctccaccgaggcctctaaaataaccccaacctgggccggggtcctggaagccattcctccccccactcaggtctggcttcaccctctccccgcgagcccggcccggactaaaaagcccaagtccccactgtacctgagccttctccaccaagatgcctatctcctccatagtgaccaagccggcctctgtgtggcctgggatgatctgtcaccgcttccgctgacgacaacggaagtccctggctgaggaggcttctgggaagtgtagtttaagttacggctgagaggtgctggaagggcaggataggacgaagggctggtctgggctccgccctcaacataagctcatgcgctgtccgtacccgcaggcgcgagggcgggacgggagctgtgggcgtgcgcagtatcacgcggtggcgccatctcgccctgccgtggagggctgggggttctctccgggaggtggcgcagccccgttgctctttcaacggagtaagttcgcagagctctggcacggacagtctggcggccaactgctcttcgctttctagtgtctgggctggagggtccttgagctgggttccacagaagggattgatcgtacgggcgggtaaggtctccacgtggcgctgatccaaagattgtgcgccgcgcgggcgtgggaagatccgagctgcccctgaaggtgacatttcatactgggctttaccccgggattgaggagccccgagcccgcagtgagcaaccaatcgagtagaacccacgcgtctgggctggggaaaaggaggcagcgagtgcccagaagttgggtagcacaggagatccatagaccttagttctgtatcccaggtttccgccttacagatctatgccaggtcctgcgcttaagctttacaggcatcatcgtcgcaagtattatgtttcctcatttatagagaaggagacaagctcagagccacgaagccaccagccacagtcaacaatgtgccgaagggacaaagcatagattgggacccaggtctgtctgtccccaaagcctgtactcttggccccagggaaacactgctacccttcacaccagctacaatttttgttaagtaaaccttttattgaagttaaataaagagaagagcacaaatcattacagctcgacaaaattacacaaagtgaacatgcccatacaacctgaatccagatcgcaaaaccaaacagtagaagcctcatgtgctcccctttcccccatcccttcttctcccccctccactccccgccccgagacggagtctcactctgttgcccaggctaatatttgtatttttagtagagacagggtttcaccatgttggccaggccggtcacaaactcctgacctcaagtgatctgcctgccttggcctcccaaagtgctgggattataggcgtgagccaccacatccggcctcccgatcccttctaaaggttatcattcatctgtttttttcttttttttttaagagctagagtctctgtcgcccaggctggagtgcagtggcacgatcatagctcactagagtctccaactgctggcctcaagctatcctctctcctcagcctctgaaagcactgggattacaggcatgacccaccccatgtagcctttaaaaatatatcttttgaaagagattcttgctctgttgcccaggctggagtgcagtggtgagatcactactcactccaggttcaacctcccagactcaagcaatcctatacctcagcttcccaagcacctggaactacaggcgtgtgccaccacgccttgctaattttaaaatgttttttgtagagatagggtttcgctgtgttgcccaggctggtcacgaactcctggactcagatgatcctcccacttcagccttccaaagtgctgggattacagacatgagccactgtgcctggctggactcgccctgacttgtaacagctgggttacttttgtttgttttgaattctccttctctctagaccagtactctgtgtactgtgtttggtttcttttagttaatgttgtttttgtgagattcatgcataccgtgtgtagaaatagttctttcattttcattctggatggtttccattttatgactatgccctatacctcagactggatattttccagtttaggggtgttatagtgctattgttactgggggtccttgttcttagagctcccaagatggtggtgggccgcttccaagatggcagtaagtctcttgttctctgacctggggttcttggcctcacggattccaaggaatggaatcttgggccatgcggtgagtgttatagctctattcagctcgattaggaggaaccccgggcacttagcccg

SEQ ID NO: 1560948 - DNA, 4001 bp, Homo sapiens
ccagatgaaggaagaggacccaagcagccagagctccagaaataaaggagcttccatgcaaccacccccccagttgggggcagggcccattctcacttgtaatcaaagtagtagcatttgagctgggccatgtagcgctcgaaggaggggatgtccttgcgtaggatgctccattgggccccgatctccagtatgtcacctgtgggtgacagagtgagctctcaggaggtgactgaggtctcttccccaaccaccagtgctaccattcctgccatgacccccagattatcacccccaaccaaccccagtgacactcacgggccagaattagctgctgtttggtcagcttggtccctgtggttggcaagaagttgagctccagaagaactagctgatggggaggggagggagggaagaaagaaaagaagggaattcaaatacagatgacttacctgctctacgctctggtcttcccacttggaaaatggagctaaccatcatccagactcatgaggaatgctttctcataaagcactcagaacagggcctgagcacgcaacacatgcccatttaagattacatcacattacaattattaatagccccactggggaaacaaggagggacactcagtgcctgacccagtggaatcacgcggcggtggggacaggagtacattccattcttggcccatcttccccacaatctattggggaaggggtagctgggctatccccaaaatctatatctgggagggggaggtccaaatctccccccacagttcagcccatacatctttccttagcaggctcagcagcttgttccaagccactggatttacactccctcccaacagatgtttggtctgaagcactctgggccccgtattcttgttctctacttgtaagaatatttcttctaggttcagtcctgccttcacaactaggctgccccctctcccaacagatgcgagcctaagccccagatctctcagatcctaacccagcctggtcttaaccacacaccctctacacagcccaccttttcagcctcattcttttatcactccgggcagtcctcacttcccacttggtcttgcctggaatccaccatcaggaaaagcccgaatcccaatcctgccactccgaccagttaagcctccacgcaccaaaaatctaacccctcactcagttctgccataagtcttccaatcattcccccaccacccccgcgtgggtccattccagtcatctctcacttaaaaaaaaaatgtagagacagagtctcgctatgttgctcaggctgatcttgaactcctgggctcaagcgacgctcccccgcctcggcctcccaaagcgctgcgattacaggcgtgaccatcaacgctccctgtccctctctcgcttcttgacgccctccgagcccccactttggctgttccaaatctttcaccccatcggatcccccagcccgcctcagtctcgctggcaccgaggtggcttccgcggcccgggacttggttgggtccagacacctcgtagcgcctcccacgcccgcaacactcggtttcctgggcctgccgactttaccttgagtcgacccagctcttccccgcacttgctaagattggggcttttacggttccactcgcccttgagttgctcgtacatgccggtcgcggcctgcagaacagcgcccgaggttgccgcgggcccggagctcgagaagcctgccgccccgttcaccgccgcggccgccatcttgcgtgatgcggcaagcagaccgcctgatttacggcagcgccgcctacaaacgcttgcccggcggaagtggggccgagaggtggagcccaaggcccggggcggggctacaacctgcctcagcccgccccgggtagcccgccgtcgctctcgaggtggcgccctcggagccctgcccttaatgaacatgtcagttggagctccgcctctgtcgtcactcaagatggtgaccggaagttggcttttgccctaactgaaaatgacagctgtctcaacaccaccccccctacccacctcacggttccaataatgaacatggctgccctggcttcagtctgagtgctcgggacgctacgtagctgtcctggaggttccgccttcggggcagcgtctccaagccaaaaggtagcgggtgtcgtgccatttggagagctgtgttattctcattttatagacagactgagaggctgggtaaccttccaaaggactaacagctaggatgtgtacctggggctccctctccagtctttttcaatgcatccttccacatttttttcccaagcttatatgaactaactagttacaaaactcatccagctctatggctttcaatgtcatgtgtaagtggaggattcacaattttttttttttgagacggagtttagctcttgttgtccaggctggagtgcaatggagcaatcttggctcactgcatcctccgcctcctgggtacaagtgattcttctgccccagcttcccaagtagctgggattacaagcatgtgccaccacgcctggctaattttcgtatttttagtagagacgtaattttagtatttttagtagatgttggtcaggctggtctccaactcctgaactcaggcgattccctgggccctggcctcccgaaatgctgggattacaggcatgagccaccttgcctggccagtattcacaacttcttataccaacttcttcctccactgattgatattacatctgcacattcaacatcgctttttctctctttttaaaaaaaattaaattttttatagagacagagtctcattatactgcccaggctggtctcgaactcctgagctcaagcgatattcctgccttgacctcgcaaagtgttgggattagaggtgtgagccactgcgcctgggcagcacgtttttctcaaacccgactttcactctccgtctccaccatttagaatgtcatctccatgaaggcaggacgatttccttcactactgaattcccagtatctcagtgcttggcaaatattagtagacagtcaataaatatttgttggccaggcatggtggctcatgcctgtaatcccagcactttgggaagccgaggcagatagatcacttgaggtcaggagttcgagaccaacctggccaacatggcgaaaccccatctgtactgcaaataccaaaaaaaaaaaacaaaaaaaccagctgtgcgtggtggcacacacctgtaatcccagatactcaggagcccgaggcaggagaatcgcttaaacccaggaggtcagcttgtagtgagctgagattgtgccgctgcactccagcctgggtgacagagtgagactctgtctcagagaaaataaataaataaatgtaaaaataccaaaaatttgccgggcgtggtggtgcacatctgtagtacagctacttgggaggctgaggcaggagaagcacttgaacccgggaggcagaggttgcagtgaactgagatcgccattgcactcctgcctgggtgacagagcgagactgtgctcaaaaaaaaaaaaagaaaaaagaaaaaaagaaaaagaaagaaattatatatgtgttgaattaatgagtaaattaatatgtgaaagaagttgtggtggtaaaaaatgttttaaacaaaaatgatggccgggtgtggtggctcaagtctgtaatctcagcactttgggaggctgaagtggatggatcacctgaggtcaggagtttgagaccagcctagccaacatggtgaaactccgtctctactatacaaaaaattatctatccaggtatggtggcgggtgcctgcaatcccagttactcactcgggaggctgaggcaggagaatcacttgaacttgggaggtggaggttgcagtgagccaagatcgcaccattgcactccagcctaggcaacgagcaaaactccatctcaaaaaaaaaaagaaaaagacacaaataaacaaaatac

SEQ ID NO: 1560949 - DNA, 4001 bp, Homo sapiens
agcacttttgcgacctgggaccaaggttaggggcggaaacggatgtggagccagatgatgttgagagacagagacaggacacttgggtggggtcaagttgtagggagattcagccaattgaatgctggggccgggccagcattggggacctggaattgtagcctcagggtgagtactaaggactgaggtcacacctaggtagggccatagttgaggggctaggggagtttgagttgagggcagggtcaagagtcacatagggaaaccagccccttgccgttttctgcccctccttgcctcagtttccttgttccctctgggagctcccaggcttaaccgagctctctgtgcaggccatccacggcttccgagagacagagaagtcgcgctggtcagaagccagccgggccatcctgcagcgcgtgcaggcggccgcctttggccccggccagaccctgctctcctccgtgcacgtgctggacctggaagcccgcggctacatcaagccccacgtggacagcatcaaggtgggcagaggacggtgccttggcactcccagccagggggtaggcaggcccggttagatcctgacccatccccacgcctcttttgcagttctgcggggccaccatcgccggcctgtctctcctgtctcccagcgttatgcggctggtgcacacccaggagccgggggagtggctggaactcttgctggagccgggctccctctacatccttaggtacctccatccaggcagcacccacccctccaagaatgtgccatccgcccaccctgtgccctgggtactttccctcaatccagccctccccgaagacgcctttaccccagggtctgtgtgggaggcagcagggggctggaatccaggaggctggaatccaggtctgcctggagcaggggctgccctccttgcacccagtcacagcctgtttcttcctgcaggggctcagcccgttatgacttctcccatgagatccttcgggatgaagagtccttctttggggaacgccggattccccggggccggcgcatctccgtgatctgccgctccctccctgagggcatggggccaggggagtctggacagccgcccccagcctgctgacccccagctttctacagacaccagatttgtgaataaagttggggaatggacagcctaactgggacattgcagtggctgcttgctggggccgggatttgcaggggaacccaggatggcactggcccatagggagctccaggtgtggctggctggacacatggtcaaagtcacaaggccgggagagtggtgtcctttattgcactcactgctggtcgccccagcccactcccctcctcgttgtctctgcatccaggtctccaataaataagtcagccgagctcccccagcactgcagcttctgggtgccaggccgggcaccctcagccaccacagccgcaggcagccgccgagagctggggcagccgctgccagcggtggcggtcatcgaggaaggccacgtcggtgtagcgagtgggccggcagcagggcccgccgtgggctcggccctggccctgcagccgggccagcgccaggccatgctgggtgcgggcaccacgggggcagctgccggcgcagtagcggaagatgaccttctcctctgaggcgtagcccaggcctagctctgccacggacagggtcaggctccacagctggcatggaccagacagggctcggcgcaggcgggcaagggggcggtgggtgcctgtgggagggaagggcgctgacagtgagcagggtcagggctggggaaagttgggaagtcacagagggtccctggaagtccttacccagccaggtccctccagcctttgccacctgttcagacgagaactctccatcggccacgggaaccccacgggcatcggggccccagccctgtcccagctgcagggacaggagcagcagggagcccagcaggaacttccctacggccattgtgacgggcaggtcctgagagtgggagctgtgccccaaatttatgccctgcctgggctgggagctaacctcttcactgccggcccctgcagccaggaggccccacgtctgcaccagcccatctcctgcaccctcgaatccaggcatctgctccttctgccccacaccccacccttctaagagttaagggctcacccccagcctaccccaccccgacattccacacagccatttccgacgccccagacaccccctgatttacgagtgctgtgctggcggccagggcaggcaactggtgttcccccgacctgctgcctggagtggaagtcagggggcttcatgggaccccggtggggtccctccccactaagtcagggtgctggggctcaggagcccccacgtgtatcatgtgccaggtggagcatatgtgagtgctgggaaaggtggcttggcaggggactgagtccacgggaaccctccatggtggctcccgcctggaggattaggacatcatgcccctgtctccgggcctggctgagccagcatcaaaacaggaaaagggagaggcctggggacagccaagggtggggacacaaggggacagggacgcctgtctcgggaaggccaacctgagacccctataactgcagccccatcctgggatctgagcatgtcagagcccccggggcgatggaggctgtccaggtcatggtaacgtctagcacgatgcagacagataagggctctcgaggcttccatacccagccccgtgtgagcccagtcccctcaccggtacaggggagctcctcagaacccctcctactcggcttggtgaggaaagagatgggcacttagagtgtaaggcagtgcccgtagcttcgaatgcaaaaacaagcaaacagcttgtgattgtccgaaggggtgcttgactctaagcacccacaagattggggaaaatcagaaaaccctcacacacaacccgtgtgacccaggtgcaccctgtgctgttggtgggggtgtaaattgctagcagctctttggatgagcagctgctactggggaattgtaaattacaccctctgccccaggagccctgtttgcggggttcctcccacacaggcaagtgaaacagccagcacagggacatctgatgccttcttcatattaggaaagtctggaagtggcctcaactccatccgtgagggattgcttcgatgattatgttgtggtttttcttactgaagtgcttattgagatgataattttccgatggaaagaaaagcctgggcttggcgtggtggctcatgcctcgggaggctgaggcgggtggattacctgaggtcaggagtttgagaccagcttgaccaacatggtgaaatccatctctattaaaaatacaaaaattagctgggcatggtggtgggcgcctgtaatcccagctactcgggaggctgaggcaggagaattgcttgaacctgagaggtggaggttgcagtgagctgagattgtgccattgcactcaaacctgggcgacagagcgatactgtctcaaaaaagcctggcggggcccagtggctcatgcctataatcccagcactttgggagggtgaggtgggaggatcacttgaggtcgggagtttgagaccagccaggccaacatggtgaatccctgtctctaacgaaaatacaaaaattaggcgaggcacagtggctcacgcctgtaatcccagcactttgggaggccgaggtgggcagatcacctgaggtcagttcaagaccagcctggtcaacatggtgaaactccgtctctattaaaaaattagctgggtgtagtcccagctactcgggaggctgaggcaggagaatcgcttggaacccaggaggcagaggctgcagtgagccaagattgcaccactgcactccagcctgggcagcagcatgaaactccgtctcagaaacccaaaaaacaaattagctggaccgtggtggggcgtgcctgtc

SEQ ID NO: 1560950 - DNA, 4001 bp, Homo sapiens
gacaacgttagcctggtggccactcagcagcaggagcacccagctgtccccgggccaggagagcccgtaggtccctgcagctgccacctccgcagggctccctctggctgcacgaggccccgctagagaaagctcagaagggcagggaagtgagccgtccacttgactgcaacttgaaaaggggccaccattgtcctttggcgcccctccctcccagcaggaccccaggccccacctctggaccaggccccacacgttccaagacaaagacacccccatcggaagccccgaggaatgctagatgccgctgagagggttcaagggctgctgtgtgctttccagtaagttggaaacgcctcggagaggctgaaactggcaaactcacaggcctgggccagagcttccacccgggtaggggtgggcccccaagagggtgcctctcagcagagtggagcccgatccaccgaggagagcaggaggcggccgtggaaaccgtcaataaaaattaacagaccgaccagaacacagcctcagttactgatcaacccgagccccgcccgacccgactctccctcctcgggacaccccggggggaaggtggatagaaagccggactgtccgaggccctcccttcagccccggccaggtcctgacccaacagtgagctccccacggcttctcccggccactgcaactcccggcgaggccctaagtgactcggagcgtccgtcggaagggcagcctccgggcctcctgcctcactccgggaggcgagtgcgcggcccccgagcccgcggtgctgggtccgagagcggggagccctcgtctcgccgtctgcaggacccacctgcccgcacgcatgctaaggggtccagacccactctagggctgcgcctcttctgacaccacagactgcacggaccacgtttaacagacttttaaaagtgactgaacccaagaaaaacttctcaggaaaacggaaagaatgcgaaacatctccagcctctcccgcttcctattcccagggagggcctcgcgcaggaagcgctcggcgggacacggcctttctggagggggctcccacctctcccaagggaagcccgcccagcaaagccgcccggaaaggctgccccggcccgagagccgggaaggcccctccccatgacggcgcccgcgggggtccctggagaggcccctccggccccggggcggaggacagaccctcggggcggccgcttctctcccgagatcaccgaaaccccttggccgcggcccggggcgcacggggggcaggggtagggcggggagcgcagagactcgggcccgcggcgaggccccggcgccagctttccctcccggcggccgccccagccccgcctgcgcttccggggctgcgccgggggcagagtccgggcggcgggaaaggcgcgcgcccccgatggcggccgcgcacgcgcgctggggccaacggggacgcgcgacgggctacgcaggcgcacgaggggagcggacgggaggcgggaagggccatccgggcgcgcgagggccggacgggaagcgggaagggccgcgcgccgccgaggcggggcaaaggcgaagtgcggggacgcgcgcggagggggaggggcgcgggaggccgcgtgcgctagggacggggcgcgcgggggccggaagcgggccggacgggggatggggacgcggccagacccccgggaagcccctgacccgccccgcacccgcgcccgccacgcggagaggaaggggagagcccgccgccccctcccgcccgagagggggcgagatcggccccggggaggccggcgcggcggcgggggcagggctgcggcgcggggagggcggtggggcgcggggcgacgtgcgactcacccgtccatggcacacagagcagacccgcgggggacggagtggaggcgccggaatagcaggaaccgacccaacggctccgagttatagactcacaaaatggcggagacgcccgcacacgtcccccgcgcgcgctgcccattggctcccgctgcagccagggggcggggagagccccgcgggcccccgccagcacctcccactggccagaaggccgcccgggggcgggacccagagaaatcgcaggcgcctattgggggaggcggttattcctcaaggccgaaggcggaaacggcttgtgtagtcgggggagggggagaaaatgggatcacgtgacggcgtctgagccagtcagctggcgcgtggctttgcgggagacgccatcttgagagtgggtacgtggcgagtcaggcggcgggaagcgtgctttgcccaggctgccgccatcttgcaagtgggcaggacccgcccgcctgggccgtgagggcaaagggagtcgcatcgccatcttggagtcgggcaggaaaccctcagggctccatgttggttgtgggcacatggccaaaaagtccgattcaaactgagcgctcacatctgggtgatcgcgcggggagggaaaggccgcgtcgcgtcccggacacgccagggctgtttccacagtggccacagatactgcgggcgcgccatgatccggggtcacccccgaccgttctttgttcgccccggaacagcgaatcccgactgcggagatagggaaactgaggtccgggccccgcacagtccgcggccggctgcctacagctgggaaaactgaggcctggaccttgtacagtccgcggccgcccgcctacagctggggaaactgaggcctggaccttatacagtaggcggccgcccgcctacagctggggaaactgaggcctggaccttgtacagtccgcggcctctcacctacagctggggaaactgaggcctggaccttgtacagtccgcggccgcccgcctacaggtggggaaactgaggcctggaccttgcagtccttggccgcccgcctacagctggggaaactgaggcctggaccttgtacagtccgcggcctctcacctacagctggggaaactgaggcctggaccttgtacagtgggcggccgcccgcttacagctggggaaactgaggcctggactttgcacagtccgcggccaaccgcctaaagctggggaagctgaggtccgggccacacacagtccacggccatccgcctacagctggggaaactgaggccaaagccacacacagtccacggccatctgcctacagcgggggaaactgaggcccaggccacacacagtccacggccatccgcctacagctggagaaactgaggcccgggctccatacaatccaaggccgcccgcctacaggtggggaaactgaggcccaagccacccgcctacagctggggaaactgaggcccgagccccctacagtccctggcccactgacctacagctggggaaactgtggcctggagctcgtacagttcgaggctgccagcctacggctggggaaactgagggccaggcccagcagggtcaccaggagggtccctcccgggccaccatcccagcagcagaaaacaccctaaactaatgttcccaggagcgctgatcacatgaagagtctgacagagctgtgagggtgcctgacggggaggccaggtcagcgggttgggagccatcccagagtgaggggatgaccccggccctccacactgggaccctcacgggaggctgcggttggaaaccggagcagttcccggcccggagtagacactgctccctaaatagaattagcgggatttagtccatgctgaaaagggggtttttcattaacaccaacctacggagggagaagacatgacaattctcgtttccccaaatccaggcgagcctagcgccctgcttctctggcgtgttttattccagcagtgctgcgtttcaggccggggcctggcgtgggcccaggagccttggagccccgccgggcgtctggtgccagaggattccagcccggattaggggtggccgccgagctccatggaggcatcgcacggca

SEQ ID NO: 1560951 - DNA, 4001 bp, Homo sapiens
ccggtgcgcccctcaccagcattgggctccagcagatgcacgacaccaccatgataccgacaagctggcccaccatctccacgtcgtgggcgcgagctctgcgtgccgagccgctgctccgagagccgccaaagaaggtggaggccgaagcgatggacgaggcggacgaggcggaggccgagcggggtccgtgcgccccccagcgacgccggctgtcggggcctgaggccgggggaggccgtcgggagcggcgtcgccagcgggcgcgtagcagggccaggccgctgagcgtgttgcacaccagcgcggcgaggagcgcgaccaggccgaggctggcgaagaggccagcaagcagtgcctggcgccagccgcccgggggacccaggccgatgaagcaccacgtgcccgggtactgcagctcatagcggcccacgcgcgccagcggcagcagcgccacggccaaggccaccgcggccaccgcggccagcgccaggcgcgcgcgggcgaccgagacccgcgcggcgtggagcagcggccgcgtgacgcccacgcagcgctccacggccatgccacagcccagcagcagcgggcacaggccgaagaagaccatgcagccgcccaggaagtggcaggccccgccggccggagcgcgccccgcagtgtacagacgcagcaccagcgcgcccgggatcacgtggcccgccaggtcggtggccagcaggctggccacgaacagcaggaaggtggcggccgagcggcggcgtcgcaggcggcccgcggcctgcgccagcagcgccagcgccagcaggttggacacggcgcccagcgtcatggagaagatgggcagcgcgggcgaagcgcccgacggcggcacggccgacgtgttggggacccagggcgccgcgcatgtggtcgcctcgcccgccaggctcaggttgaggggcccgcaagggctcatgtcaggcgccaggggtgctggatagaggagaggagggcagagtgaggctggctgggcccgggcggggaccagcccacggtgccatctcagaacatcagggcctgtttgactccatggcgttctcaggcggcccctctgcccatggcagttgccatgggcaactccaaatgacctggccactccatttggaaacccttctccctctcttttgcctctcaccaccccatctcctgctccagggcctccctctaaccccactggccctttctctgcccttcatggtttcctgcaagattccccccagccccgccctcaggcatctctgccagtgcctccgacccccaccttccatttttacacccagcaaattcctggggcctgtggctccatctgatagctctcacccatttctgccactgtggccctacctgactttccccatgtcagctttactccagtcccatcctcgatgccccagccccatctctaccaccacgggcacatctctccccacggccatgtccctgtcccccatggacccatctctgaccccacatggcacagccacatctgtgccatggacccatctctgcccctgccccatggacctgcctctgctccactgcggtctctcgccaggccctaccccgatcacctctgcctcaccctgggtgcccacggttccactccatatccctgccccagaggcctggaggcggccccacgaccatccactctttgatatcctggtggtgagggctgaaagggcggaactgcccaccaggccagatgggaagggaggatggacagacggtaagacagggacgcacagatcagggagaagagcccggggacacaggacggacagcaggtggccatggccccaccccttcatgccctcctcctccccaatcagggaccctcatgtgcaacccccttacccggcactgcctgggatgtggggtccccatcaccggccgctcagccctgccgcccactgcgccctggctctccggcaagccgcttcctccctccctcttcctggggcggctcctcagctcctcccgccgcccttgctggcctccaggggccgctccaccccgcgcacgcccgctgggggcctggagtggcagagacccccctctctgctcctggcaatgggcgggggccactctgggccccagcggctccctccacgaggagtgaggctccctggagttggtctggccccatgtgaccccctcctcccagcagggcgggagcagcccccttcccccccaggatcgggcctcttgcctcattaataaagcggataaaatctaaacactggaaaatgtgagcgtcgtctggggcgggctggggcagctgcagggggtgccactgcccccctccctggggctttggagctagagaggctaactccaattctgtggggccagcaatgccccccctgccctgccaaagccttcgtggatgtcggggtgggtgctggtgggcagggcctcgggtagaccagcttgggtcaggcccagcctggccaggggatccgcctatttatacaggggcttaagccccggctagggccacagcgagtcatatcctgggaggaggctgaaagggggcaggggaaccaggaggcctggcgacctggggactctccccagtgactggctcctttaagatgggctgagtgacacctgtgacacacgtcctaagacacaaagactcgcctcctgccctgagaagtagggtcacactggcacagcctcacaccctaagacatacaatcctgtcacttaccactcagtttcatcctgtccccatctcagcacagccaggttgctgccgccacatccctgaactcagggtcttacccccagcgccgggacgcacccagagttactgcctcaattccagcccctcccaacaccccaaaatgcagccctctgagatgatcacccgaaccaccctccttagtgctgggaaatagggtctcacttggcaccccgagagatacacacacgcacacacactccttattgccaaaactgcccctgaccacactctgtttgactttcaatgacccctcaacaatcccagacaggccccaccagcacactccgtacacccaaggcacaagaagtgacaccccccgccgctggacaccagagacctagctggccacccccaccctcacccagaaacagcaacgccctgagacacacacacctgcacccctagagacccctagacctagccagcacccccacccaggaaacagcaacaccccgagacataccctgacacccctgaacaccccaaggcctagccaagcacccctccttgccccagaaacagcaccctaagacacacacccccacaccccgggacaccccaagacacagtcactccgttgcactccccaccaccagacactgccagttacacctgcaattgccctggaacacagagccggttatcacatcccttacccacgacacagccctccctcattgcgtcacgagccatcaacactcttgatagactcacagtgctacccaacacccgagacacacatagccacaccccttcaccaccgcaagcggctcccagcacagacacctgaggagcccacaggtgcccggggatgccctgagtcaccaggactgcggctccccgactccacccgggtctgtccaccaacacccagcccccagggtcttccccttttcccccttcccctcttcctggtggcccagtgcccgcccgccttttggaacgaggattgcaagctggcctcggacttccccacagcctctcggctcacccccaagcattcctgtggggccttctggcccagcgccccttgcttcaatcccttcccttccctccaggtctggccagggtcccaccccgcctttccctgatcaccctcaatcctcgaagatgagtgggttgtcaaaacaagtatgctgggtttatgtctaggacaaagcagggtgccccatggacgcctgcgtgtccagcattgggccgggtgggg

SEQ ID NO: 1560952 - DNA, 4001 bp, Homo sapiens
cagcctcccaagtagctgggacttcaggcatgtgccactacgtccggctactttttatttatttatttgttgtatttttagtagagacagggtttcatcatgttggccagactggtctcgaactcctgacctcaaatgatccgccggcctcggcctcccaaagtgctgggattacaggtgtgagccaccgcatccggtcctgcctcggcctttctacatgctgggattacaggcgtgagccaccatgcccacgatgtctcacctcttttgagcctcagtctccccatctgtgacatgggcacaacccacagagctgccctcctcctctccccactcctcccagctccggaggggactcaccgtgagaggcagggagcacacggccatgaccactgtcatgagggccagcaggatcaggtggtccacctcgtcctctccggtgcgcggccgtggacccagagagccctggtggcgcttctgctggcggtacatgcggcagaggctgagggtgaccgagccgttgcagaggaagatggcagccaccagcagggccaccaggccggcgtaggccagcgagaaggcggcgccgcccggctgggcccagcgcatgcggaggaagcaccagctgccggggcagtactgctggtgttggcccaggcccagcaggggcagcgcgcagaagaggacgcagaaggcgtagatggctggcagcgccaggcgggcgcagcggggcccgtccagctgcgcgtagaggtaggggtggctcagcgccaggcagcgctccacggccatggcaaagaggatgagcatggacgccaggccgaagaaggtcatggcgaaggcgaaggcatcgcacagggcggggccgcctcgggccaggcccagcagggagctgttgcgcgcataggccacgaacacggccgggctcaggaagctggtgcccagcaggtcggtggccgccagtccggtcaccagcaccgcgaaggccgaggggcgcgccggtcgccgtgcgctcaggatgcccagggccagcccgttgcccaccacaccggccacgaacatcagggtgctggtggccggccccaccgagccccgcacgtaggtgaggttcctgcacgaatccgccatcccaggtctgggctggagggttcccaaggtggggggtcagagggagccagggctacccccaccacccagcccactcagatgtccctgctggccagtccttttggcagctggggcctcccagccaacccccagttctcctgtgtgtgcgggtatgcagtcctctcccctctggcttctccagtatctctctctgtctctccccaccttcctgtttctctttctctctttcttttctttcgtttcttttgagacagagtctcactctgttgtccaggatggagagcaatggcatgatctcggctcactgcaacctccacctcctgggttcaagcgattctcctgccccagcctctggagtagatgagattacaggcgtccactaccacgcccagctaatttttgtattttcagtagagacggggttccaccatgttggtcaggctggtctcgaactcctgacctcaggtgatccatccaccttggcttcccaaagtgctgagattacaggtgtgagccaccatgcctgacacccaccacccccccaccacctcctgtttctttccttctctagctctgtttctgccattaaagagacagagaacatccgggcattgccagttctttccctccctgtctctcggtctcttgctgatatctccctgtctctgtcccctcccttgtccttgtcctccccgtacctttctccctctaaccccacaccctctacctgctcctgctctgtgttgctgcatccccagcccctcaccgcacctctccagtcttgcccaggctctcctgtcccgtgcgtctgtgccttcacttgctttgctcctcgtgtctctcgctgcctgtgtcggtctgtgtgtcagcttctccttccctcctccctccgtccctccctccttcccaccctcctcagcttgcctgctcaccccagctttttcatttcctctctctgccccgccctccctcactgttctccagagggccccctggcacactccccactccccgtccacccgcccaatccaggacatccatctcccatcgctgcctccactctcctccccacatcctctcttggttcccatcactgagccacctgccacctccccacacacaggtctcctccctcccccagtgtctccctctctggcctgggtggggaattcctgagtcaccatcacttaggcttggagcctcccggggtagtagggggcctctaggagggacctgaagagcacagttgaccaggcttcagtggggtggtcttggcctgggctgtctcagggtggcctctgggatctattctgggctccaggccccggggctgaggacattgcccagggattgagaaatgaccaggaaattcctctctgatgtagtgttttccagacaccactgagagttctggtccctggacacaattcactccttccagaaagctgaggaaggaggcttggccagagagagacatgccagtccctcgagcctgtccctgggcacccagctcaccctgcagagacccgagaagaaagcatgaaggggtgtatttggtgtccagttgtcagggacaggcttgggagacttccatggcccatgatggaaaggtagcactgggccaccgtccgacttctcgcacagcacccctaggccccaggccaagctctggtgaccttgaccttcaggaatcatattttgatcacaggaagctgtccacagctccaacattgctgccatgtgtcccccaccctccccaaacacagccaagccaccaccgctgcagcctcgggccagtgtgacagacccacatgttcccgctacccgcacagcgttcacgggtctcccttcccacggagtcggtggcttcccaggcagcctcccagcccaaaagggccagataaaacctcagagaccctctctgagccccgctgtttctcagggggacggtctcagatccattcgacttggcttcctgtttccatctgaccaccttttttcttgctgcgagatggtcccaggtgaggagagggagctggtagacttcagcctccttctctgtgcgtggggtaacacgggcctcagggacctggtggccagcctcggcctgcagcacatcccagattggtctttgtaacaaggagagaggctgtgcgggtgtctcttgtccaaggccaggagggatgtgtccaacccaaggactggactgtgggcagctgccgtcttgccctctgtaccccggtgtgtgaccacaacccctttgcccctcccccccatctccctatcacccttgcccagctggcacccgcagcttccagcaggatggacgcccaagttccagccccaccgtggctccctaagggaccccccagccctgctctgggggtgcctgtacatgtgggctccaggtcctgccacgttgtcccgcctcatgccgtgaggtccccagacagaccagagggaactcaggaagttatatcatattaatgaaggatgatgcctggcaggcgtgcatcttgtttcggcatcgggggggcctctggttcccggagactccctctctcgcttcctgttacaaggacggttaacattcaggaagtcccctctgctcccatgcccagtgggaccacagtcaaacccttgtcccttccaggcctcagtttcttttttgttgttgtttttctttttgcttgtttgtttttgttttgagatggaatcttgctctgtcacccaggctggagtacactggcatgatctcagctcactgcaacctccgcctcccgggttcaagcgactctcgtgcctcagcctcccgagtagctgggattacaggcatgtgccactgcgcccaatttttatatttttagtagagg

SEQ ID NO: 1560953 - DNA, 4001 bp, Homo sapiens
gacgcctgctcctttctcttctcctgccccagcctggcgccccgaaggtctctagagaaggagacccgaagtcagaaaaccctgaaaaaaattgctggacgctgctgtgagaagaggaaacccttttcaaataaaagcgttttgctacgtaacgggcgctgtactgaagtcttatgaagtatatcttattggatcctcgtaacagatgaagaaaaggagacacagagactgacgtcaagaaggctttctcagtactacgcagctagatttggaggaccctgggtttggatgctagggctgcctcacaccagagcccgcgatctttccactgtgcctggggagaagtctggaagtgatgggagggaggaacagcgaaattcaaagatgagagctgatggagagacagatagaaacctaacggaggaaagaaaaggaagatatgaaggagtcaggcagaggaaaaaggaaaaaagaaagtgatggagaagggaaggaagagtttcagaggcagaaggagaatagagagaggaggcagagattcccagaagaccagaaagccaaaagggtgaaaggggagataaccacaaggacccagggagacggggacacatacccagagaggaaagagacccagagaaagggacagagacggaggaggacagagaccttggagattacagagaaccagagagaaggggacagagatgggggtagggagggacaggggcccagaatgaaaggagggggcgggggggtgggggcgatagggaagcagagatccagaaataggaaagaagccagcttcctggacaaagacaggcagagagaaacggaattgaggaaagaaaatagagtggggactgaggagagagatgccagagtggccgacacagagtcctgtctcttttctaccccccatttcaagccccgcgcccccaacccaacgcacacgcaggtcgcgcaggaactaggcgcagtccggagcgcagggcatggtctttattaagatggggacgggcagcgcgctcagggcgcatccaacaccagcagcttgtgcatgtacgagttcagccagtggcggcgctcgagggcggccagcaaccgcgcgcgctcccggaaggccgcgtcgtccgccagcgccaggctcctccgcggcctgggggtggcgggatccgcccaggcccgtcctggggggcggaggctgtggagagacgcggtgaccgcgcgtccagactcgctcttgccgccgcctgtcctccccgcggtctaactcgaagccccgttactgcccagtccgtggagtggctcggtccggctccccctgtctctctcgttctctgtgtgggtctctgtctctctgctcaccaggttcgaaactccccaggtactgagaccgagtctgatgcacttgtccgcccacagcgctcagcgcatggccaggcgcacaccaagaacccaataaacgttgctcaaagaatgaatccgtttctgcaacgactcctttcgagcctctccacgcctttctcgggatctatctttctgtgtctctttcccttgctgattttctgtccatttcccgcaccaccactaccaccaaaccctcctcccgccttcccccacccctagtctctgtcttctcgctgggtctcggtcgccctctctttgggcttctgttccgctttctggatcttccgtcccctttctctttggttctcttcccacttctccaagttcccacccctccctgggagttctgggactggcacctacctgaggaccccgaccgggggcagggcgactcccgaggcagtgcggacgccccagggcaccaccagcagcagcagcagcagcagcagcagccgaacccgagggctcctggacacctggcgggtctccatcacctgtggagaaccagaaaggggctcagtagggctgcatcccggcccagaaccccgggccccaccatgcatccacccccagcttcccgcacagtcccctaccgtgcagtgggctggggcagcgatggtggcagcccccttatatcgcctccgcagcccccgcaccgggcagtgacgcaggccggggggccggggacgcggggtcaccccctccccaggctcattaggagccgccagcggtaatgaggagccgggggtgggggacctgccgctgccttggccgccaccaactaattgggaccagaagctggacctgagacgagggagggggagagacagacagacagagaggtggacacagggggtgtgtcagagggctaaaaatagagactggcggaaggaccgtcagaggaacagagacacaaagagaaggacaaagacagagtggccgaggaagaaatagagagaaagaatgggaacgacagaaaaagaaaggaaaaggaagaaaacaagaaaagagagcgaaggagatggaaacgaacagtcagatggagatggaggagggaaagaaaaggctctcagaaagacagacggaaatggaaggacgtcctggtctggaaggagctgcccagagataaatacagcagcgagaggcccagaaagatcgagggtgaggtagggaggggggaaaggcaagaaatggcaaagggtacgtgtggcaggggtgtgaggacaggaaaagtgacagaccacatcagaaaaacctcagagagtgagaagaggggaaaacagacagggctcctgagctgccctaaggatgtgtctaagcccttatctgggaggagtttgggggtgctgtgaagattaaagcccagtcctcctcacactgactctttttgtgtgtgtgtgtttgtctgtttgagatggagtcttgctcttgttgcccaggctggagtgcaatggcactatctcggctcactgcaacctccacctcccaggttcaagccattgtcctgcctcagcctcccgagtagctgggattacaggtgcccaccatcacgcccagctaatttttgtatttttagtagagatagggtttcgccaaactgttggccaggctggtcttgaactcctgaccttgtgatctgccctccttggcctcccagagtgttgggattacaggcgtgagccagcacacccagtccacactgactcttaagaggggcctcagccgggtgctgtggctcatgcctgtaatcccagcactttggaaggccgtggtgggtggatcacttgaggtcaggagttcgagaccagactggccaacatggcgaaactccttctctacaaaaatacataaattaggtgtggtgtaatcccagctacttgggaggctgaggcaggaaaatcgcttgaacctgggagagggaggttgcagtgagctgagatcgcaccactgcactccagcctgggcaacagagtgagactctgtctcaaaaaaaaaaaaaaatttaaaaagaggggcctttatacacagtgaggagaagatgggcaaaacttggaagtcctacagagcagtagaaacttgggatgtgggaacttgggctcctagtttcctaggaaggtggtggcagaagcttggactcctgagtctaagagtggatgggacagggacccagattcctatgttctggggaaggaggaggctggggacttggattcctgaatctgaggaaggaaggagctagaggactggagttctgagtctggggggagggagctgggggatacaacttaggggacttgaaataggaaggtaccagggaactagacccctgggttttcaggtaggagagggtagagggccaggaccactggtttcaaaaaaataatttgggccacatctccactagatcaatccagtttctaactcccttccccaccccagagaaaatgtcctttacttctgtccctttaagagtctaagtctgtcgctaggctcccaggatcccctgggagggggtgaggtgcgtcacctgtgtgcccctgagaccctacctcccaccgccctgcccagatctgttctgcaacattcaccgttct

SEQ ID NO: 1560954 - DNA, 4001 bp, Homo sapiens
actagcaaacacaaaaaattttattttgtgagtgcttaaaaagagaaaaacctgaacaaacttgctctccacccacgcaggtgattctccacccacgcaggtgattcttcacccacgcaggtgattctgacttttgggcagtcgtcagaagatcagatagaaaacctgagtatcttggcgttagaatgagttggacagagagtggatgttgccccgggggcttcaggcaccataccggacatccagcatctgagatgagttaaaacgcacagctggaggtgactttcgagatgagggtacacttacaacatacaagttgtttatggcgctgggacctgaggtatctagtccgcatatacagtgacacgtatgcatttactgccacaaagatgggtaaaagtcaggagaacgcacttaagagcccaagcgacatacttaatgtctgcttgtctaggagagcaggttgactcaggacttcaaatatgctgggatctggagccatagtaaagaacacatatgcttgcctaaaacccagggataccttccacagcaggagcagcacatcaagatgggacgatcatatttaaaaacgacggttaaggtgcaacctaaagtaaatctcacatcttggcaatcgtgtgcaaaactgcgcgcctgacatccctattgcacagggaagcccatctagtacttgcactgaggtttaaaaccttggggtgcatgtctgaggacccggaaagcacttttgaacaactagatgcgaatgctgcaggaaggggcgaaggcagtggagtgaaggggtacgtttaagttgtgggaggtgatctaagtctcggtatccatgtttatgaccccaggaagcctgtttaaggtttcagtagggctgccacagctctgtgccatccacaccgctgaggcagtgtatttaagaagcggacccgagcgcgaacccaggggaaatctcacatcggggcaagcgtgtgcacggtgcaaagtcgcgatgtgcggttttacagccccaggtaaaccttacggtttctgaaaagcatgtgcatcttttgggtccggagaagcgtgtgcagcccaaagtacctgcgaagctgaatgtttacgtttaaggtctgggctcacggcagtccatcaaagcatcccacatgtgggcgcgggcgcgtattctaggtgcgcactccacgggcacggagcggccgccaggggagaacgcccacgggtgcgacatctgggggcgctggtacaaagcgcgggcccctccctcgccgctgtcccccaaaaccgcccccatttccaggtttcctgcccggagagcgagcaactctccaataggaaaaacaagcgagcgtgccggctgcctgtctgccgcccccagcccgcgtttaaatcgggccgcggagtcagcagtaatatgagcccgccccgcccccgtcccccaaccccccaccccggcccgaacgcgcaacaaaggggagagcgcggcgcgaaccaccgggtgctccacgggggaacccggccccgggcgggaccacccttcgggccacaggggacaccccggagcggcgggggctgcggacaaaggcgtgagcccgggataggggctgggggggcggggccgtggaaggctctggaaaaagggcggggggctcaccatgggaggggccgagcgggcccggatccgcggaggctgcgggcctcgggggctggcaggccaggagcgcgagcggacggcgcgcaccacgaggggccgcggagggcggccgcgacccccgagggggcccccggcgccggagcggtacggggcacggcgcggacggaccatggcgggcgcgggccgagcgggcggggagctgccgcgggccacaaggggggctgcgggctccaccgactgaggggcgcgggcgcgggcgcgcggcttcgggggagacgggctgagccgtaccaagctcgggggacgcgccgccggagtggggtcgccgcggccgaaccactgaggcgagcgggggagcccggcgcgtaccaagcgcgtccgagggggcgtggccggagcgtaccaaggcggcgcgggggagcggggcccgggcgggagcggagtgtgggctcggcggtcctgcgggcctctccggcgcgggggagtcctgggaagacgcgcgagccacaacttcagggggcgtggcgggaacgggagcccctaccgaatggggtggcagaagaacgaaggcgacaccaagctggccccttgcgggggtcgggacggcgggagacctcatccggagccctgggcccgcagagccaggagaccgcgccaaaatacatcagggaagaggggaggacggaataatgggcctggggacaaaggaacccactgaaagggaacccactgagggtacggattgcacccgagcctgagacagctgaaggtttgcagtcggtgacgtggcgaggtgggcaagggactccaactcccagcgggccccgcgcggcctgggcggggccagctgtccctggaggctccgcccattagccccggcgcccaggctccgcccgccgtccctggcgactccaagcttctcgccactcacgtcgctccccggccttccgtggattcgctcattcgctctgctaaaatggaatgactacttactagtagttgtataagatttttccctcgatttttgttccttaaacgtgggtaatacctaaccctagagtggttatggggatcgagcccgaggggctgtgcttgactgcttggcgcagtcactactcaaatgttagcttttctttaaaaacaacaacaaaaatctgttatgagtaccctgtccagttctgtgctcggcgacgaccgaatcagaccacgtccctcacaggccccacggtccactggggagagacataatcacaggctgtgctaagtgttaactagcgcacatccacagggcgatgggatatgaccatagcgaggtaaagttagcaagcaagggaagtcaagaaaacgacctgtgagcaacctgccattccagatggctggaaaagtgtgcaaagaggacagaacagcaaagacaaatcctgaaagtagaaggaataaaagggagccagtgtgggcggagtcgagtgaaggtagagaggagaaatagacacagctgtaggaggttagagacggagtccctacttctgtttcggatgttgactaaacaatgtagatagatattgatgtcatagcctggagagagaaattcgggagtcatcagtgtttgaatggagactggatgagctcacaaagagactgggacactcatccctttagcagtcacgacaatgagaagcaaccagcaaaggacacggaggagtggccagtgaaatggcagaagaacccgtaggcctgtccatgttttcctgcccaggggctcccgagggctgactggagcccagccttaaaccccaaatccaacctgcattgtggccaaacggagtcagtgctccctgaacacaaactgcaagttagttatcaacaggtacctccaatgccctgtcaatcacccatgtgaggacaacctggcagcaggaaggagaaaaaacaggagctgctttaatctcccggaatcctcacttctccccattcttgttggtccaaaccatcaagatctcttgcctgggtgacgtctcctaactcttgctgccttctctgtcactacaataatcaaaaccatccaatggcttcccagtgcctttagaattaaatccaaacttggtactgtggcccctgctgccgccccccaaaaaatctctctcccatccttcctgttctctacctgttaatgccttcccatccctcagaacccatcaggacacacgtgagtttgaatgccctgaattgtataagcatggagagcggtataccagggtgtactccagagtgagcaaaatgggaactcatgtcagaaagtgaaatgaaaatgtaggctgaaattctatcagtaatactgcaacaa

SEQ ID NO: 1560955 - DNA, 4001 bp, Homo sapiens
gaacagactgggaagggagaaaaaaaccaaggttggggatcaggaaccttggcctgagggtggagggcctgggggcctgggggcctgggtctgagggaggaggggctgggggtctcgacctctggtttgagggaggagaggttgggggcctggactcctgagtctgagggaggaggggctggggtctggactcctgggtctgagggaggaggggctgggggtctcgacctctggtttgagggaggagaggttgggggcctggactcctgagtctgagggaggaggggctgggggtctggattcctgggtctgagggaggaggggctgggggtctcgacctctggtttgagggaggagaggttgggggcctggactcctgagtctgagggaggaggggctggggtctggactcctgggtctgagggagtaggggctgggggtctggattcctgggtctgagggaggaggggctgggggtctggactcctgggtctgagggaggaggggctgggggtctcgacctctggtttgagggaggagaggttgggggcctggactcctgagtctgagggaggaggggctggggtctggactcctgggtctgagggaggagggcctgggggcctgggggcctgggtctgagggaggaggggctgggggtctcgacctctggtttgagggaggagaggttgggggcctggactcctgagtctgagggaggaggggctggggtctggactcctgggtctgagggaggaggggctgggggtctggattcctgggtctgagggaggaggggctgggggtctggactcctgggtctgagggaggaggggctgggggtctcgacctctggtttgagggaggagaggttgggggcctggactcctgagtctgagggaggaggggctggggtctggactcctgggtctgagggaggaggggctgggggtctggactcctgggcctgaaggaggagggactgggggtctggacccctgagtctgagggaagaggggctgggggtctggactcctgagtctgagggaggaggggttgggggcctggactcttggtttgagggaggaagggctgggggcctggactcccgggtctgagggaggaggggctggggtctggactcctgggtctgagggaggaggggctgggggcctggactcctgagtctgagggaggaggggctggggtctggactcctgggtctgagggaggaggggctgggggtctggactcctgggcctgaaggaggagggactgggggtctggacccctgagtctgagggaagaggggctgggggtctggactcctgagtctgagggaggaggggttgggggcctggactcttggtttgagggaggaagggctgggggcctggactcccgggtctgagggaggaggggctggggtctggactcctgggtctgagggaggaggggctgggggcctggactcctgggtctgagggaggaggggctggggtctggactcttggtttgagggaggaggggctgcttcctgtccgtgagcacagctgtgtgttgcctgaagccagtgtcccccgcagcagacacgacagtgtctaagggcccgggtgaagctggtgtcccccacaacagacacgacaatgtctaagggcccgggtgaagctggtgtcccccgcagcagacacgacagtatctaagagcccaggtgtaagactctcctacagtctctgccaagcctgaagccctcttccttctccaggggatcttcagcacctacttcctcaagatcgaggtgcaggcacccagctccttctccctcagacctgggagtccctgccttgggagcccgctctgggcggggagcacttaccagcagcaccaggttcccccagaccccgaggcccccgccagccccagccatgcctccagacactgccggggacccaggagtcccaggcctagtccttccacctgctggactttacactcaagaatttcccctttaccagatcattggtgaagccagaggccagggcgggaaggggaggaggaggaagtggaacccagctcccaaccctgccccgctggccctcaccttcctccctcaccgctgcctctagctctgacactggagatgcctcccatcctttctccagcccccagcccactccactttgtcccccgaaatctccctctgcaccccaggtaccgggtgccgcgccccactgctgcacggatgcgggacgtggggcagaggatgagagcagggggtgctgagagaaaggccagctgactccctcgcctccctggtgggtgatcacacatcaagagcagcctggggcttagacctcatgcccctcgtccctggagcacgctcttccattcagcctctgacgcctttcccctctccgtctcccacaagcccctgcagctctcacaaaatgagcccagcgggctcctgcctcttggcctttgcctagactgtctcccccaccagatgcacctgcctactttccccctaacagtctcctacccactgctccattaggattcagcttggaaatgacccatgccgggcctggggcctttctagcctggtcaggaccctgtgcactgtcttccacaccccagactctctaatttgcatatccatctgtgaccctgagcaaatgacttaaatccacagtgactcagattcctcatctctaaagaatgggcacccttgtaaatatgctaagagaaatagatgagttactacgtggaaagtcttggaacaatgcctggcccattttaaacagttgataaatattagtcatgtttatttttagttcatccctaggccacctgtgctcagaaggggcctgacacccagggcttttcaaggtgtttttgttgacttactatgtgcacacgtggactgccttcatctcacatatagtgcggaaatgaagaatagaaaccccagccgggcatattggtgtgtgcccagctactcaggaggctgaagtgggaggatcacttgagcccaggagtttgagaccagcccgggcaatatacaaaaccccatctttacaaagaaaaacaaaaagagagaaaaaattacccaggcatggtagtgcacgcctgtagtcccagctaccgggaggctgaggtgggaggatcacctgagactgggaagtcaaggctgcagtaagctgcgattgtgccactgcactccagcctgggtgacagagtgagcccctgtctcagaaagcaaaacaatggccaggcgcggtggctcacacctgtaatcccagcaatttgggaggccgaggtgggcagatcacctgagatcaggagttcgagaccagcctggctaagatggtgaaaccccatctctactaaaatgcaaaaattagctggctgtggtggcaggcacctgtactcccagctactcaggaggctgaggcaggagaatggtgtgaacctgggaggcggagcttgcagtgagtcaagatagcgccactgcactccagcctgggtgacagagcaagactctttctcaaagaaaaaaaaaaaaaaaaaaaaagcaaacaaaacagctgagcatggttactcacgcctataatcccagcactttgggaggctgagacgagaggattccttgagcccaggagttcaagaccagcctgggcaacatagggagatcccgtctctataaaaagtagaagtaaattagccaggcatggtggtgcacacctgtggtcccagctactcaggaggctgaagagggaagatcagttgagcccaagaggtggaggctgcagtgagctgtgattgcaccactgcactccagctggggtgacagagggagactctgtctcaaaattaacaaataaataaataagttctcacaccaccactttgagaagtcagtttctctgtctctgagagcctcagtttccccatctgtatacacaaaggtttggttgcgagaagtttcctttcagtgggca

SEQ ID NO: 1560956 - DNA, 4001 bp, Homo sapiens
caggagcagaggagcgggatggcttccttctcccgggcgaaaggcggcagaaagagggaagaagggcgccccagacaaagaggcgccgtcaccctctgcaccccaaggacagcagcgatagggggccacccagaggaggccagaatcccagcagccaaagtccgggtggtggcggacgggagcccggagcgtgtgggtccctgtccttgggaccctaggggtctcttcctgcctcctccggcttctaggtatcatccctgctgctcagccgggactccgacacctcggacacccgcttcactagccgcggctgccgggatgtgtttttagggtctcggccagaggcaggaggaccccatgctcagaagggggctcccctagattgtgacggggggggacaggggaatcccagctgagcccagaagggggaggcaaggcacccccaatgaggctctgggaggtttgttaatttgggggaatgaggtcccaggaggtggctggatttgaggaagggttgcagaggaaggggcgttcttggaagctgcatatttagggagacgagaagacgatttgagactggggaaagagggtcaaccgaagaaggaggtcccagatttggggcggggggtgtggctgaaaaaaagattcccagtttgtgggaaaggttccctgatttgaggattctggagagaaagcggccgaaggggagttccccaatttgggaagggggggaattggtgggaaatgtccaggatttgtagggggaggtccgaaggggaggatcttaattttaggagagattcccataaagagaggtgaacttggccgcaacctggccgaaccctcgcacccacggcgcgggcactctaacctggggggctcccctcagggcacgccccgcgccccctttaacccagtgccgacggccccgcccccggtatgacgtcacctcccctccccccgcagcccccgggggctcccggggcgtgcggaacccgcggggctggcggttccaggggcggcttccccactctcgggatccccacggggcccccagcgcggaggggagactggggtgctgggcgtgcgcgtctgcctgccagagcccctggggctgggggctgaggctcgcccctgggtggggaggctggaagggggcgccgaggccgcagaagggtggggcaatgcccgagtgccggaggggcgacctcccataaggcaacgacagggcccggagtgttccaggggagacggcgtagactagggggtctccaggggagggagacccggagagggaaggcggcgggcgcagcagccctggagccaccccgcctggagccacccgtcccggctcctctccgctccggggcgcccgcatgccccccatcccccggcacagcgccccctgcctccaggacccgcccggggacccgggccgggcgccgccggggccggcaccggctccgcacacacgcgcgcccccctccgcgcctctgccccgcccgcagcccggggtggtgcagccggcggcgctgggcagcttccaatgccgcgctctgggcgcttccagcccagccccctcccacgccgcggacgaagcccccccagcaccccctgccgagcgcccccagcgcggccccggccctgtccctcggggcattgtccgggcgcagctaccggggcgcagcggctgggcgtgcaactggctgcagccgagcatcctccgagcacaatggccgtgcaggcttccccggcacaaagccggcgcgctgcccactcggctgcctccgagaccccccttggagcgcctgcatttttttttcctctaatccatgattttatttttttttttggctttacctggaggctggctgggctgggctcccccggctctgccccgcttcacatcgtggctgttgcatgggatccgagcggagcccgagcgccagcggctcgcggcgtgcgcgcgccggccgggctgccgggcgggcggcgcgaggacactcactgcggctcgcgctcccctagctcccgctcgcgcgcccccccagccggtgacgtcatcccttccgccagcgccgccgccgccgccgccgggtcgggggcagggccggcccgtgcgcgtcactgcgcagccgcgcggccgccacgccccccggccaatgggacggcgcagcgcggtcacgtggctccggggtgtttaaagggccgcgggagcacgtggggcgcggggcttcgcgggacacgtgggcggctggggtggtggtggtggtggcggctgcggcggcggcgggaagggcccctggggctactgtccgtgcgggagccccagcgtcctgggtgcaaagggcatggcactttctgtgcgctgccctaaactgtgccacggctccccagtacccttggaataaaatcccgcctcctctctgcagctcgccgtttcacattagcgcccactaccctgtcccctcccccccaccatgtcaatgatccagaaaaaccagctgctccttctttgctttttcagagatggggtctgccacctgggcctcagtacagtggtatgatcatagctcactgcagcttcaaactcctgggctcaggtgatcctcccgcctcagcctcctgagtagttgggctcgggtgatcctcccgcctcagccagcttcttacagttcctctaacttgagcatccaagaacttccccttctcatctttccaatttctgctcaaataagcagcgcctgggagaagccctccctgacaacagctaccagccacgccccactccactctatcccattatcccggtttgttgttgttgttgttgtttgtttggttttgagtcggagtctcactctgtcgcccaggctggaatgcagtggcgtgatcgcggctcactgtaacctccgcctcctggattcaagctattctcctgtctcagcctccggagtagctggaattacaggcgtgctgtcaccacgcctggctaatttttgtatttttgttagagacagtgtttcaccatgttggccaggctggtcttgaactcctgacctcagtgatccgtccacctcggcctcccaaagtgctgggattacaggcgtgagccaccgcgcctggtcccattatcccgtttttattctagttacactacagtgtggctccagagatccctattgtaggttgaacacatgaatgaatggatgatggagcacttcttatagagtaagcactttacacaggtctcacctaattaccatcccctgcttccctggagtcaggacgagccacagttggaacccagctaaaacactgatttgctgtgtgaggcccggagcctcactttccccatctgtagaatggatttgcctctggatctcagctctcatctgtaaaatggggcaaggtagcccctgctcctaaggagggtgtgatgatgaattgctataatgtggcagcctggctgccattggtgcctgaagatggaataataagagaaaagaggccgggcccggtgactcatgcctgtaatcccagcactttgggaagccaaggtgggcagatcacttgtcaggagttcgagaccaggctggccgacatggcgaaaccccatctctactaaaaatacaaaaattagccgagcgtggtggcaggtgcctgtagtctcagctagttgggaggctgaggcaggagaaactcttgaacccgggaggcggaggttgcagtgaaccaatatcacaccactgcacactctagcctgggcgacagagtgagactctcaaaaataaggaaaaaaaacagagcggaagtaaataaaagggggatattgacaaaggtaagggggttggagggctcacagccaccaagcaagattgcacatcagtccttgtgttttgatcatgtcgaaagcatttatttcctcaaggcacatatttggagaaggcctggtgcccaacagaggaactcaactttagaattggttttttttttcctccaaa

SEQ ID NO: 1560957 - DNA, 4001 bp, Homo sapiens
tgtagagatggggtcttgccatattgcccaggctggttttgaattcctaagctcaagtgatcctcccaccacagcctcccaaagtgttgggattacaggcatgagccactgtgcttggctgcaaccagcctgggcagcatagcgaaaccctgtctctaccaaaaatacaaaaaaaattagccaggtgagcacctataatcccagctactccagaagccacagtgagaggatcgcttgagcctgggaagtcgagtttgcaatgagccgggattgtaccactgcactccagcctgggcaacaaagcaagaccttgtctctctcatacacacacacacatacacgcacacacgcactatatatatatatatatatatatatatatacacaaaacatataaataaataataaaatatgttatctatttactctttaaatgtataataaaatatatattatttattatataaataatatatgttataaatatataatatatttaatatatatttattaagaaatatattattatatattatcaattatataatacataatacatattatatattataataatatatataatatataatatacatattatatattataataatatatataatatataatatacatattatatattataataatatatataatatattataatatattatatattactataatatatattatatattttattatatattatatattactataatatatattatatattttattatatattatatattactataatatatattatatatttttattatatattactataatatgtaatatataataataatatataatatatatatttatcaggagtttgagaccagcctggccaacatggtgaaatcctgtatctactaaaaatacaaaaatattagccaggcatagtggcacatgtctgtaatccgagctactcgggaggctgaagcaggagaatcgcttgaactcgggaggaggaggctgcagtgagccgagagcaggacactgcactccagcctgggtgatggagtgagactgtctcaaaaaaaaaaaaaaaagaatgaaagaatgaatgaatggccaggcccctggagtcagacattgggggtcagaggggtaatggtgtcaagtgtcacccactgtcctcctccccaacatcaaccatcccctccgtccagacccagcctgccagcacgctgctgggttatggcctgggtatgctgagcaggaacctgggtaaggtaatccggcatgcgtcaccatctgctgattttccgggattcacttgcctttttgggaaatttcctcacccaactccatcccctttccgaggggcccagaggagggtcttgtgcccgacccgtgttgctgccaatttcgaggaatttctgtacccaactccgaccgctctccgggtggccaagaggagggtcctgccctcgcaccctcgcaccgtgttccttccaaccccggggcagagatggggggtgggtggcgccgggcggggccgtcatcttcgggaacccaagggggcgagtacccggcctggatgcggagctgggagccagacaggggccaccggactgcgcgggggtcactcaccggttcctgggggtggccaggacagcaccagtagcgccaccagcagcagcggccacgcggcggccatggctcgggccatgccagttgctccgagcagctgggcctcccgcgggcgtctcctcgcttcccggcgcccgctcgctctgccgcggtcgctgcgagtccagctcccggagctcaggtcctggaatccccggggggccgctcctccagtgcctggggtgggaaggggaatacccacttcttcaagctccagacaagtgactggagcggaggggagttggcggccagtcccgccaggcgcggggtgggccacccaggctggccctccccgcgcgcctgcgcctgcgcaggtctctcccggcgctcagtcccgctgcagacgcgcgctcgctccgtcggtgcccactagaagaggcggcttcctgtgtgaggtcgcccacattccaggtgaggaaacggaggcacacggagagattcagcaacttactaacggctcgcggttgccgagtggcagagctgaggttccaactcgtgatgggacagatcctgagcccaccaggctgtccttccacgcagcctaaacttcccatgggctttggggtcagacaagaccagggctcatgttgggcaagtggtttctcctcgagggccctcagattctttatctgaaaaatgggcatagtagggcgcggtggctcaggcctgaattccagcattttgggaggctgaggcaggaggactgtgtgaacccaggagttagaggcttcagtgagctaccattgcgccactacactacagcttgggtggcagagccagacctgtctcaaaaaaaaaaaaaaaagtttgggggctgggggagcaagcgcagtggctgacgcctgtaatcccagcactttgggaggccgaggcaggaggatcaccagaggtccaggagttcaagaccagcctggccaacatggcaaaaacccatctttactaaaaatacaaaaattagccggcatggtggcacatgcctgtaatcccagctactggggaggctaagacaggaaaatcacttgtacccgggaggcagaggttgcagtgagccaagatcgggcctctgcactccagcctgggcgacagagtgagactctgtctcaaaaagaaagaaaaaagggcatactaacagtacttacctcacagcgtggtctgtaaaacttaaacaagaaactgcctagctcaatttcggggatatagtttgtactaaataaaaagctgatataccaacaatagcagcagtggcagtgacaattattattattgttgctttacagttggcatcaaataataatgttcatgagaatggtcattcattcattcttcattcagcatatatttattgatccagccagtatcccaggcactgggtatacagcagaaaataagacagacaaaaatctctgcctttaatgaagaccgtgttctagtggagggaaacagaccataaacagattaataccagaactccatcaggtctggggaagataagggttatggaccagcctgcagtagggagaggggaggagggaggggggagagagaaagagagagagagaaagagagagagagaaagagagagagagagagagagaaatgagagagaaacagacacactcagagataagggctgggagacagagacagagagattgaaagagatagagacacagcatagacagagggagatgagagagaaatgagaggtgacagagagactcagagagccaaaccctcagagacagaaactgagagacttcctggtccccagaggtggctgtcctggccagggtctccatgaggccgactaacagctctggtccctgtgctctgacatctttatatgttttttatttttattattatttttagacagggtctcactatttcactgaggctggagtgaagtggcgccatcattgctcattgcagcctccacctcctgggctcaactcctgcctcagcctcctgggtagttgggaccacaggcatatgtgatcacacccagctagtttttaaatttgttgtagagataggatctcgctatgttgctcaggctggccttgaattcctggccgcaagcgatcctcccacctcggcctcccaaagtgctaggattgcaggcatgagccactgtgcctggccccacattcctgtatctttctgtaaaatccttcctttggcttttggctggcttggaggtttctgtccccgggtgccctctctaacttggatctgatgcttgtgtatgacacatctgatgcttggggtctctcaccctggatgtatgtaggtgaatttctaaatggaaacagggaggctagtctcttggaaatctc

SEQ ID NO: 1560958 - DNA, 4001 bp, Homo sapiens
tgggaggccagtgagagccatcctgggggaaatgaggccagagaggtggccggggttcccccaagatccccctgagctctcttctgcgcaaaccctcgggaaactctagcatcccagagtttgtcgctgggaatacacaaccgggtcacctgcaaggggcggggccagcgcctctttcaagggttccctcccagcccctccctccccaggggggccgctctcctcccctagtggggtggatggaaggacgccagggggtccaaggcatagcaatgggagggacgggggataagggcggcggctccactcgtccacctcctgctatggctctgaggacaaaggcgctaccagaggatagataaggtcccgaaaccggggagtccggaacccggagccaggagcgcccgccccgcccctccctggctcggcgagagtgaaaccaggaaaacttccccggcgacgtctccgtcgcccccgaccattcatagggaaagggaggagtctcccagcctctgggactcggggcctcccgttctatctgggactcaggcgactgagactccagcctcaagacagagccttcgacccttgatcatatctggagcccaagagacggggcccgctgctcgcacttctgtttggatctcagaagacgttcctctgcctacaattaagtctgaagcccacgagatcgagtctcctgtcccccggttctgccgggaaccctgaaaacgaagccccctgcccacaattaaatccagaagctacaagtttgatcctctctcgcccccagttttacctagatcccagttagacttagcgcctagcctccattctaccagggaccctgaagacggagcccccggcccctaatttttctggagtccacggagtcagaacccccaactccctgaggttcggggttggagctccgagctcaggcccttccccctaagtcgccagaactcttatccttagccctccaagggacccgaatcaggtccgcttgtcctcagttctctccgggcctcagacgcccaagccgggaagaaggaaaaataggggagggaggtggtctcgcctcttcctcgagaccttactgcggtaggtggggggaacattccccacattcctgagaggggtagaggagacagagacccagatccgggtgaactactcggcgcggggtggggagggggcaccaggccttcctgggatttaaccctttcggcgcgggaatccgagaaatggggagggggacagacaagcaggcgtaggatgggcaattggattaagaaggatgggggtggtggtgagagagatgcagaaaggaggggtcagagtctcctcgagagaatcggacgtgtagggggtcggagtctgtggggccagccaggaagggggcacgcgagagggggctcggggagccgggggtgggcggggaaggtgctcggcttccccagctcggaaggtaaggttggagggggtccgcgcgagggcagggggccgtccgctcgtctcaccggtttccaggagcagcagcagcagcagcggccacagcagcggcgtcggcggcgatctcgacggcaggagggcagcggcccgggccatggagggcccgggaggggactgggcccggccggaggcccgcgggccactctgtgggggccgatcggctgggcggtttagtaggtgcctgtggggctccggctccggctccgggccggttcccgctgcgctctagcctccctgttctgctctcccggcccagctctccccgcccggctcggcacccccggcctctcgctcagctccggcggttcgaacccgctgacgtcacaggatccacccgctgctcccccgagtcaagccgaccctggctccggccccgccccctcctggcgttctgaccccgccccccggattccacccctgttcctccccgggattccattctcgctcctccccaggattctaaggtcgcccctgccaaagaattctgtctccttcgctcccggcgttaaaccacgccccctaaggtctagccacgccccctctgctcccgagtagttcccacgccccgccccctgcctaccggccgcctcgccaaggtcttgccacgcccctttcggcccttccggccgactccgcccccaccagccccgcctccaccagccccgcccctcgccctagccggagttctctcggtctcttagctcagtccgtcctggcctctgtcccacccacagttcgaatcctgccctttcctgcctgcccgggtcctctcatcacagttgcctgaggcacgtggggctttacggttctgcccccagcacgtcccggttgtgcgacctccccgcaggtcgagcccatcgccctgagcctgtttctcgtaccctcgtgcgtttctaatctctgccccgaactctaggtgtcgctgcactcgtttctttctggatttctctgtctctcttacgtgtctttgtgtctctctcactctctttgggtcttcctctctgtccctgtatttctgcctctctgggtctttccgtcctcatgcttcggtgtcgctctgtttctggtcttcctttgtcagtcactgtttctttatttcaataaaagagacggggcgggggggcggcggggtctcactatgttgctgaggctggcctcaagcgatcctcccggctcggcctcccaagatgctgggattacaggcgtgagccaccaagcccggcctgtctgtcactgtttctgggtcacttggtccccatgtctctttccatcctttgactctgtctctgtgtctctctgtctctatctgtgtgcctctctgtctctgtctctatttctgtgtatctctgtctctatcggcctgtctctgtgcctctctgtctctgtgtgcctctctgtctctgtgtttctctgtctctatctctgtgcctctctatctctgtgcttctctgtctctgtctctccgtgtgtctctctctgtctctatctgtgtctctctgtccctgtctctttctctgtgtctccctctcggcgtctcttgtctctgcgtgcgagtctctctcgctgtctctctgtccctgctctgttctctgcttccttccctccctacctccctgcgcgccctggtcctcccctcccaacacctgctccgcgccgccttctcaccgcagccacccgccagggggcagcagagaccggcccccgcgctgcgctggcccggccgggctgggtggggctgggctccagtccggcctccggacctggtcactccccgcgtccttgtcccacttcccctatctccccagcctcctcgcgtctttgtgtctctcgctcagactcgggccctttgtctctcccagcggctcgccctcctccctacccccacctacctcttcgcattctttgggctgcccagggggagctggtgaggccgcgccggggggcgggatgagggcgcgaagcgggaggccgggggagggggtgccacggagcgccagtctgggcccaagttcgtccagggccaggaggcgcggagctgctcagctgggggcaggtgcttgggggcttcttgccctagcaagaggaccacctaggctcgccctcccttccacctgccacacacctgggctttcctccccagaaggactaggtttcaagtagcagaggctgttatccctccgcattcgagtcttagttatgatcctttttttttttttttctttgagacggagtctcgctctgtcgcccaggctggagggcagtggcgcgatctcggctcactgcaacctctgcctcctgggttcaagcgattctcctgagtcagcctcctgagtagctgggattacaggcgcgcgccaccacgcccggctaatttttgtatttttagtagagacggggtttcaccatgttggtcaggctggtctcaaactcctgacctcctgatccacccgcttcagcctcccaaaatgctgggattgcaggtgtga

SEQ ID NO: 1560959 - DNA, 4001 bp, Homo sapiens
aaaataaaataaaataaaataaaaaagaaaccagtccaaggtcacaatctaagtggatgaggtagcattgggactcaggcagtatttaagtgactttttttttttgagatggagtctcgctctgtcacccatgctggggtgcagtggcgcaatctcagctcactgcagtctccgcctcctgggttcaagtgattctcgtgcctcagcctcccaagtagctgggactacgggtacccaccaccacgcctggctaattttgtatttttagtagagatgaggtttcaccatgttggccaggctggtctcaaactcctgatctcgagggatctgcctgtctcggcctcccaaagtgctgggattagaggtgtgaaccactgcgcctggcctttaaatgactcttcatgctttctggaagacaacagatacattacagcaccagctcggagccaacctgtttgggttcaactctaggtctatgattttctaaacattgggtctcactaggttgactaggctagtctcaaacttctcaggtgattcttccaccttggcttcccaaagtgctgggattacaggcatgagccactgcacccggctaaggtctactacttattatctgtaggatttgtgcaatgtgtataacctctctgagcctcagtttccccatctgcataatgaagatcatattggtacccaccttatagggctgtctgttgcctatgcctagcacacagtaagcttttggtgggggcattaaggggggcagtacagcctggtggtttgttaccagcatggagtctagagtccgattaactccagtcagagccccagttcctcctcttagcttctttgggatcttgaacaggattcttatttcccattccctggagggctagggggtcagggactggaggtgggtccctttacctttctgacttggagatttcccgggctgcccggggttcgcacaaccagcagggggcgcagataagtgctccagagacgctgtggatccagttgtcccaccaccctccgcagccgggcttcggggaggcttccgatcaatgggaccttgggaaggaggtgggatagggaagggaagaatgagagcaacccccccatttcaaccctaccccgggcgccgtcacccgcgaggagccccgggttctcttcctaatctgccgcctccagcatcggagacttctaggataaatccaaggctcaggaaaagtccttccaagaccatccggtccagcctacctcaaacttgatggggaaatcgaggcccagtgagagagaggggagatggaggaagggactcttccaaatagttgactaaaggcgtagaaccctgaacccccccgtcttactatttcagacctttcctcttaaaaggaagctactgttgcagaaccagcccgaagccttattcctttggtaagggtcatgcgctcagatgacgaagacggtggcatctgcggttagggccgtacgctaaagccacgtcaaccctgggtaacagcggggagggaatgagggtccccgcggtgcccgggtccccgcccagcctcacccgcagctcccggcccagcggcagctcctcagtcctgcggtgccagccgctccaaatggtgtagaacgccgagcccacggccagcgccagcaacagaggcaagagccgaacccgcggtagcaggcggcgcttcggcggcaagagtggctccatgaggccacgttcccccagccgcaggcggggtcgcccgcggcccccggaacgcatggccgctttgccctgaaacctgtaccagaccacggattgagtttaggcccagccaagttcctccccatggaatcggtgggccaataagcaacagctgcggctgcaccagcccaccccacagcgagcagcgaaaccaataagaactacggtcctgaggacacgcctcccagcctcccttaggtattggggttggttcccctgagaatggcacgacccaaatgggagcgcaagagaagtaggctccgccttagcggaggagggaaagccaatgaacagcgtttgatcatggaaaatattcgatctcccgggcgcaggtccatgccccttccggatgtaggcaggggattggtggcgcagggtcggaaagatcagtagatacgtcagtaacgcgtcccagagggaagaggggcggtgcctgtctccgaagcgaggagcggattggcttcacggaggccgcgcccccgaagtcacggccggcgggcatttggaaatagcttgtcatttccctccttcaacctgtaccattcttcaagaaacggtttgaatcagactgcctttccttttgtcttcattgtcataaacatctgcccccgtgtggttctgactggccgcgaacccctacccgaagcttttattccatcattgtgcaccgttggtggggaatgctgtggcaacaggccacgcctccacttactggttggctttgcgcaggcgccaacggaagtgggtcgcaggaagaggaagtcccgcctctctctcctcaggcagcagcaacgcggaggaaacgggagtgaacggagagcgtagtgaccatcatgtgaggccgggctaggcttaggcggcgggaatgaggttgagggtggatatttgaccgattgagtgtgggaagggttgagcagagcggggggggcaggggcagatgttttagggatgcagcgtcctgcttttctcctgatgagtttgagaacgggcgtggggcctttgacgcatcgtgacttcgggagaggggacagctttatcagataacgccctgggctgggcgcgggggctcattcctgtgatcccagcactttagtaggccaaggcggagcatcgctggaacacaggagttcgagactagcctaggcaacatagcgagacccccgtctctacaaaaaaaaaaaaaaatttaattatgaaaaacatgttttaaacgataacgggagtggtcctagataattagtcctattgaaatgaatgttaaggggcagcgattttacgaatactgggggaggccgagcgcggtggctcaggtttgtaaatcccagcactttgggaggccgaggcgggcggatcacctgaggtcaggagtttgagaccagcctggccattgtggtgaaaccccgtctctaacaaaaatacaaaaattagccggccgtagtggcgggcgcctgtaattgcagctattcgggaggctgaggccggaggatcgcttgaacccgggaggcggaggttgcagtgagccgagattgcgccactgcacttccagcctgagcgacagagtaagactccatctcaaaacgaaacaaaagaaataaaacgaataatgggggagggaagttaggacttttagaaataattatttgaaataagggacttatcttgatcatttgagctggagacgggtgcgttttcgacttgattcacaacttacacggataacgaacgagtcattgacatgattttgcgcatttattagtgcagcagatattacattgaatgcttatgtatcagacactgcttaagctacataggatacatcagtgaatgaaacctctagtccccaagggaaaagaaaaatctttttctctttttctttttttttttttttttgagacggagccttgctctgttgctcaggctgtagtgcaatggtgcgatctcagctcactgcaacctccgccgcctgagttgaagcgattctcctgcctcagcctcccgagtagctaggattacaggcacccaccaccatgcccagctaactttcgtatttttagtagagaccaggtttcaccatgttggccaagctggtctcaaactcctgacctcaaatgatccacccgcctcgaccttccaaagtgctgggattacaggtgtgagccaccgtgtctggtcggggttttactttctacactgagatggggggaggatgggagggttttcttttgttttgtttgtttga

SEQ ID NO: 1560960 - DNA, 4001 bp, Homo sapiens
ctattagaatgatgaggggaagaggggttttgaccctgtgttgccatggttctttatcaagaaatggggatattgggccaggcgtggtggctcacacctataatcccagcactctgcgaggccgaagcaggtggatcacctgaggtccggagtttgagaccagccttgccaacatagtgaaacccgtctctacaaaaaatacaaaaattagctgggcatggtggcaagcagttgtaatcccagctactcagcaggctgaggcaggagaatcacttgaacccaggaggtggaggttgcagtgactggatatcacaccattgcactccagcctgggcgactctgtctcaaaaaaaaaaaaaaaaaaaaaaagccaggtgtggtggctcacgcctggaatcccagcactctgggaggccgaggcaggcggatcacctgagctcaggagtttgagagtagcctaaccaacatggagaaaccctgtctctactaaaaatacaaaattagccaggtgtggtggcgcacacctgtaatcccagctactcgggaggctgagtcaggagaatcacttgaacccgggaggcagaggttgcagtgagctcagatcgcaaaattgcactccagcctgggcaacaagagcaaaattctgtctcaaaaaaaaaaaaaaaaaaaaaaaaaaagaaggatattgaggatatgggagaagcctaaagcctccccaatcctcttgttgccaccattatttcaacagatatttgtccaattaatttgttttttttattttttattttttattttggtagagacagggtctccctgtattgcccaagctggtctccaactcccggcctcaagtgatcttcccgcctcagtttcccaaattgctgggattacaggcatgagcttccacgtccagtcttaatttgctaatgagagaaaaactgcaataataatacttaagctactacatggctgggatggagatttactgacatcatctcatatgtacttgtcaacaattctaccaaagacctgctactatttacccccgctttgagttggttcaactgaagctcagcgaggagtgacctgctcaaagccacacaacagctaaaaaacaggccccgtgtaaacttcaccccctgacagacagggtaaggaggcggctccccagggtcctctcacccagcgcattctggatctgcacggatttctccgggctcagcagggtctcattgccgtcgtagggggagcggaagcggacgccctcctccgtcacctcggacagagacaccagcgacaccatctggaaaccgccgctgtcctaagggaaaccccaccgcaaagctgtcagggggtggagatggggacccttcactccagagaagggccctagaacgtcggctctctcctcagctcaccgttagcagattatgaggccaattcatgaagccgtggagaccgttggctttctggatcagctcgggtccctgggttgatggaagaaagtgtcaggttaggggtgaccgcgtccctgggggcccttcttgggagacagatctggccagctttagtccctgctgctctttcacgcccagtacaaggcctggtcattgggggcgctcaatacagctggtcgattgactttgggaggagtgtccgggcctggaggacgctccatggctccccacgcctcgccgcctcgccgcctccccgcgcgggcagagcccacccaccggccttagacccagatggtaggtattgcccaggcagatgcggcaacccagagcgtccagctgttcggtcgtgatgcccttcatggtggcctgcgtgcccactggcatgaacacaggagtggccactgtcccatgcggcagccacagctcgcctgcccgggccctggagcggctgcattcggccaccagccgcatgatccgtggggccgactccagggaagcctgggtagctgctcccgccatcttgactgtcggaaccacgtgggccgtaccacacagtgggcggcgccatgttggccgctgtcacgtgaccacgcgatccgttctggagcccgggaaagcgtcgggggaccatggcaacggatttgaacccctggtcctggctgggggcccatttaactcctacccacaacacgctaaagcgaagaatcagaattgaactgggaacgaatcccatccctagcactttcgagctacaatcagagactctcttagccataattttctcttggataaaatgtggcgaattacagcatctcggcataaagactttgtaaagattgaataaagggccgggggtggtggctcacgcctgtaatcccagcactttgggaggccgaggagggaggatcacgaggtcatgggatggagaccatcctggctaacacagtgaaaccccgtctctactaaaaatacaaaaaattagccgggcgcagtggcaggcacctgtagtcccagctactccggaggccgaggcaggagaatggcgtgaacctgggaggcagagcttgcagtgagccgagatcgtgccactgcactccagcctgggtgacagagcgagactccatctcaaaaaaaaaaaaaaaaaaaaaattaagctggtgtggctgggtgcggtggctcacgcctgtaatcccagcgctttgagaggctgaggcgggcggatgacctgatgttgggagttcgagaccagcctgaccaatgtggagaaaccccgtctctactaaaaatacaaaattagccaggcatggtggtgcatgcctgtaatcccagctactccgaaggctgaggcaggataattgcttgaacctgggaggcggagtttgcagtgagccgagatcgtgccattgcaccccagcctgggtaacaggagcaaaactctgtgtcaaaaagaaaaaaaagttttaaaaattaaaaaattaacaggttgtgagccaggcacggtggctcacgcctgtaatcccagcactttgggaggccaaggcgggcggatcacgatgtcaggagttcaagaccagcctggccagtatggtgaaaccccgtctctactaaaaaaatacaaaaattagccgggcgtgggggtgcgtgcctgtagtcccagctattcgggaggctgaggcaggagaatcgcttgaacccgggaggcggaggtcgagccacgattgcgccactgcactccagcctgggcgacaaagcgagacttcatctaaaaaacaaaaacaaaaacaaaatcaaaacaaaaacattaacatggtgtggtggcacgcccctgtagtctcagctactcaagaagctgaggcaggaggatcacttgagctgaagagttggaggctgcagtgagctatgattgggctactgtacaccaggctgggcaacagagtgagaccgaaaccctaaaaaaaaagataataataatatacaatattatatagtaattgttatcattacaactggatctgatatctgtcctggccagcagagagcgctattgtcccagaagatgtcctttcaattgtcttaaactgagctactctggccaagagggtgtctaagggagcctcaagccccctatcctgtaagaaaggctaaggatgccggttgcccagatggtggggcatccttagtaaggccacacccggaaaacccgcctggaaaacacccctgcccaccagcaagccaacctcagggcctttgcacctgcctttgtctacaacactcatcctttcttttctatttcttttctttcttttcttttcttcttttttttttttgagacagaatctcactctgttgcccaggctggagtgtagtggcacagtctcagctcactgcaacctccgcctctcaggttcaagcgattctcctacgtcagcctcccaagcaaccgggattacaggtgcctgctgccacacccggctaattttttttttatttttgagatggagtcttgctctgcttcccaggctggagtgcagtggcacaatctct

SEQ ID NO: 1560961 - DNA, 4001 bp, Homo sapiens
gtgaggtcaggaaatcaagaccatcctggccaacatgatgaaaccccatctctactaaaaatacaacaattagctgaacgtggtggcgggcgcctgtaatcccaggtactggggaggctgccgcaggagaatcgcttgaacccaggaggtggaggttgcagtgaatgaagatcgtgccactgcactccagcctgggcgatagagcgagactccgtctcaaaatattaatactactaaaataaccaataaaacattaacgataattagtaatgagacaacggacactcctgtttgctgggcccgccgcagtgccagctcggtaacccccaccactcggagaagaggccacacttactatcccattttacagaaggggaaactgaggcatggaagcatgaaataacctgcccaggtggcgccgtccgcacacggaggaggcaggaacggaacacgcgccgcctcctcgccctccaccaacacggaccccaggggcgcaccctgggtccccgggtccctgtgcgggccggggtgacacacggctgacccccgcacagaccgccccgcttccgggtcccccgggaaggacgcgcgggctcctgcttgccaggttttaacccacaagggttgtagggatttacccaaaggagagcaaggagccgggtctgcccggaaaggcagggggcgcggacaagcccagagggcgagtggggccgggcgtgcggcagggaccaggctggagcgcatggccacgtgggtgaaccccgacccgcggacaggggcccaggaccctctggcgggaggctccatggctggcacctcggggcccggggagtgggggggcagacccgggagtgggggcgcggccccggggaggtgggggggggggtggaccagggagttggggggcggactggggaggtggggggacggacccgggagtgtggggggcggaccagggagttgggggactgaccggggagtggggggacagacccgggagtgggggcgcggccccggggaggtggggggggtggaccagggagttggggggcggactggggagtggggggacagacccgggagtcggggcgtgggccagggcagtgggggggtcggacagaggagttggggggcgggcccgggagtgggggcgcggacccgggagtgggggcgaagaccagagagtaggggcacggaccagggagttggggggtggaaccgaggagttggggggctgacccgaggagttgcggggcggacccaggaatgggggcaagaaccaggggagtgggggggtggagcagggagtggggggacggacccaggagtgggggcgtggatcagggcagtgggggggcgcggacccgggagtggggggagtcggacccgggaagtgggggcgcggaccggagagtgggggcacggaccgaggagttggggggcggacccggagagtgagggggtggacccgggaatggaggcgcggaccagtgcagtgggggggcggaccggggagtggggcgcggaccggggattagggggcggaccggggagtagggggcggaacaggtaaatggggacgtggatccgggtcccctcccccagcgagcccccggagcgccaggagggtgtccccgctgagtaacaatgaagaccccccacccagcctgggggtccacagcgggcgagaagggaaggcaggacaggctgaagccccggaagatgagcaacgggagcgaggggaacgaagggaacgaggggagggaagggaaaggaggggaggggaggcggggagaggatctcaggggagggagcccagcccgcccccggcgcccgccgcgccccgcccgcccgcgctcacagcagccgccgcccgcccggggtgccctccgccgcctccgggccgcactcggggttctccagcgcgaccatggctcgcacgctgtcgccgccgccgccgcccggcagggccttcaccgggccgggcaggaagtgacgggcgcccggaggcgggcaggggcggggcctggggctgcgcggcggggcgggggcgcccacctcccggctgccgggaacgaacgcggaaacccaggcgcgcggggaggggatccagcccctggggggacgaacggggaaaccgaggcgcgcggggcggggatccagccaacagggaacgaacggggaaaccgaggcaggcggggccgggatccagccatcagggaacgaacggggaaaccgaggcaggcggggccgggatccagcccctggggggacgaacggggagactgaggcgggaggcggggccggccacgatccctacacccagaaatctagctccgggaaggagggacacctaggcgaggggtcgaaaactcaaccacaaccctgcgtcccgatccgggctgcggactgagccaggaatccagcccagggaggcgaggagacacggacagggaaactaaggcctgagcatcgacgagggaggggacgttcttcttggaggcagaggatggcggaaattaaaactgcccgagccttccttccacctgcccctcccagccctggagcctcggctaggcaaccccttcccctgcttagcctcagtttactcttctctaaaattaggcctggtggccaacgtggtggctcacgcctgtaatcccagcactttgggaagccaaggccagtggatcacttgagtccaggtgtctgagactagcttgggcaacatgatgaaaacccatctctaaaataaaaagaaagggccgggcgcggtggctcacacctgtaatcccagcactttgggaggccgaggtgggcggatcacgaggacaggagatcgagaccatcctggctaacacagtgaaaccccctctctactaaaaatacaaaaaattagccgggcgtggtggcgggggcctgtagtcccagctactcgggaggctgaggcaggagaatggcgtgaacccgggaggcggagcttgcagtgagccgagatcgtgccactgcactccagtctgggcgaggagcgagactccatctcaaaaaaataaaataaaataaaataaagcaagagggaggctgggcacggtggctcgcacctgtaataccagcactttgagaggccaaggccagtggatcacttgaggtcaggagtttgagaccagcctggccaacatggcaaaaccctatctctactaaaactacaaaaattagccgggcgtggtggtatgcacccatagtcccagctacatgggaggctgaggcacaagaatcgcttgaacatgggaggcaaaagttgcagggagccgtccacttcactccagcctgggccacagagtaagactactctgtctcaaaaaaaaaaaaaaaaaaaaaaaaaatagccaggcacagtggctcacgcctgtaatcccagcactctgggaggccgaggcgggtggatcatgaggtcaggagattgtgaccatcctggctaacacggtgaaaccccatctctaccaaaaatacaaaaaattagccgggcatggtggcaggcgcctgtagttcctgctactcaggaggctgaggcaggagaatggagtgaacccaggaggcagagcttgcagtgagccgagattgtgccattgcactccagcctgggcgacagagcgagatgctgtctcaaaaaaaaaaagcaagaaagaaagaaaaagaaagaaagagtaaggaggaaaaagaaaaggatgagaaactgtggatggactcaaaaaagcgtgcactgtgagattcctgtagataaatgtgcaaagaggtgaaaaaggacaatggagagatgtatcaggagtgactggcaggggagctgggcatcgggaatgagtggtttccccatccatcaggcacagggtaagggtagatgctcaaagaatggacctgaacatttattcgtgagagagggaggcaactccagagaacttcctgggccttcctcccattctgggttccagggcttcccttcaggg

SEQ ID NO: 1560962 - DNA, 4001 bp, Homo sapiens
cacttcaaggaaataatctaaagggcaaaaccatgacttgagcaagcactcggagctgggtcatttaacacagcaaaagggcaaaaataacaagcaggggataaccacagaaacctggatggggcatgtggggagcaacacccctgccctggcagtgccacgtctgggtgggtgcccagccaggacctgggagcagctgcctcacggtgggctgagtggagatggcacccgatcagcaggacccaaagtttagtccccctgtctccagacggccccttagaatcccagtctccaaaacccttccaaagcttcctcctgccacgaggggcgagaccttgggccgggcacctgctgaccacagagcctcacccaccagtgacattatcaacctgtgtgcagctgccagagccctcagtgccacaggacgactctaggcccttgtagaggcacttcctctccctccccccggaaggctttcgccacacggacagcccaggtggggagacctctgcctcattccccacaatcagaagacgctggatgagaccagacacaaggcccagctaggcctggtgcaagccacagagcacactcggaggaacggctcagcgaggtgaggataccaacagctgatgtgcgacgcaggccctcatagagcaggccgcagggtgaaggcaccttggatccaggggttagccctcaagggctgccattgtcagccagggagcccagcaaccagggcagaccactaggccaaagtgtagctgggcacagaaggctcagctgagaaacaagggactccggcttcctccagctgtccctaaatgggcaatggctgcctgatctacctaggccttatgtgatgctcctagagccccctcagtccctcgggcggggaagaccctccagcaggctggctggggccccggccatcagtgcgcacgtgttggaagaagttggtccaacaacccaaagtcccagatgctggccacaagccccctaagacacgcttcctaagtggtaaggcctacaggtggcctgggctcaatcgggttccaacacttataaactgtgtctttgtcactctgggcctcagtttcccaacgtgtaaaaagagaggctggttagtatcaacctcaaagggctgcagtgaggattttagttaattcgggtaaagtgctcagaaaagtgcaagtactggcttagcactgttgagagttctgagtgaagagatggaattcttgctgcacacacgggtgcctttccactcaatcccagctttgcaccccaatccaaggctcccaccaccacacacctcacccccaggccctcatctcggcccagcccccattgcctgccccgcctctcccgggccccacccccaaacacgctgccccaatcaggacaagcctcgtgagagccccgcctccgtttgcccaggcccaacccacctattggtcacgcccatcacgccttagccccgcccctaaaaaccccgcccccatcccgaatcacgctttcagcccagcccggcccgccaaatcttgggaaagctccaccccctgcggaggccccgccctaacagcctctcccaccgctccgggccccaccccctctaggctctggccccgccccggcgcgtcctaggtcccccaggtctctccgggcctccggctccgtatagccgcgcatcctagcccgaagctgatgctgcccggtcggctccggccttcccggctgcctgacccgccgggccccaagccccgggctccggcctgggcccagcggcctggagcgcggccttggcccgtctgcccgccgcctcgccgccacgacttcgcccgtctgtgccccaccggccgcacctttgaataggtagtcgtactcgtcgtcccgggtccccattgtcctggcgcttccggcgggatcggcgactccgcagccccaccacaaacacccgacgggggcggagccggcgccgcgcagagcggcggttgaatggcctatcagcggcgagtggagtagcgacgggcacccagcgaagccaatcagagatggaagtagtgctctgagggtgggcgccgcttggtaccaccctcctcgccctcggtgtcctggagaaaggcggaaggaatgcggacctttttgaagtgacggacgcgccagcctatcaggggcgagctcaagagggcggggcggaagactgcaggaatgaaatggattgacagaccaaataactaatgagaggcttgattgagaacctacccgactatcagaggacctgtccgggaagagaaatggggctacgtccaggtaatgctacgatgcttaacgtcccgatgacgtcataggtcagcgcgcgctgccctggtcgccccccaagcccataaatgaccatttccggggacctcagcgctgggtcccctttctcggttgcagtctccatctctatattgggactcactgggttatccttctgtgcctcagtttcctcctctgtaaactgaagaaacccgtctcatggaatcttttgaaaataaccagatcagccaggcgcggtggctcacgcctgtaattccaggactttgggaggccgaggctggcggatcacgaggtcaggagttcgagaccagcctgaccaacatggtgaaaccccgtttctactaaaaatacaaaaattagtcgggcgtggtcgctggtgcctgtaaacccagctactcaggaggttgaggcaggagaatcgcttgaacctgggaggtggaggttgcagtgagccgagattgcaccaagtgtgaatcaaccgtccactttctgctattctttgttaaataaatacttttaaatccttactggataccaatgctctccaacaggacctcctaccactacccctcttttgtcctatattttgccacataggtaaaatataaaaataggtaatatagaaaataaaacacatactgctgtattgtcaggtagtgataggatttatcactacctgacaatacagtatgtgtttgttttatatatttagggtgtacagcgtgtgttttgatacacatgtacccagtgaaataataattatgacagtttttttttttttttttgagacggagttttgctgtcgttgcccaggctgaagtgcaatggtgtgctctcggctcactgcagcctctgcctcccgggttcaagcgattctcatgcctcagcctcccgaatagctgggattacaggcatgcaccaccatgcttggctaatttttttgtatttttagtagagacggggtttctccatgttggtcaggctgatctcgaactcctgacctcaggtgattcgcccaccttggcctcccaaagtgctgggattacaggcattttcaccacacatggccaattatgagagttaagcaattaacctatccattgccttccataattaactgtgtgtgtagtgagagtatctaaaatgtactttcttggcaaattttcaatatactatgcaaaattattaacacaaagtatacgttactttttgtttgtttgttttggctggctgcggtggcttatgcctaaaaacatgccctttgaggaggctgaggtgggaggatcacttgaggccaggagctagagaccagcctaggcaacatgtcaaaacccagtctctcaaaaaaaaaaaaaaaaaaagaaaaaaaggaaaaaaaagagaaaaggaaaaaaaagaaaagaacaacaacaaaaattagccagatgtggtgcatcatgccagggtcccagatacttgggaggccaaggcgggaggatcattcgagcctgggaaatcgaggctgcagtgagccatgatcaccccactgcactccagcttgggtaacagagcaagaccctgtctcaaaaaaaaaaaagccttgctttcctgacccattgatctgtttgttttttgtcctctgtcagcagcatatcagcctgatgacatcagggactgtatctgtccccatcattgctgta

SEQ ID NO: 1560963 - DNA, 4001 bp, Homo sapiens
ctctacaaaaaagaaaaaaatcagcaggcgtggtggtagaagcccgtggtcctagctactcaggaggctcaggtggaagaatggtttgagcctgggaagtcgaggctgcagagagccgtgatcacgtaactgcattccagcctaggggacagagcaagaccaccctgtctcaaaaaacaaacaaaaaaagagaatggggaccaagatccagctgaaacctcatacatggaagaacttgaagatggggaaactgagggaccaggattaggtgcttatgggagaacacaggtgctgtttctgccccggtacacagtgggcaccttactgataaatgcccagtgtgtaagtgaatgactccagtcaggaaagagatagacgaggttggggctgcttttccaagtacgggaatccaaccgagccgggcgggagccctccagctgggacccacccagatctgcagcttgatcctcttgtcgttgcgatagatggtcttgaccttgaagtcgatgcccacggtgctgacgaaggcaggcgtgaacgagtcgtcagcatagcggaagaggaaggacgtcttgcccacgctgctgttgccgatgatgagaatcttgaacatgtagtcgaagttctgatccgaggactccttctgcccatagcgcgagtctgtggcggatgccatctggggataccgggtgtagcagagccgtgaggggggctctctccatcctcatgtgcccaagcccaggcagaagatggcaagggctccagaaaacggccggtgtatggaggacacccttatcccatcaggagccccagtattaattggtggtgcccccagcagagggcagcctgtgaccttgaaatcctgggcgtttcagaggaggggctcagagggttgccgatggggacaccccagcagcccccttcaaggggcaggtgccccaggtggggctgtaaccctaaacccagggctgagcccggagggggtgactgcggctggctccgccccccatcaatctttcatggtcctcagaacccggccgcgcggccccacgtgcaccgcgtgcatggtccctcgaggacgcgcatctgcagcccccgctccccgcaaacctccaggccggagagctccggccaaggccgctgcatcacatgatacaggaggggcatgcacacgctcacgtgcacacagcctcaaacacgctcatccgtacatacaggagtgtgtgaacgcactgaggtgcacaggacaaagacacagacacctgtttgcacaccgactcgcctatagaaatgtgcaaaccacccgtgcgcacaggcccctccacccatgcaggcgtgtgcacatcacccacacggacacggatccccgtgcttgtatgcacgggccatacctgcacaggcggtccacacgtctttctccacgcgcgtgcaacgctcacacacttaggcccagacccccacggcgtcacacgagcatatccaggtacacaagcaagggtgcacacagacccgctgacacaggcaggcgcgcacacgcgtgtgcacaccacgcgcacgcgcacgcaaaagcctcccgcgcgcacagcttcccgcaaggagctcggctcccctccccctccgccgcagagcaggggggttgggggggttagtggtgaggatcaggcaggagtggggcgcccgggccctacccattcccagcctcgcgaccgccgcatccttccccccattcaaccctagtcaacctcgtcccccacctccatcagcccatcagtcaaatgaaggttatgcaggtgctcggagcctgagcacacccggccgcccaggagctcaccttgccctgcaccgatgcaacggcgaccctagcggcggtgacttttttggcggtggcggtgacaggaccccggtgcgttgatgtggggctgcgcggcggcggcggcagcagcggctcaggcccctgcagtcctccgtgacgtcctgcaaagggaggggcggagcctcacatgtagataagtccgtgacgccatccggaggcggagccgcgcgtagagatgtggcccattgacgcacgcagagccagatggggcagggctcctgagcagattgacgtgcaaatggggcggggcctagcgtgtgcatccagtaggggcgggagcggcgcgggggccgactccgcctctcgtccgcctcctgtccgcctcggggaggcggggcccctcagcgttctctcactggcttaagctctcgagcgacgggcgaagtagccaatcagagattgtctacgccctcctcttgtccaatggtggcatctgggagattgaagggccgagaggctgaggccttggctgagccccggtcttcgaggggcggttcccttacccgcccgcacccaccccaggtaggggactcttgaggccaccgtctagtccaaggtgctgtgacccctgttaaatgcccctgactcccaattgcagaaaagaaaaatcgaggcccaagagatgttttataccctcacatatatggggttcaaaataaataccaaagaataaacaggagtcaagagggacccctgtcccattcccgaggcgtaagacccccccactgagggaggggctagtaaagactccacccctcccccgtttctgaggtttgaaaagaaagaagtagaggtcaagagagcctcccctccccaccattcccagaaaaggaggaaggggctgatggactctctgggaaccccctcccctccctgcgccccgtcatcaagaagaaaattcgaagaaaaggtttagcagggacagagaagcgacctgtcccggaaaccccttaaagcctgcggtaaatgccccgggaaacagggagggcacgagccgaagcctccagctcttcaaagctcggattcaaagacccgggggctgggagaccccctccctccatcctgggaaagcaaaactcagaggatggagccttttgggagctaagatggtccatcttttattcctccaaatctttagggaaggaagtcagaatttggggagggaggaggagcccgaaaccccagcccccactttgggtctcctgctccccctactccagctttcaaaccctccaggggtgtgtggcccccaggagagtcctgatcccctagattctccccccacccctcccagtaggcggggctggagcgtgtgtgtgtggcggggggtgactcgtcctgtttataaaaagctcgccagctgcggaggcgccgagagaccagaataacttagcgcctcgaggcccagccgccgccaacccagtccccagcccgcccccagtgccctgggagtactgggacgcccacccccacgtccccgcaccgtttacatttgggaaatttattttttctttttagggtaacatgtttgctccctcctcccccactcggactatagaagtatcaccaatccactgcagagaaattgggaaaattcagaaaaacaaaaaataaaaagaaatccacctcccattctccctgccctccgcgcccacgcggtagtccgtgctctgtggggggctccagggcagctggtccaggccctggcctgccgcctccttggaggggaggtttttcggttgctcagctccctgatcgcccaaaggcacgcttcctacatgggtggctctctcggaaatacctcctgccttttttccccaggaagagaaaagtgagccacgagaatgtgcggaagcttccgtcactgacttagtattttaaagtaaaaatagccgggtgcggaggcttacgcctgtaatcccaccactttgggagaccaaggcgggaggatcgcttgagcccaggaattggaaaccagcctgagtaacatagggaggccccatctctacaaaaaatttaaaaattagctggatgtggtgtcgcgtgcttgtggacccaaatactcccgaggctgaagtaggaggatcacttgagctcaggaggtcgaggctgtaggaaaccgtatcgc

SEQ ID NO: 1560964 - DNA, 4001 bp, Homo sapiens
ttctttttttttttttttagagacaagatctcgctctgttgcctgaggctggagcgcagtggcgtgatcatagctcactgcagtcttgacctcctgggctcgagtgatcctcctgcctcagcctcccaagtagctgggactacagacatgccaccacatcaggctaatttaaaaaaaatttttttgtagagatggggtctcattatgttgcccatgctggtttcaaactcctctgctcaagcaatcctcctgcctcagccttccaatgtgctaggattacaggcatgagccaccacgcccgacctaaaatgtgtttctttattcattcaacaaatgcttactctctgccgggccctgttctctgtggaaatgcagctgtgaataggacaagaaaaagtccatcctcgggtggtcacgttccttccagtgggaaggtattaacacacgtaacggtcattagacagtgcctggtatagagctggggcacaaaaaatgtgactgctgtttaatcttcacaccctgtggcgtaactgagtctgtattggggtggagggtggggagacctttcctatctggaaacccagaggcctagcaaagggttcaagtgcaaggccgagggtaaggggctctggcccctgcagaactagattctggagaaggcacaggtgtggacttcgccccagcgtgtgcagccggtgtggcccaggtgtaagctggggtggggtggggggaggacctgccagctggataagctggatagagcccctgattaaggcttgggtgttgactttggcaggtgtcagccactggggcgcctgccgcccaccaactcatgccaaatacaaccccttctctgagttccaaggggaaggggttttctatgtacagggcccaggtttagagtccagttctaccccctaaatgggtactgctattttctatttgtcaaaggggccaggcctgtctccttctgcccaaggctgactcactccagccccagtccacggaggcaggagtgagagtccttatacccaaggaaacgatcccagccacttaattaacacaaccccaccaccacgaccactgccgcccacccttggtctttccaggcaatctgtcccacggctaggctccttgaatctgcccacactccaacatgctgcttcatccgagtccaaggtgctccctcaaccctcataacctctcccaggcctcagtttccccagctgtctatggccgctgcgggaaccgcacggagaggctgcagaaggcctggatgcaggcggggcagaggcagagacagccctggcacagctatttctcaactgcctttggggcttttttccattttaaaccaggacccaaccggccccaccccgtgttccaggagaacgagtttaaggaggggaagagaagaggcaggaaacctttccccacgcagggcagggccgcaaggctggggcccccacctcccccagccttagctcacctgtgtcagtcggtcccgcctctttctaaccatctgccgaccctccctcaagcctggccccggagggctcgcctctgttccccttcactagatttggggcgccccagccaatgcaggtggactcaggagtttcccccatcaccatatggtcccaacgcctgtccccagctgggctctctgccccgcccgcgccccatcagcgcttcccaagtgcccagctgggtgggggcgagggcagaggcgttccccgcagccccgcctttgttccccagaccccctaccttcctcccaaacccccgtaccccacagacctgctcggatgcggaggggccgggtgggctgcgctccttcccaggggtgacctcgcgtagggggcgccgcctgcaggggttccgcctgtgaactcgctgcggcttggccctggccgcgaccccgaccccgcagccgcagaagccagcagcctgcagccacccggatcccgcgcgggctccgcccagaaggcggaggaagggccgttcccggagcgggggatgggggaggacgaagaggggccgagtcttgggcggggctttcagagagcgggtgggaggggctggaagctgcaccaagcgtctagagcccgtcctagccaagcaacatctcattttcccagctgcttgtaaagagcttctactatacgcacggctgttaaaagcatagagtcttgggcctggttcgagtcccagctccaccactttctagtcttgtggctttggacgcgttacttaacctctttgagcctcagtttccccatccgtcaagtagctcatagcgagagtacccaacctcacagagttgtgggaggattctgatctgagttagtgtttgtcaagtgcagtgccggccttaaagtaggctaggccaggcgcggtggcctgtaattacagcagtttgggaggccgaggcaggagaatcacttgaggccaggagtttgagaccagcttgggcatcgtaaggagacctcatctctactaaaaataacaaaaattagccaggtgtggtggcgtgcgtctgtaaccccagctacttgggaggctgaggcaggaggattgctggagacatcgaggctgcagtgagccttgattgcaccacagcactccagcctgggcaacagagcaagaccctgtttcaaataaataaaaataaacgagagctgggcgcggtggcttatgcctgtaatcccagtactttgggaggccaaggcaggcggatcacttgaggtcaggaatttaagaccagcctggccaacatggtgaaacctcatctctactaaaaaaaaaaaaaaaaaaatacaaatattaggggctgggcacggtggctcacacctgtaatctcagcactttgggaggccgaggtgggcagatcacctgaggtcgggagttcgagactagcctggccaacgtgaagaaaccctgtctctactaaaaaatacaaaattagccaggcgtggtgacgcatgcctgtaatcccagttactctggaagctgaggcaggagaattgcttgaacccggaaggcggaggttgcagtgagccgagatcacgccactgcactccagcctgggcaaaaagagcgaaactctgtctcaaataaataaataaatatacaaaaattagccgagcatggtggtgcacacctgtaatcccaactacttgggaggctgaggcaggagaatcgcttgaacccaggaggtggaggttgcagtgagccgagatcgcgccactgcactccagcctagacgatggagtgagactctgtctcaaaaaaaaaaaaaaaaaaattaaaaaataaatgaggctgggcacagtgtctgatgcctgtaatcccagccctttgggaggctgaggcaggaggattccttgagctcaggagttcaaggccagcctaggcaacatagagatcccaactctacaaaaaatttttttgaaaattagctggccacaaaaaaaaaaaaaaaaaaaaaaagaaaaagaaaaaaagaaaaaagaaaaaaaaattagctgaccatgggggcacatacatgtagtcttagctactccggaggctgaggcagggggattgcttgagcctgggagagagagaggcttcagtaggttatgactgtgccactgcactccagcctaggtgacagggcaagactttatctctaaataaagaaagttaaagtgggttggatccctttgtgaaatacccaggttttgctggtgttggaatcccagcaattccaccttactcaatttgctgaacttctctgagcccccactgcctcgtgggaacaaaagtagctgcctcaagagctgccacgtggatgaatgaggatgaagtgcattagttaggaagggctgggttatgcttagtaacaagcactcccaaagacttcacggccccaacagctaaggtttggttcccatgatggttgttttgtgaagtgaaaatgcagcaaattatgtactgttttgtaatacttctccttg

SEQ ID NO: 1560965 - DNA, 4001 bp, Homo sapiens
aaaagccagcactggacttgtacctatggccagccctgccctccccaccggctgcccaccagcccacaccatgcgcataaacacagctcagggttcccaggaccactgcgggaaactcacacttattctcaatgaactgatgaaggagacatgatttgccagttcctgcactgccaatcaccaggaatttgaagaggaagtctgaccagatggagccaaaatcagggatacccacagggagagaaagatacagggaaaaaagatggattccaatccaatctctctctctaaccatcacagttagagggagagaaacagacataggcagaaacaaaccaataggtaacagtaacagataactcttatgtagtacttgccatgtgccaggcacattctatatattttttttcaacttttattttagattcagggagtacatgtgcaggggtttttttgtcgttgtttttgtttttttgagacagagtttcacttttcgttgcccaggctggagtgcaatggcgcgatctcggctcaccgcaacctccacctcccaggttcaagcaattctcctgcctcagcctcccgagtagctgggattacaggcatgcgccaccacactcagctaattctgtatttttagtagagacggggtttctccatgttggtcaggctggtctcaaactcccgacctcaggtgatccgcctgcctcagcctcccaaagtgctgggattacaggcatgagccaccgcgcccagcccacatgtgcaggtttgttacatgggtcaattgtgtgttgttgtgggccaggaacagttctaaaggtctttactcacatcaacagctcacatcatcctcaggaaaactctatgagggaggtagactaaaaattattcccattttccggatgaggtaacaggccagaaaggttaactgacttgcccaaagtgacacagctgggcagaagtgagattcaaacctaggccaagggctccagagtcccagatcttagctattttgtcgctaaagtctcttgaaagctatttaaacaaggactacgatatagcccttgttcctcttcacctcctaccaccctctgactcattcactccactatagctcctgaccttcagtctattccctgaaaatgacaagctggttctcacctcagggtctttgcactcttctcccttctcttctatatttgttgagtgaatgcggctccctctgactcctaaacctgcacttcccctgcctccaatcaccacctcctatggtgcatccctactgattttccacttcccgacctctccttccctccctctgcccagaacccggctccattctcatgcataagtcccaccctttgccactaagtcctgcccctaactcaaggacagcccatccccaaacccattccagagctctctccagccagatcagccccagggtcccgagcttccattcagtgttccctctagcccataagcccgactcctgccattcatgcagtcagccccgccccttcactcaggctccgcccagatccattaaggcccacctcttccctcagggcctccctgaacccctcaggaccagctccctcaaatcccgccccagatctatttaacccacgcaccagaccctcaggctccacctaaatcgattaagctcagcctcagacccactaaacccctcccagcatccacttaggtcctgcctccatcacaccagaccccgccccctgatctacaaagccccgcccattcccacaggccgcatcctccctgggcccagacccaggaccccagcttcgtccaccaccctcaccgtaggtctcagccatgactcggtcgcggccgctgagggccgcaatatggcgccgcggccgcgcctgctcctcggctggcagccgctccactccggctacagccccggctccttcctactccccgggcccggcaccgccacttccgcctccgcccccctccggcgcgacccgctccggcagctggataccaggcgacgctttccgaagggcgggattggcggactcgcgggcagggggcgggacaagaggcgcggattggtggcgtgagaaggaccaagcccaaaggggcggggccgagcccagcgattggctgagcaagtgggaagggacgtgcagagctgcttagctgagccgaggaacggatttagtctggagtacggggggcagagtcgagtctccggattggatcggagcggacttgggggaggggatacaaatgcaaagaagggggcacgggcaggattgacagaaagaggctggaagaggagctgatcttgagctggcgggagcgattactgttctcaaaggcgaaaaggaggaaaactgggcagataggcgcaggttacttcccacctccctttccagataatcttccaagaaaacctttactgtgcgatttatatcctccgcgtagtccgattggctccctcccactggtctagagaggacactacaatcccctagttgggctgcttaggttttcctttgcttgtgtccgaaacctaagcttaggagcgctcctactgcacagggctttcatcagtgaaactctgcctagcaaccactgacgttaccacaggcagcgggttaattggttagattcagcaacctagagaaacatttcatttgtacagtccccaccctaccctaccccaccccaaagaccacggagacgagccgtttgcactgggctgattgtatttgcataaagccaaggaggggaaacggcagggccagcggtaggctgagctcactggcagtagaaatcccatttctgaaaaagagaaaggggaaacagtggaaagaaaaccagcggtcacaccacaaaggatctagtggttttagcaaaggctgcagctgcagggcccaggtctggccacacaagtgctatgcaaattagcctagagccctctaatctttgcacctcccaactggacccattttactggtgagaaaattgaggcagggaaagaatttctcccagcgcacatacctaggctgccagggagccaagtgtgggagcatttttgcccatccccacaacctaagggtcctccccccacatttcttgccagcccccatgacactcacgtctgtcttcacatcgactttgccaggtttcagggtctggtcctctcggacaatgctactggggaaatagcccaggcgagcagccagatctccatagtaatctccctgaacctggggaagaggagttaaaagctagggtctgggaagatggcaagcttgtgcctgctgaaggcctttgcattctcccttctccctgatctccacataactgctccatccttgtcatatgaatctcagcttaaatgccacctgttcagaggccctttctgaacacccaagtaagtctctgttaattctcacagcagcgcatatttgcttttattattattattattttggaaacagggtctcattgtgtcgcccaggttgaggtgcagtagcatgatcacggctcactgcagcctcaacttctgggatcaagcaatcctcccacctcagcctcccgagtagccgggaccacagacacatgccatgaagcccagttaattttaaatttttttttatagagatgggggtcttgctatgttgcccaggctggtctcgaactcctgggctcaagctatcctcccaacttggccttacttgggattacaggtgtgagctactgtgcccggctgctgctattttttatgccttgctttttgttcatttccctccattagaataaaaaggatcatttgttgttgtatcttggtgtctagaacagaacgtgggaccatatcaggtcctaaaattggtaaataaagtgaaaataggctggggggcagtggctcacacctgtaatcccagcactccgggaggccaaggcgggcagatcatgaggtcaggagttcaagaccagcctggccaatatggtaaaac

SEQ ID NO: 1560966 - DNA, 4001 bp, Homo sapiens
tgcttgtaatcccagcactttgggatgccaaggcaggcagatcacaaggtcaggagttcgagaccagcctgaccaacacagtgaaaccctgtatttactaaaaatacaaaaattagctggacgtggtggcgggtgcctataatcccagctactagggaggctgaggcaggagaattgcttgaacccgggaggcagaggttgtagtgacccgagatcctgccgctggattccagcctgggcaaaagagctagactccgtctcaaaaaataaaataaaataaaataaataaagcatagctcctggaggagggcaagaatggaattagcacattatcttggggttcagggagataacacgattctgtcaaagtgacacagtaaagcaaaggccattccctaggttttcttgagtcggaataaactcctggacttagtgaccgttcccccactttccccatccctagcagggctacagagctcacaagccactcaaataggtgttactcctgggtcaaaccttttcattgtgggccaggactgcttttgtggcactgagagaggtcagctccacttctgtggacatcacaactgagatgcaccaagccaattctgttcaaccacaatgtgggctggccctacaggaaaagctgttctaaagtgacagctggagtcttgggccctttgatagggaagtcaaggctgtctgtggcagtggctgatttagtttctcgctgaggcttttatcttgcatcttcttggggatgacaggtcccagggcaggcagtgctgtcacttgccattgctgtcattcctggagcaggatgaaaggtgggcagggaaaaggtcctgactcttcttatcattccttctagaggaaaatacgcttatgaggggaagcatggtcagggagaggggctcaacctctgaacgctccagagaaaagagcaggaatggtgtgggttagagtcccggctccaaggtgcattagctgagcttgtcatcagctgggagtgtgcagtggcatctctctaggagagctaagcctcgagttttgggttgagacacagccaggttcaaattccatcaaatcccattctcaccacgtgcagactgtgtggccttgggcaagttccatgccctccctgagcctcagattcctcatcttgtcagacgggctcataacagcacttaacaccaagaactgaagagtgtgaaaatgcacgtgaagcacttggcacatagtaaatgctcattaaggtgagatgccactgtctttttcccatggccaattccccatgactcagtttccacttctgtaaggcaagagcctcaaaagaaccgcttcgagggctgctgctaggacagatcgagaggacgggcgcgaagaccccagcccaagacataacacgccctaacgagcgggctgagggtcggagcctcagtctccctatctgcaaaatgggcacctggtctcccccaccacggcccaggaacccccgaacggcggtgcaggcgactgctcttctccctttaggccccctcgaccctctcagcgccctcggcccgtccagccctgtagatccctcagccccagcccctcaggggcgcgcccagcccgggcctccggcgcccccagccattccccggtcccgttacctatggtggagataaaagtggagttgaaggcgtcctcggagaagcggaacaggacacaggtcttccccacccccgagtccccgatcagcagcagcttgaacaggtaatcgtaggtcttcgccatattacactctctccccgacgggaagtgcggccagcgcctctccactggccaccagcaccgtccatcagcaccgagcccgccccttattggctccaggcccgctgcgcgtcaccgcggccgacgcccgcccctgcgtcccgccagtcgcggggagaccttgggagggggcgagcggagcgcggagccggaagcagcccgagcgcacctcccattggccggcactagggagagcacgggctctgattgaccagcagtgaagagtcgcggggcttcaaatggggacgaggcgggggcgtggcattatgtggcccccgccttccacccccgactcgggcggcccggccccgccccactgtaggagagggaaggcagggagcggcgccaaccgctcgcgcgccggcagcctggcggggcgtggcttggggtgcgtgcgcacgcgcgcccggagttccgttaggcgacagcagagggcgcacgccagtagttggggcgggtgtctctgggtcccgccctcacagctcgcgcaggcgcagtaggcaccgaggcgagcgcgggaaagcaaggtagcgctctcagccttgtctgcggcctgcgagtcggggcagtgggggcctagggaggaaggagagaggaggagctgtatactcgaaaagtgacccaagccggacgcggtggttcacgcctttaattcccacactttgggaagccgaggcgcgtggatcacgaggtcaggagttcaagaccagcctggccaagatggtgaaaccccgtttctactaaaaatacaaaaattagccgggcgtggtggcgggcgcctgtaatcccagccactcgggaggctgaggcagagaattgcttgaatctgggaggcggagcttgcagtgagccgagatcgcgccattgcactgcagcgtgggcgacagagagagactccgtctcaaaaaaaataaataaaagtgacccaagacgagctccgaggtctgcggcctagcgatctgcttagagatacccaaggcctccgccatctgagcggcttcaccgccacaagctgtgcccggaagcgcgcgccggcctcctcagggcccgccctcggccaccttaggggttgtccgggccagcccggggatggtggggggggaggggttagagcagtgaggatgctgggtcctatctaggggccagggctctcaacgttgaaaaaactggccggggcgttggctcccgtctgtgatcccagtgctttgggaagccaggaggttgagggtgcagtaagccgtgatcgccccactgcaattcggcctgggcgacagagcaagaccctatcaaaagaaaaaaaggctgggcgcggtggctcaggcctgtaatcccgcactttgggaggccgaggcgggcggatcaggaggtcaggagatcgagaccatcctggctaacgcggtgaaaccccgtctctactaaaaacacaaaaaattacccgggagtagtggcgggcgcctgtagtcccagctactcgggaggctgaggcaggagaatggtgtgaacccgggaggcggagcctgcagtgaaccgagatcgcgccactgcactccagtctgggcgacagaatgagactacgtctcaaaaaaaaaaaaaaaaaaaaaaagaaagagaaaaacagaggagagatacatttggaaaatcgggcttgcagctgggtgtggtggctcaggcctgtaatcccagcactttgggagtcagcactttgggaggcaggaggattgcttgagcttaggaggtcaagaccagcccggacaagatagggagatccccatctctacaacaaataaaattagctgggcgtcatggtgcacgcttgtaatcccagcactttgggaggctgaggtggaggttcattggaggccaggaggtggagaccagcctgggcaacatagcaagacctccatctctgcaaaaaaaaaaaagttttttggccaggcgaggtggttcacacctgtaatcccagcactttgggaggccaaggcaggtggatcacctgaggtcaggagttccagaccagcctggccaacatggtaaaacaccatctctgctaaaaatacagaaactaggcaggtgtggtcatgtgcgcctgtagtcccagctactcaggcggctgaggcaccagaattgcttgaatctgggaggcggaggttgcagtgagccgagattgtgtcactgcattccagcct

SEQ ID NO: 1560967 - DNA, 4001 bp, Homo sapiens
ggatcccggcttcctgctccctagactagggctctcctgctgcaaccctcgcgcagaccagggtctcaaactggtggcccaagggccaaatctgacctgtggatgtgttttttgagctgttttgcaaggatgtgatttgtggctggcaaagtgaacgatttcacataaaaataccaacttcaggcttctcatagaagtctcagggatggggtctacatgctctggtgacggtgatcagctgaagccaagtcgtgcctgtgcttcaggcactccctccaccccagcccatcaagcacataacttgcaggcccctgaagagcctggccttcaggtctacctaactgtccaatcccaactccctgaccccactccaaaccttgattttcccctggggggaatttcccctggcattttgttttcccagtggtccttggtactactagtctgggaaccacatgaaacatactcctcggcttccctctctaagttccaagttctttctggtcacaccccagaaagcaggaaaagaaacgggaacagatctaggccagtgtaaggtggccacctggtgtccagtgtgggcacctgcagctgatgttggccgcagagagcggcaaggggaggagagagaggggaggagtcatgtggtttgaaaaggagtaggtttaaggcacagcagccaggtggatcctgggtttgaggaatagcaatttgagggggctgagactcgatggaaggatcggttgtgtctgagattttaagggatcaggtttgggggatctagtgtacatctaggcttgggcggacttgggttttgaaggacttggatttggggtctgaggtctgtctgcattccaaaagaccaagatttgagggaccaaggattcatctgggcagggggtttctcaccaaagagcacaagcttggactccaaggtgcgcagatagagaatgtaacaggcgccgaaaaagacagccagagccaccagcaacataggggacgtcaccctggaggaggagtgcagggaggcagcggttagacagctggggctgggccagcccgacggccctggccttctccaccggcgggcggcaagctacatcctggagaccagggagggccaggtgacatttagtcacactgcatcctggccagggtgatggtggggtaggggacctggccctttggtgacaaggtagtctagcagagccaatccttgggggcggggcctgggcggtgagaagagggccctgggcggtgagaggagggaccgggcggtgaagggcggggcctgagcggcgagaggaggggtccagccggtcggggctagtgcgggtgcggggcccgggaggcactcacacacagtacaggatgaggcccaggaacacgaacacatagttgctctggtagtactccacgttgcgtacgaggcgctggcacagctctcccaggttgcggggccgtgagaagcgctgctggtccacgaaggtgctccagggccggatggtcgcgcggcgccgctccagccactcccggcctgcaccggagggaatcagcttcggcagcagggtcctgcggggggtggggccgggtcagtggtggaccgggatggagccccagacccccgcaaaagaaggggactaagggtgcctggactccctcccgggaccccagattcctgtacagcaggcagggaggggactaggggcccagactccagggtcccattagaggagaccggggccaacacttctgcggctcggggctgggactccaggctctcgagggaggagggaggagggggccgggggcccggactcccgggtctctggtccgagggcctagagccagctcgctcacgtgccgctcagcccttccgcctcggcatctttctgctggtccttctgcgctgccatgtctgcgtcgtgaggggtagagctgctgtaaccagcccggtaccctgaagaccccgccggccccgcccgacgccggccccacccagcggagtcgacgtggcgcagccccggagcagctggggactgtagttctgccgccgagtattgtgggagttgtagtcctgacggtgactaagaggatgggcgctatgatggcggtctgactcgcaaaacaccttgggagatataatcccagaaagtgacggcgcgcgcctctgggtattataggagttgtagtttcaggagggtgcatgtgggctgtcaggagcgagggcgttatgggaactctaacggcagaagcgggcgttgtgtactctcccagggaaggcacaatggggaccgtgcagagctgtccttctgactctagagggcataaaaaaacacctggagggcttgctaaaacagattcctgggccctagcccagatgttttcattcagcaagtctggggtggagcccataatttccatttctgagttcccaggtgatgctgatgcccctggtccatggactacattttgagtagaaagatttagataatttgtgggaattgattccttcctcaagagattgaggctagtgagggggccatggttgctggaggggtatctgaggttgccccctgccccaccttgtggagtcccaaagatgaatgagttggggctagggacacctccgaccccgccacacacacctttggagagaagggagtgaagttgggaaagacaaaaggttgagaagttttgtgggcttttttgaaatggagtctcgctcttgttgcccaggctggagtgcaatggcgcaatctcggctcactgcaacctctgcctcctgggttcaagcgattctcctgcctcagcctccagagtagctgggattacaggcgcccgccaccacgcccagctaatttttgtatttttttagtagagacggggtttcaccatgttggccaggctggtctcgtactcctgacctcgtgatcttcctgtctcagcctctcaaagtgctgggattacaggcgtgagccattgtgcctggcccacagggctggaattctaattgaattctaatggggtgaaccagaacagggcctcaagaaatgtgtgtggaagtatagggaagcctgggctcccttaagcagactgggatcctaattttccaaagcagctgggtggggctggaaggaaaatatctatatgggataaccaggtgacctttttttttttgaaaatttttttaagtagataagggattttgctgtgttggcccagtaggtctcaaactcctggactcaagcgatccttctgcctggccttcccaagtattgggattacaggtgtgagccaccatgcccaggttcaagtgacttttttttttttttgagacggagtctcactctgtcgccagggctggagtgcagtggcacaatcttggctcactgcaacctccacctcctcctgggttcaagcgattctcctgcctcagcctcccgagtagctgggattacaggcgcccgccactatgcccagctaattttttgtatttttagtaaagatggggtttcaccatgttggccaggctggtctcgaactcctgactttgtgatttgcccgcctcggcctcccaaagtgctgggattacaggtgtgagccactgcgcctggccccaagtgactcttttaggcccagctcttgtcttccaagatctacagcagtttagggtttgtgctttgaggcctgctggaaggtgttcccaggaggtgggaggaagatggccctgtctgaggggctggtggcgcaataggcagggaagccctttgcaagggccccacactgaagatggaagagttacactttgaagatcagattggctagttactgtttatttcctctttgtcacccccaggcttttagtggaatcaggtttcctttttttttttttttttttttgagatggagtttcactctgttgctcaggctggagtacagtggcacaatgtctactcactgcaacctccgcctctcgggttcaagcgattctcctgcct

SEQ ID NO: 1560968 - DNA, 4001 bp, Homo sapiens
cccaagattctcttttcccttctagtttaggacagagaaactgccagccctgatggcagaaaggcaagcacgctgggttttttaagctttctcagcatctaaagcatgctagatttgaattcattcaatcatcatgccattcaacacagtatttacttatactaaacacccattatgtgccaggtgctgttttagacacagaggccacagcacagaacaaactcaacacaagtaagtccctgctctcaatgagagaacactaatgtgaagaaaatgtaatttcgggtagtataaagtataattaacagaataaaggggacagtcccccactctacactctaccttggacaataagtgactaatagttaatagtgatattttttaattttaagaggcaggatctcgctgccgcccatgctggattgatgtggcacgatcatcgctgactgcagcctcaaactcctgggctcaactggtactcttgtccagccttgggagtagctaggactaaaggtacacaccaccactccagactaattaaaaataatttttttttgtagataagagtctccctatgttagactggctggtctcaaactcctggcctcaagcaatcctcctgcctctgcctcccaaatcatcaggattagaggcatgagccaccgtgcctggccaatagtgctactgtaaatgtatatgtgtcataccttttaagtttcctatgaaatacgtttaattggtctcattttatttattgatttttgtttcttttttttgtagagaacggggtctcactgtgttgccaggatgatctcgaattcctaggctcaagggctcctcttccctctgcctccctaagtgctgggattacaggcggaagccagcaggcgaccggttcatttgatatttgagaaaacggaggcacagacaggtaggcaggttaacttgcccaaagccaaacacttgagcggatcaaaaaatgtgtgtttccttttctacaaaaagtggacttcaatgtctccctcactatgcaaaaagcgccaagtacccaatagacattcagtatgtttgaattaggtcctaattctacttttgactaaaaaggcagcataatatttatatcgtggacgctcacacgaggcagaaccgaatttgaatcccagctctgccattacttgtgtgtgactgtggcaaagttcctcaatccctaggtttccacatctgtaaaatgatcagaggtccccaatgacaagcccgttttgcagagcggtaaaacaacactacaacactcggtgactgataaaaagtaaacggccaacaaacacggaccaccaaaattataaagactgagacccgtttattatcattaacatcgttgttgtcgtcactactcagtatctcctggtcattactcctagattcgaccaccagtgtcccaaggagacgcctgcaaagctgggaacgtggagcccagtcttggagagcttggcctgcccaggaatccgagcttgtgactcccgcgccccgcgagagcgctgacattggagccggggcctggccagcgccccgggggtggggcctcgcccggagaccggcgcaggagcgccgcccgatcggctgggggctgggccaaagaccatcggggggtccaggaaagtcgggcaggtcgggggtctgggcagggccgacccgcgccgtcctccctgcccctcccgttgggattctagcctccccgcccccaccccacccccgaaacccgtcgctcccgcccccgggctccggcccggcccgcaccgtctcgtcaggctccatgcggatcttgaaggtctgctgctgcagcgttttgagcgtgatggtgacggccatggcggggcccgagcgacgcggcggccccgggatcctcacacaacatgcaactcacgccgccgccatcttagcgcccaggcgcgccgcgccgcgcgccgaccacttccggggcaggcaatgcgcgcgctgaccaccggcgcacgtgacctgcgcactccctccttggcctttgtgggcatgcgcacgagcgcgttctcgagcgaggcacgcgcagactaaactccgcgctgtgggcggggcttcttgctcggcccgcacacgtggtctcctgagtgacgccatgcccgttatcggtgacgtcacggggctgcaaagtgactctggtgtccccactctcacgctcaaatgaatttttaacaaagtttttatgtacctgtactggttacagacatttgtatttcttctgtaaaaacctcattttgcctcttccaaatgagaattttttctttcaaacagtctctgtcacccaggctggagtgcagtggcgcgatctcggctcactgcagcttccgccttccgggttcatgcaattctcctgcctcagcctcccgagtaactgggattacaggcaccccccaccacgcccggataattttttgtattgggtttcaccgtgttggccaggctggtctcaaaactcctgacctcaggtgatccacccgcctcggcctcccaaagtgctgggattacaggcgtgaaccaccgtacccggcccccaaatgagttttattctggtctgggtatcctggcaggaacccttgtagagcagtcaaagtgaaagttactcaaaactagaaatacctgaaaggccaccaagcacagaaaaaaaaccttaagttggaagcgggggcaaggtgccattttgtagcctcattcattctttagggatctggagttttggaatgaacctacaattttcattcttgggtctccgggcaggagtactttgttgtactatacctaatctgaccccagaagtatttaaagatgttaactttcaaagcctcactacattaaatacagaattctcccttggatctaccagtcctggaggcatcccagaggggttgggctgagccacaggaccccaaaggaatagaagcatgaaaaaggccagtttaaggggcagggtgaaccagattgagccactgtacgccagcctggacaacagagcgagagtctatcttaaaaataaataaataagcagaaccaaaacttaccagttaggttcaaggattcagtaagttagtatgtggagtatttacagcagcaacagccattcccccgttggttttgagggttatggggtaaataagggtccctggaatcttgtggaacactcagcaacctctctagcaatagctgaaaaaggagatatactggaaaccccccccccccccaaaaagaccactgctgggtttccttaagtctgtctttccccagaaggagacacaggagggagacacaaaatttaatttaatagaaattttgtttgtagttcttacattctcagtgtgagccaatctgggacccactgccccacccagaagtggcccagtcctgggggcaggggagaaagggaggggtgaaatgagaagagccccgttcttcctcagtgctggggggttggagacaccacccccttctgctgccctcctctgggctccaggaaggagagcagatgaaatctcaggcctgtggcttctccacaccactgccccccaggttggaggggagctaagagatgagagaaggggacagaggcaagaaaagatgttgatcaagaaagatgagaaccaggggtgagggctgaaggagaatcaaagataaaataccagtttaaaaaaaaaaaaaaaaaagggcggggagggggtgggggagagtggaggaggggaacaaaaccaaaatccaccccaaatccgaaccagcctggaaaaaaatgaaagttctcgagtctcacagagacattatttggcgcggccagctctgcggcaggagcgctcaggcctcagtccagccctggaggcaggcctctctacagctcgtccttggcctggccggggacatcttcctcctcatcttcctccttgtcctcctcatcctcctcatcctcatctttgtcctcatcatcctcc

SEQ ID NO: 1560969 - DNA, 4001 bp, Homo sapiens
tcctgagttcaagaagctatgtgggctcaggatgtaaatacataaaatatgtcatactgattcccacttacccagtccctctgtaactagatctcatgagttggaatgctgcaaccctccatgggctcctttatcttaaaaaaagagatgtagcagccgggtgcggtggctcacgcctgtaatcccagcactttgggaggccgaggcgggcagatcacgaggtcaggagatggagaccatcctggccaacatggtgaaaccccgtctgtactaaaaacacaaaaattagctgggtgtggtggtgcgcgcctgtaatcccagctactcgggaggctgaggcaggagaatcacctgaacccgggaggcggagattgcagtgagccgagatggcgccactgcactccagcctggctacagagctagactccgtcccaaaaaataaaatagaataaaatggccaagaatcagggagagaacctgtgctgctgcctgtacagatgcccagcgcccgcccaacaccacacagaatcagaatctgcagggactgagcacccgtggtctggcatctgaagccaggccatcttggttcacatccctgctccttcccagctgtgtgacacgccttggataagcgacttaaccacgttgactcagtctcctcatcaagtgaatggggctaacagtatctatacctcctaccagggaaaacagtatgtcaagactttgcaccacacctggtaactaccctaaatgctccacaagaccaagcacttcctatcatcattcattcattactgcaattcggtagggaaaaccctccagtcacagggagcaccgaatgggggaatcagagccagacaggtagagagcttgcctgcatttgtgcaactagaaaagggggggagctaaaaataggcctcagaagtcttgaagctacagcgatggcaacacgactatggatggaagcagacatcagccttatggtgccttctcgggggatctggaagtgtaaccttgtcaaaaacactcaggtgggctgtcagcgctccacagaggagggactcgcacggtctcttgtctggaagtgcagcaaaaagggccaaagagcagccagggttttcggcggcccagatcctgcggcggggcctaaatgagggggagacgaagcgccccgaaggatccggggggaactggcgggaagtgggggccgaagttcggggcggggacggggtgaaaacggcctgggcttcctccgtccgcggtgtgcggctggcccgcggaggacgagggcctcacgggcttaggagataggcagccaggccggggaaggggagatgccgggtggcggaggacgagggggcggggagggagcgtggcgcgctccgggccacaaccaggccctaaggtctatttacatccgtggccgaagcactggggccgcgcctcccgcccccttcagccccgagcttggctgcgacgcagaggggccttagggctgcgatcccgatggccacccggctcctctagccagacggctgcagtggctggggttgccgggagtgatgggccgggccggtgagcccggcctgaggggacgcaatagggggcggctgcaaggcccgccacggcgctagcctggagcggacgaaacccttgcactctgcggtgctccccccaagggcttgtggcccctagtcctcccgccgcccgttccccggccgccagccggtccccaacggcgcctcccctaccttcgttcgccaggtccgccattttacttccttaagccctcccacaaggccccgcgccggcccaggctcgcctgctttctgccagaaactcccgcgcgtgcgcacttaacaagccgactccgtgtgaggcggccagctcgcgcctgcgcgctgaatgccgcgcggaggcgagccccggatcgcctgccctgcagagcagcctgccctgacgagccgcgctcctagcacgcacctgcgcacgagccatctcccgcctccttttcccgccgactgagagggcggggaaagggccgggaagggcgcatgcgcagtggcagcgactaaggtttagtgaggcggcaccgcgcggcccgaggcgggtcttgaagcactcgttttcccactcgttttccggggttcccccgcggtgggacagtgagcagttcagggcgccgcagccgaggccttcctccaggtaaatcgccgggcctgcgggggcttcccacacgcgcgggcgggagacgcgttgcctcctacctcagtttacccgccttaggagccggtaccttcggcaaacgctttcctgaaaccacgggggaagtggcgagagggcgcggggtgcttgggattggggggtaaatcagagctcatcggcgggggcgggggtcgtggtcaggctctaggagggggcgcagccctgggacccaggtgctggcgttgggggcggggggagccggcgcgagggactcgacccctcggagctacgagaatcaacttcacaagctcatgggaggggaaccgcgcgcctccaggttacccatctgtaaaatgggaccatcagcctcactcacaaggctcatgggagggtcctggacaccctggagttgttctctactcacctgctatgaatctctcagcaaatccttcggacttggccttgcctccaaaatacagcccagagccacccattgtcacccccaggctgtcaccaccctaggccacatcgtccgtatctatctcatggaagacttggacagcggcctctctgctatcctttgctgcattcttttgaagccccaggcttggttctgcacatggccgcaggctgaggagtctttgaaaaatataatcagccagacgcggtagctcacccctggaatcccagcactgcgggaggccaaggtgggaggatcgcttgagctcagttcaaaaccagcctaggcaacagagcaagaccccatctctacaaaaacacaaaaattacccggatgtggtggtgcaagcctgtggtcccagctacttgggaggctgaggcaggaggatcacttgagcccaggaggttgaggctgcagtgagctgtgacagtgccactgccaccatcctagggacacagcaagaacctcccccatatatatacacatatatactttgtttttatctatatatatacacacagatatatacatacacgtgtgcatatatatgtgtgtgtgtgtatatatatatatatacacatagactgaaaatggaaatatcaaggccactcagtgcttccagagggctctcagctgaacttggaatatcctaaaccttgtattcaggtttatgaagtcccctgaacttggctcccatgccctgctttgttcccccttgctcattgctgttcagccgcgtgggtctttccatccttggagcacaagctcattccaacctaagggtctttgcacttggtcgtctctctgcctgggaccttgtgtttcaggtcttacctaggttggagtcccagctctgcacctttttgagtatgatctaaaagagagcgaggagtactacaatctgtgggccagatatagtctatgagctaaaaatggttcctccctccctccccttgttccctccctccctttccttcccttccctttcttttatttattttggaatctaactctgttgcccacgctggagtgcagtggtacaatttcgactcactacaacctccgcctcccgggttgaagtgattctcctgcctcagccttctgagtagctggcattacagctgtgtactactatacccagctagtttttgtgtttttttgtggagacagggtttcaccatgttggccaggctgctctcgaacttctgacctcaggtgctctgcccaccttggcttcccaaagtgctgggattacaggcatgagccaccgcgcctgccgatttttttacatttttagctggttgggaaaaaaaataccaaaagaagaatatctatt

SEQ ID NO: 1560970 - DNA, 4001 bp, Homo sapiens
cctcccagattgcctgtctgttcccttgtttttaccaccaggagcaataaatgataactcccgcttattaacggatcacttaaaatatgttgggcctggggccgggcgcggtggctcacgcctgtaatcccagcactttgggaggctgaggcgggcggatcatgaggtcaggagatcgagaccattctggttaacacagtgaaaccctgtctctactagaaatacaacaattagctgggcatggtggcgggttcctgtagtcccagctgctcaggaggctgaggcaggagaatggcgtgaacccaggaggcggagcttgcggtgagccgagatcgcgccactgcactccagcctgggcaacagagcgagactccatctcaaaaaaaaaataaaaaaaatgctgggccctaggctagtgttacattcctgagccctaattcttgtgatatccattactcttctagatccccctgtgtgacacttagcaccatctgtcattttttttctttcttttttttttttttcttccattgagatggagtctccctctgtcgcccaggcgggagtgcagtagtgcaatctcagctcactgcaacctccacctcccgggttcaagcgattatcctgcctcagcctcctgagtagctgggagtacaggtatgtgccaccatgcctagatacttttttttttttgtatttttagtagaaacagggttttgccatgttggccaggctggtctcgaactcctgagctcaggtgatccacccaccttggcctcccaaagtgctgggattacaggtgtgagccatcatgcctggcccatctgtcattttcttgttgatggatttcctgtcaattccactacactgtgagctccatggggcagggagggtcatctgtctctttcactagtgtgtcctcagtgcctaaatcagggcctggcacatacaatagaagctcaacaaacctctgcttgaataaatgaatgaatatgagcaaataaaattatatactctccaaaatggagatcattattctcactgaactgatggagaggctgaggcttaagggctcagaacaaagacacggaagctagaaggtaggagagtaggaggcaggctgaagatggatatccaggtaggaaaggatgggcctgagccattgaaggagagacccgttggggccaagagccgtttagcctctggacaatactatcacgggtttacattcactgttccttcctcagatggaccctctgcccacaggaccccggcaactcctcctaccctctttagggggaaagagggaacagggtagctgggccccagcggcttcctgctgggcttttgcactccccacaacttcctgtgtctgtatggttgatgctccggaggcagacaaaacccaagcatccggcttcccagcccggcccaagctcagggtgggggaaccatgtacctggggcctcctgctccggctccgggtctggctccggcggtgggttcttatgcctcccccagagggccttggagagtcgaaggcgactggtccgtgactccttgggaggcgcagataggacccgacggaatatcgagcgaggggctggctgggtgctgaccatgggctcctggtggctcagggccctgccccagccagcaaagcggccccagcggaaccctccagccgccttctccccaccgccccctgtgtgccagcggtaggaagtcagcggagaggtggctgtgggctgggtttgggaggtccggcttggcgacggtgggtccatggttgggggggggggtctcctgggggacgagagagtgacagtagtgcccagtgtctgtccacatactgccctcatctcggccccctccccaccctcagctctgcctccaggaatccccctgcccccacctccactccctcccttaccttggtttcctgaccagccccagaatcagcagccgtctgcaccccgcctggcttcctccctcggaacccaactccacgtgaccctctctgtcccaccccaccccacagccaggctgggagggcacagtgcgggcaggttgctggaggttcgagggaggagaagagaggaggtgggttaccaggcttctagcaagaaggacccagactgcctccctgacggggaggcagcacttgcccctctctctgagcctccgttgccttctctgcaaaatgagtacaggctgaacaaatgctggcgagaatacaaagcacctagaactctaatccacagttggccggagtgtagacccattcactcatgttgggaaacggtttggcaggatctactaacactactagctggatcttctctgactcagcaattccattgctaggtagacgtccaatagatatgcccccccagcacaatgcataatagccccacattggaagcagcctaagtacccattagtgggagaaggaataaattgtgatctcttcgcacagcagaatatcatacagcagtgagaacaaactaaagaatgatttaacttgggtgaatcacaaacaatgttgagccaaaaccaaaaccaaagccataaaatgccagtaatctgagctattcaggaggctgagggaggaggatcgcttgaggccaggagttcgaggctgcagtgagctgtgatcatgcctgtgaataggcagtgcactccagtctgggtgacatagggagacctcatatctaacttttttttttctttttcccctccctgccctcgggagaccccatctctaaaaagcaataataaataaatttaaaaaccccaaaacaatgaagagtatacactttgtgattccatttacataaagtcctaaagcaggcaaaaccatgtctaacaagcagggtatcagtttcttttggaggcactggtggctgggaagagggtacaaggggggcttctggaagatggcaagatttattattactcttattattattaattgatttatttatcgagaaggagtttcgctctgtctcccaggctggtgtgcagtggcacgatcttggctcactgcaatctctgcctcccggattcaagtgattctccctactcagcctcctgagtagctgggactacaggtattcaccaccatgcctgcctaatttttttgtatttttagtagagacggggtttcaccatgttggtcaggctggtcttgaactcctgacctgaaatgatctgcccgccttggcctcccaaagtgctggtattataggcgtaagccaccgtgcccggcccttattattattattatttataaatgaggtctataaaaataatatagatctcataaaataaaaatataatatttatattacatagtaatataaataatattacattatacataatatgaatattattattttttgtagatgaggtctgtcatccaggctggagtgcagtggtgccatcatagctctctgtaacctctaactcctgggctcaagagatcctctcgccttagcctcctgagtagctgggactacagctgcatgccaccacacctggcttattaaaaacaatttttttgttgttgttgagatgagggtcttgctttgttgcccaggctgttcttgaactcctggcctcaagtgatcctcccacctcagccccctaagtagctgggataataggcacatgctaccatgcctggcctattttttttttaattgaggtaaaattcatataacacaaatttagcatgttcttttttttttaataagatttttttttgagacagggtcttgctctgttggccaagctggagtgcagtggcacaatcacagctcactgcattctcaacctcctgggctcaagcgatcctcctacctcaggctctcgagtagctgggactacaggtgcatgctacctgactaatttttaactttttgtttgtttgttttttgtagagatggggcctcactatgttgcccatgcttgtcttgaactcctgggctcaagca

SEQ ID NO: 1560971 - DNA, 4001 bp, Homo sapiens
aatggggtttcaccatgttggccaggctggtttcaaactcctgggcccaactgatcctcccacctttgcctctgaaagtgctgggattacaggtgtgagccatcacgccaggctcccacctctaccctttttcagacagggtcttgctctgtctcccaggctggagcacagttgtgcaatcaaagctcattgtaaccttgaactcctggactcgagtgatcctcctgccttagtctcccaggtagctgggactacaggtgtgcacgaccatacccagctaattttgtgtgtgtgtttgggtgtgtgtcaatgggggggggggtctcactatatttctcaggctggtctagaactcctggcttcaagttctccttgtcttatcctcccaaagtgctgggattagaggcatgagccatcgttactagaagggacattttaaagtattatatatgtcctaggctaaggaaggagcattctaactaagtcagcatttccctaagtgtgggcacccagctagtaccaaaagcatcacctgggaactggatatcaatacagattctcaggtcccaacccagacctacaaaatcaaacactttaaggctaagggtggtggctcatgcctctaatcccagcactttgggaggccgaggtgggtggatcacgaggtcaagagatcgagaccatcctgcccaacatggtgaaaccccatctctactaaaaatacaaaaaagtagctgggtgtggtggtgcacacctgtagtcccagctacttgggaggctgaggcaggatgatcgcttgaacccgggaggcagaggttgcagtgagccaagattgtgccactgcactccagcctggcggcagagcgagactccgtctcaaaaaaaaaaaacaaaaaaaaaaaaaccaaacactttaaaggtaagcccagcaacctgtattttacaagccctccagacagttctgaggctcgctccagtttgagaaccactggtctagagtgtctcattgagtacttacaggcctctccgaggtagaggatatgattgttctactgacagaagaaaaacccgagacacagagcagttaagtgacttacctaaggtcacacagctaggaaattaggcagccaggagtctaccactaaactgctgggtggggaggaaagccctttgcccatcagagtggtgctgggggtggcaggaggagttacccaggctagggagccacccaccatctgcctctgtggggacagaagggccagcttgcccaggagatgaagcccattccagaaccggccgcacagccagccactaggccctgtcctgcagccccctgtaggggtctggaacagccaggagtggtttaagaggcaggggagtcgccttgccctgtgccacactcccctctcctgggccaggccctgcaggagcctggagtttccagtccacggggatggggaaccaggaagcccccagggagggcagagacactcagcccaggccagggatggaggtggggtgatgaggagtggaaaaggggcacggagcagctcaaactccagggacaacacggtacagatgccacatacaagcgactgcagccgtagctggctccagactccctgaagcatccacctggcccccctgcgcctgatcccaaagaagtcaggaatcctgccaccctggcgagtgatctccccagccctcccatgcagagggaggcctcagggtgctgccgggctccctggggagggtcctctcacctcttactgtcttttctgttcatgcttcccgcgtggggtgaggaggccgggggtcttgcaagagtagggctcagctcctccccttgcccaggactccagcttctcagcccctagggagctggggcctcctcggtgcttgggaaggaaagaggaactgcccctccccacccaccctcaggccagggggaaggaagaggctggggagagaccgaaggcccccctcccccacacggggatcccttctgctgaggtttccggcatcgctggctctcccaccctcaagctccccggcgggctctctatctcccccatctttcggtgtcgagacccgtcactgtcatacttcaataaaagaaggggcttttctttttaaagcatgactgatatttatgtaaaaacacacacactcactcaaaaagataagtctgtctgtctagaaggacatattcatatatataattcatgaaggtttgaatggaaactcacaagacatagtattttgtatatttcttcataggcgtctcttattcctagtttaagtgataccatttgtaccctggaaaacattttcactttctgactttattgtaacaaacctccacatagcacctactgtgtaccacacactgctgtaaggactttaaaaatattaactcatttaatcctcacacaatccactgttaccttaaaaaaaattacataccggaccaggcacgggggctcacaggggctcacgcctgtcatccagcactttgggaggccaaggcaggcggatcgcttgagtctaagagtttgagaccagcttgaacaacgtgacaaaaccccgtctctacaaaaaatgtaaaacgttaggccggtgtggtggctcactcctgcaatcccagcactttgggaggccgaggtgggcggatcacctgaggttgggagtttaagaccagcctgagcaacatggagaaaccccgtctctactaaaaatacaaaattagccaggcgttgtggcacatgcctgtaatcccagctactcggcaggctgaggcaggagaattgcttgaacccaggaggcggaggttgccgtgagccgagatcgcgccattgcactccagcctgggcaacaggagcgaaactctgtctcaaaaaaaaaaagttagctgagcgtagtgatgcacacttgtagtcccagctactcaggaggctgaggctagaagattgcttgagcccaaggaggtcgaggctgcagtgaaccatgatggtgccactgcacttcagtctgcgtggcagagccagaccctgtctcaaaaaacaaaaaacaaaaaaaaaaaacacacacacacatcaaaaaacattagagatggaggtaaagccttggggaagcccctccccatcccctgcctttcttaagcagggtgtgaccaatatgacacgttgtcgagtttcgtccaaactgctgtctgtgcgtttaagcacatcatataaacatgtgctcctagaaacagacttttcttttgagtgtgcatttttttctttttacctaaatgtgtcatgctcgacacttttttttaaattgaagtacaaaaaagatcacgaatcattaagtatttaggttgatgaaatgtcaccaactgagcaaacctgtgtgacattcatacaaatccagacacagaacattctcaccctccacaagccccctgtctttcttcccagcacgaattcccacagatccccactcgcccgaagtctggcgcagtagttttgtcttgttttgagctggataaaaatggactcctgtattgaatctgggttctttctctccacgtcttgtctttgcagttcttccatgttatcatatttggttataatttattcctttttttggccgggcgcggtggctcacgcctgtaatcccagcactttgggaggctgagatgggcagatcacttgaggtcaggagttcgagacccgtctggccaacatggtgaaactcccatctctactacaaatacaaaaatgagccaggtgtggtggtgcgtgcctgtaatcccagctacttgggaggctgaggcaggagaatcgcttgaacccgggaggaggaggttgtagcgagccgagattgcaccactgcacttcagcttgggcgacagagcgagactctgtctcaaaataataataataataataataataataattccatatagtctttcattatgtgacaattccatgacttatatatatatattt

SEQ ID NO: 1560972 - DNA, 4001 bp, Homo sapiens
cctgtaaaactcctgctcaatcaacaagccccacccaactctcaggcccgcccatctggccgcccccggccctgctctagctctgcctagagtccaacacgcaccgtccagtcccctcccagtcccctcccgcgggccccgcccccagccagcccgcgagtcccacaagccccgcccaggccccgccccacggaccccgcctctctggcaccgagtccccgccccagagccccgcccgccgctcaccttcgctgtccgcggccccgaaggcctcctgctccaggcgccgcgcctcctcgcggccgcgcaactcgaagcgccgcgcccagccgggccgcgcccgccacagctcctgcaccagcagcgggcgctcggagtcgcccagcacgcgcaggtgctccgcccgccactcgccgcttcccacgcccgccgccgcgggccggcccagagcgtcgcacaaagcgaaggcgtccacgcagctgctctcgccggggccaccgccggggctgcctgctaggccgtagcgctctagcgcctcggccacgagctcgcgcgccgtggagcgcgccgtggccagcacgctcttgtagttggcgcccgatgccagtccggcgccgaagatcttgaggacccccggaggcgccgtggcgcgggtagccagcgggggctcgggggccacgcccgccgccagctccggcagcttcttctcgctggcccagcgctgcgcgccccccggggtcccagggcctcctgcgccgctggaccccgtggtcccggtccccgagccccggaagagctgggagatgcgcttggcgcggctaccggaggctcccccggccgccttgacagcgcccactcgccgcagctccacgtgcggcgggggcggaggtagcggctcgctgctgcggctccccgtgtccgacgaagaagacctgggagtccgccggggaacagagtcgcgggagagagacccaggacgacacgccaagacgggggtgggggcatattaggagggaagtgggcagagacccagagggaggacagggacccagggtggatggacggggcgggggtgagggtggggacagacgcgaggcaaagagagagagaaaaaataaataaataaaggcaagtcccacagtaggaaattccaagaggtgagcagggaggggaggaaggaaggtgaatcaatccccctgctccttctgtccccgtccccgtgcccatccggcctcactccacctcctagcctagctcttactcccaccgcgccctggtatcactgtgccccaccgtctccccctgcccaccagctcgtttgcccaattcaggatgaggaccggagccaacactttgcagggactgggcagtgaacagggacagatgggaagcaggtgtgcaggggcaggagtcctgcagagatggcactcacttgacagaggctgcgctgggccagcgccgccccagcttcgccagctgcttcctgggggaattgatccacaggcccacggggagatgaagcttcccgaagcgggggcttccgccctccttccgttcaccagacagcatggccctaagggaaggcgggtaaggccccaactcctaaggcattcttgtggggatggggtggagggaacctggactccgagtcagagggaggagggggctggggctcagacttgcgagtccagggggaggagagggatggtaccctggattcctgggtcctgggatggaagatggctgggggactgagtcttggggcccagggaggaggggtttgggctgctgggtccctggctcttaccctgcttcgggtccggcacacccggaggccctggctccactggcctgggtcagttccactgctcttgcctctgccacggctcccagcactgggtgggggacaggaaaaggcaagaggaaacccggcaggaagagcggggagggggcgtcctgtgaggagaccaggcctgggggaggagatctgggtagggttggccctgccccattccttgattctggaattacatcgcagtcagttggtcccctccaggacccaagggtcccggttttctgcccttcctccctcaggccggagcccatccccagacctctcctctcggggaaccaaaggctagaatcagtcccgtcccggggagtgagtcagatgcttagacaacaagataaatctttattgttgcctcgaatctgtggccttttcttttgggacctgggtttgctcggccgctccactgccaaggccaaacagtgaggatttgatgaaatcgatcaccttccttcgacgaaatatcctaggggtgggagtggggtgcagatcatggaaccggtttgggtactaattgtgtgggggacacccctcccaacctccccctttgtgaccttattctagcaattacctaagcctcgcccttcgaagtcctcctattcaagccccccgcactccatccccaggaaagtcctgctctcaggcctcagtagcccccagaccagcttctgtgttgggttcctggaagccccgccccttactccaagccaagcctgtcttcttcaatgggttgcttacgcaaaggtaaggccggttatcagtgctagggagccgcagatcagcagccccagaaggcggcttgccagcattttctcgggctgcagaggctggaggcttatggacgactccgtggtcgcctcccccggggttacgatatttggagaaggtttttcctccttgatcattttgggcaacactgttagagaaagcgtaaagagcagtcctggcagggcgtggagttcctgccctggcaaagacaagcccgtcccagtagccggccatcccagagataatcacgccttcaacagtgtcaagcctgaacacacccaagggaacccctgtcctcggggccagaggccacgcccccggcaggaagccacaccccgtgccccgaaaccacacccaacaggaagtcacgcccccatcgccaaggccacgcccccgccgcggaccccagctttcctgggccctgaatcctacacttctctcagccccacagcactgacctgtgacgtgaaaattgatgatcgtggctgggctggaattcacagagcccagctcgcagcggtagctgcctgcatcctctggacccaccatgggcttggtcagggtggcctctttccccttggacaccaaggtctccgtattgttcccccaaacctagacccaagctcaaggggtcactgaggcctgaggaattcaggggttgggggagtacaggggtgagaagatcacagggcctcagtgtgggaggtgagtgtccagggtgtcactggtcagggcacggggtccccagaggtctgtagagaccacacctaatagaccaccctcctgggtcatgagaatcgtgggtgcaggcccatagatccagaacacaagtattgtagtctagggagttcaagggttacagaagttgaggccctcaccctgtaaaagctgtaatcagtgaggccttccgaagcctgatgccagtttaactcacagtccaggatcatgtcttccatttgaggaacttccacattccgctctgggggtgggggatgaccatgggacactcatgattctgtttttgtttttgtttttgagatggagactcgctctgtcgcccaggctggaatgcattggcgcgatctcggctcactgcaacctccgcttcctgggttcaagcgattctcttgcctcagcctcctgagtatctgggactacaggcgcttgccaccacgcctggctaatttttgtatttttagtagagatggggtttcaccatattggacaggctggtctggaactcctgacctcaggtgatctgcctgcctcagcatcccaaagtgctgcgattacaggcatgaggcactgcgccgggcctccttcacggttctttaccctcccctaatcctttacatttgttgtaacctcgtcttttctcttttct

SEQ ID NO: 1560973 - DNA, 4001 bp, Homo sapiens
tcaagccactgcactctagcctggcgacagagtgagactccgtctcaaaaaaaaaaaaaaaaaaaaaaagagtatgcctttagggaagccatttaacctgcatgaacctccttttgcaagattcactgtttccaacaactctgtaagtgaagtattaacaaactcatgttgtatatgagaaaacttaggctaggagaagtgaagagatctgctggaggccatgcagttgggcagcgcagccacccatgggtacctgactggggagcccaccttctagtaagccccacgttgtgtgggttcacatgcctcccaatttcctcctgctgataaagctgccctcttccaagccagctcatttatttttcttttttttagagatagtgtcttgttctgtcacctaggctagagtgtagtagcacaatcatagctcactgcagcctcaacctcctaggctcaagtgatcctcccacctcagcctcctgcgtagctgggactacaggcacgcaccaccatgcctggctaatttttaaaaattttttgtagagatgagggtttcactataccgcccaggctagtctcgaacccttgggctcaatacagcctcttgcctcagcctctcaaagtgctgggattaaagggatgagccaccatgcccagcctctcaagccagctttgaaggcaaagtgctggcgcctgctgggaccagacacactgtgcatcttgcaggagagacaatgtgttcccagctgagagactgcagacactgagaggaagacccagaaagaaacctgaccatccttaatgatccctgtcccgatctgtccccaaattcagcccctcccaacatccctggggttccactagccacgtgcccacccggtgtgctggtgggccggagagcagggaatctcagcagcaggaagcgagaacctatttcaccgccatagggcagggcagtatagatgccatttccctgggtccaaagagcattgggaagcgctgccccatgctggccccatgagaagggcactcctagcaggaagattagccacgaggggctccatagaacacaggcctcgcttccttcctgtaggtctgtaggctggtggcagaagaccccattttcccaaattaatcctgaggttttgggggctgagacccaggggctgctgttaacttccggatttatctctgagagcagtgaataaacgcgtgatatggaggggcgtactctccgcagtcctgaaacttctggatgtgaggtcccgccaccctgtggtagagtgggtggagaaaagcatcatccaagcagggggcaactggtggtccaatgtaccagcccattcacaattccccaacaggaccaaagctgtccgcccccttccattccccgcccgcttccatcacttggtgtcgcccaagcctgtggtcgcccctagcaacgccctccctcacttcgcagtcggtttcccctttcatcatcgcccccccacgtcccgctcttggtctctcccgatcccgcgtggatccggtgcttgggcgcccccgccaacgacccccgcgcacctcagcgttggtgtcgcccggttccccccgcgcacgcgcaccgtggtatttcccgccacgctcctacaccgccccccccaatacctggttggtcacgtcccccgggaggccccggatcagtatcttgcggcggttacggaactggcgctcggtgtgttccaggcgtttccggatctcttctggatctagaggcggcagctcttcttccggcgcccggcgctccgcggcatcgccggcttcgacttcggccccagacttagggctcagcgggggccggtgagtaacggacacgtccgccgccatcttgggaaacccggcgccttctgggaccagcgagccggggcggagcggcatagagcggcaacgagggcgcgcccgtcgattggctgggagaaaccccacctccttcccgccccccttgccccgttggctaagccccagcccacctctcaagagttcaagctgcgtctgcgcgccacaggccccgcccccttccgtcgcagcgacgctactcagtggatgtgcacctgggtgggagagacttgcagcgcgggtggaatcaaaccacagattagggagtttgaaggctttattggtgcggaatctgagggcacagccaagcccccgccaactttgatcccggatcccagcgtcactcagctctggacggttcttcccccattgcttctgtcggctgcatagacgtgaggggcagataggtgctctcctccctaacatggtaactgccgctccgttggtgctccctgaagacgtacattaaggccagtacgatagtcaccacgcccagggtcagtaacaccgccacgaagacggggacaaagtgggagctcccagctgtgcagagaaagcgctaagtcaatatgcgtcccttctgtctccaacccccccgccccccggcttaccggtccagacccgcagccccgtgttagctcaccctcaatgtccatcaccacgaccagggtgtatttgcctcgtgagctggacgcttggcactgataagtaccattatgtgttacgttgacgaagaacgggatccccaccggcacctcccggctggagccttccttcaaacaccgcagctcggggtacgggttgcccctggcttggcactgcaggacgtgtctcgttttatctttccatttcaagtgctgggggcatgtggctcggtcaattttgggaccatctgtggaaccaccatgtgtgatcagacacccaacacacccgaggcacagtggtgcagaggagcgtctaatctttccagggcaggggtggagggattaaaggtcagggtgaccgactcacacaggactcgcagctggacgctactgttcctgtgcaagaactcgccgtccacctcgagagtggcactgcagaagaagctgcgtccgtcgtcactctcggtagcatttagctgaagttgagctggctgccccggggccgcggccggaactccgtccagcgtgacctggactcgagccccagccatgcaactcacggtcactgtggacccctcatgggcggtgggctcgctgaggttcacaatgggtcctaggaagcctaaaggcggggcattgcccaggagcttaatgaacaggaccttcctgtgggtcaagccgctccctccgccctcccctttcctctcgggatatccgggccacgctttcggccgttcaagcctcgccctctttccgcgctgtgtccagcttcgggcactcaggcccaacccacgttgcaactgctattggggcaagccaggccccaccttttcggctagtctccgccccctctgccacgcccccagactgctgaggccgcgcccccttcccacgcctcctcttactaaagaccgtcaagttctcccgggcctcccgtctctcgccccctagggtcacgttgcagacgatctcccgggcaccctcctgatccgcgcgcgccgtggctgtggctgtggccgttagcgtgtccccgtggttcatgactgtcgcattcagcatctggtcccccagcgccaggtagacctgggcctctgaggctggaaaaagcccgtctagggtgcagtccaccggccacgacgtttccacctccaagaaccggggggccacgaggcgcgggggggtcacgggcaggactggggagaaaggtgggcatagtacaacccccaggactgtgccttccccaggacaccctcatcccccccagtcaggatatcttgctgactgggtcacccttcttcacaggacacacacacagggccatgaaaacggccttcttcaaagatcccacggctcgggcctcccttccggggccaccttgcccagtggccgggggctttccttcccagaagcctgtgaggtccggggtaccccactctcaggaaccccaaggtcagggcaccgtctaccctggctcagctc

SEQ ID NO: 1560974 - DNA, 4001 bp, Homo sapiens
agagatttacactcatcttacagagtcagcggtcccgccacccacagcctcgcagccctcgaacctcggaggcccccacgcccaattaacagacaggagactgaggccccaggaggggaggaggtccccgcacctggcctgagaatacttgggtcacctcctgcctgacactgggggccagtccgctgccagcaggacgggtggcgatggggtgggagacgggatgggggcagggaacccagcagcctgtctctctggtcccgctccccagtggtggtggcctggcctgaccacggttgctccatgacctcggcctaggccaaggcgtggtggctgtcaccagggcacgtccccggttctcgggttgggccgaggagggggcccgggagggcggcaggctcaggctggcggccaggccctgtccagagcctgtgcatgttccttggccagcagccgcagggacgcctcctccagggcgaagccatctgcgaaggtgggagcaaaggcatgaggcccgaaggacgcttgcagccccgggcccgggcccaggaggcgggggaggcctggcacggccggcggtccggggcccaaccagggctccaggggcagcgacatggccggggggcgggcgaacggcagcgctggggcctcggggagtctcggagctgccacggcacccgagcctgactccagccgctcctggcggcgccacttggcccggcggttctggaaccacacctggagggtgcgagagggaaggggggttgctgtgagctcagccgctccccgccaatcctcggaccccctctgcacaccccagccctgggggttctgactcccgtctgacccgactcctacctgctgcttcgctgttctgccccaagaagatgaggatctcccaagcgttccctaagcccaggctcccctccaactcctcactcccctccttggcctcccttggcccttagcaagtaacctgagctgcctaacgtggcattcaaggccttcaaaagcgttgttacccacaccattctctgcctcctccttcacccctggctcaagggaaacgcctccaacttaacccctccatgtctttgcacacactgttcaggatgcctagaaaaactccccttttccttcccagctggcacactcctactcaaatgtcaaaacctcagctcccacaccccctcctccaggaagccttcctagcttctcttctgctgttgctccgggagggtcaggatcttgctttgcctccctccccaggttgcaaaagatgtgtgtgttggggggtgccctcacctgcacgcgcacctcaggtaggtgcaccttggctgccagctcctcacggctgtacacatccgggtagtgagaggcctcgaacgcccgctccagctggtgcagctggtaggtggtgaaggtggtgcggttcctccggtgcttcttcttgggggcctcctcgcccggccccagacccccaccctcggttgccggcccctcgcccgggctcaggaacatggctcccacctggtgggacggcagcgggacagatggtggggagacggctgggggggctaccggcagggacagggcaggggagccccaggcttgcctcccggctccggggaaatcggttccctccactggggccggcatgcgctctgcatccccaggctgtcctcctcgggcttgggggggtctcctgctgtgcctctgtctgctcttccttctctctgtgtgtgtcaccgtccctgttttctcttcccctctctgtgactgtcacggcctgtgtgtgtgtgtgtcggcgggggggggtcaaggatgcccccccgtcaaggaaggcaggatcccttctcacgccctaagccctccaccctgaggggatctctgcccccaccacctcctacccaggcccaccagtgcccaccccgcactcaccgcccacggcagcccctccgtcgatttccacgggacacctgccccagcgggcctggcgctgcgtctgctgtggcctggccctgccggagccgagccaggtcggggctgcgtgggggaggattagctcaaggtgattaattgaggcggcccctcccacttggtcctgggctgttctgagccaggagggagggcagggtggatggagggctggggctctaagtgggtggctggggggatagtcttacaggctccacggccccttgccataagacggcaagggcctctccctctctgggcctcagtttccctggctgtaaaactgccacactaggacctaccctggggggatttcagcttctcagagcatcgcacagaaattggcatacagggggcacttaatgaatgctcactgttaatatttttatctgctgggggcagaaaaaggtgtcttagaactcacagatgtcagaggcagttggggaagctgaggtccagaggtgaaggcactgcagttggttcctctggacacaaggggtagggacccttttagctgggtctggaggtatgaatagacgttcaccattcacagccgggcgcagtggctcacgcctgtaaccccagcactttgggaggctgaggcgggcggatcacctgagatcatgagtttgagaccagcctggccaacatggcaaaaccctgtctactaaaaatacaaaaattagccaggcgtggtggtgggtgcctataactcccagctactcgggaggctgaggcaggagaattgcttgaacctggtggggtggagcttgcagtgagccaaggtcatgccattgcactccagcctgggcaacagagtgaaactccatctcaaaaaaaaaaaaaaacaaaaaaccaaaaccaccaccaacaaaaaagaaaaacagaagttcaccattcaataaacatttattgagcacttactgtgtaccaggtactgctcacagcagtagtgaccaaaacagacagaagtcacggggctgactttctagcagggcagacagacaaccaaccactgtgttaaaatgcagagcgtggccagtggccacgagcctagggagaaaacccacggaggggggcctgtgggggcaaggtgggttgatatttcatttagtttttgggtttttttttgagacagagtcctactctgtcgcccaggctggagtgcagtggcacgatctcagctcactgcaacctccgcctcctgggttcaagcaattctcctgcctcagcctcctgagtagctgggattacagacacctgcaaccacgcctggctaatttttgtattttttagtagagacacggtttcgccaccttggccaggctggtcttgaactcctgacctcgtgatccgcctgccttggcctcccaaagtgctggcattacaggtgtgagctaccccgcctggcctatttttgtttttttgagaaggagtctcactctgttgcctaggctggagtgcagtggtgagatctcggctcactgcaacctccgcctcccaggttcaagtgattctcctgcctcagcctcctgagtagctcggattacaggtgcgccaccacgcccagctaatttttgtatttttactgaagatggggtttcaccgtgttggccaggttgctcttgaactcctgacctcaggtgatccacttgcctcggcctcccatagtgcaggagttccaggcgtgagccaccgcgaccagtcgggttgctatgttaaggaaggtggtgagaatggaagatggagtgcaaagccgcaagttctggacacatggggtgtgaaggatggagtgctggggaaccatgggaggttgtggagcagggacacagtggcattttatacaaacatcaatgatgagcagctgagaaaccaggggcaggtgccaggcaggtgaggctacagggtctagtcaggccaagggccgggggagatggggaggacagaagggtgggggtagcaattccagaggaaggaagctggagaggggcagggtgtgggtatggaggtgcaagggcgttgcc

SEQ ID NO: 1560975 - DNA, 4001 bp, Homo sapiens
tcaccccaagagaccaagagcttcatgctttgtgctctgtatgtggctggctatctcaggtcttagctaaaatgccacttctcggggaggctttttggatcacactagggctctctgagcagcaacttctctcaccaccttatttcatcttccccacagcacttagcacccactgaaactgtgtccaacctgtcctccccatctcccatgcacaacctccatccaagccaccattaactcctgtctagattactgtactagccccttcctccatctcctggcttctgcccttgtcccttacagtcttttttttgagacggagtctcgctctattgtccaggctggagtgcagtggcacgagcttggctcactgcaacctccgcctcctgggttcaagtgatattcctgcctcagcctccggagtagctgggattataggcgcccgccgacacgcccgcctaatttttgtatttttaatagagacggggttgcaccatgttggccaggttggtcttgaactcctgaccttgtgatctacccgccttggcttcccaaagtgctgggattacaggcgtgagcaaccgtgcctggccaccagggttcttaaaatggccataaggctctacaagatttggcctcacctctctgtccttatctcctcccactttcctctttgctcactccactgtcactggtctccttgctgttccttgaacacaacaacacaacaggtatgcacctgcctcagggctttttttttttttttgagacggagtctcgctctgtcaccaggctccagtgcagtggcgcaatctcagctcactgcaacctccgcttcctgggttcaagcgattctcctgcctcagcctcccaagtagctgggactacaggcacgtgccaccacacccagctaatttttgtaattttagtagagatggggtttcaccatgttggccaggatggactcgatctcttgacctcgtgatctgcccgccttggtctcccaaagtgctgggattacaggtgtgagccaccacgcccagcgcccagcctattttcatcttaataatttctctctctttctctactagtcatatatagttggctactgagcacttgaaatgtgactaatgagaataacgaactattaaatataaattttaaatatatcagaacagtctcgtcattgcagaaagctctactggacaacatgttctagaatataagctcccacagggcagaaatgtctctctcagtcattactgtgttctcagtgcctggcatataaaatatttgtcatgctaattagtcaacaagccaaaacgtcaacagctctctgtacacaaacacctactctgttcgaggcattgtgttccctgacttacatgccttagctcagccgtacctgctggtatgtgttggtcgcgataattgggcggatcacaggagccgctgggacctgcatcgcttctactgtggggaccgtggggacagtgggcaccgcaggcacagcagttgggattccaggtactggagcccccagaacttcctgctcaaacctggaggagtagaacagacatcagcgctcaggacctcgtaccaattttggaactgtgggtatatcgcgaggggaccctcacccctgccaacctctcccctatccccgcccccacaatcccgaaggtcccacttccccatgttagagccgtatctccggcctatcgaggcctggaggctccgagattcggtggctctggctctgggacgacttttatcactctctgtcgcgggccttacagggccatctccgcctccatttccttcaagcgttcctcgccgcttttgcccgggatgccagcgccaggacccgggaccacgggtcctcctgcacccgggagtcccggggctggccccgccccagccatcgctgccgtcgtcgctgtcgccgctactacagtctctgcttagccgccgccgctggttctgctgtctactctcccccttcgtccgggtgggctcccgaggatgacgtccagcaaaagcgacgggcgctggcgcatgacgtcatacattcgggcgcgagagccaatgagatttggccacaccctcagggggaatataggccaatcagagtgagagaaggacacacgaacgcaagaacctgggcctatgagagcacagcggagaggcggccccgctttcctggaggaccaccggctaatgagagcgaagcaaagtcagttgggcccatccccaatgtggaatctggacctttgagatcgcaggaaagtttggaggaccctcctgtgccaccgcagagcccgcgccggaagtttaaaaagacgctaaagtccgtgtcaaccccagggttgggcaaggctgggaggcctggctggcccctcggggcccctatcctggagtaggttgacacccgacctgtggtttccaggaagaccggagacgcccgggaggaagcgcctgacccggcttcctggaggaggacagctgaagacatttaaagatgagagctgttcagggtgggagccaaggcccagagactagtgcaactcagaggagcacgtccgtgggcttggtccctgtcctttcttgggccacagctgacccttttttttttcccgtagccctcacaagtgttttattctgagtattttcaaacatgcacattaaggggaatagtataacgcactcttaagtacatctcaaacgctaccaatattcaacacttctggatttcacttgatctatacttctttgtcacgcgcgtccgtgtgaagagaccaccaagcaggctttgtgtgagcaacaaggctgtttatttcacctgggtgcaggcgggctgagtccgaaaaaggagtcagcaaagggtggtgggattatcattagttcttacaggtttgggataggcttataaagtacattctcaagggcggggagaatgttacaaagtaccttcttcttttttttttttttttttttgagacggagtctcgctctgtcgcccaggctggattgcagtagtgtgacctcggctcactgcaacctccacctcctggactcaagggattctcctgcctcagcttccctagtagctgggattacaggtgtgtactaccacacccggctaatttttgtatttttagtagaggcggggtttcaccatgttggccaggctggtagcaaacttctgatctcaagtgatccactcgcctcggcctcccagagtgctgggattacaggcatgagccactgcgcatggccttatacttttcttatttttatatttttttgctggagtatgttaaagcaaattccagacatcaactcagtcataaatgcgccattatgtctccttaacagataagaactatttttttttttttgagacggagtctcgctctgtcgcccaggctggagtgcagtggcgcgatctcggcccggccgataagaactatttttaaaaaataccattaacgctgggctcagtggctcacacctgtaatcccagcactctgggaggtcgaggtgggcggatcacctgaggtcaggggtttgaaacccgcctggccaacatggtgaaaccctgtctctactaaaaatacgaaaattagccggccgtggtggcgtgcgcctgtggttccagctactcgggaggctgaggcaggagaattgtttgaacccgggagacagaggttgcagtgagccgagatcgcgtcactgcactccagcctgggcgatagagtgaaactcagtgtcaagaaaaaaaaaataccattaactatgccattatgaataccatcaaattaatttcttagtatcatctaacacccagaccgtgttcagttttccttgtctcaaaaatgtctttatacgatagtagaatcaggatcaaaacaaggtccaaatattgcatttgattgtcttttttttttcctgtcaaaacttaaatttttgcttgctcagatgtttaccaacaagaaaaa

SEQ ID NO: 1560976 - DNA, 4001 bp, Homo sapiens
tccctcaccacagtgtaaacttcaggaggacagatgtgttagctgttgtgacttcagcacctagagcagtgcctggcacatagcaggtgctcgataaacctttgcaggctcaatcagtgtcaggaggatgcacagaagaaggcggctgctcccatcgcgcccccctgcgctcaggcctggacggagagggtggacagggctccattccacccagctcaccctgaaactcagggctctgccactctcctgcactggccgggctccttaaaggccaaacctcattttccacaccagtccctgccatttacagagcaggaaactgaggcttggggaggggagatgtctgggacaaaagaataaggagcgcttagggggcagaatctaacccagattttgctgccctcaaaggtcctcttttttattgttgttgttgttttttagacggagtctcactttgtcgccctgactggagggcagtggtgcaattttggctcactgcaacctccacctcccaggttcaagcgattctcctgcctcagcctcccgagtagctgggattacaggtgcccaccaccacgcctgcctaattttgtatttttagtagagacgggatttcaccatgttggccaggctgttctcgaactcctgacctcaagtgatcggcctgccttggcctcccaaagtgctgggattacaggcatgagccaccacgcccggtctcaaaggtcctctttaggcctcaattttaacttaatttctttttcccaaggatagaaggtagaatttcatttctcacaaagaaatgaagttcagtccacgccatttctctgacccctgtcgatacccccgcgtctctctcctaagccccacctctggacacgccccaaccgaatgtctctcttaccccagacgggcctggctttcctctggggtgagttggtcgaattccttggccacttcccgtcccaggaaagcctcatggtcgtactggaagttcccgtgggcgtcatcatggggagcgtcgctcaggggggccgcctggtgcaccctcccctggccatgagggcctgcgtctggggatggcttcccctgggccccgtgcctcagtagcaacagaagcagcagaactgatggtcgccacatcatcggtccctggggagtggcaaaggccaggggtcaggggtcacagggatggggacagacacgggataggagaatggcggggtggaggggttacctaggacaggacagggagttggaagttggctgcaagctttcgggctcaaaaagggcgggcgatgggggaaaagagggcgggatgcttagaggtaaagccacctatggggaggaccgaatcttctgacggagtctcaggggggtcccagacctgccagggggaattacagagacagacgtggcgcacatcccacgcaaggtgcagggcatagttgtggccagcgagaggtcaggcaggctccccgtcattgctcccagtccggaccctggtcctcgacccgagccgccctccctggacagaggccccccacccactccctttaccctgttatccagcttcgctccgctctccacgctccgctctgcgttcccgcaaatgtgcccaattcggccgctctccagtcaggccccgcctctggcagcgcagagccccgccccccgcccaatgagctcgcacgagcgtctcacggggcggggccaatgagtgcacggggtgccgcgggcactcctcgccacgtccacaaaggaaaccgcggcctgcccggggaagaagggtgggcgacaccgcagtgacgcggccggggagaactacaactcctggcagtcgtcgcggcactctgccgtccacctccagctgttctagtcacaacgcctcacgggaaatgtatttttccctttccctttgtcaggatggtttaagaaagaggtgtacgttccaacacttctataccaaacaaaacaaaacaaaacaaaaataaacaaaaagaacgaaagaaaagaaaaaaggccgggcgcggtggctcacgcctgtaatcccagaactttgggaggccgaggcgggcggatcgcctgaggtcgggagttcgagaccagcctgatcaacacggagaaaccccatctctactaaacatacaaaattagccgggtgtggtggcgcatgtctttaatcccagctactttgggaggctgaggcaggagaattgcttgaacctgggaggcggaggttgtggtgagccgagatcgcaccattgcattccagcctgggcaacaagagcgaaactccgtctcaaaaaaaaaaagaaagaaaagaaaagaaaagaaaagggagagcagaatcaaggggccggaggaaatatcccatttcctccaagagtgaacactgctcctcgctcctcttcggctccaaggattcaggtggtcagacagtagccaagaattcctcaaaatgcctggcatggcagtcatccagtaaatatttgtaaaagttatgaattaaaaatacatgacctcaggttgagcacagtagctcaatgcctgtaatcccagaactttgggaagctgaggcaggtggatcacctgaggtcaggagttccagaccagcctgaccaacatggtgaaaccccgtctctactaaatacaaaaaattagccgggtgtggtggtgcatgcctgtaatcccagctacttgggaggcaggagaattgcttgaacctgggaggcggaggttgcagtgagctgagatcacgcaattgtactccagtctgagcaacaagagcaaaactctgtcttaaaaaaaaaaaaaaaaagtgaccttaggccgggcgcggtggctcacacttgtaatcccacccctttgggaggcagaggcgggtggatcatgaggtcaggagatcgagaccatcctggctaacatggtgaaaccccgtctgtactaaaaatacaaaaaattagccaggcatggtggcaggcgcctgtagtcccagctactcgggagcctgaggcaggagaatggcgtgaacccagggaggcggagcttacagtgagccgagatcgcgccacaggactccggactgagcaacagagcaagactccgtctaaaaaaaaagaaaaaagaaaaagaaaaagaaaatacatgacctgatgtataaaactggcaggttcccctgtggcagcatgttacctgtaggagagatccgaggcccagccgccattcagtcccccgacttattcccttacctcccctgcctgaaaaatgatgagaacacactgattcgggcccaaactcgtgttatattatcgaggtggaaaacagccatatgtattaggaggggaaactgaggcagaccacaggacggggctccagagggaggacaactaggcccagaaccccttctggaggctcagagatgccagtgttccaggaggtctcacagcatgaaaggggcctgactacattcgcttttagcagtcggaatggcggatggtcaggcggtggctggaatcacatttacatccttcaaatcagcatcctgggcctcccctggggtgggcaggaggaccccggtgtcgtctccacgaagggagatccaaggggctgaggagagagagagagggagaggtcatcagaatctctgaggcgctctgggtctgactggcgtcccccatttgtgtgtgtgtctcacacactcttcctcagtctctatccccttccttctgggcctttgtctccccttctcccaattttccgtcccccctctttctacatctttgcctccctcctctgggtctgtctccccctccctctgtccgcacctctctctgtcccctctgggtctctgttcccccgtctctgggtctctgtctccgtccccctctctctgcacctctgttctcccatctctgggtttctgtctccacctctctctgatctctgtcccccctctctgggtctctgtcctcccaggtctgtgtgcccctctcttgggg

SEQ ID NO: 1560977 - DNA, 4001 bp, Homo sapiens
cacaggttcaagcgattctcctgccttagcctcctgagtggctgggattacaggcacatgccaccacacctggctaatttcttttgtatttttagtagagacagagttttaccacgttggtcaggctggtctcgaactcctgaccttgtgatccgcctgccttggcctcccaaagtgctgcgattacaggcgtgagccaccacacccaacaacctctccttctatcttccatctcccctctgactgagcctcctgctccctcttataaggaccctataagactacaaggcaggaccggcacagtgcctcacacctgtaatcccagcactttgggaggccaagacaggaggatcacttgaggtcaggagttcgagaccagccatggccaacatgctgacaccccatctctactaaaaatacaaaaattagcagggcttggtggtgcacgcctgtagagtcagctactcgggaggctgaagtgggaggaccacctgagcccagggagggtgaggctgcagtgagctgtgacagcatgactgcactccagcctgggtgacagagagaccctgtctccaaaaaaaaaaaaagactacatgataatcataagatccttcacttggccgggcacggtggctcacgcctgtaaccccagcactttgggaggccaaggtggccagatcccctttggtcgggagctcaagaccagcctgaccaacatggagaaacctcgtctctactaaaaatacaaaattagacaggcgtggtggcacatgcctgtaatcccagctactcaggaggctgaggccggacaatcgcttgaacccgggaggtggaggttgtggtgagccgaggtcgtgccattgcactccagcctgggcaacaacagcgaaactctgtctcaaaaaaaaaaaagatgcttcacttaacacatcagcgagaacctctgacacgtgaggtaatgtcgtcacaccttccgaggattaggacgtggacccctctacggagtcacgactctgcccaccacacccatgtcccacagaggctaacgctggcaacaagatagtgtccagcaacaggaggctgagcaggtaaacagcactgcacccacaggagagaagggcaccatgcaatacagtggccaccagccacagaggctaatttttaagaaagtttaaattaagtaggctgggcgaggtggctcacgtctgtaatcccagcactttggaggccgaggcaggcggatcacctgagggcaggtgtttgagaccagcctggccaacatggcaaaaccccgtctctgcgaaaaatacaaaaattagccgggcgtggtggcgcacgtgtgatctcagctcctggggacgccaaggtgggaggatcacctgagcccaggaggtcaaggctgcagtgagccaagatcgcgccactgcactccagcctgggcgacagagccagattctgcctttaaaaataaacgaacaaataaataatacaaaacaacaaaataaagagtttaaaagtctggaaggaaagcaacatttacaagggcccaggctcgcccttccctccgagtgaccttgggccggtgacctggccggccagagcgcaggtttgccccactccgggcgggcactgcgggtcgggagctacggggcctggacccgggtgcgaggggcgggggtctccgccgccttcccggcccctgcgctgggggcccgccttgaccgcgcacgcggggctagaatgtactcacttgagcagcacggcggcgcctgctaccgtgcccagcgccgacagcggcagcaggtagcggctcatgccgggccggggacaggcgtcaggcgtcaggggtcggcgcggagcttgctgcacaccagccgcctgggtagctccgaggaagagcgcgcgacgcagccacaggcgagcggaggcgcaggcgcggctgggcccgcgtccggaactgggctgcgaggggcggggcgcgggcggagggggcggggatcctagggacgggacctatgagcatcggtcctgagcgctgtcacagctgggattggtggtttcaggagcctgtgggcgtggctagtccgggggcggggcctatggtttgttcgaatgacgtcacacttgccgcagcgtataaggcgctacgcagttctggagtgaaataggttcgaatcccaccactgtcaattccagactgtgaccctctgtgtgtctttcaactatatcagcctattccctcatctggaaatgtgtgtttaccttcttcatagacttttggagataatttgagaatttccatgcacagaaacaaggatctagtagcctgtgggtacccaagctcctggggtcctgcaggagaaggcggctgggggcctggactcctgggtctgagggaggaggggctgggggcctggactcctgggtccaagggaggaggggctgggagcatggacttctgggtccgagggaggagggccgggtgcctggactgctgagtctgagggaggaggggctgggggcctgattcattcccaaattatcagaatctcatccccatgtctggccctgcacagagatatcttccctgaactctgcctgaactacctttcttagattgagtattgcacacactcctgcacttacctgtccatgtttgtcacccccaccaaaccgggatgcacctctgggcacctgcttccccttgcactgctcacagcgagtgtatctgatcaccacctcctacccctgactgtgcctgaggtgccaggagcagacaccgctggaaacagggaagaattcaacccaatctaactaggagtaagttttcttcctcatcagatgaactgtcatcttcttatatgagccctgccataatggagattatacaggcaggaagagctattttaagaccttagtcaatggccgggcacggtggctcacgcctgtaatcccagcactttgggaggccgagacagatggatcacgaggtcaggagattgataccagcctggccaacatggtgaaaccctgtctctactaaaaatacaaaaattagctggatgtggtggcactcacctgtagtcccagctactcaggaggccgaagcaggagcatcacttgaactcgggaggtggaggttgcagtgagccgagattgccctactgcattccagcctggcgacagagtgaaattctgtcaaaaaaaaaaaaaccttaggcctgtagaccttaagctctcaccatctcaaacgtattaaaccagttacacaatgccaaatgctgtataagaggcacttggaggagtcaaattcatagagacagaaaacagagtggtggctgcagggggctggagatgagattgggaagtcacaggatttgtttttgtttgtttgtttgttttgttttgttttttgagagacagtctcactgtgtcacccaggctggagagcagtgggcgatctcagctcactgcaacctctgcctcctaggttcaagcgattctcctgcctcagcctcccgagtagctggggctacaggcacgtgtcaccacacccggctaatttttgtatttttagtagagacggggtttcaccatgttggccaggttggtctcaaactcctgacctcaggtgatccacctgcctcggccacccaaagtgctgggattacaggcatgagccaccgcacccggccgggaagctgttttttaatagatacagagtttgttttgcaaaataaaaaaaagacctgaaggtggacggtggtgatggttgcacaacaatgtgaatatacttaacatcactgaattgtacacttaaaatggttaagatggtacattttactttatgcatagtttaccaaactaaaaataaagaaaaattttagactgggcatggtggctcatgcctgtaatcccagcactttgggaggccaaagtggagaatagtatgagcccaggagtttgagagcggcctggacaacacggcaaaaccttatctc

SEQ ID NO: 1560978 - DNA, 4001 bp, Homo sapiens
ccatcagtaaaaggacccagagcgcggctccaatgccatggtaggaagcttggcgttgactcagagggcgctgggtaccgctgaagagtgttgagccaaggagggtcatgtcacgggcagatacatgttttagaatttcttcttttctggctgagatgtagagtatggactggagagaagcacaggggacataggaaaggtagttctagaaagaggggctgtcccaccagggaaagtcaaccaactgttccccagtatccattcctcccttccagctcatggcactaaagccactgattgattagctgggtgctatcaatctctctctcatctctctctccctctttctctccccctcatctgtgtcttttctctctctcatctctctgtctccctctttctgtccccctcctccgtgtctcctctctctctcttctctgtctcatatctctctcattgctctctccctctttctctccccctcctgtgtctccttctctctctctctttctcccccatctctctttctctcccccttcctctctttctcctctcactcttcctgtttctctctttctctttcttcctctctttctccctgtctctctcttcctcttttcctttgtctctctctctccccccaactctctctccctacacacatcttgagagacctcagcagtgtaagataagtttagctactccacggcctggcacggtagctcacgcctttaatcccagcactttgagaggccaaggcaggcagatcactggagattaggggtttgaaaccagcctggccaacatggtgaaaccctgtctctactacaagtaccaaaaaattagctgggcatggtggcacgcgcctgtagtcccagctactcggaaggctgaggcaggagaatcgcttgagcctgggaggcggaagttgcagtgagccgagaccacacctctgcactccagcctgggtgacagagtgagattctgtctcaaaaaaagaaagaggaggccgggcactgtggctcaggcctgtaatcccagcactttgggaggccgaggcatgcagatcacgaggtcaggagatcgagaccatcctggctaacacagtgaaaccccgtctctattaaaaatacaaaaaaattagccaggcacggtggcgggtgcctgtagtcccagctactcgggaggctgaggcaggagaatggcgtgaacccgggaggcggagcttgcagtgagccgagatcgcgccactgcactccagcctgggcgacagagcaagactctgtcaagaaagaaagaaaagaaaagaaaaaaagaaaagaataaagggagggagggaagggaaaggaagggaaggaaggaaggaaggaaggaaggaaggaaggaaggaaggaaggaaggggaggggaggggaggggaagggagggaagaaaggcaggccctgatgttcagggagctgagagtgaagtcaccggctccaacccaggatccaaactcaagtctgtctggggtcctatccccgtcaccaccccccgccccgacccatcccccagagacctgggaaggagccaggctcctccggtttcaggaaagggctgcacaaaccaccccgccacgatccctcccagagaacaaacagctcccggccaccggcagtctccctcctcctcctgccaggctggttcccagacccaccctccctgtgtcataagcgcctctccccgcactctcaccagggctggctgttctcagaggaacgcccaggaaaaacctacccgaacccctttcagctgggaaggggacccgcctgggcttcctcaccgccgatgagacctccctcgtcgtacacttagagctgcctgtgttttccttccttccttaagcgggctgggaactctagacactcagggatgggccagcccattagagtaagcattcggccacctctaggctgctacggtcactgctgctgtcaccatcaacgtgactgtctcacacctcacttcctccggccagccacacccctgcagatttaacccgccagcctccctaaggtttcctctgcctgaaatcctctctgcattcctggctcattctcgaaattgaggtcaaagctcagatgccgcctccttccctgaccaccctacctgaagcagccgcacctgcctgctcctagtcacgccgttccttcacctgtttcgtttcctccacagggtttaccacaatctgaaagtcttattcatgcaggtgtctacttgtttatctccccaccacacctactaggatgacaatatcacaagggctggggtttcatctgtctcctcctcctctgtatctccagcacatgaaacatgcttggcacactgtaggtgcttaagtatttgctactacatcactttgggattttgcataggacactcccaatgcttagaatgtcaatctttgcttcattgtccttggcaaactcctattcatcctttgaaaccccatccatttatcccttaaccaggaaaggcttctgtgcctcatacaaccacccataaagctggattagggctttctctggggacacccttgccctgtgccacacttccattagcgcacatatcccccatgaattgtgcacaccagcagggtctagagtacggcacacattttgtctcaggagctacgtattgaataaataaattaattactttttttgagacaaggtcttgctctgtcacccaggctggagtgcagtggtgcaatcgtggctcactgtaccttgacctcccaggttcaagcaatcctcccacctcagcctcccaagcagctaggaccacagatgcaggccactatgcctggctaatttttaattttttttttggtagggatggaatctccctatgttgcccaggctggtttcaaactcctaggctcaagggatcctcctgcctctgcttcccaaagtactgggactataggtgtgagacgccacactcagcctcattatttaatatgtaagtagctatatctctctgagacccagccccatctaatttataacctccctccttctcaagaacatgcctcagctcccattgccagggaatctgacctttctccttgtcataggatttttttttttttttgagtcagaatctcagtcagtcacccagcctggagtgcatggcgcaatggctcgctgcaacctctgcctcccgggttcaagtgattctcctgcctcagtctccctagtagctgggactacaagcgcacgccaccacacccagctacttttgtagagatggggtttcaccatgttggctaagctggtctcgaactcctgatctcaagtgatggcctcccaaaatgctgggtaacaggtgtgaggcaccacatccggctgtcataggaatttgtcagcaaatcctacagactagaggatgtgtgttgggtggtgtgggggtggggataacggaggagatggggggtgagctcttcaagccccaggggagaattctgttccgttcctgggacatcccaggtgagagggaagaaaggccagccccccaagacagctatcccagactgggacagaggcaaaccctgaccacagagccctgtcactcacccaagaacaggtgccaatgacagaatagccaggccgaggggggagagaggtgcttcggtgatggatttccctggtgacttgccaagacagggctttactgcctccgccctggactggctgagtcagactgtgcaggggtggacactttgactggtatttgggaggcatttgctgtgggttacagagagggaggggcctcctttgcggccagagaaggaggaaagaggccctgggccctgggacttgggacttgggtggaggctcgggtttcggtctcacctgctgctccagaccatggcctggagggccgcctgcgccacccccaaagcaatgagatagcccctcctccctcagacccaggagtccaggcccccagcccctcctc

SEQ ID NO: 1560979 - DNA, 4001 bp, Homo sapiens
aaactcctgatctcaggtgatctgtccacctaggcctcccaaagtgctgagattacaggcatgagccactgtgcccagcctcaagcttatgttcttaagcaggacctcagcatatgtactatgtctgcacatgcaccagcatacgtgtttgatatcccccaatgtgtgcacccataatcacccatgaacactcctgggggcatttgcctcttgtcttcgggtcagtgtgatttgtgggtagcaggcacgtgaatggggtcacttgcatctacatgtgatatagtgggaaacatgggtgcaagggatgggctgcctgagttcaaatcccagctctgctactttgcagctgggagaccttgagcaaagacctttcacagtctgcaccttagtttcctcatttctaaaatagggcaggccaggcacggtggctcatgcctgtaatcccagcactttgggaggcccaggcaggcagatcacctgagaccaggagttcgagaccggtctggccaacatggtgaaaccttgtctattaaaaatacaaaaacttagccgggtgtggtggtgcatgccttaatcccagaaactcgggaggtcaaggcatgaaaatcacttgaacgtgggaagtggaggctgcagtgagccaagatgcaccactgcactcagcctgggtgacagagcaagactctgactcaaaataaataaataataaaataataataaaatggggtgaatgattgtgcctgcctcacgggtgtgatgtgaggattaaatgacttcctggattcagggcacttagaatgcagcttggtgcattgtaaaagctccataaacattagcctccagcagtttcatacacccatctgcccgcccatagggacacacgttattccctgcacactggcattcaggctgtcatgctcaaagctgtgtgcgtctctaaaacagagggcagagggctgggagaagcagccctgccaactggggcaatgccctcacccccagtcgcctctttgtaagtaacaaccctttgcccactttgactccagcatgctccctctgggtcaggggttctcctggttggttaggatgcaggtcccagggatttattctagaggtgcagaagggcaagttcttagaactagaaggccatcccttcaacccccaaggtcaggagcacttaagaagcttatctcagtaaaagcaataatctggggagacgtggaagagtgagcatcagggtagtgattattccaatctaggaaatgccctagtgaaacccttctaaaaataacccccacccaccccctgccactctcagcatgctttattttgtgtctcagcacttattcccaccagatagagcaacaatttctttttatctgtttatcacccattctccctctcctccccacatgacacccgtcctgagggctgagatttttgtctatttcatctccagttgtgttgccagcattcagagcacccagaagatgctcaagaaatatttctaggatgaggggatgattcctggagggaatcctgggtctccccaagcccacaagtgcagctgggagggatgggtaggggagacagtgctggggaagccgtttccacccggctgcctcctagtgccaccctgcacttcttaccctggtagcgcttcttggggtcatgggccagttgcactgcaagttccagaccaattcctgatgagcagccggagatcaacacagtccggggtgcagcggccatgttgatcccctccctggactcgtgacctccgccgggcagcacctgactctgaccattcatcctgggctcatctgctccctcctaaccccctcccacagatcccctgcagggcaaagcctctgccctcccccggagaccctcaattctggactgaccctgaacaggcagtaagagagaatctcttaaatcctctctgcacctcattttcttcatctgccaaacatttcttctccgcacctactatagacatcactggtttttgtttgtttgtttttaagagacagcatcttgctctgtcactcaggctggagtgcagtggcaccatcatagctcaccacagcctcaagcgatcctcctatctcagcctccagagtagctggggctaccggcgcacactaccatgcccagctaatttttaaatttctttttcttttagacatgggatcttgctatgttgcccagattggtctcgaactcttggcctcaagtgatcctcctgccttggccatttgtaactgttttcttaatttataatttttattatgactgtaaattattattattattttgagacagagtcttgctcttgtcacccaggctggagtgcagtggtgcaatttcggctcactacaacctcagctttccagggtaaaatgattctcctgcctcagcctcctgagtagctgggattacaggcgtgtgccaccacacccagctaatttttgtatttttagtagagatgaggtttcgccatgttggccaggctggtcttgaactcctgacctcaagtggtccagccgcctcagcctcccaaagtgttgggattacaagcatgagccactgagcctggccgagtataaattatttagggctggggagagtttctgtgaaagttggggggaattagtgtctgtattctgggtgaagaatctctgattgaagggagagagtgagagaaggagacagagaatgtggatccagaagtgtttcatagagggaaggggtgtagaactgtcagaagatgtagttagactataggaagaacttccagcaaggcagggcagggcaggaattttgtgagagtcttttagttggagaagtctcagcctcagatgtccctggggtgggaggaggcacagcttacagagataccctctcctcctcccaccctggggggcccccatctccccctcaggcttgatggggccccaacccctcctcttcagggacacagagactctttgtctggggagtcagaggctgggagggaggcactgcttgcgtctccctcttcccctggggcggaggtgggggaagcagggttcggggagcagttcagggctcagaatacgcctcttggttcctcccctccctggggaaacaccctcacatcctgcgtgtctgcgcttgtccaattgcataaaagctctatttgacctcatgggggcctcttcatgctggaggtgggggtcccagcacggtgaggggggcctctgcctcatcccaagaatggcaagaatccaccccttcctccccagtggctgtgcgttgctttgcgacagggacagattcccaccacctcccaccaacgcgccggcctttttttttgagacagacagagtcttgctctgttgtccaggctggatcgcagtggcacaacctcagctcactgcaacctccacctcccgtgttcaagtgatcctcccacctcagcctcccaagtagctgggactacaggcgccagtcacaatgcctggctaatttttgtatttttagtagagatggggtttcgccatgttggccagctgatctctaactcctggactcaagcgatctgcccgccccagcctctcaaaatgctgggattacaggcatgagccaccgcacccagctcagactccctcatttggtggggatttgggattgaggccggggcatccactggagacctgagttggggcggggggagatgagggttagggatggagatgagaccctttatttgaggaatcaagaatttggggaaagtgaaaactgtgttttgggatctgtggtgagaatttgggaccaggacacgtgacttagggatttgagtggacagatgaaggtttggagtaaggctggggaccccattttgggatctggggtgagatttgaggtgggatgaggacccgttagggacttgaaggaaaggctttggggctgaggctggtacctcctattgtgcagctgagggactgaggataaag

SEQ ID NO: 1560980 - DNA, 4001 bp, Homo sapiens
aggatgaccttggacatcagaactgtggagggaggcccagcccccaagattagcagcagatgggactgggggtgggcagggtggaggactgtatgcttcagacagaacaggcacagaggcagcccctgcctccctgtgcctcagtttcgtctctggtgacacggtgccccaggcagcccctccctgctgcctgcctcctgggcgctctacgacctaaattcctgcccactagccccagggatgtggaaagggagggcagaggtcagggacctgctcccgggggcaggcacagccgggccatgcccatgccacctgctgcgctgcacatgggaccaggcacctggggacctccagggtgtgggcacagacttcagactgttctggcgctgcctggcatgggaacccccagatggtgggaaaattgggggggaactggactcctgggatccacctgcagaaggtgctcaaaaaagtggcactgtcctctacccagaataccccaggcccagagcaagtccttgtgagtcattctgcggagcttcctggaagagaaggcagagccagtggggctgggagcaccacacaaacggaagaaaggctgggtgcagtggcttccacctgtaatcccagagctttgggaggctgaggcaggaggatcgcttgagcccagaagtttaagactagtctgggtaacatagtgagaccctgtctcttaaaaaagttaattttaaaaagttttaggccaggcaaggtggctcatgcctgtaatcccagcagtttgggaggccgaggtgggcagatcacctgaggccaggagttcaagaccagcctggccaacatggtgaaaccccgtttcaccatgttgaacggctaaaaatacaaaagttagccgggcatggtggtgggtacctgtaatcccagctacttggtagactgaggcaggagaatcgcttgaacccaggaggtggaggttgcagtgagccaagatcacaccactgcactccagcctgggcagcagagcaagactcggtctcaaaaaaaagttttaaaggtggggagggaggcatttaaggagcgtttactacatgctcttgctagagatttggaaaggggaaggggcgcgcagcgtcaccaagggtgaaagtcacggaagaactgtaatggagtcacaatcggggtgcctggatctccggctctgtgggccccagtccagcctccccacatcacagccgtcagacaacccaactccgtcttaacaaacatttacgctcggtggcactaagccattgagctgggggaaggtgagctagggcaggagaggaggaggaaaggagaagggtcctgggcaggcccccaggacggtccgttccccttcccgccaggagcctcccctcagaaaaacgggaagatctctactgttgcagccaggccggggtccacgggggaagggggacggcgaaacgcgcaggacactggcatcccgacccctctggggccactgggcaactggaagaaccggacttcggcatggcaggcacccagcgcccggaaggaggcgtcggggggcggccaggggcggaagctagagaggggtggcccgggagcagggtcgcagggcgcgggcaagggaagggctgcgggcggacctcgaggtcccagtcacctcgcgcgctccaccggccggaccggaccccgtagccggggaaggagtccggtctgcgacccccaggcccatggcctcggtgtgcccgtcggcgaaacgggctagcgccgacggctcacctgcagccagataccgcttctccaccccggtcttggcctccagcgcccccagcacttcggtgaccaggttcctttgctccaggaagtgctccacgcgctgcctcaggccgtccatggccccgacgcgcccggggttggctgctcgagctcgcccgcggaccagggcacccaccccgctgcacgcgcaccgctttcccgcagcctgagccgcgatgctccggccccgcgccggtgtccgcccccggccccccgctaggaccaatgggagggcagggcggacaaaggaggaggggcctgccccgtctcccccgccgcatagccctccgccacggccgccgctgcccagaccccgccgggagagggcggggcgcggcggcccagggcaccgattggccgggccggagcgagacgtagctgattggaagggcggtgtcagaggatgggattattggctgaagggtggagccagggcgaggagaggcgtgggggggcggaaccggggggaggggctaaagaaacatccgagccgattggagaaacgggacgcgattcattggcgagaccagtggagggcggggctgatcacaaaggaggcagggcggaatggtaggggcgggaacggggcgaggcttatcggaggaggcgggattacgcaaaagaatgattctgattaggccggacaggaggccgggctgattctcgaaggaggggtgtgttggaaagtgggagaggtcaaacaaagggtaggacgcgttatcgcaacagtgaacccgcttctctgggttagtcttgtcgttgtacaaatgggaaaactgaggctcccgagggtgtgggtctgcggaagacgggcaggcgtgcgtccctctcccgcttctgttagatcttcgcgcccctcctggctgagtagccgcaaggccccctgggagtcgaagccttctgcgttgctatggcgccgggggcgggtcggacgcctgggcccactcggcggtttggcgggagggaggggatttgcgcaggccccgctcccgccccgcctccatgcggcccgccccgattgcgctgtggctgcgcctggtcttggccctggcccttgtccgcccccgggctgtggggtgggccccggtccgagcccccatctatgtcagcagctgggccgtccaggtgtcccagggtaaccgggaggtcgagcgcctggcacgcaaattcggcttcgtcaacctggggccggtgggtgggaccgggatagacgggaagtgggggcttggaggggactgaacaaccctagaccccgacaagggggagggagcccacaaggtcttctaaatatcaagagtcccagcccacccctgcctcagccaagctcagcttctgggactcccagagagcacctgctggggaaggacaaagaagggggctgttaccggccctcgggggcttcagcaggggagccgggtcccatcggtgcggccgcttccccacatccccagatcttccctgacgggcagtactttcacctgcggcaccggggcgtggtccagcagtccctgaccccgcactggggccaccgcctgcacctgaagaaaaaccccaaggtgagcctggcctggaggccaaccccctgcccggggtctcagctgcctcctggggccaccagccatcttctgtggttctcgtggttgttatgaacagctgtgtgctttctgtggctcagacccgcccgggccccaagtctatacagcaagaggaggcaggaagacccagatacggaaatcatggcgcctgccagggcctggtacacagtgggcacctcttgtcctccccctccctcctctgggccccaggggctctggtaaggagggacagacggcgtgacttccccaccgtctaggtcatgggatggagggaaggggattttacgacaccgtaatgggttccaaagagtaggaggcttggcccggcgcggtggctcacgcctgtaatcccagcactttgggaggcggaggcggtcggatcacaaggtcaggaaatcgagacgagatcctagcgaacacggtgaaaccctgtctctactgaaaatacaaaaaaattagccgggcatggtggcaggcgcctgtagtcccagctattcaggaggcttaggcaggagaatggtgtgaacccgggaggcggagcttgcagtgagccgagatcgcgccattgcactccagcctgggcgacag

SEQ ID NO: 1560981 - DNA, 4001 bp, Homo sapiens
aggctggagtgcagtggtgcgatctcggctcactgcaagctccgcctcccaggttcacgccattctcctgcctcagcctcccgagtagctgggactacaggagcccgccaccacgcccggctaattttgtttttgtattttcagtagagacggggtttcaccgtgttagccaggatggtctcgatctcctgacctcgtgatccgtccgcctcggcctcccaaagtgctgggactacaggcgtgagccaccgcgcccggccacctgtcacgctcttaacagtccaagaggtaagaaaacctagggggcccatctcaactggcagggagggatgcaccctgtcaggagaaagctgaggtggacctcgtgaacccccaaacagagacatctctgtggagtcctcccaacctcatcctgcatgagcgagtgggcaggaactgtggagggctgctcacctgtgctcctggaaacggcgagcgagagtgaggagaggtcgggggaccctgcagagaaggagaaacgtctcaggaggtgatggggggcagccagaggaccagagaatatcccaaggaagccccaccccttcctcttctagcccttcccctctggatcaggcccctcgccctgactgcccccctgcgtctggccaggcttaccagctaaatcatggacaggtcctggcctttagtttctgtggttcgccccacccttcatcacactcagggcccgctccttttctcccttaaagttgggcctggaggggaccccatctcaatctcagtttaaaaagtccccatcccgctgggcacaagggctcacacctgtaatcccagcactttgagaggccgaggcgtgcggatcacctgaggtcagaagttcgaggccagtctgaccagcatggtgaaaccccgtctctagtaaaactacaaaaattagccgggtgtggtggcgggcacctgtaattccagctactcggggggctgaggcaggagaactgcttgagcccgggaggcagaggttgcagtgagcctagatcgtgccactgcactccagcctgggcgacagagcgagactccatctcaaaagaaaaaaacaaaaaacaaacaaaaaaaaacatcctcctgtcagggtcagaccacttttaattttttcaatgtcaaggctccgcttctccgtctggaggcaagccccaccccctcctcattctctgtgtcgggccccgccctgcttttttgggtaacaggcccttcccctccactcggccagagtcaggccccgccccttccccttctttcggccaactcaggccccgcccccttcctgccctcacggccaggccccgccccctcacccctcagcgtagggccctgcttccttttttgagtcaggcccggccctcttctcatagtccgggtcggatcccgcccctcttctccctctctgggcccggccccgccccgataccgcccaagagcagctttcgctccgccttctctgagtcaggccacgcccccttctttgcctcagggtcaggccccgccccctctcactctacagcgggacgcctcgctcgaacctcgggccgtaccccctcatcaccctctgccttcttcctacgccctaatacagtgtctcaggaaccctcactctgcccccgcgaaacccttagactcccataggaacccccagactactccgggaccgccagaatccccgcatctccagccccgccccagacccctctcctgaaccccagccccgcttacctaaggcccccagctccggcgcagccggcggtctggcgacgcggcgactcggcatggcccggccagtggggacggacggcccagaggctggcccagaccgaagcatgcacgcgggccggccgggcggccgggaggcacggtctggtggacgatcgcgggtcggacgagcggcgcaagggctggggccgcaggccgggcaggacgcgcggcgcccggggctgcgcggggcgcggggccgggccgggcgggcggcgggcgggggcggggcggcggaattccccggcgccgccggcctgcgcgcccattggtctgcaccccgccgtgacgtcacgcctggggaacgggaaaacccccacgcgtcacgtgatcgcgggggcggggccggccgggaaagggaggctgggcgctcaggaggggttgggcaggcgtcgctgcccattgctctggacgagacaactgaggcctgcttagagccatcacgccttacccattgagcaagccggcaaactgagccgctccccgctttggtctcccagtgggacttgaacctgccgtttctcaggctggaaggggagcttcaggatcgagaggttggcagggctctacacctgccatccataataatatttcggaaacctccaaggtctcgctacacctcagtttcctcaaccgtaaattgaggatgaagatatttaaggaacgtttaaagctagcgtgtcagcttcagaatttatgttttgtgcgttgttgtaaccccaacgcctagaccagcgcctggaacaccgtaggtgcccaataaatgtttattggaggccgggcgcggtggttcatgcctgtaatctcagcactttgggaggccgaggcaggcacatcacgaggtcaggatttcgagaccagcctgaccgacatggtgaaatcccatctctactaaaaatacaaaaattagctgggcgtgttggtgtgcgcctgtaatgccagctactccggaggctgaggcaggagaatagcttgaacctgggaggcggaggttgcagtgagctgagatcgtgccactgcactccagcctgggcaacagagcgagactcccatctcaaaaaaaaaaaagtttattggatgaatgcatggatgttttatttattggtttgttcctccctgcagcccctgaaagttacccataaatagcccagaccactttgagctcaaaagctcagttattcagtctgcgaatggcagcagtgtagcctccgtatacatcctgagctgtgtgcctaaaccctgagctcatccctatcaccagcgccagaagcatatgataggattattgcagaagggactcaggctgaaagaggggcagccatttggctagatcacattcctaagcctctcatattcctgagaacgactaggtgatctattaggttctaagttggatgccaggcgctctcagaccacagatgcagggtttgttgtctttcctttgcttgtataaaatttgggtgttctggctaggcacggtggctcacacctgtaaccccaatactttgggaggccgaggcaggaggattgcttgagcctgggaggttgaggctgcagtgagctgtgatgacgctattgcactccagcctgggtgacagagtgagaccttgtctcaaaaagaaaaagaaataactctgtaagttgaatgttcacaacaattgtgtgaagtatatggtgttattgatccccacatagcagatgagaaaactgaaacccggcaaaattaatttctccaaggtcacacaaattaatagacacaaatatttaaaacacaaaattcttagaacagggcctggcacatgtgggtgctatatacaaatgtgaactttttttttttttttgaggcagggtgtcactctgtcaccgaggttggagtgcagtggcaggaacatggttcaccacagcctcaacctcctggactaaggggatcctctcacctcagcctccagagtagctgggactacaggcacacaccaccgcatccggctaatgttttcttttcttttctttctttttttttttgagagatggagtctcgctctgtcacccaggctgcagtgcagtggtgcgatctcagctcactgcaatctctgcctcccgggttcaagcgattctcctgcctcagcttcccaagtagctgggactacaggcatgagccactgcgcccagcctgttttctatttttgtagagagaggatctg

SEQ ID NO: 1560982 - DNA, 4001 bp, Homo sapiens
ggaaggggtaagcaccctgcgtgtatctggttgtaactaactactcacaactgcacttgcctgtgtgaaaacgtgagcttgtgatgatgcgtgacgtcaggtaggcgtccctgactctccgtaacccaactttgcctgtgccttggggattcctccttgcaggtaggaagtgaggggtacaggttccagctctgggctgagacatgattcagggttccaccctgacctggggctcctggagtcttggggccctggagggtcccgtccactgcccagactgacccaggtcctcgatgaagcctcattatgaggactgggggaaaaggacccagccacttcctggggaggtcggagaccccagggtgagcgtcaaggtagcctcaaagatgagacgtcacctcttgaaggcagccatgagccttgggtggggacgtcactagaggaagttcaggccctattttcggaggaagcagttggagaccccataggaggaagggcgatggggcagtagaaagtcgcggtgtccccgccccctccagcagctacgcgccccactctcttggagacgctagatcagtccctccgggcctactaaagaaaccacgcagggctcagatccgctccatcatcatcatcatcatcatcatcatcatctccaggtttatttccagctcccccgcaacccctccggacctggagccgcctccgcccgcgctgtgcacgcgctgcgcgcgacctcagggctgcacacgacagcagcgcgctccggtccagtccatgcccgcgcactggcagtgacatgtggtctcggcgcgcacatcccacgagccacaggcggagccacaagtgcagccggtgacggcgaagcctgcagcccggaacacaggagcgtggactctgagctgggaggctgagggtgggagcgggaggggggtggggagcgcggaggggggttgggggggcgggggtggggacggggacggctggaggctccaaccactgaatgggcactggaggcagggagtgagggtggacaccagtgtccagatggtgggcggagaaggctgggagtcaggaccaagatcctaggggagtagaggctggacacggggaacgtggcggggagggggcattcccaggggacttggaacagaaatgggcgcctggacaacagtctcctgcactcacctcgggggcaagtagccaggtcccccctggaggtgacgctctggcactccaggccaatgctgcttattgccctaaatactggggggcaggaggaaaggagacagggggagctgtgagaccaaacggtccctcccccatcctcccctagccctgttggtttggagctaggtccctgtgggcataggagctcactggcctccaggaccctgtcttgagttgggtgttttggagtaagggaaggtttggagtgagagcggggattgggtttggagccgtggataaggtggggacagtcggaggggttgggagtggagttggggttgaatttatgatctggttggatttgaggatgagatttggtgagcgctggggctgggttggagtcaggtctgtgccagggatcagtgaggtctctgagacccttggggagcttgcccaagtggggggtcctcacttagggagccggcgacctcctggatcctctcattgatggcttcttccatggagcacagggtcttgctagacaccaacagccccaggacagggaggaggaggagacagagagctttcatcctgcaggcgctgaaagagggaaccaagagacccacagctggatcagccctgccctgtggggaagatccggcccatggagggagtaggatctgcccctggacctggacccctgtccccccatgtgggggacagggatggaggctcagccttgaccccagcctccccgctggtgccatggcaagcgcaggagcagctgtcacttaccctctcggtgggctcagctaaccaaatccggcacacgaattcctgcaccgcagctctttctttgaggcctcttggggtggggcttcctggcttggctaataagtccctgggcccccaaccctccggtcccacatccggggccaagaggaagcccctgagcagacagtaagggctggaggaggaagggagccttcccacttccaacagggcctccgtcttcatgtccagagactggtcaggaggtggtgccccagggataatgccaggggctgtggtctgaggaacaggtagacaagcagagttttgcatgcaagggtggctgatgcaaacatgacaaaattaatgcctcttgctaggcatggtgcggacaagcacttgtagtcccagctactaaggaggctgacgtgagagaattgcttgagcccgggagttcgaagctacagtgacttatgatcacagcactgcactccagtctgggcaacagagcaagaccacttctctaaaatagtaataataattatgtctctgggtgagaatgacataccacattcatacccaaatgcccatgagcaatagaactggtaaataaaatcatggtttatggccggtggctcacgcctgtaatcccagcactttgggaggccaaggcgggcggatcacttgaggtcaggagcttgagaccaacctggccaacatgatgaaaccctgtctccattagacatacaaaaattaactgggcgtggtggcgtgtgcctgtaatcccagctacttgggaggctgaggtgggagaatcacttgaacccgggatgtggaggttgcagtgcactgagatcgtgcccctgcactccatcctggatgactagcttgggcaccatagcaagactccatctcaaaaagaagaaagaaaaatcatggtttattccatcaatggcatcacctgcaacagaagttggaaagccattgctcatgggccaaggtccagctcatgtttcttcttggaccacccatgagcttggaatggttattacatttttatttgttctttgtttccagtacaacgggcctttttgtggtaaaatacatataacatacaacttaccattataacttacttttttcttttttgagacggaatcttgctctgtcgcccaggctggagtgcagtggcgcgatctcggctcactacaagctccgcctcctgggttcacgccattctcctgcttcagcctcccaagtagctgggactacaggcgcctgccaccacgcccagctaattttttgtatttttttttttttagtagagatggagtttcaccgtgttagccaggatggtctcgatcccctgaccttgtgatctgcccgccttggcctcccaaagtgctgggattacaggcgtgaaccaccgtgcccggcctttttttttttttttttgagacggggtcttgctatgttgcccaagctagtgtcagactcctggcttcaagtaatcctcccaccttggactccccagtagctgaagctacaggtatgcaccatcttgttccattttaaccattgcttttgtttgtttctttgtttcagagtctcactcagttgctcaggctggagtacagtggctcaatcttggctcactgcaacctccacctcctgggttcaagcaattctcctgcctcagcctcccgagtagctgggattacaggcgtgcaccaccatgcccggctaattttttgtatttttagtagagatggggtttcaccatgttggccaggctggtctcaaattcctgacctcaagtgatccacccgcctcagcctcccaaagtgccgggattacaggtgtgagccaccatgcccagcctattttaaccatttttcagagcacaattctgtggcaataagcacattcatgttgttatgtagccaccactgccgtccatctccagaactttctcctctttccaaactgaaactctgtccccatgaaacactcactccctatccctctccccagcccctggcaccctccatcttgctttc

SEQ ID NO: 1560983 - DNA, 4001 bp, Homo sapiens
gacacgccatggtaagaggcaggcagctgcctttttcccataggaacggggggcagacaggaagacgacatcaccaaagggaccctcaaaaataagcctttgggaaacaaatgagccatttgggatgcagacagatatcataagcctgacttgcgccgggtgcagtagctcacacctgtaaccccagcactttgggaggccgaagcaggaggtcggctcgaggccaggagttttgagacaagcctggacaacatagcgagaccctatctccacgaaaacatacaaagttagccaggcttggtggcacccgccgcccatagtcccagctactcaggaggttcaggcaggaggatcccttgagcccaggaggtcgaggcctcaaagagctgtgatcgcaccactgcactccagcctggactatagagtgagaccctgtctctaaaaatagggttaaaatgagcatcgtgagtctggtgtcacagcctccgagaagcctctcccacgcgttgccttcttcaccaactcccagcccccgccaaagccggctgcgtgctcccaggacatcacgacctatgctacgggatctgtaggcacagctgtcggcaggtccctgagagcacagccggcatcgtacgcagctctgaatcccccgcctcaaacacagcgaagacgctgggctgtggggagctgacaagtgattgcttgcatctgtccacctgcaaacaaccgcccacaggtgcaggtgtcccaagcacacttatcagggaaatcagaaaaaaatgctaccttttctggcaaaacaggaaaataaacctattcttaaatcctagagaagatgtttctcttttgcaggaaaaggttctgagctgagactgtttcatggttaaagtaaaaacagtgcttgaaactcacgcccaatgaggaaatctgggacgaaggaagtcaggggctgggtgaagcagagagccactatcaagggacagaggtaacaggggagtctgaatgacatcacactcgataaccctccctccacgactttccttgcgatgtccctctttttctccaatccaaatcccacatctcctccaagaaacgctgccatgacgatgaaaaccaccatgacgctgtgaggtggagtccaccaacgtcctctgcccgaccaaaagcatggaattcctcggagcccactcgagtaagctttgacttcctccctgccagtcatgctggacacagggctcgacaaacacaagagacgatcctcggaccatcctaactcaacgactggagactgaggtggccgctgccagaggcgcggccggaggaaacgtcatggaaataaacaagggcggccacaagcacatggggtccgggaagcggcgggcgccaatcaggggcaggaggagtccaggacctgcctagcgccggccgcgcccgtctcccgagcccccttgtgtcaggcccggtgcccggtactcaacatgcgctcgcactccgccctctagacagccctggcaggacgcgtcctcctagttgacatttcacactcgtgaagacgaaggcttagggacatctagtgctttgcaccgggtcccagggtgggtggttccggtcccgactgggaaaaccgtcgcccgcgaacgtgtggggaggaggctgggccgagaacggggaccccgggcgggaccggggtggggtccagacccgggcaggggagccgagcccaaggcaagcaggcgggcgggcattacctgctgcggggggcgcctctccgccgtcaccgggcgcgccggagccccgggccccgcggtgccggaagtggcagtagggccgccggcagggccccccgggcgccccagaccaataggggcagtcaatggcccggaagaagccagtggagcgtagcatggtccgtcccgcggcggggccccggcccggagccgcccgggccccagggccccctcactggcgccgcggtcgccgccgcccgcgcctcacggaccccgccgccgccatcttgctccgaggcccccggaggccctcgggacgccgccgcaagggaccccgggaggggctgcccgcagcgcgcctgctcagaaacgcctgctcctgcgcgaccaaggctggtgacggacccctgggccgggacagacggccgcgggaggaagtaaggagggcaggggctgccctgcctgcggtctccgggagcctcgccagcgccgccgcccgaccttcggcggctgtagcggcgccatcttgagccccaggcccctgcggcgccagggctgtccacggcgcgcctgaccaaaaaagccccgcggggcccgctattactcatttgcatattatttcctttcgttagcatatcaccttaaggcgccctctgctggacgaggagagttctgcggggaggtggccttaaacctgggccaggtgaaactcatggttgaattactccgttcacagtctttaaaaatcccctcgccctggtatacagctggctctcaagaaacgccttaatctccccaacctcgactcttgtcatcagtctaatgaccaggtccacgttcactcatttgttcaacaaatattgagcgcctactgtataccagctagagggtgcattttaacagacaaacgaggaacaaggctgggatggggcaactctgtagtctggtggagtaggcccacgtcttaatgggaagtttaacctggtgcattttggtgggattgtaaaatagtgccactgctatgtaaaacaaaaaacccaaaaagtttgtttttaagagacagggtcttgctctgtcacccaggctggagagcagtggtgcgatcacggctcactgcagcctcgacttccctggctcaggtgattctcccacctcagcctcccgagtagctaaaaccacaggtgtgcaccatcatgcctggctaattttttgtattttgtgtagagatggaaaaagttaaacagaattaccctatgagcaactctattcctgggtatacacccaaaaagaatagaaagcaaagtcttaggtcgggcacagtggctcatgtctgtaatcccaacactctgggaggctgaggcgggtggatcacttgagcccaggatttcaagaccagcttggccaatatggcaaaaccctgtcctactaaaaatacaaaaattagctgggcgcgatggctcacgcctgtaatcccagctctttgggaggccgaggagggaagatcaaccgaggtcaggagtttgagaccagcctggccaagatggcgaaaccccacctctattaaaaatacaaaaattagctgggcgtggtggcgggcgcctgtagtcccaactacttgggaggctgaagcaggagaatcacttgaacctgggaagcggaggttgcagtgagccaagattgcaccactgcactccagcctgggtgacagagtgacagtccgtctcaaataacaatacaatggttaagatgacaaattttatgttatgtgcatgtgattttaccacaattataaataaatgacaggatgcaatgatgaggggacgtgggttgggatgggtcatgggcgactctgcagaggacctgatctaatctcaaagctgtcctatcatgggcagtggaggcgtagactccctgtcatggctcctgatgatgcgtgagagatgaactctcatttatgcgattgctccatccgtgccggctggtgtcggtcattcattcagcaaatagttactgagcacctactgtgtgccacaaaatgctagaaacatccataagcagagcagagaaccccactctggtggaggtgatggtgtaggcagggaggccgacaatgaacacagcaataagtgagacagcctgaagccaggtggaaagtgctttgagaacagaaacaggagaagagcctggactgggcacagggctggtctgggtgattctatggggaaggcgggatttgtgcggttttacagaaaattaggggccaggcatggtgcc

SEQ ID NO: 1560984 - DNA, 4001 bp, Homo sapiens
aataagtcgtaccaggtaaaactgaatcttctgcatagcggaaaaaaaaaaaaaaaggaaaaaccagaactaatgaaaaacaaacaagcagccatatatatgacaatggattaatatccaaaatatataaggaatattttcaaggctgtagcaaaaagaaaaaaaagccaaaataatccaaattccaatgggcagaatcctgaatagatatttctctgaaaagcacacaccaacgaccagcaagtactgaggaacaagctcaacctcactcaccatcagagaaatgcaatttaaactgaggcaggaatactgtgtggtcacaagagaatcgagaacgtatccagtgacattttcacataggaccaaaacagtggctgttaaaattagccacttgtcattaaaattacaaggacaaggaggaacctgggctcatgaggtgataaaaaaccggagggagttaagctgtttcaaagcattgccacagtaatgaccgtggtcattatcacactaaatcacacattctgcagtgtcacggctgaccccagcatgcccatatgtagtacaaaaatgggtacctcaccaattctaaaaaatctctgctttttcctagaaaacctaatgattagttcacctcctaattagaaggactgacaaaaatagaaaccccgaaggccatcgaaagccaccagctttcagaatcacgcccacacttctctcctaacagtgtgcttttgctctggaataaaaacttcttgcctttcacttcattctggctcatccctgaattcgttctcccgacagcatccagaacctggaaactggctgggactggggtctctctggcatccagagagcctcctgagccctccagcaacaaaaccgcgatgagatattaacccctctctgctaggatggctatgatcaaaaagacaaaagacaagtgttggtaaggatgtggagaaaggggaacccttgtgcacggttggtgggaaagaaaatggtacaaccactacagaaaatagtagggaggtttctgaaaacatgaaggatagaactgcctgtgttccagcaaccctacttccgtgtttctacgtgaaagaaagaagtcagcatgtcaaagagacatctgcactcttaggttctctgcagcgttattcacaagagccatggaaacaaccccagagtctatgagagaaacatggatgaggaaatggtggtatatacattggattattctaccataaaaaagaaggcaattctggcattgcaccaatgtggatgaaggccgagggcatgatgggaagtgaaataagtgaggctgagggaagtaaacactgtatgatctcagttatgtggaatctgagttgactgatctcatagaatcagaaaatagccactgcactccagcctggcagacagagcgagaccctgtctcaaaacaattaaagaaataatgaatccccatcctggaagaggtgggtcccagcatctggccagatcttttccgcaatagtaatgtaaacaaactttgcttttcatttccttccctttctctttctgaattaaaaggaacaaaaaactgaacaaaaaaaaaatcagaaaataagagaagaatgatggttgccaggggttgtgggaaggggagaataggaaaacaataccaaacccataggaaaacctgacgttgagtaacgcagccaccgaacctctgtccatcatttcagaaagtctaccaaattctcacgaaattcaagcaaatggagattgtcaagtctctcgccttggtattgaaaatctaagacttacctaactgttaccagggaagaggtccccttatcctccagaaatacagtgtgtctgtcatggccttggcctcagacaacacttgtggaatcaagacattattgcattcccctagactctcatacgccttttgtaaaaatgaattccataagattgaactcacctctccttctggagtttctcccctggcctccagctgcttctgcggacagctcagatctggagtgagagctgcctgccaggggcttttataccagagggtgtctccacccaccttagccacaccctttccctcctttttaatccaatcagattctgatttcattctgccatcattgagattgttactattggacaggtttttaccttaaaggaagacgactgtgttttcagtgttattttttaattaacaaggacaaaatattgccatgtaataatttttagataagatcttgaatattatgcctattggttaaaatttggaaattaattaaaattaattaaaatcgtaaaatttggggtgacatttaaaattcctctaaaatgaacggtgcgactttcaaagagttttctattataaatgtcacaccttttcacatttcaataaaagaggtgacttaaacctactcagaagtcgttactaataggacactccacagaccacactcaactctcaaaatcattttctctataatgtaaagattctaattaagaagcttaggaaagaaatcccaaaacggtttccagacaatcagtcagccagtgaaagtccgtttttctttgtagttgcagcatctaaaatgaaagttaaacgttactgttacaatctatttcccttacatcacaacataagtaaaatgagattcatttcctctttaaaaatgttcaaaaacgggttcctcatgtattaaatatattataggtgatcagagttcatggataagaatgtaaaagtgggagactggaggtcaggtgggaaaggatttgattacattaatgtgattaaattaatagtctttaatttaatcatctccacagtaatcattctctagtgattgctagattctcttctttcctattcaaagccaaggcagttctcaattccttttgtctcatgaaggcaaatggagaaacacaaatctctacgttgtggtgcatatattagatgaaatccttgcacattgcatttcttcattgattgggacctataatataatctgccacatgtatgtccatgtatacacacataccgtatctacacatatgcatgcagggagaaaatgcttatctcttcttgcataattctaattgctttattttctcatataaatccttttaaaatatactcacatttctgggagcagttattctccagcttgtaattttatgggcccatgttcctggagcactgatccctcacatcttttaatttttatctgcttcccgtaaagcttgaacgaaatttctgttctctttgggaataccaggtggcctcagttgtggaaagcaccaagcccagtgggttgatttgcctctctaatagtctcccaaaatatcttacagcctggaattgcattcatgctcatgtcttgggagaggagttcttccgttcagaattagagaatagcgtcttaggattgctggcacactggtggggttggtttgggtgttagatactttccacatcttttccaattgcatcttttcacagaaagcagctccgctggcttctattcagacagtggtaaagtttccttgcccactctcatgtacagttcagtactttaggggtcttctgtgtttgaataaaaacctgtccttcaacatcccagtcagcgaggtctgtattctccatgccccgtccctgcaggcgtgtcacagaagctgacgtaaatggttggcttcggtggcttccgatccccaggccctgttcactgtacaagcaaacttttctttttttttttaattatactttaagttctggggtacatgtgcagaacgtgcaggtttggtacataggtatagatgtgccatgtgggcttgctgcacccgtcaacccgtcacctgcattagatatttctccctaatgttatccctcccctaaccccccgccccccgacaggtcccagtatgtgatgttcctctccctgtgcccatgtgttctcattgttcatctcccacttatgagtgagaacatg

SEQ ID NO: 1560985 - DNA, 4001 bp, Homo sapiens
tcattttatttagaagtggttatttaatttgcatatatgtggagaatttatggatttcttcctgttattgatttccaatttgactctgttgccgtcataggagagggtgtattgtatttcaattttaaagctaacgagttctctctaagaccacacatattcgtggcaaacactcagtgtgcacttgaaatgaatgtcagtgttcagttattgggttaaactgaatacatgaacatatataattttgccgtattcataggtccttatcatttgaaattcagttactgtgttgggtcacattcaaattattatttcgttcataacttccataacacacagtacactaatcttgcagcaaatagaaaagattggcaaatgaatctgaattttcaaaatatttattgaacagaaatataaacataagccccaaagaaaacaacatgacaaactttaagtacaatgtaattttcccctcattaatataattgctttctgttcatggtttacagagtgatggctctttcccttctgtccctttgtacctatgtgtatctagcggaaaagttcttagctatggctatgggggcactgaaacttcctaaagatgattatgttcaaatgtttatttactttccctcagaagaaactggggcactggcagtggatggattgatcacagaacagatactcaggatgctctgatcatcttgacttccacgtttatgagcaaaaaatggacgccagggctcgcaaacaggaatctcgatgaatgtgttgatatggcacccatcactaacattgtaaaaggcaatggacctcatacctacatccaggaaaatccccactctgtgcaactggggactcacccagagaggagtcataggcacagtgctggcagcaaagacctttccttctctgcaacccacagtcaagaagccgtgttctgaagaaagctcaatcttcccctgtcggttgacagattccttgcacacgcccacatcccacacttggctggtgcccacgtccacctcccagtaatggcggccggaagtgaagcgaggggtgcccaggacgcacagggcagtgtcgaacctctcagcttgctccttcctattctggctcaaatccccacttcggaaactcctcaggtcttcagaaatgatgagatagttgttggctgtgtccacatcgaaggtcatatccactgtgcaaagaagaaccaggagttcagcaaagacacacactacagactccctctgccctttgactgcaaacacttaaacacattattcacttttacttttattctactttctttcccaaatcaaaatttcctggggaaacttgtttggccacctgatgaggttaaattgtatctataggttgcatgaatatgatcattgtaacaagtccaccttattcatattagaaatgcctttcgaaataagttagtggataatttgatgaaaattagttttccatttagcacatatgatacatgaaagaagacagtagcttgctctccaaagtattctacaaacttgcacagattccatgaaaatctctacgcaaaggtgagaactgctgttgtttgtgaagcatggaagttttagatgctagatatcctgctaatgcctatgtttaatgaagaaatgtttgaaagtcgttttcccagtgccttttatgggttgtggcaggtcctatagattccttaccttgaaacttcctcatccttgggttcattgttagaacagatttcagcttgggctctagttccttgatgatggaaaccagcgccctcagcttgtacttgggcttgatgtcatccttctgagagaccacagagcagaaacggcacagtaaaccttccccatcgggctccttctggagtgaattgaggcactggaggcagcaggcatatccacatttcagttgcacggcttcttcaagatcttttagacagacaggacatctaatgatctgtttgaagtgctcagccatggcaaatgtctgtagaaaaaaaaatgaacacggaattagaatttccacgagctgaatgaacagctgatagtgtttggggcttttatctttacatgcatggagctatcatggcaccatactttaaatcactactgctagtgatgaagacacaacatgaatacaaatgtcaatgactcgaggccctgaacttctaatatctgtaatactcattggaataaagggcatgattcaccgaaagactttgagttgaaatagtaaaggagtctacacctgggctgtttcatatggtagccaccagtgacaaatggctattgagacctgaaatggggcgtatctgaatggagatgtgctgtgagccaaatacactcctctttgtgaagacgtaatggggaaaagagaatgtaaactatctgcttgagaaggtttcaagttgctcacatcttaaatgattatattctgagttaaaattcattaggcttgttttgttctattttatgtgactaccagaaaatgaatttacaattacatatatgggttatcttaagattctattggacagtgctggagtccatttgaagaccttctacttccccaactgtgcaaactgcatgtggtgaaaaccctgatagcacaccaaaaggacaagacacaaaatacaaataagtcgtaccaggtaaaactgaatcttctgcatagcggaaaaaaaaaaaaaaaaaaacaaaaaacagaactaaaagaaaccaaacaagcagccatatatatgacaatggattaatatccaaaatatataaggaatattttcaaggccgtagcaaaaagaaaaaaaagccaaaataatccaaattccaatgggcagaatcctgaatagacatttctctgaaaagcacacaccaacgaccagcaagtactgaggaacaagctcaacctcactcaccatctgagaaatgcaatttaaactgaggcaggaatactgtgtggtcgcaagagaatcgagaacgtatccagtgacaatttcacatgagaccaaaacagtggcttttaaaattagccacttgtcattaaaattacaaggacaaggaggaacctgggctcatgaggtgctaaaaaaccggagggagttaagctgtttcaaagcattgccacagtaatgaccgtggtcattaccacactaaatcacacactctgcagtgtcacggctgaccccagcatgcccatatgtagtacaaaaatgggtacctcaccaattctaaaaaatctctgcttttttcctacaaaacctaatgattagttcacctcctaattagaaggactgacaaaaatagaaaccccaaactcctttgaacgccaccagctttcagaatcacgcccacacttctctcctaacagtgtgcttttgctctggaatagaaacttcttgcctttcacttcattctggctcatccctgaattcgttctcccgacagcatccagaacctggaaactggctgggactgggttctctctggcatccagagagcctcctgagccctccagcaataaaaccgcgatgagatattaccccctctctgctaggatggctatgatcaaaaagacaaaagataagtgttggtaaggatgtggagaaaggggaacccttgtgcacggttggtgggaaagaaaattggtacaaccactacagaaaatagtagggaggtttctgaaaacatgaagaatagaactgcctgtgttccagcaaccctacttctgtgtttctatgtgaaagaaagaggtcagcatatcaaagagatatctgcactcttaggttctctgcagcattattcacaacagccatggaaacaaccccagcgtctgtgagagaaaaatagatgaggaaatggtgatatatacattggattattctaccataaaaaagaaggcaattctggcattgcaccaatgtggatgaaggccgagggcatgatgggaagtgaaataagtgaggctgagggaagtaaacactg

SEQ ID NO: 1560986 - DNA, 4001 bp, Homo sapiens
catggtgaaaccccgtctctactaaaaatacgaaaatcagccgggcatgatggcgagcgcctgtagtcccagcgactcaggagactgaggcaggagaatcacttgtacccgggaggcggaggctgcagtgagccaaaatcaagccactgcactccagcctggccacagagtgagactccgtctccaaaaaaaaaagtgctgatgatccgtctagcaacttggcatttctagcttttttgtttgttttactgaaaattaatctccacctgtcctaactttcaaagagtccctgcctcctctaaaaagggccaggcctagaaaaagtacctggagaagttaggacccgccaacccccaccagaccaatctcaaactcttgggaaaaagcctgaaatgatccttttccttggaatgtattgactgatttaaaaggaaatggctgcagtttgcacaccgacactaagctcaaaagcaagacggagaataagccaactagacttggcctggctggctacttaaaaaaaaaattcctccccgagctggcaggatattgtcaccctaaaaagcagtggcaaagattctcctctcacaaacatggatagcttccccttccctctgaccgctcctgcccacgtggccctagaggctgggaccttgtcagtgacatgtgactcggttgacactcgtttgacacaaaaacatgtgtctggccaagagaagcgggtttaaaaaatctaagaaacttcctcaggcttcatttgctcccccattcccagtaggggagacctcgatgggcaggacccagaaacgttccatctccaggaacaaacccccgcaacctcaaaccaggaaacatcaggtctcaaacagcagcccagagaaaagcactcaggtttctgttcctctaaagcattccctcatggtcactcctccctaccatggactttgatttctgcaaaccagatcctccacgctaaagccaaatcgactcctagctcctccatgaaactttgcttcctctttgcttcctcccagagagaaggtggcaggtttaggagtgggctgcagtgttgaaatcaggactagctgacagttattttatcaaaccacattcagaaacggtagatacgaggaaaaggttcaaagataagccgtaagtaaaattcctggaaggaatgaggagtcccggtactgcaggaaaagggcgatgtcaatgattctccccattttacaggatggaaaactgaggcctcagatggacaggcacttgtccaagttctgagtcctgggacaactgcaaagctcttaaggaagaagggagtcgcttaaggatctggaaggcggaccgggtggtggctgcccaccctggttcccgaggtggaggttggggagacccagccggccccgcccataccttccctcctggtcccgcccacccaccttggccccgcctcgtacctccctcgctcccattggcccagcctccccaggcccgccccttcgcgctcccgacatataaaagccccccgccccggcctgccgacctccactcgccgcgggcctgcgagcgcccgcccctcgcgggggccgggccgcggggacgggggcgggtggtgtcgttccagccgggccccggccccctcccccacggtccagacagtcgccgccgccattttgaccgcccgccccttccccccggactgtgattacagagacacctactgccccggccccgccgcccaccccggcccggccagccaccccggggccgccctggttacctccgcttctccccacttctgtctgcggaaacgcttttcggaggtctcggagtcgatgttgggaaggggacgggacgtgctggggtccccgggccgggcctggggggtgggggtgggggtcggccgggcggttgttgttgttgactcgcgttgccgggttgcttggtcgccacgactaccgtggctatggcgcctccgtttccctcaccggggcaactgttgctacccaccctagttacgtcacgcgcgggggcggggcccggggtgattggcggcggccggagaagtgattggacggcgccaggccttgcagctaaactattagttccgatgcacgcttttcaacaccctctggacttcccggcgatctgatttatcagtatgaatgtccatcaaaagaaactgaaccctcaaaggcagccgggcccgtcactccggcagggaagcagctggttaagaataaaggggtaggactcgtgaggacgggattggtttgccgatgtaaaaccggcctcctggttcgactaaagggacgtcaatctaccaaaggtttgccgcgctctctggctggaggccgtgcgcatgctcggcacgcaaggccgattgggagttgtagtccgctcttgcgtacactttacatgtcttaccaaattaaaaaggcgagaaaggaagactccgctccagacttctctctcgctcggtgggccagtttctggcttcttgcgctgacgtcaggggaggaatgcagtgacgcagcgcagcccctctgtgacgacagcggcgaaggccggactcgggattcgatgacgtcactgggcgcgcgtcccccttccccactgcccatggccccgtcggggttgggtggaagcgggaggccgcggcggggttcgatcccagctcccacccgctggggtgacatcctcctccgcccaagccggccagacagcgcggccgccgcgccttctcccgcctcccggtcccctccagccggaaaaggtcaccgctgccggggtgaccgcggctatctctgccccgcaggcggtgcggccgccttgggaaaggtctctgcaaggcgggggacttcattcgcggcttcaaccgcggtagataagcaaaggtcagccccgacccagcccagggagcttggtccgcccaggagagctcaccacaacccccgccacacacacacacctcccacacatacgctcctctgtgcctcagtttcctcaagggactgtctgggtgctgcaggacgagaagagacagaaacagggcccggactagggtgaacatcttgggagcaaaaactcagtcatcaagataaataatcttctaattcaatatttgttaaatatccaaattaatgggaaaaaataaatctatgatgaacaaaacatcacaattttaaataaagacaggatccgccaacacagggattaaggtgagatgcgttatgcaagctcagggtcagatcttgtgtttaaaataaatttattattattattttttgagacggagtctcactctgtcgctgaggctggagtgcagtggcgcaatctcggctcactgcaagctccgcctcccaggttcacgccattctcctgcctcagcctcccgagtagctgggactacaggtgctcgccaccacgcccggctaattttttgtatatttagtagagacggggtttcaccgtgttagccaggatggtctcgatctcctgacctcgtgatccgcccgcctcggcctcccaaagtgctggggttacaggcgtgagccaccacgcccggcctactttttatgttttaaatgtcaattatcttatgactgagctctttggccttctcttaaattttgcattctcatcccaggtaggccctagaacagcaaggggaaaagaaaacaggctcagacagccctgaagtctaatgccagccctgctgtgtggcattcagaaagtgactccacctaagtttgtttcctaattcaaccaacattatatttcctcggtgcaaggccctgggctatacaagtgaagaaaggtgacttcatttatggtggctcacacctgtaatcccagcactttgggaggccaagcaaggaagattgcttgagccaaggagttcaagaccagccttggcaacaaagcaagacacccgtctctacaaaaattagctgggcatggtagtgtatgcctgtaatcccagctactccggaggctga

SEQ ID NO: 1560987 - DNA, 4001 bp, Homo sapiens
aattgcagggaggcacaatgctaacaacaccccaaagtaggaatgaagcctgggggggcgggggtaaggcagccagccctgggtcccgagctccatcttgccctctcccctccccattcttgccgcacaaccaggaggttaaaataggaagatgaaccgcgccggcagccgccagaatggcccgggcgcttggggccctcgggggcccttgaaatagccactaggatcgggaaatccaactttcccagcggtgcagcgaggaaaaccaaaaggaacggagccggaggctggtggcgagggagcgcggaggcttctcggagggaggaaaaagaaagaaatgagcatttggggtgtgagtgagtgtgtgtgtgtgagtgtgtgtgtgcgcccgcgagcgcgctggtgggcggtgggggcagggggtggagtttaaatccacaaacacacacacgcactcgcactacctcggagaaaatgcctggagcagtttaggttctttaacaaaataaataaattgaaaaaaaaaaaaagtttcactcgcgttggtgaaacttttctcccttccagatcagtcctaagaggagagctgcggacgtgcggaggggcatcttgggggcacgtggaaagactggcggacgcacgaacccctatactcaggaatatggggtcacagggagaaggggagggggtgtccgaggcgacctgaacgcgaggatttggggcaaaaaggtgagaaacagttcccggggaagctcgctcggggagtttgggatgaaaaggtgagaagggcaagaggggttctccccagggcagacgcaccagcttttagttaaggaatgagaaaaaggttccaggggtgcccccaaattcagtatgtctgggagtccattaaaaagggggtccccgggacaagtcagatctaggaatttggggtaaaaatgagaagggagtcttcgaggtccccccgatgcaagaagtttgcgactaagagtgacagaagggctctggggtcaccccaatttcggaggtttggggagtaaagtaagaagagggccccaggtggccccaattcagggagtttgagggtatgagtaaaagaggggtccccgggtgtccccatctcagagatctggggagtaaaagtgaggagagggtccccaagcgcccccaattcagagaattcgagggtttgagtaaaagaagggtccctgggtgcccccaactcagagatctggggagtaaacgtgagaagagggtcccctggcgcccccaattcagaaaattcgagggtatgagtaaaagaggggtccttgggtgcccccaactcagagatctagggggttaaggtgagaagagggtccccaagcgcccccaattcagggagtttgaggagtttgagagacgttcccggggcgcccccaactcagcgagtttgaaggtaagcgtgagaaaggggtccccggacgccccaacctcaggaagttttgtaaaaagtgaggcgacggcaccgcacctcccccgcgttcagtcaataaggaaagtggggacgtcgccagggtccccccaaactccgccgcgcgcgcggacggggtggcggaggcgggtcccgcgggcgcaccacccggacgtttggggtgagcggcggggacgtgctgcccgccccccggcccccgaacggggtccccgccgccccccacactccccggccgggctgggcccggggcggtcgcatcggtcacctggagttcgggccgggagttcgggcagcggctcccgcggcggcggcagcggctgctgcgtgttggtccccgttggtaagtaacagtctccacggctacagtctctatggcggcggcggtggcggcggcggccgctcctcctccggctcccgccgccagccagcctcgcgcagcccgcccgcccgacggggcggggcgttgttaccggcaacggttaccaggctccgcgccccaccttcctaacggcccgcccacgctcgcctccaacgggcccccaagagggcggggcgcgagaccctacggcgttccattggctgtctgcagagtctgtcggaaggaggaggcgttcccccttgaaaaagagtgcgagactcggccaatggccgcgaagaggggcgggtcttggcgggaggcgcgcgcggctcagagggttggcgaaccggtcgcgcgcgcggcgccgtgggttggtggcgcgttttgggaaagtccagttttaggggacccaagggactccgtttaccccacaggaggagtgtgggacatgtgggaacagtctgatcaggggtcagcaaactctcgctcgccgcctgtttttcacggacccccagctgaaaatttaaatatatatatattttttacatggttaaaagaaactatcggccgggcgcggtggctcacgcctgtaatcccagcactttgggaggctaaggcgggtggatcacggagtcaggagatcgagaccatcctgactaacacggtgaaaccccgtctctactaaaaatacaaaaaattagccgggcgtggtggcaggcgcctgtagtcccagctacttgggaggctgaggcaggagaatggtgcgaacctgggaggcggagcttgcagtgagccgagatcgcaccactgcactccagcctgggcgacagagcgagactccgtctcaaaaaaaaaaaaaagaaagaaagaaaaaaaaagaaactatcaaaaggagcttttgtggggtgtgaacctgataggagactctcttttattgtattgggcccagtattttgaactagtttaaagattggcaaactgcggcctgcgggtcaaattctgcctgcttgggtttgtaaataaagctttattggaacatagccacgcccatttccttgaacagcttggaaggctgctttgacactacaggggcggagtggagtagttgcgcaaagacggcatgtcccacgcgaagcctaagatatttactatacggtcctttacagaaaatgtttgccaaactcaccagccctcctctcaagctggtagattcagctacgagtaggacagaaacagacagatcctcatagaacttttattctagtgagggaacattgacagcaaacagaataaagaggtaaacatatagttattcgagacaaggggctggaagaataggagaaaacaacttgtactgagaaaaggcaggagattaggcttcagccccactcattcattcaacaagaaatcatattagtgagcactgattaaattgctatgtgcctgaaagtgatctaagcattttttaaatatgcaaactcattaaatcttacaatcgcatctttagaaagatgctaggcattatccccgtttttatttgttttgttttttctttttttttttttgagacagagtctctctctgtcacccagactggagtgcagtggtgcgatctggctcgctcactgcaacctctgtctcccgggttcaagtgattctcctgcctcagcctctcaagtagctgggactacaggcgcccgccaccacgctcagctaatttttgtatttttagtagagacggggtttcaccatgttggccaggctggcctggaactcctgacctcaagtgatccgcccgccttggactctcaaagtgctaggattacaggcatgagccaccatgcccggcctttccccatttttcagatcaggaagctgaggcccagaaagaatgagtgaatttgcccagtgtcaaacagcttgtgagggatcggaaccctagtagtctagtgccaaagtccatgctcttgatcactagatgggtggttttcaaacatttttgaccacagcatacagcaggaaatacattttacctaggggctcagtccacacaaacatatctataactaaaacaaatgatactgtaactaaagtaccgtgaaatgatactttaacgcactctgatatttcctgttctgtttcattttaattaaaatgttgacggtgatt

SEQ ID NO: 1560988 - DNA, 4001 bp, Homo sapiens
catgtgaggcctgacattccatcatcatggaatcccagagggctaatcccagaggaggtatcctaccctgtggagaggaaacactggcatccggttcaggattcacaggctcaggggtgcagggaaagagactgaggaccacagtgtctgagccatctgcagcctcctctccggggtcttcagggtccccaagttctgaggcaggggtctgctgggtctggatgaggtcttctgcaggctgggtaagctccatggggaaagctggcggaggtgtcagaaggggagagatgacaataattatcaacagttataataaagtaggcaccgactgcatacctagccttgcactgtgagggtgggtaaactgaggtccaggttaattaccagagccagggaaatgaaaaccagagtccaactgctttcgaggtctaccattccccaccaccaaagcacctacaatgtgcaatgtttaagagcctgggctctggcagggcacagtggctcacggctgtaatcccagcactttgggaggccgaggagggtggatcatgaggtcaggagttcgagaccaggctggccaccatggtgaaaccccatctgtactaaaaatacaaaaattagccaagcgcggtggcgggcgcctgtgatcccagctactcgggaggctgaggcagaattgcttgaactcgggaggtggaggttgcggtgagcagagatcgcaccactgcactgtagctggggcgacagagcaagactctgtctcaaaaaaaaaaaaaaaaaaaaaaaagaaaggaaaaaaaagccggggctctggggtcagctgtctgggttcgaatccctcaatttataggccgtgagaacttgggcacgtgacttaacctttgagcctcagtttcctccacgacaaaatgtggaaatgagacctacaacgaattatgtctgtacatagcttatcgggggatctgctaagcgtggagctcaataaatattcgctatggttgttgggaggggctccccataatgagtgacggctcaacaaaggtgcgattggtcccagtcccacccgagcctcctaaatcgatccaggaggtccactcacctccccacgagcctcctctgtccccccgcgccgaaagcccagttctctcaaaacttgggggcccaagtcacaaacttttctcttccaatggatatagcaggaggcaaactggagaccggaccctcagcgatctggcttcctctgccgggacagaaagcaacttgatactcgaccgctacccccaccccagagctcccccactgcgcttgcgcacccccgccccccaaaagtgaggaagggcccgggcagtaagtgctgcctctggccctttaagacttaggggagggcgtgggttccgctggggtcctgggagggcagttgcgcctgcgccttcttttcccctcctcaccgactcggagggaatgggcggggcctaaagggctctgagaatttcactacgcctgcgcccgctcacctttaccctgcccacagatttttccagagggagccaattggctccggcttcgggtagatgggcggggctatctcaagaagaagaagtaggggaagtacgcggggcgtctggaacttaaaggggcagcgtaccttggccgtcccgttccacaacaaggtcccttctgcggtctcaaaggcttataagcaagggcgggggcagagggctaaagaagggagtttttgcggcccgagtgggtaatgcgtggaggactcccccaactcgtctctcaaggaaaagggggttcagaaagggagagagttcttccccctctcctgcctgggtgtcgctccaccagcctcctggccgtcgcgccccctcctcactgcgccacccccgggtgtgcctccttccctgcgtctcacacagcccctttcttgtccgcaaagactgaggagcggggagggcgggccctctgacaccggaacaggagccgtgcggcgtccggtttcagcagggaaggcttaggcgggcgtcccaacctccgggcttccggtgccgtttcccggttcgctcggccgcggtcgctatggaggagccggagatgcagctcaaggggaagaaaggtggtgcgggcctgcgggcgggacagagggggccggtaacttgtggaggggcggcctgacaaaggccgggcgcggagggaccgtgcgaggagcagtgattgaactgccgtccaatcccagctctgccgctgactagttttgaaacctgtagaaaggctccgtgtctgctttaattaccggtccccccaggattgtttcaagaattcagtagctgaggctgggagtggtggctttgtaatcccagcactttgggaggcctaggcgggaggatcgcttgagcccgagaccagcctaggtgacatagtgagatctcgtctctaaaaaaatacaaaaattagccgggcgtggtggcgcacgcctgtggtcccagctacttgggcggctaaggtgggaggattgcttgagcccgggaggtcaaggctgcactgcagtgggctacggtcgtgccactgcacccccagcctgggtgacaagtgagaccctgtctaaaaaaaaaaaactcaacaacctgatatttgtaatgcattggaagaatccccggggcgtagtaatcgctgtgcgtcttgtttccttttttttttttttttttgagacaaggtatcacactgtcgcccaggctggggtgcggtggcgcgatcatggctcactgtagcctcgatctctctggcgcgggcgatcctcttgcctcagcttctccagtagctgggactacaagtgcacaccaccacatcaggctaattctttaattttttttttttttgacggagtctcgctctgtcacccaggctggagtgccgtggggggatctcagctcactgcaacctcagccccctgagtagctaggattacaggcacacacccccatgcccagctaatttttttgtatttttagtagagacggggtttcaccttgttgctcaggctagtctcgaactcctgacctcgagtgatccacccaccttggcctcccaaagtgctgggattacaggtgtgaaccactgcacccagctaatcccctatactttaaatcaccctagattactcacatctagaatacataatacaggcctacacatcacttcattcacatggattcaaagaagtgcttcgtgtagggcagattgaagttttgctttttgaaactttgtggaattttttttttcctattttccatccacggttggttgaatccacagattcgggaaccatggataacggagggcatgagtatgaggcatgagccaccgtgccttgtctgttatgctcacctttcttcttctttttttttatttgagacggagttttgctcttgttgccaaggctggagtgcaatggcgtgatcatggctcacggcaacctccgcctcccgggttcaagtgtttctcctgcctcagcctcccgaatagctgggattacaggcatgcaccaccatgcctggctaattttgtattttcagtagaaacggggtttctccacgttggtcaggctggtgtcgaactcccaacctcaggtgatcctcccgcttcggcctcccaaagttctggaattacaggcgtgggccaccgcccctggccgttatgctcacattcaaagcgaggaggcctatctggtaagaggtcacacagtttggaggtggcaggctgggctctgccactcaaggcacagtggtgagatggagagacttgtgttagcctcctttgactcccagacacgcctgggttctctctcctgagcagtcaccctggtgatggcattggattcatctctgtagcaaactttgaggctggtgctgttattctttttttgtggatgaggaagctgaggctcagagaagctctgctctcccaagtccaagcttttaacttttcctgtgaacatgtaa

SEQ ID NO: 1560989 - DNA, 4001 bp, Homo sapiens
cactttcggaagtggaggcctgcagatcacttgagcccaggaggtggagaccagcctcccaaaaaaaaaaaaaaaattagccaggtgtggttgcatgcctatagtcccagctcctagggaggctgagtgatggcttcagcccaggaagttgaggctgcagtgaactatgattgcatcactgcactccagccttagtaacagagcgagaccctgtatcaaaaaacaaaaacaggccgggcacagtggctcatgcctgtaatcccagcactttgggaggccgaggtgggcggatcacctgaggtcaggagttcaagaccagcctggccaacatggtgaaaccccgtctctactaaaaatacccaaaaaattagctgggcgtagtggcggaagcctgtaatcccagctactcaggaggctgagacaggagaatcagttgaacccaggaggcagaggttgcagtgagctgagatcacgccattgcactccagcatgggcaacaagagcaaaactccatctcaaaaaacaacaaaacaaaacaaaacaaaaacgaaagcaagacacaggttccatgtgaggcctgacattccatcatcatggaatcccagagggctaatcccagaggaggtatcctaccctgtggagaggaaacactggcatccggttcaggattcacaggctcaggggtgcagggaaagagactgaggaccacagtgtctgagccatctgcagcctcctctccggggtcttcagggtccccaagttctgaggcaggggtctgctgggtctggatgaggtcttctgcaggctgggtaagctccatggggaaagctggcggaggtgtcagaaggggagagatgacaataattatcaacagttataataaagtaggcaccgactgcatacctagccttgcactgtgagggtgggtaaactgaggtccaggttaattaccagagccagggaaatgaaaaccagagtccaactgctttcgaggtctaccattccccaccaccaaagcacctacaatgtgcaatgtttaagagcctgggctctggcagggcacagtggctcacggctgtaatcccagcactttgggaggccgaggagggtggatcatgaggtcaggagttcgagaccaggctggccaccatggtgaaaccccatctgtactaaaaatacaaaaattagccaagcgcggtggcgggcgcctgtgatcccagctactcgggaggctgaggcagaattgcttgaactcgggaggtggaggttgcggtgagcagagatcgcaccactgcactgtagctggggcgacagagcaagactctgtctcaaaaaaaaaaaaaaaaaaaaaaaagaaaggaaaaaaaagccggggctctggggtcagctgtctgggttcgaatccctcaatttataggccgtgagaacttgggcacgtgacttaacctttgagcctcagtttcctccacgacaaaatgtggaaatgagacctacaacgaattatgtctgtacatagcttatcgggggatctgctaagcgtggagctcaataaatattcgctatggttgttgggaggggctccccataatgagtgacggctcaacaaaggtgcgattggtcccagtcccacccgagcctcctaaatcgatccaggaggtccactcacctccccacgagcctcctctgtccccccgcgccgaaagcccagttctctcaaaacttgggggcccaagtcacaaacttttctcttccaatggatatagcaggaggcaaactggagaccggaccctcagcgatctggcttcctctgccgggacagaaagcaacttgatactcgaccgctacccccaccccagagctcccccactgcgcttgcgcacccccgccccccaaaagtgaggaagggcccgggcagtaagtgctgcctctggccctttaagacttaggggagggcgtgggttccgctggggtcctgggagggcagttgcgcctgcgccttcttttcccctcctcaccgactcggagggaatgggcggggcctaaagggctctgagaatttcactacgcctgcgcccgctcacctttaccctgcccacagatttttccagagggagccaattggctccggcttcgggtagatgggcggggctatctcaagaagaagaagtaggggaagtacgcggggcgtctggaacttaaaggggcagcgtaccttggccgtcccgttccacaacaaggtcccttctgcggtctcaaaggcttataagcaagggcgggggcagagggctaaagaagggagtttttgcggcccgagtgggtaatgcgtggaggactcccccaactcgtctctcaaggaaaagggggttcagaaagggagagagttcttccccctctcctgcctgggtgtcgctccaccagcctcctggccgtcgcgccccctcctcactgcgccacccccgggtgtgcctccttccctgcgtctcacacagcccctttcttgtccgcaaagactgaggagcggggagggcgggccctctgacaccggaacaggagccgtgcggcgtccggtttcagcagggaaggcttaggcgggcgtcccaacctccgggcttccggtgccgtttcccggttcgctcggccgcggtcgctatggaggagccggagatgcagctcaaggggaagaaaggtggtgcgggcctgcgggcgggacagagggggccggtaacttgtggaggggcggcctgacaaaggccgggcgcggagggaccgtgcgaggagcagtgattgaactgccgtccaatcccagctctgccgctgactagttttgaaacctgtagaaaggctccgtgtctgctttaattaccggtccccccaggattgtttcaagaattcagtagctgaggctgggagtggtggctttgtaatcccagcactttgggaggcctaggcgggaggatcgcttgagcccgagaccagcctaggtgacatagtgagatctcgtctctaaaaaaatacaaaaattagccgggcgtggtggcgcacgcctgtggtcccagctacttgggcggctaaggtgggaggattgcttgagcccgggaggtcaaggctgcactgcagtgggctacggtcgtgccactgcacccccagcctgggtgacaagtgagaccctgtctaaaaaaaaaaaactcaacaacctgatatttgtaatgcattggaagaatccccggggcgtagtaatcgctgtgcgtcttgtttccttttttttttttttttttgagacaaggtatcacactgtcgcccaggctggggtgcggtggcgcgatcatggctcactgtagcctcgatctctctggcgcgggcgatcctcttgcctcagcttctccagtagctgggactacaagtgcacaccaccacatcaggctaattctttaattttttttttttttgacggagtctcgctctgtcacccaggctggagtgccgtggggggatctcagctcactgcaacctcagccccctgagtagctaggattacaggcacacacccccatgcccagctaatttttttgtatttttagtagagacggggtttcaccttgttgctcaggctagtctcgaactcctgacctcgagtgatccacccaccttggcctcccaaagtgctgggattacaggtgtgaaccactgcacccagctaatcccctatactttaaatcaccctagattactcacatctagaatacataatacaggcctacacatcacttcattcacatggattcaaagaagtgcttcgtgtagggcagattgaagttttgctttttgaaactttgtggaattttttttttcctattttccatccacggttggttgaatccacagattcgggaaccatggataacggagggcatgagtatgaggcatgagccaccgtgccttgtctgttatgctcacctttcttcttctttttttttatttgagacggagttttgctcttgttg

SEQ ID NO: 1560990 - DNA, 4001 bp, Homo sapiens
tttcaccatgttggtcagactggtctcgaactcctgacctcaagtaatctgccccccttggcctcccaaagtctcccaaagggctaggattacaggcgtgaaccaccgtgcccagcccctagcaccacttttttttttttttttttgagacagaatctcactctgtcacctaggctggagttcagtggcgtgatcttggctcactgcaacctccgcctcctgggttcaagcaattctctgcctcagcctcccaagtatctgggattacaggcacccgccaccaagcccagctagttttttcgtatttttagtagagacggtgtttcaccgtcttggccaggttggtcttgaactcctgacctgatgatccacttgcctcggcctcccaaagtgctgggattacaggcgtgagccacctcgccccgcctgtagcaccattctttcatgtgattcctctgtctcccggcttcttggagttattgttttggtttgttttttttagaaacaggtcttgttttgttgcccaggctggggtgcagtggcacaatcatagctcactgcagcctccaagtcctagactcaagcggtccctctgccccagcctcctgagtagctgggaccactgctgggcatcatcacgcacagctagttttttaatttttatttttattagagagaatcttgctgtgttgtccaggctggtctccaattcctggccttctgccttggtctctcgaagcgcagggattataggtgtgtgccccactccctgcccgcttgaagttattgttcctccccatccacaaatagctcctgcaacttgccctggaaaccctccctctcccatgccctgtcccctactccctctcccgtcccctccccctcccgtcccctccccccacccccccgcccccgccccacacactcttttccacccagggcttccctcagccctcctgtcgcgcttcactggctgccccatccgccctcacctagccacttctaaaccaaccccattccaccttccagccccggccctctaaacctgcctttcccaactctgccgtccagttctgtccttaccaagttgtccctaggctcctctcgggaactgcgcggccatcgcctggccccaccccattccctggatctccccccacttacctggccgcccccagtcccctttctacctggtcgcctcatctggtcgcctccgagcccctcccttccttccgcccactgcacctggcggcctgtgctcggctctccagctccgccctcaactggtcgcttccggccccgcgccacccaccaaaccccctcctcacctggctgcccccggggccctccgccgggctcctgcgctgactgcgctgccgccgcagggagacactgtacaccgcgccgtcctcggtctcttcaccccagtcctgcagcggtgcctggacgcacaggcggactcagggcaccaaaggggcacaggtcctggggcctcagcctccttggccgctcggactcgggccgagtcctcctgctgcatccccacgccccttcccggccagaagctgcgagactagggctggggtcccaggctagtcccctcctcgctgcgggtcccctcctcccaggtcctgaggacatggggtggcatttggggatgtcccagggcccagtctaatagaacctgtctctagctctttctgccgactgcgctcagagactcgcgcccccatccctaagaggaaccagtcgcttcactgggtcaagggccgcgagtccccaggaggggactccagggcaagttcagattgggagcagataccgtccgacgggcgggcgcttggagtttctggacctgcgggtcaccagggatgcggggtccggggatcccttgtccccttaccagggccagctctttgcctgctgtgcgctccatggccggcgcccgtccctctcagtggcgccgctgagtgaggcggaagggccggcgggtggcgggtggcgggcggcgggcagtggccgggcgctgaggccagaggggcggagcggccgagctgctggggcggggcggggcagggcaggccggacccagcctctgggtgcctccagccggacccagcgccagcccaggagaggtcctggctcttccgctgggtgcctatcaatctgtccccagaagaaaggacatatctgtccccaaggggtcttttttgtatccccagatgtgggggagctcctgtgtgggggcatgtgtgtgtccccagaccagagtcctctgtcctccagtggaaggggctagcttgatcaagtgtgggggcatcttccactttttattattattgctattattttgagatggagtctcgttctgtcacccatgctggagtacagtggcttgatcttaactcactgcaacctccgcctcccagattcaaaggattcttgtgcctcagcctcccaagtagctaggattacaggtgccgccaccatgctcagctaatttttgtattttttgtagaggcggggttttgccatacttgccaggctggtctcaaactcctggcctcaagagattcgcccacctcagcctcccaaaatgctgggattacaggcatgaaccacggcgcccagccttattattttttagagacagggtctcactcctgttgccaaggctgcagtgcagtggcttgatcttggctcactgcaatctccgcctcctgggttcaatccattctcctgcctcagtctcccaagtagctgggactacaggcatatgccaccatgctcagcttttttttttttttttttttttttttttttttttttggtaaaaactggttttcaccatgttgcccaggctagtctggaacccctgggctcaagcgacacacccagctcagcctcccaaagtgctgggaatataggtatgaatgagccactgcaccccgcccttattttatttattgagacagggtctggctctgtggcccaggctggagtgcagtagcacgatcatagctcactgcagcctggagctcctggactcaagtgatcctcccaactcagcctcccaaaatactgggattacaggcataaaaccactacatcgggccatctcccatttttaagctccatctgcgtcactagctgatgggagtcatcatgacccaggttggaggaggcagtctgtggccctgggttttcagggacagccgtctcttgggtggtgcagggtcaaaaacagatgaatacccaggggcatggtcggtaacatttattgcgcaactctgaggccggggcggacccagctggggagatttactgtgggaacgtctggcccggccccttcctcccctccgggcgccgctggccgcctccgttcccggtccgggccgcgttcagcccctgaaggggccccgtggggcctgcgctagacccggagggatcgggggctccgaagggggccgcctggtgggtgtcaggacgagtctaggacctccgagagcgacggtgcttcttgtgactttcgattaatttctgggaacggatcttgagtgatgcgcgggtcactacctcgttgtcctcctcctcactctcttcgtctaaggggggtggggggatgagcagggagcgatgtgggatccaggtccccatccctggctccccttccctttaccaccccactccacccccaccttggccctgaacagggtatctgacaacctcctgctacccagcttggggccccaaccgcaccccttcatccccccacccatactgaccaaaaaacttgtccttggaagtggcaaggggcagggcgatgcgggtgttgtattcgggcagccttccctctaagctggcgaggaactaagcggggatgggaagcgagagaggaaggtgggcggggccaggggccaccgagaagtcacgttccccctcctccctaccccattccgagatatgccctagttccaactggagaccactgcccactccca

SEQ ID NO: 1560991 - DNA, 4001 bp, Homo sapiens
agaaccaaacagcgtccctctccaaacttcactccaccccacccaccttttcaaactgtcccacgcagaaagggggcgacgctggcaggggtgggcaccgaactcggactccctgtaaagacgccccaacagcacatgtgttaactcattaactcggagggatctagggtcactgtgacggttttctattaatagggaataaagctcctgcagacgttagcggtaatgccctgacggccggcgcaaagttaactcctcccgggccagcaagaggaaaccgtgtcctgcccaggcagatgtgcactggaaacgcgcgtgtacccatgcacacacggggttttaggaccactccccttgcacaggccagaccccacacccatcccgagtcttttctcaggggagggagcggcagcagcaggcggccgtcgggtgtccgtcagctcagcttcgccacgcacacggctagggccacagccgccagcagcacggcgccgaaaaggatggcggccagggccttcctggggtcgcaaccccccccgcgctcctgcaaggacacgaccgaggaggggccggcgctgaccgtggacaggagctcggcgcccgccgcctgccgggcttgcacggtccagcggggcacgttgaccttcatctccatgttgtcgatcatctcgcccacctgaaggacctcgcgctccagctcccgcaggtccgcgacgtcgaagtcgccctccgcctcgagccgcaggctgcgggtgctcagcgcgcgcgccgccacgccggaggaggcgccagccacacctgtgcgcaccagcggccgccgcggcgcgtgcagcgggaacgcggcgcccagctccagcgcgcgtcgcatgtccgcttccagcaggtccaggcagcccgagaaggccacccagagccgctcgaactcggcgcgctcgtcggcggccaggccccggtcgcgcagcacagcagtcagccgggcgcaggtggacaccgccagctcctgcgccttctggcgcgtcttttgcagctcctgccgcaggttctgcgagtccgccgagccaccgacggtcagcaccaggtggtggtagcacgcagtcgtcttgttgagcccgtccagcagcgccttgcactcctccctcgccatcgcggtgggctccggctgggcccggccgcccgcgcccgttagcctccccctcagcgcggcaggatgtggctaacccccatcccggccttgggccgcgcggcacgaacgctcttcatggtccgtgactcgctcggcgctaccgccaacgtccacggagcccgcccgggaccctcgacgtgcgcctctgcggacggggcgcgcagagggagccccgttagcggtcccccgctccctcgtccatcctccccaggcgcactccgagtcacacgtcgtgtctctgcaccgccctggcctccacggtggctccctgcgaagctgagggtgcggtccccatcctccgtgggtgccaactccggggcaagcaggctgcagagccgcgcgctccgccttaggcgctgccaagggcggccgggtagggtttcctaggacccgcccaccccgctcgtcccggccggagctgccaccccctggatcagtggtaggcggggctccacgcggggaggtcacgtgtgggtggcccatccctccctccccttcgccccatccgagttctggaatgttagcgctcgggagatccaacccgttctattttacggatggggaaactgaggcccaggtaaaaagcgggccaggctcccgcggagtttttgcctgtgatgggactagaacccagctatactgactcccggaccctgtcggcgacaggacgtcgggtgccccgcaggactgggcacctccgtgccccaaagcgagcagtgactggcaatccgaggggctgggcgccgccggggtcaggtgtccctgccgcgttgcgctcacgttggtcggtgcttccaagcgctaaccccacctctagtgtcagcccggctcccagccccgcccctcacgttctgggcacgcgcagttgcgggcgtggggcggggccagctggagtaggaagcgtagggagccgcctgagccccgcccccggctgggctggactccatgattgctctgcgtacacgtcactctgggaaacgacggtttctcattgggtcagctgtggcgcggctccgccccacggcggagtaaggggtgggctatagggccagatcgccgcgcgagggtggtgggcatcgaggtcccagcagcggacgagggaggtgccgccgtcgcccaggatgggctgggaatgaagcgatgtagccttttaagtaagtgtcctcgcgctggcctcctcctgcgcctcccctcccgcgggatggctgcgcctcggggcgcggcggccgggcggggcccggagagtgaggggggaggggctccctgctctccggagtccgctcccgggtccgccaggtggccccgcgccgccccagcccccgcgtccccaggtgggtgcccggtgcgcagccggcgcgccctgcccactccgcccctcgggtctggaggaggggagcggtcggcgcggagaatgcaccctccgagcctcgctgcgtcgacaccggcgggtgtggccggggtgccgggtccggcggttcggatctggcggggcgcggggcggtcgccgcgcggtttcccggaggcctagggtctgctggaggggagcggcgggtgggggtccgagccgcgcgcgcagcggttgtggtttccggggggtgatgagggcgcggagcggggaatccctggctgccggcctctcgcagggcgggggggtctctgcattcccacaggtaaagattgttaaaggaaaactcttaagcaccgagagatgttccggattctgagtctgttccgtcttgtggttgaaaatggactgcccaggagcacacgagccacgcggtgcccccttggctgccccacgaggtgcaggggacgtgggcactcgcggcctgtgctgggcgagggagcaagggacgggtcttcgctgaggatttagagcatgcagggaacgagggctgctggcagtgctggagggactgtgaggctgcagagagctcagattttacaagttgatgggtttcatggatagaggcccctattttgattaaaaaatgcactcttcccactggccgaagagtagagcagtggatattttttttcttttctttcttttcgtttttttctttttgagacagggtctggctctgttggctagtctggagtgcagtgatgccatcatagctcattgcagcctcaaactcctggactcaagcaatcctttcacctcagcctctgtagtagctgggactacaggcgcatgccactatgcacggctaatttttaattttttttttttttttttgtagagatggagtctagcaggttgcctaggctggtcttgaactcctggactcaagccatgctctcgtcttggcctcccaaggtgttgggattacaggcactagccaccacgttttgctgagcagtagctgttacgtttcgagatcagcctggcatgaggactggtgttgaggtggcctaagggtccggtgtactgagccccggggcctgctgtcacccaggggtccgtcctttaactgggtgagcagtaggctgggtgtttgctgccagggcttgggtactcctggccttgaccattgtgtggaaggggggttctcagccacccacacgctacatagggtcgttcccagggggatagtagttttcaggacaaaatgggtggaaagagggaaaatactctttcccttcgggggaagctttggagacagcagagggtgaggaagctgcaaaggtggccagaggccagatgtgccaggtcctgagcacctagcagagaagttgagggctcacctggtggggagtgcaggggaatcctttgaggaatcctgcagagctcggcgctggaaagatcgctttg

SEQ ID NO: 1560992 - DNA, 4001 bp, Homo sapiens
caggaaaatgtgttctgggaggcttgggaccacccctcacaggtgtgcttctcttgctgccattttcccccaggtgctgctggagttccagagctacacctgctcagagaacaatctggggaggaaatgtcccagaaagaggcagcaacttgcgggaggccacacagcaattttgtgggagtggcagtcaggccccggggcccgaggacagacataggaattcccaggccaggcctcctcctgcaattccatggcctgtgatcctctgtcccaaacgccacacataattagaagttataatcctgtaattccatgatgacatctttaaacttaaatatacctcaaaactactttttttttttttaatgctaaaagcaacttcacaaaaaagaagttttcccactctgccccacactgtcctgcccagggctcctcaccagtgagcaaagcccacagtctctctgtgtcacctgggagaaggaggaagatgccaagaccatttaagaactggatcctaaggctttgaacaattaagaattgattcgtttatgggaaagtttcacttccctatttataattatgcactgtcgtatctattataaaaacgaaaatcaacaacaatctctccaccctctcagtgatccctggccaagggccaaaagctatttttagacttgctcaggacctagagggaggaaggcttggaaggcatcaccatgactcccggctccaaagcatctttgtagcccaggccctgccgcctgcgggtatcccagggcccctgctccacaggctggggtcgcttttgagggactgagctccctgactgttatcttctgggcccaagagctcctggacatgccaagaacctgcgaggccggcacccgccacccgccgcccgccgcccgccgcccgccgccagcccccgccaagtctcccggacaacaagacaaatccgctttggcacacagtgagacgcacaagaccgtgggcctcacctgcggtgctcacgccctcctggacgacccggagcggaggagggtgcaacgccggaggctccctcccaccagcagctctcccctgctccctgaaaagtcccacaggcggactttggaagcattttggaggcaaaaagagaccgccggccgggcgcagtggctcacgcctgtaatcccagcactttgagagaccggggcgggaggatcccttgagcccaagagttcgcgaccagtctgggcaacacagcgataccccagttctacaaaaaattagcgtggcgaggtggcgcgcctgcagtcccagttactcgggaggctggggcgggaggatcgctggaggccaggaagtcgaggctgcagtgagctataatcgcgccactctactccagcctgggcgacagagcgcctaaaataaatatgagaccgccaacacgcctgggatggtctgtctccacccgcgctcccaccaagcgctcttgcaacgcgcccagaggccaagggcgccagcgcagccaggaacgggtcctttccccaggcaccagggatcgcaagcgaggggtggcggggggtgggaggggggagacccaagcacccctccaggtcctccgcccgcacctgcgcggagcggccacatgcgcctcccctactccccgcccagtcccggatgccacctgcccgggacgccggggacatcgccgcccccactcctccccgccagcctccgtccggccagcgccggcccagtgcgccccctccccctcccggcctagtggaccccgactgcgcgctcccacggcccctgcagggcccgggggaaaggaggtctggagcccgcaggtccccgcccgcccgcccgaagccgcccaccttccgaaagtagccgtcgttctccttctccagcggctggggggccgcgggcaacagcgcgtcggtcatgctagcggcgcgggcgcggagggcggacggcggactgaggcgcggcggctgaggctggcccgagaggacgtgcggccccgcccctgtccccgcccttccccgcccctccactcccaccccgtcccgcggcccttctagccccgcctgaggccgagcactggagccctggagacgcgccccgccccgtcgcgggccccgaacccgcgccccttgaggcgctcgtcacccggagagctgcgccctgggcgcggcgcctcggggttgtctgtgggcgtcgtggctgactcaactttgcgagtgccgcgagagcgcaggaaaggcactggggtctcaggggccgcagcgaagccctggctgtggacctgcaccctgccctggagcccggggagtcagtgaggaaggcgtggatccaggcgcgtccctcctgggtgaagcccgtgcgccgcgggggaaggggccagactcgacgccacgtcgagggcgcggcgggagctctgggccctgggcccggcggtttggaaaagcttttcccaagaggggagcccatggcggagggagcgttgactgccccgccgagcgccttgcccggactactcgggcttgttggcatgggatcaactcagccgattccctgtccgcgctgcaaagacgagtgggatccgctgggctcgcggactgccctgagagaggggaccaggaggggttttgcgccccagacacggcagatgtccttgagcacagttcttttttttaagagatgggacctcgctctgtcgcccaggctggagagcagtgttgcgatctcgactctttgcagcctcgacctcccaggatcaagcgatgctccagcctcagcctcccaagtagcaggggctgcaggcgcgggccaacgcgcccggcctttttatttattttttttatttttttatttgagacggagtctcgccctgtcgcccaggctggagtgcaatggcgcgatctcggctcactgcaacttccgcctcccgggttcaagcgattctcctgcctcagcctcccgagtagctgagactacaggcgtccaccaccacacccagctaatcttcagtagagacagtttcaccttgttggctaggcttgtcttgaactcctgaccttgtgatctgcccacctcggcctgcctcccaaagtgctgggattacagcttttgttttgttttgttttgttttgtttttaaatagatgcggggtctcaccatgatatcaaggctggcctcgaactcccgaccttaagtgatcctcactcgtctcgctctgtcgcccaggctgaagtgcaatggcgcgatctcggcttactgcaagctccgccccccgggttcatgccattctcctgcctcagcctcccgagcagctgggactacaggcgccggctaccacgcccggctaatttttttgtatttttagtagagacggggtttcacagtgttttccaggatggtctcgatctcctgacctcgtgatctgcccgcctcagcctcccaaagtgctgggattacaggcgtgagccaccgcacccggccgtggagcacggttcttaaccacctccgttttctaggctgcaaaatggggctcttttattattcttggattctttttttctcgggctgatggagggcagtaggacaaaagtgagtgttggaaagtagggatgaacttagtttaggagggaaagggtgacccatggggacagggtttgtatcagtctgccaccaacctcctgctggctgctagactctgtgggcagacgcctggcagcacgtgaagccaggaccttgccacctaagcagggacacccagcccgcgggccatgctcctcccggccgctgcttactgttacaactgcttctcccccagcaaagggaccgccctcagcggtcgcgatagatgccacaggtggaacagaatgcaatgtgctgcaaaaccagcccagcgttaacatatctttaaaaaaaaaaaaaaaaagtccgggcgcggaggctcacgcctgtaatcccagcactttggaaggccgaggccgaggccgaggctg

SEQ ID NO: 1560993 - DNA, 4001 bp, Homo sapiens
cagagtcctaatctagggtgtcaggatgggcccccagctgtgagtactcacccctagtggccacagccccacaagggcctccgcatcctgggtatccagctctggcacatgccacaccccccatgtcctctgcaggcgagtaagtggctctagggtgctgaggacccctagaggggtcctgtctgctttgttcacctgtggtgggaccagcctgggatggacagtgtccagggagtcaggggtcagaggtgggcagtgggacaatgaggtgaggtcaaaggtacaggaaggggcaggcccagggcagaggctcagagatgtgattcaggattctgtagtgagggaggtattggatggaaagggtttctggatgcaggggaaggagggcatagcctcagccctagtagcctcacctcaccccctctgtggggacttcaggtgccttgtcttctggctgggccatcgtcaggttgcaggaagccagtgagtcatgacctggcctctggcagggagaaaggtaagactcaaagctgctctagccctcgggtcatgttcaagatatttacaatcaatatggcagagaccctgaccaatcagaatggaccccagaggccgcttgccgtggcaggggttaattctttattttatttttgagacggagtctcactgtattgcccagactgcagtgcagtggcacgatctcagctcactgcaacctccgcctcgtaggttcaagcgattcttgtgcctcagtctcccgagtagttgggattacaggcgtgcaccaccacgcctgggtaatttttgtattttttagtagagacaaggttttgacgtgttacccaggctggtctcaaactcctgacctcaagtgatccccccgcctcggcctcccaaagtgctgagattacaggcatgagccaccacacccggccggcaggggttaaatctttagtaccggatggtggggaatctggggatcccaggagagaggccagtgtgtcttgcggtgtggggagaggactcaaaacaatagctctttactgaagtggtaggaaatatgttaagatttttaacagccatgggggctgtgtaaatgtgggccagcccttggcaaaacccagtcagcgcctggaaaagttcttggcccagagtaggcagtccctatatctggaaaggtaataacatcccctcttcctcccttcccacaccatggaggggccactgaatctcttcccccagcattttattatgaaaaatttcagacatagagaaaagctgaaagaattgtacaggaaacatccctatgcccactaccaagattctaccatgaacattttactcatcttgctttatcacacatctgttcctctctctcttcatccacccatcaggccccagctcctaaccaggtacagagtcctacgtaggttatcacttagggtggcacttatcccagcagcagtcccaggagcaggagacctggatcgggggaggatccatcctccctccctccctccctcccttccttccttccttccatccatccagtatttactgaatacaggctggaattaggtgcctctgccctggagagagggtgatgaacaggacaggctcctcccctcagggccttccattcttgtttggggcaggtgtagcatatggataataggcagctaaacaaatacattaggccattgaccagaaggccagggtgttattaggaaggagggaggtgggcagggaggcgcaggtgccctgcccaggcaagagcaggaaggaagggaggggaggggaggggagagggaagcagatgcctgcttgtgtaccgtggcaggagaggaggctgtgggcagtgcgtggcaggggtgggtcagggcagctgcctcataccaaagggaggcagcaggggctgaagatgccagatgctcggttcctgggggccctacctgttctcggaggagaggcctgcagtagcaggaagtggagagaggaagctgagcaggcagggggaagaggcggggctggggtatctgaagtcaactttcctccctctttctggggcctcaggcctttagtgacggggcttagaggaagggacactggcaggctgggagtccaggggtcagagccacgagggcccccgtgaggaccctcttgttacccctcactctggatcccggagactttctggttccttagtggcccaagatctaaccccctcccttcagagatttccctgggtgcccacagaaagaaacaggaggccagaccggattgttagttgtttttgtttttaatttgtctccaataagcaatgtcttctgcccatccagcatgggaagtgggtcccacgtgaagggggcccaccacccactttgggagctgaaggcagagactcgggagccctcccggctcagactccccctacgctgggtgtgggttatattcagaggcccacacccacactggggtaggttaggtatggtttacttagccacaggcccccgggggcaggagacagagtgggggcccgaagctccctgtcctggaagagttaaaagttctggggtagccctggccccgtgggggcagttagagatgagggaggttactccttagcccaggagtggttagagacagtggggctggtagagatgcctgtttaagccttggcctctaggaggtgttagagatttgctggggttgggggccagggttgctgggaccccagttttggggagggagctgtaagagattgggggatgttctgagctccccagacaagaactgctggttaagagggggccaggcccggttggggctcagctgtccctgaggagctcggcatcccgcctgggagatgcagctgtcactggggtttctccctctctgttgtcctggcctcgtccttggcaggtggcggggacttcttgggggaagctgaagtgctggggttggggacccccgcccccgactgggcatctatgctggcgtgctccctccggacaaggtcctccagctccttctgcaggagcaaaggtcacagaagtcaaaggtcactgtgcatcatggggtcagaggacccatggggtggggagagggtccagggatggggctcaggacaggctggggttgctcagctcctcaccttccatccaaggagctcagcaagggccaggcagccctggtcgcattcacccagccaggccacgtccctgcggtgcagcaggagatcagagttcccaggcgggctcgcccctgcctgctcctctcatctgccttcgtgcccccgctcccacctcaccctgtcccttccaggctgccccaacccccggcggggcctcacctgtaggccttcttggagtcaaagtccatgcctcctccgaggcccataatcatccccaggaaagggtccgactgtcagggagggggtgggtcaggggcaggagcagggaagggagagctaagagcacagaccctggagccaggtggcctgggtttgtatcctagctctgtgactttgttttttttttgttgttgtttttttggttttttttgagacaaagtttcactcttgttgcccaggctggagtgcaatgatgtgatctcggctcactgcaacctccacctcctgggttcaagtgattctcccgcctcaacctcccgagtagcctggatgacaggtgcccagcaccatgcccggctaattttgtattattagtagagacggggtttcaccatgttggtcaggctggtctcgaactcctgacctcaggtgatccacccgcctcggcctcccaaagtgctggaattacaggcgtgagccattgcgcccagccagctcagtgactttggtcaagtgacttgtcctctctgtgtcttagtttcctgtagaataggggtgatcacaaaaccgcgatggggttgtggcgccagtgagttcacgcaggctaagacttgggacagtgtctgcccacagcgtgcgctgcttgccc

SEQ ID NO: 1560994 - DNA, 4001 bp, Homo sapiens
gttttataaggagttaatattcattaaaaaaaaaaacttagaacaatgtctggaacatgatgagcactcaaaaatgactattgagtccgggcacggtgtctcacacctgtaatcccagcacttccaggggcacatgctggaggatcaccagaaccaggagttcaagaacagcctggacaacacagcactaccctgtctctacaaataataaaaagttagacatgttggcacaagcctgtagtcccagctactcaggaggctgaggcaggagaattgcttgagcccaagaggttgaagctgcagtgagctgtgatcacaccactgcactccagtctgggcaacagagcaagaccctgtctcaaaaataataataataataataataataataataataatttattgatcacttactttgtgtcaaacaacgttttaagtgctttagcaggttaacttctttattcttctcagtgataaccagttgaggtgggtgcagttatcacccgtattttccagaggagaccactgaggcaggactcagtaaagaatttgcatggctgggcgcggtggctcatgcctgtaatcccagcactttgggaggctgaggtgggaggatcacctgaggtcaggagttggagaccagcctggccaacatggtgaaactgtctctactaaaaataaaaagattagcgaggtatggtggcacacatctgtaatcccagctacttgggaggctggaggcacgagaatcgcttgaacccaggtgatggaggttacagtgagccaagattgcaccactgcactccagcctgggcaacagaatgagattctgtctcaaaaaaaaaaaaaatagtagcacatgaacacacaactattacattgtagagctactatctgaatccaagtggtgtgtcttctatgtccacgctcatacctatcctccttctcaccatcatgaatatctatttgccaggtccctgcccctcatgaagctaggtcttctgttccctctgactctcctgatggatcccagattgtgccgctgccctgctgagactctgccctaatctgttttgatttaatcataccacttaatcctgcaagattcaggaactgtgtctcccatttgaagataaagacactcagagactctaatctcagcacttagggaggccgaggtgggaggatcacttgagcccaggagttcgagaccagcctaggcaacatagtgagacccctgtttctacaaaaaaaaaatttaaaactagccaggcatggtgtcaggtgcctgtggtctcaactactctggaggcggaggcaggagaatcacttgagcctgggaggtcgaggctgcaatgagcagtgattgggccactgcattcaagcctgggcaatggagtgagaccacatctccaaaaaaaagacactcagagacggaagaaaaaccaacttgctggggagaggtcatgcattaggtgacaaacccagctatgtgtataccacacccttcacattacctgctggaaagggttggaaaacacttcggtgttgtctttgcaaatggcacgctccccgcccccacctgtcctcagacttccagcccccatggatggcttgcaacaccccatcccagctctgcagctctgctaactcctgagcccttgtttcaaggctgggcaggtgtccctggctgaatgtggcaggacagggaccctcctcctccagcaacctcctcttatctctgtccttagctcctgggacccatccagccacctgttccccttctacatccactctctccccagcctcacccatagcctcgtgggccaggatgtctgatcgtctccaccgggagcccccgcaggtgaagatgactgctcggatgaattctcggccgcaaagcctgaccccgtaaggcgctgcccgggcctcagctcccggccacagctccccggtcagcacccataccgccaggagcagcagcagcatgtacctggccatgctggacggagatgctttgaacgtgagagtgggccagtgtctctgctgcctcttggccccccatttatacatcgtggctcccccacactctgcctgaagaaagctgagtgcctcccttatcttctccagcagaggggagacaggcacggcccccccaacccgacctttctcatgtccccagcgaagtgataacctttcgctagggacagggtgatgtggcccagcttattgtcaacatcattgacagagaggcgagaaggtctccaacctgcagagaccagaaacgcataatcccaaaaggcggggtaaggtgacacaaccagatccccacaacgttagggtcctggacctcttcgaagatcataatagcagtgaacgcccagtgcagtatgtgctacgaggccaggcacactactgtaagcattttattgtttatttgtttgtttgtttgtttagatggagtctcgctctgtcacccaggctagaggtacagtcccaatggcacaatcttggctcactgcaacctccgcctcccagattcaagaaattctcccgcctcagcctcccaagtagttgggattacaggcgcccaccaccacacctggctaatttttgtattttcagtagagacggggttttaccacgttggccaggctggtctcgaactcctggcctcaggtgatccgcctgtctcagcctcccaaagtgctgggattacagatatgagccacagccctcagctgctcaaagcattttatatctctgtaatgtatttgattctcccaacaacccagggtaatggttctcaaatgtgagtgagcttcagaatctttgggtaggcttgttaaaacagaaatcaggccaggcgcggtggctcacgcctgtaatcccagcactttgggaggccatggcaggaggattacctgaggtccggagttcgagaccagcctggccaacatggtgaaaccccgcctctactaaaaatacaaaaaattagccgggtgtggtggctcatgtctgtagccccagctccttgggaggctgaggcaggagaattgcttgaacctgggaggtggaggttgcagtgagctgagatggcgccactgcacttcagcctgggcaacagagtgagactctgtctcaaaaacaaacaaacaaaacacatatctttgtgtcctacctgcagagctcctgactcaacaggtatggaacatatctaagaatctgcatttccaaccagttcccaggtgacattgatcctgctggttcagaaaccagacttttttttttttctttttttcagagacagggtctggctatgttgcccaggctggattgtagtggtggcaacatagctcactgcagccttgaattcccgggttcaaatgatcctcccacctcagcctcctaagtagctgggactacaggtgtgtaccaccatgctcagctaatttttgtattttttgtagagatgagacctcacaatgttgcccgggctggtctcaaactcttggactcaagggacccaaatgcgtcagactctcgaagtgctgggattggctggacacagtggttcacacctgtaatcccagcactttgggaggtcgaggcgggtggatcacctgaggtcaggagtttgagaccagcctggccaacatgatgaaaccctgtctctattaaaaatataaaaattagccgggcatggtggcgggtgcctgtaatcccagctactgagaaggctgaggcaggagaatcgcttgaacccaggaggcagaggttgcagtgagccaagattgtgtcattgcactccagcctggagcaccacgcccagcccagaaaccacagtttctttctttcttttttttttttttttgagatggagtctcgcactgtcgcccaggctggagtgcagtggcatgatctcggctcactgcaagctccccacttcccaggttcacgccattctcctgcctcagcctcccgagtagctgggactacag

SEQ ID NO: 1560995 - DNA, 4001 bp, Homo sapiens
tttcaaaaagactaccttctgttgctgcttggggaacagattggaggggataggagggtgagggacgagagacgacactcagcaggtgtccagggagtggggggtgtcctgggctaggacagaggtgacaggtagacaatgtaggatttgttctggagactgagcctttaggatgagggagagattagatggagacgggactaggggctacactgtggtcgtcagtgtggcacacatttagggcagaaacaggagcacgaaatcaacagtagcaatgaatatgcccgaggcactccagacgtatctgatgctgaatctgcacactgcacatttttgcccacatttattttttattttatttttatttttatttttcgctctgtcccccaggctggagtgcaatggcgcgatctcacctcactgcaacctccgcctcccgggttcgagcaattcttctgcctcggcctcaccaataggtgggattacaggcacccgccaccatgctgggctaattttttgtattttcagtagagatgaggtttcaccatgttggccaggatggtcttcaactcctgacctcaggtgatctgcctgcctcagcctcctgaaacgctgggattacagccgtgagccactgcgcctggtctcccatttttagtttattttttattttttatttttttgagacagggtcttgctctgttgcccgggttggagtgcaatggcacaatcttggctcactgcaacttctgcctcctgggttcaagcgattctcctgtctcagcctcctgagtagctaggattacaggcgcctgccaccacgtccagctaatttttgtatttttagtagagacggggtttcaccatgttggtcaggctggtctcgaactcttgacctccggtgatctacccgccgcggcttcccaaagtgctgcgattataggcgtgagccactgcgccctgcctccatttttgagttggggggcttcctttgtcacccaggatggagtgctgtggcatgatcatggctcactgcagtctcgaactcctgttttgtccccattttatcctgagatgaccaaatggggacaacttacagttaactcacctgggtgacgttcacgccctggtccaatgcatactgtataagcccagtggctgtatcatgtgacagggagttcaggttgtatttgaccctgtggtggggaacagagcccagttaatctcattctaggaacaaagcttggtcagcccatgctggctgcccctcccggggacccctcaccgcccaagcatgctggtagagatgaggtttggagacagcacatccagcgcccagccgacaaagtccgtgtcctccattttcgcaaacagcctttcccgctcgctctccaatagggtctttgagtctgggaggaggtttggaagagaaggggaacagctggttctcccagttcctgccctcccctttcagttctcacctgcccctgcacatacccaggaatcccttccccagacgcacacctcgggctcacctgccactttcagcgcctccagatctgccaggcgaggcaggggacaataacagatggcgtagaccatggggcctggggagaaggggtgtcagttttctggcagccggggtccaatcactgagcccgtgaaagttgccattcatccctgttctatcatcactgcttctttaggtgccatcaccacgaccacatcccctcccttggtgcagtgcaatcccgactcccgtttcccgcatcctccgtaccacgcccctcccctccctggccctaggggcgcacccagcacggggcccctgcccgcctcatcgacgcccaggacgcaaggctccttgcggcacaccgcgggcacaggcgaactcaggcgacagcggcctgtattgtctctctccagctcgctgagatccatgccgcctcagccgccaccaccagctgcaagaactaatactgcaggagcgggtctcggcgcgcgttttccgcgggcctcgaagcggcgcctgcttccggccaatccgcgggcagaacacgcccctggcgctcccgccgccgtggacgcttacgcagccgacgccgacgtcgctgccgtgcgccctcctgggaattgtagtcccgaagggctatggccgaacactcagcttggggaattcggtggacggggtcactttgcaagctctgcttcacggtctctggggccccgcctgcgtggcccggtgggaagagggggaaataagagggaaactgagacgtagcttcgaagacccagcctaacggggaactagagagtcaaatatcaccccactcccaggacacgggtcaccgcatcactgggtccccaactgccacttggattcaggccctgtacttgcggtccctgcttctgtacacattctaagtcccctggaccaggtagccccgcttccactaaacccaggcttttggatttggagtccccaaactccctctcttggttgctcccttcggcccacctccactccgtgcaagatctgtgcttcctaacctctgtctcattcaggccaagccttccccacccccgttggagatcacagacctcggtggactcctgctcagggtctctgctccctatagaagctcattcctcccaacttagaatgaatgtccccacccccacccctcgacccactttttttttttcttttttttttttttgagacagagtctcgctcttgtcgcccaggctggagtgcaatggcgccatctccgctcactgcaagctccgcgtcccgggttcacgccattctcctgcctcagtctcccgaatagctgggactacaggcgcccgccaccacacccggctaattttttgtactttttagtagagatggggtttcaccgtgttagccaggttggtctcgatttcctgaccttgtgatccgcccgcctcggcctcccaaagtgttgggattgcaggcgtgagccaccgcacccggccttcttttttttttagacagggtctctctctgttgtccaggctggagtgcagtggcgcgatcttggctcactgcaacctccacctcctgggctgacgcgatcctcccacctcagtctcccaagcagctggactacaggtgcacaccacaccaccatgcccgactatttttggtattttttgtagagacggggtctcattatgttgcccaggctggcttcaaactcctgggctcaagcgatccggtcgcctcagcctcccaaagtgttgggattacaagcctgagccagccacagtgcctggcatccaccacttctattccctgggctcactggggctcatgtcctctgcctgtgggttcccgccccttaccaggctcatgccccttcctcagggtcctagttcattgtctctttatctccttttactcctcttcgcctccccctccactttttttttttttttttttttttttttttttttgagacaggatgttactctgttgcccaggctggatagcagtgtagcgatctcggcttattgtaacctttgcctcccaggctcaagcgatccttcctccccatcgtaccgagtagctgggaccacaggcatgtgccgccacgctcatctaacttaaatgtttttgtttgtttgtttgtttggttggttttttttgagacagagtctcgctctgtcgcccaggctggagtgcagtggcgcgatctcggctcactgcaggctccgcctcccgggttcatgccattctcctgcctcagcctcccgagtagctgggactacaggcgcccgccaccgcgcccagctaattttttatatttttagtagagacggggtttcaccgttttagccaggatggtctcgatctcctgaccttgtgatccgcctgccttggcctcccaaagtgctgggattgcgggcgtgagccaccgcgcccggcctaattttaaaaatttttatggagaggtgatctcaacgatattgcc

SEQ ID NO: 1560996 - DNA, 4001 bp, Homo sapiens
ctaaatgtgcagccgagtcaaggcagtgtcggccccccacagccaccactccaggcttcccaggggcttcccaggcctgtcccagggctcaaggggctgcaaggggctgccctgcaactcacccaggctggcgggctgtcaggcaaccagcctctcctgccacggccagtggggacagaaagctggaagaggcaagagcgagacccctgggagacagaggagtaaggcaaggctcagtctcagctccccaaccttcgccccacacccgagatttcactttatttgttcctcctgctggggaggggaagccctgtggcttcagtagagaggaaaccacacctctctctttccactcctgggcctggccccgctctcccgccatgccccaactctagcactcgctcctcctctgtgacccagagacaggcggcttctcctgactccctccagccccttcctgggtctctactcccggggaactgcactgcttctggggggcttggacttctcttacgggtcaaagcgtagcaacagccgggcggctacgtacacagcacagtaaatcctcaatgcctgcagcctcttcccctgggcacagggtggggagtccagacccctccacctcctgcggctgctcccctcaagctggccaagcggctcccgactgagccggctctgccactttcccgctgagccaccacgcgcctcagtttccccatctataaagcacgggtggctcgactaaatcaccactttgcacgtcagcctggcgaagggcaacacgggttaaaaatgcagaccaccgccgggcacggtggctcacacctgtaatcccagcgttttgggaggctgagccagaagaatcgcttgagcccaggagttcaagaccagcctgggcaacacagggagaccccattcctaaaaataatattagaaatgcagactgctgagcgcattccacacctactgactccgaaaccctggaaaaggggcctggaaatagcaccttcaacgagcgctgctcccacctcccccaaggtgacatcaggtccgcgtgggaaacactgccctaaacgagcaggaagtagcactcggcacgcccaggcccagggtcctcttcggtgaggggcggctgtaaacacctggaggaagggtgggctgcgcagccaagccccgggaggggaggaacgcaggctctgctcacaaagccccgccggcgggccgcggtcggaccccgggacagtgcctggggcgttccgggcctgggcctgcctccaaggcggcggccagggctccacgaggcgagcctgcagcgaggcgccggcgcccccaaccacgcgctcggcgggggtcccctggcgttattctcggggtccgagccccgccaggcccagcccctgccccgcgccgcgccaccgggcaataccctctctctgctcgccgggcctcagtttctccgtttgcaaaaccaggctcaccgggcttagggatcccacctgggatcctcgcggcctctcgggtcgggaacgccgcggatgtggggtcacccggccgcgatcccgctgcgccgctccggccaggccctgcctcccgcccgggcctcagtctcccgcatgtacaggacggggttcgcgcgcgcaccgcccgggctccccgcggattcagcctgggccggcgctgccccgagcctcagttttcccgtcgtggtcagctcgcgcaagaggcgggcgcaagcgacccccaccccggccccggccttgcctcaggcctgcggcgcagaccctgccgcccgccgccccggcccgggcctcaccggcaggcgcgggacgatctccacggagcagcagtggcagaagtaccgtccgggatgcggcgacgcctcggccatggccgccgccacctactccgcgccgcccgccccccgcgcggcacccgccgccggccgtttgctgctccctcgccggccgacgcgcccgcgcacgctcacgcacggcacgcacggcacgcggggcggagcgggggcgcgggagcggcgaaagctgcgtactcggcgggcagcggcccgggcgacggtggccgctgagagacaaactaggcccggccgttgggcggggctccaagcgggggcggggcttccggcgggggcggggccaaagcaggcggcggaagagacgagaagcggggcgtgcgcggggcggggccgaggccctcctcccctcccgaagctgcccaggccttcgtgtccctcagtgcttccctacctcatcgccgtctcccctcacggtacttcagcccactgtccccaccgttcctggggctcgccaggcgccctctcccccgcccgctgcccggtgcagcgctctcccgacgcccgcgtggctttcttccaggtctttgctcaaatgtcagcttacaaggtcttctctgctgccctcctgctccgtggcactgattccctcccgatgcactgtcaggtcagctgcgcagcaaagggatttttggacccgcagcagcgcctgacacacagcaggcattccctcagcgctgcggaatacaggcagacccggggctcagggcgctgtctgggcctcactgggacccgtggggtcagacagaggctgaggtctgtgggttgtggccttgtttccaagatgctccacgggctgacggcccaggcgcctctcgggtgcggagaaggcaggaaacctaacccctgcttccaaatttaatcagtagaaacggtatcatcacccagcacaggccaggatcatttctgaggttagttctggcccaatcatgcatgcatttcttttttctttttttttttgagacggagtctcactctgtcacccaggctggggtgcaatggcccgatctcggctcactgcaacctccgcctgccgagggttcaagcgattctcccgcctcagcctctcgagtagctaggactagaggcacccgccaccacaccggctaatttttgtatttttagtagaaacggggtttcactatatttggccaggctggtcttgaactcctgacctcgtgatccgcccgcctcggcctcccaaagtgctgggattacaggcatgagccaccgcgcccggcctcatgcgtgtatttctttcttcactcaacactcattgagcaactactgcacaccagaccctatgctgaatgcacgcagatacccccagtcccatgagattggacaggagcgtggaactcaagggtgactctggctctgcctggggaaagagagagagggcttccgaggggtaaggacattggaaccagggctgagggatgaataggatttggttggagttggacttcctgcaaaatgaggcattggagcgagactgttgaggaattaagagttggagcctgtgcatttagattttttgtttgtttgtttgttttttagagatggagtctggctctgttgcccaggctgcagtgcaatggcgcaatctcggttcactgtaacctccgcctcccgggttcaagtgattctcctgcctcaggctcccgagttgctgggattacaggctgggcaccaccacgcccgcctaatttttgtatttttagtagacggggtttcactatgttggccaggctggtctcaaactcctgacctcaggtgatccgcccgcctcggcctgccatagtgctgggattacaggcgtaagccaccgcgcccggcctgcatttagggttttgaatgtccagaggttggggacaggggcttcagcctccttccagtcgtctttgcagcagcgcgaatccagtcattcctgctctgaccaccagagagcgcacgggccccgtccctgggaatccaggaaaaccccaggctggggaggggcgaggcttgccagacgcagcccctgcaccagccttcacgctccgcaagtgcaggaggagcagcaggcctggttcaaacgacgccaaaccacgaactggctgtgtgtccctaggcaagtggcctaacctctgag

SEQ ID NO: 1560997 - DNA, 4001 bp, Homo sapiens
ctaggatccctctggctaaccaaggaggtccaggactcccacccccaccattgtctgcctctgtctgacccctggggtgatgttggcctctgagccatgataagcacagctgcaccacagcatattgggaggatcctagaagccacgacccagggggaagtggaggctcccagagcagtttgggacttaggattggggcgggagccagtctttaaggctcaagttcctccccagccctggccaggacaccctgttacttcaagcctgagccccagccccaaccaggtgtacaggatggcaactctacacccgggaccagcatgtagacagctggagcccacccaggcccagcctgcaggcagtagaaaacaaactccacagatgggtggagtggtgggacgtcccctgcaatgagccagttggggaggaggtgaccaaggaagaatagcagcagcagctctgccctccaaagataggcgggcccctgcaacctatggccaatccgaaggatgagtgctttggcctccagtgctggcaaggacgctcccccaggaatctgtggtgaggatgactgggggcactcccagcaagacccgttcaaggatccgtgtggggctgcccctggctgggcacctgcatggatgtcagtcgggggcgtccacagctggactcctacaagggatgaggatcagggatgcttccaactgcacccccacggagtaggggttgcggagcaggagcaagccccagcaggacccttatagaggtcacggtcagggcaccctccgctggacagccacaagaatgggggtcaggggtgttcccagaggatccttgtgggacgactgcggtgcctgctccttgagagggtccagccccatggtgacaatgccaaggatgcttgccctaagccccaatctggagaaacaggtaagtgctgcgcgccctactaagggccccagataacacggaggtgccaggcctggaggcaggactgcagtactggcgcacttattgtgagccccacagcctcctcgcgccccgtggccacggggcccagccggggccagcctctgtgccccacgtgccatccgatcgcctgtccagcgtcctctcggcctccgccgggtcctcggggcccgcctcgggctccagcgcatcttctgcagttcctggcagggccgtgtccaggtcagggcccgtggggcgcggcgtccaggcgggggcccagggcgaccccggcgggggcctcggcggaaaccaagagaagccaggcgctggagcgagcgccacgagctggggccgcggggggccggaggaggtggcgtgcgggatgaggaagaagatgtagacgcccgagaccacgaggcccgcggccaccagcaccgccagcgccacggcagcgttgaagacccaggccgggctggccagcgacaagcggcgcgacagcgggcggcccaggcgcagaggcggcgggggcggcggggcgcgggccttgcgcggcccgggcgggggcggcggcggccgcaggtagagaaggccgcggcgccggtcgaagcgcacggagccctggcgagagggcggtgcgcgcgcgtcgcggggcaggagaccggactgcgtgggcaacgcggggagtccgcggcggggggccaggcgcgtgggcgcgcggcacaccggacaggccaccgcgttgccgccgcccgccgtggccaacgataggcgcgccaggcactcgagacagaagacgtggccgcagtccaggcgcttgggcagcttgaacacgccgtcgaaggacgacacgcagatgaggcactccaccggggaggcggggggcaggatagggccggagcctgggctgccgtccccttcctcctcctcctcctcctcctggtcttcccctctgcttggggagcggggcgcagagagcgagcctggggagctgggacccgagccctggggggcccgggaatggcggagccagaacggccgagggcagggcatccggatggacctgggaggagaggaggtcaggcagggaaggaggcggtggagcctggagcgggttctgagaccagcagggaatccagggaagactggggactgtactttagagaggatcccccagtacagagcaccccatcccgagaagggtgtagctagcgtcgaggagcaggggagatggggaggcccgaggcggagactggggataggaatggacccacggggtaccagttcctgaattggaaacggagagacagaccgcagttgaacacggagatggggaggaccccagacagggatggaaaggacctgacccacagaggagcagagataggcaccccccacagagtaatgacagaccgcagccagcctgtgggcgccttcctacctgtggaagcctcctccctctggccagtggcgtgtccctgtctgttcctggcctgccagcagctgggctcaaaagtaccctcccagggggagggtgctcaaccggcaccacccctccaggtcccaggtacccgctggacccgtttgactgcctgccccgccccctgggccagccccaccaggatgaacaccaagcctgtcttggccagatgttgggggcggtggaagggtgatggcacacggtgggtgggcttgggcccaccccacccttcagaacctgatgagtcttctaccagagtcaccagcctgtggccctgggtgggtcccaacctgtccccagcagcctgatgacactgcatggacactggcagaagggaacccgtacagcccacagaaactgggtgtgcaggcccagggtgcagccacaaccagtgtagccggggaggtaaccaggagcacaacctcgccagtgtgaaaccaccccacactccaagaggggggtgaagctaggggtctgaaatcgtgtgccctaaacagctgagctttcctcctctccccagtgctacttcaaggtgacaagcctctcaggatggtcttgtgactacccagacctcacaggcacccaagccacccatccacccagaccacagcaacatctcatgtgccacgccctcagaagttatggataaccccatctcatttccagtacctgctgggacactccaggcagcctggcctgcatccagtgccccacctgctagccctggggtgccatggttctgagtcagcaatacttccaggtccccacaggccaacaggtcaggaaggtgagcagctcccaaggccaccagggctatgccacccacatccccccaccgaagacagacaacagcacaggtggctgggactgccccaaagggcagacaggtttattgggcagcagctgggaaaatcagcggttggacttggccacacgctccagctcgtccttcttcttaatggcataggagttcgaggagccctgcaaggagacacacagctctgaattctgaaggacccccacaaatgcccaacttaagaccccccaaccggagtgccctcacccaccttggcagcattgatgagctcatctgccaggcactcagcaatggtcttaatgttccggaaggcagcctcacgagcgcctgtgcacagcagccagatggcctaggaagacagcaggggtcaggctagaaggacagactgcggtcctccagcaccctggggccactcccaactgatgctgccagccacgttgtcacccataggcccactgagacaagaggtggtggcatcatgcctgatttgcaatcagatagagggtcacaagagcaagtgtccagacacacacacacacaggctgaagttgcgtccccagtgacaggagattgagacctgcctcaacagcaaactgctagacggccgggcacggtggcttgcgcctgtaacacttcgggatgctgaggcaggaggaacactttggcagggagtttgagaccagcctgagcaacttggtgaaaccccacctctacaaacaaaaaaaccgacgacaacaaaaaaggcggccaggtgtg

SEQ ID NO: 1560998 - DNA, 4001 bp, Homo sapiens
acgaagaccagcaaggctctgcccactgactacccagttacaagaccttgtaactaataaactgtaggatttggttttgagacagggtctcgctgttgcacaggctgtcctgtgatcctgtgacctcccaggatcaagctatcctcccacctcagcctcatgagtagctgggactacaggcgcgcaccaccacacgcagctaatttttgtacttttttttttgttgagtcagggttttgccatgttgcctaggctgctcttgtactcctcgcttcaagtgaaccgtgtgcctcggccttccaaaatgctcggattacaggcttgagccactgtggccaatcaattgtaggatgttaacacaatctaattctcttctaatgtataggatgtttctaccacaaatttaatttggaagaaaaccgaatttcaggtgggatgagattaggcagagtagtcaaaagcccatgctagctctgctatagagcactctgctttccccggtaaactgctcaggcaccgaacctcagcttcctccggagtagaaatcctggccgggcacaggggctcacgcctgtaatcccagcactttgagaggcctaggtgggcagatcagttgaggtcaggagttcgagaccatcctggccaatatggtgaaaccctgtctctactaaaaacacaaaaattagccaagcgtcgtggcaggcacctgcagtcccaggtactcgggaagctgaggcaggagaatcacttgaacttgggaagcagaggttgcaatgagccaagatcgcaccattgcactccagcctgggtgtcacagcgagactccgtctcagaaaaaacactaaaagtagaaatcctcattgttttaatgcaaaagcatgaagcacacactggttgttacacatgctttgtaagcgttggtacaaagactctaaaatccagacagacttcctgaagtcgtgaccttggcccaaaatcaccaattccaatttaatttcctcctctgtaaaacaaggataccagtaactgcctcaggaatatggttaactgaactacgcaaaacattgcgaactgtgctaggcacaaagacacatgcttggtgaacacaacttgcctagatcggcctggctctgaaatgtcacccgccccaacaacagactactcacaaagaaacctttccagggccaatccctcctttatacttaagtagctacaccaggagccagggaaagggcccccaggtgtcaggcccaaaagatgtcccatccttgtggaaccattcatcacagctctcgacttccagtaacacgcctcaggacaatcgccaatccccaaaacgacggaaaacgagttcattccagagtgccccgcagccaacagctctcgaccccccgcagaaaggcattgagaattaaaagaaccggagctgcaggggaccccgattaacacctccacgtgaaatcaaagtagcccgcgcactgagcgggataaaaataccttccattttggccaaaactcagtttctcattgccccgagaccgcccggccacacttccgcgtgttcctcatcgctgaggacacacaagggtccaattcggccaagactctaccccagggcccccacccactacccgagttcaaggtaagcaaaatctagttgcaaaatacctgtcctgtgctggaagctctatcaccctcgcctcgagaaggaaatgccacattgtagccaaccctaggcctaaagagagccgcggcatttcctacagattccccttatcccaaaagacttccattttgcttcattatggatgttaagctccgcaaaacatgcaagacagagagggtgcgaccccattccggcctggatcccacccggccccttgccgccccggcccgcgcggagcccatacctgcacctccgccatcttcggcagccgcttggaaaaggaggaggttttgtcgcagggtttcttatcccttgaaacaggggcggcagaagtgacgcaacgcggttgcgcggacggcttcctgtgttttcattggtcgaagcgttctgcgcgtgcgcagagattccccagggaaggcgggccctcttccgaatgtccaatccggacattcttccggttggacctccgcggtcagcgctgtgcccggcgagagatcacgtggggcgcggaggcggtgctgctggggcacggccgtccagcctcggcggccatatttttgaggggctgttcatctcgttcacacgctctgtccgccatgtttgtgagtggaagcgccattaccccttcaagcgactgaaggctgcagggcctctggtggcccgcatggggagaccagacccgccaggcccgcctttccgcactcagtccgggcttactttattttgtgagacagggtctcgctgtgttgtccacaccagagtgctgtggggcgatcatggctcaccgcagcctccacttcctgggctcaagggatcctcctgcctcagcctctcgagtaacttggactacaggggcgcgccaccatgcctggctaatatatatatatatatatattttgttgtggcccgggaacggggggagtctgacatgttggccaggctgatctcgaactcctgggctcaagcgatcctcccgtttcggcctcccaaagtgctgggattaccggcgtgagccccggagccttgcccattctaggcttagagatttggattcctgtgtctggtcgacttcactgtgacctggagaaacccttggccttatctgggcctcagtttatccatctgtaaaacagatggaggtggtcttccccaggggctctaagagtggatcaaggaatggcttctagttgcctggctgcaccaatccactgagcgttcctcagaggaacttctcactttctggactgtcggcctttgcttcagctgggtcccttgcccaggatgccctccccaccccctccaaatctggcttgtcaccatcgcaatgccatttggctctggaaagcctctctgctctccctgcctgggtgagttgcccctcacactgcctctgttttatctccatagtagcctatggcatcctgcacccaggctcgctgaatcccttgtcttctcgtccatagccaaggagacctggggcacctgggctggttctgactcaaatccaggctctgacattgcccagcgccggcccggggctccaggggacctcagaaaacacgtattgaatgaaacattgcattgcaattcaaaaaccaagattctgaaatcaaaactaccccattcacacccatccatagacagacctggccagagctggtagaaaaggatgatttatatacaatttcatggggacaagggctttgtacagagttgggtaaatggggccggtgctggattctggcgttgcctccattctggggagggaatgagaggggcccaaggaagggaccggcctctagccaacttcctctgtgtccaggctatgcatcctctggctggtgactcccctctgtgtgcctcagtatcctcccctgtaaaatgggatgatagatgtctgtctcactgcgttgtttaaggctccgctgagagaggagagggaaagtagcttagcttggggcgggccacagatttatgcccaaaacaactccattcccagcaagcgcttactatgtgctagggcattgctgtccaagagaacgtggccatgatagaaatgttccctatatttccccgggcgcggtggctcatgcctataatcccagcagtttgggaggctgaggctggtggatcaccttaggttgggagtttgagaccagcctgaccaacagggagaaaccccatctctactaaaaatacaaaattagggccaggcacagtggctcacgcctgtaattccagcactttaggaggtcgaggcgggcggatcacctgaggttgggagtttgagaccagcctagctaacatggagaaaccgtttctactaaaactacaa

SEQ ID NO: 1560999 - DNA, 4001 bp, Homo sapiens
tataactggagggacgggaagacagtgagaagctgggacagcctgctcccccgcagccttccagtgaaggggcaaacacatgatgatctggactaaaataatctttatccctttcccccaacccaccgacctagagggagaaagctggcccaggtccttcctggccaaggacctagaaaatcctggctccactcccgagctgtacacagcctagaggctgaaaatacaaatgcaggagaccctggaacagaaccagagacccgagactgctctgcaggcccctgggaggagcttggtgccagcactagaatggaggatctgcaagtcagacctggggtgacccttcccaaagacctcagggcccagcctcaccttgaccaacagcctcaggtagatatcctggctcttgggctccttgcgccgaacctttcggtccttgttatggcggatgtccactccctgtgggggtgaagaggcaaccatggacccaattacccccaaccatagccaattattacttatttctgaaactgagagctgggacacaagcccaggtctgaacacaccagctcaaatcccaggcccaccaccaggagacctgtgggctgccactgatccctctgtaaaaaggggctgtttacaaagccttcagcccatggcacacagaaccctgaaacatcgtaacacagcaatcatattaacttaatacaaaaaggtcaattctttacaacttgtattttgcaacaatgttatcaaaactggttcccatacccggagggataaccaaaaatatcaaaccaatggcagtaatgatgaaaacgaatccttattcagaacctagcaatactactagaaccacctctcctacagcatcagtcaatccaacaacccttaccaaatagtgtctttttaaaacatcgtttttaaagtggagacagggtctcacaatattggccaggctggtcttgatctcctgggcaaggaatcctcccgcctcggcctcccaaagtgctaggataacaagcgtgagccgcctcgccaggctcctaccgccctgctgcctttctgagcaacttaagtttttcagactgtgttgacaattacaagaactatttaatagctccacttatgcagcacttactgtgtgcaaaaccccgtgatgagcatctcctgtgaattatttcttcccaaattcacaaacttgtcagatgagattactgtgtacccaacgaacagccagacactggggcaaaggctcaaaaaccatcacaaggtgggaaggggcctgagactcagagacctgcctggtccccaaatccagttattcggctctcgatcctctcacccgccgcggcccccatcgaacccgacttttcatactagaaagtgacaggtccagataaaggcagcaaagccaaataactaagagtggctgcgggtccagccacctgggtcggaatcctggctctgccacttcctggctttgtaaacccagtcatatcagcctccgagtacctccacttggtcatctactaagtgggggcggtaggctatgactgacccatccctgctttcctggcccccagagtaggtccccagtatcgggaattgctccctccgggcagccgcagaccccctgccgccctccagcgtgcccctagcccaaaaccacggcggatggcagcggattatccagccccgaacgccgcaaagcgagctcaccatgatggcgcctcctgctcggccaggtccggaaagagagaacgggctggggtgggcggggaaagcctcaagcgagtggcgccgccgtgacgtcacatgggtgcgacgcggcgctctaccacgatccggacttctctgtggtgagttggacgactgactagccgggcgataacggcagagagcatagagcgcaggaacaagcgcaacgtccaagagggaagggccagcacgtcgggggcctctctggccctacccaggccgtgttctcgatagctttccggaagaaagggatctgggagcgagatgcgtgtagctagcacgatgcgtcgcgcggtgacgctctggcccgacgccgacggcctctcagtggctcccggaggacccggcgggcccagtgttggaggtgaggaggcggggctggcagggctagtcggggcatctggaaatttccgaccccacgcttcgggcgtttccttatcaggttcaccgctccctgatctcgcgctgcacttcgtaggcgcagccgctgcttgggaagtcctacttaaggtctaacccgagatgatcttgctgcacctcaatctatagcatcctgtattcccatcctttgagttccgcttctccttctcccccggcccctagatggcccttccctgacctagaaagagggagacagagtttcataggggaggcaaaatggagactccgtggcttgggggtggggggaatggaggcccaaagggtaggaaggagacctagaaagaggggtgagatggagacccagggagaagtagtggcaaagaaagatggtgagatggggccttgcaaggctataaccaaattcaaatcctggctctgctagttactaatggggtgattgggcaagtcatttaacctctctgtgatcttgggaaaatcacttaacttctttgggccttactctccttatggacaaaaaggggatgacaacaggcctggcacacaggggtgtttttcaggattatgaaagttaataaaactgctgaggtcaatattttgcacataataagtgctcaataaaaattagccttcactcctattatagcatacatattgtgtgcaaccagatggactggctggggcagtgattaaaatgacttatctactcttccccccacccgccagggaggcccctgcctcttggttctcaggcacattgagcctggaagggcctcctgcagttggctgtcaatgctgctcctcacttacctctcctccacagagctgaaggtcaggccaggacagtgagacctgactccttgctcctaccagcctactatggcttaagacccagggccagggtcccgttgatgtaacagagcagaggaccagcagatgaatggacaccttgaagcagaggagcagcaggaccaggtaagggaccatctaaaagccaagatcctcatactgtggaaagacaaaatctgaagcttttctttaaaaaaaaaaaaaaaaaattggaggccaggcgtggtagctcaagcttgtaatcccagcactctgggaggccaaggcctgcggatcacctgaggccaggagttcgagatcagcctggccaacatggtgaaaccccatctctactaaaaatacaaaaattagccaggcatggtgatgcgcacctgtaatcccagctactcgggagactgaggcaggagaatcatttgaacccgggaggcagaggttgcagtgagccgagatcgcgctgcactccagcctgggtgacagagtgagactccgtctcaaaaaaaaaaaagaaaaaacagggtctcactcttgcccaggctggaaagcagtggcacaatcacagcctactgcagctgcaacctcctgggctaaagtgatcttcccacctcagcttcccaagtagcctccaccatggctggctaatttttttatttttatttatttatttattttgaggtggagtttcgctcttgttgcccaggctggagtgcaatggcacgatcttggctcactgcaacctccgcctcccgggttcaagcagttctcctgcctcaacctcccaagtagctgggattacaggcatgcgccaccacacccagctacttttgtatttttcatagagatgaggtttctccatgttggtcaggctggtctcaaactcccgacctcaggtgatacgccggcctcggcctcccaaagtgctgggattacaggcatgagccactgcacccggccaatttttttattttttctagagactaggtctccctctgttg

SEQ ID NO: 1561000 - DNA, 4001 bp, Homo sapiens
ggcttctgccacggacaccaacccagccccagatgcagttcctgaactcaagtctcctggaacctgtctgggccaacctagctaccacccactgaccagatagccatcacctctcctcacttaacagacagggcccagggaagacagcaccaaccaaggtgtcccaccatgccacccacccgctccctgggtccctggctttctaatcagggaaatggcacataagctctgctccagtcccgtgacccaggcagaaacacaacccggggctctgatgtctgatgtgatgggattacaggcgttgagctaccgcacccgttcgatgtctgattaattcttgagatgcacgatgtcccaagaggcgcaaatccactccagaccccacgtagccccggcctctccatacctgcccacagtagacaatctcccctgaagacttcttcatcttctttaactgagatacaaagtaccagaagcgggacttggcgacgacatgattaggcgcaaagattcgcatgcggtagaggggcggcgtgtggcatttgggggtgggcaggcagcgacccactaccttgtactctcgtagctgaaaggaaacaggagtgagggtaaggccagcacccagaggcaactgtggagatccacctcactccctttcctacatctagtgaccacagattcgggaagcaggaggcagggccaccctagggcctccatgtggattcttggtgactgtaggtcacactcccgaccacaactttatacacaaaatgaactgaggagagggaggtctccagggaggattaattgagttgcctgcctctcctttgcctgggctaagggtttcagaccaggaaagctgtggcttagacccacagcctcctttcttcatgctgcagtcctgaattgctttgcagtcgccgtcaaacagccactctgcacctcaaaacatccagccaacatcttctttcaccctgaggcccagtgaccagcatgggatctcacagcccattccaggcagaactaggacaagacctcaggtctctccccagccctgggatccctgcactgttgccacgcgagctgcggctgcctccgttttcccaactgcaatccaaacgtttggcccagggaagactcccggtttacagatgcagaggtgagaatctttggtcaagtccaggctctgtgatatggcacaaagaaaccacctctgaaactgactcgccagcttttcactagttatcaatgaaaaatagtcacaaattatcgcagttcctacttttactgtgaacctgacccaccggcctcggcacacgttcaggaagggaacaatggggcccgcccctttgacagcaaggaaaccgaagctggagatctggacataatacacccactccatgggagtccaggttctcctatctctgcgccatagagccgtttgattctatccagtatgtaccacagcgttaagcctcacgctccccgtttcggctcactgttagcaattttcatctgcttctcacagccattccggcagaaagaaaacacactattgctctaccgccacgtccacgttgcagaaaggaaaacagaaacttggcggctcgacgaggtgccggggctagggcctctatgctgcgcgacttattccttcccccgggaagaagacccggagtccttgggcccccgcgatccctgagctggcccaggtcacgcatcgctctctccacgcggctcccacgatggccgccatgttgggtgcaacaagagaaggcggcgcgcggccaaggggggcccaaacagaagcgcgcggcaccaacccggcccacgccacttatgcaggcccctgatggggcccgtgccccatcccttggccccctgccgcgccgcgcccgccttaccgtgcccgaggccttcatggcgtgctctccgcgttcgccgccacccgcaaaaggaagtgtcctctgtcgcgcagccgttcaccaggccttcactaccggaagacccgccctctcaatgccgcacgtccattggcttctctgccccgcactcaaagcgacccgcgtcttcattggctatggatccacctgctactcaaagttccgcctctcttcagcgagacttcgtttcccagaaggcaacgaggcaagctccacctgttccaccacgaccgcaacggagcgtctgcgcgcgcggcacgtcgggagttgtaggcactccgccagtcccggctgcaactaggggcggcggcgcgcgccgcctgcaggatgcctaagcattgaacctaagctacctcgggtggctgcggtgtttaccgtgagatcccgatgcttcacactcggggcctcatcctccggggaggtgtgttacggaggtctccaccagatacctgagggtatctgtaaaatgggaatacaaataatatatttttctcctagcgatgttgcagcacgaatattgaataagctctggaatgctgtttttgttaatttggggtccgatttgtgtttcgtagtagctgggattcaaactctgtctgtctgcctccagttcataagaacctgagggagcaggggttgggggagagcgcgcggagagccggagaatggatcaagatccagccgcccactttgaggggcttggacttagcagtttgcttgggcagaaagaagccctcctggggatgaggacggggaccagatatgaaaaaagaaacacccgcaaacaactccctgatgacaaggctatgaagtaaaattaagaggaaagaggcaggaggctgaggcatgagaatcgtttgaacccaggagccagaggttgcagtgacccgagattgcgccactgtactccagcctgggcgacagagtgagactctgtctcaaaaaaaaaaaaaaaaaaaaaagaccaggcgcggtggctcacgcctgtcatcccagcactttgggaggccgaggcgggtggatcacttgaggtcaggagttcgagaccagcctggccaacatggcgaaaccccgtctctactaaaaatacaaaaattagccgggcgtggtggcgggcgcctgtaatcccagctactcgggaggctaaggcagaagaatcgcttgaacctgggagatggaggttgtagtaagccgagatctggccattgcactccagcctgggagacagggcgagactccgactcagaaaaaaaagaaagaaagaaagaaagaaaataaaggacagcaagcatgcaattttttattttcattttcttattttgcatttctggttctcttaatctggttttgtggattcaagtcactactgggtgtgattttcttttcttttctttttcttttattttttgagactgagtcttactcttttccccaggccagagtgcagtggcgctatctcggctcactgcaacctctgcctcctgggttcaagcaattctcccgcctcagcctccagagtagctgggattacaggcgcccgccacgatgcccaggtaatttttgtatttttagtagacacagggttttaccatgttggttaggctggtctcgaactcctgacctcaggtaatccgcctgcctccacctcccaaagtgttgggattacaggcgtaagccaccgcgcccggcccaatgattttcttattccagtacaacttggctcccttcacctcctttgtgccgttaatgtcaaatatgttacctttctctatattgtagacccaacaatacaattaatatatagtttgttgttgttgttgttgttgttttgagatggagtttagctctgtcgcccaggctggagtgcagcagcgtgatctcagctcactgcaacctctgcctcccaggttcaagcgattctcctgcctcagcctcccgagtaactgggactacaggcgtgcaccaccacgcctggctaattttttgtatttttagtagagatagggttttactgggttggccaggctggtctcagattcctgacctcaggtgacccac

SEQ ID NO: 1561001 - DNA, 4001 bp, Homo sapiens
ggcctggttgggggtcagggaggtcctggggtcagtccacctaacctgcacctttagcacacctcgcaggtgtggacagtctcacattgagaagctgagcagcgtgggcccgtggcgggtgcctgggcaggccagcaggtagctgttttcccacctgtccatttcacagaggctcactcgtcatcacggagtactgaggacacagcttctgccacactcatagcccaattctgtccaccatgaaaacactcctttctcatgccagaaagctgccgcttcagttaggatctgatccaggtccagccagagcccacgctcctggcaatgggtatgaacagcttcccaggaaccccaggcccatccccacagcagtggttcaacatcagcttggctgagaggcccagcctcactcaggccagtcccttagtctaggaagggccacccatgtattcggcaatccaagaggtgaaagctttcaggactccccagaacggggtccccaagtgccaagcaattggctgctccctggactacgtgtccctgagacaggaggatcactagccaacagactgcgtttgttgctgccactgagtaaaaggacccttggctctgaggcagttccaatcaaggacctgagaaaaactcactctaaaaagaaaatacagccctgtcaagaacacatgtgaagctggactcctccattagagacccccgactcacacgaacattcagggaatccccaaaaaggcctgcacctgacagcacaatgtatggagtggggtccccaagacctcttctctaacctacacaggcaaaatgggaatcaaatggctgcaaccaacccagcctgtcccctcctaagtgtggtagcgagggcccctcccctgttgtgcctcaatcttcccacctgtgggatgaaaccatccatccccaccctgacttgctttgagaatttcatctgaaaacatcaaccccgtgccttaactctcaacaaccaccgaggaagttcaggtcctttttcatttctccactttacaggtgaggacacgggctcagacgcgcgcggctcacagagctgacaagtcggccgagagggaagccggtacccagaccaacaccctggcgccagggatgcccgccgcgatggcagttaccgctcttcctgcctgacagtaaaaaatcacagctcccagacccgggaaaggggccgctctctggcccaaaccagacaaaactcaccggatctccgcttaatgaccaccacgacacctttgccgtcggctgccggctccacgcccacagtcttgcggtgaatcagtccgttgtagcggaaggaattgcgggccttcaagttattgggctcctgggaaggaggcggcacaaggcatcgtgaataagggacccggagacatgcgaaggtcccgccctctgacccagagtcaagagactcaggaccctcctcccgcaggagccacgcatccgggccccacttacagtgctgtaggtctgcttattcctcttgatcaggaaactggagcagttccgcacgaccatccattgcagatgcgcagacatggcggcggctgcggggaaacgggcacagggaaagcgtcagacacagagaactaaagcagcgttaggccacgggccacgctcggacagcagaggaagagagcgactgggaacttgggtgaatgggagacccctgagggcagacagcgacctagaactcttgtcaggcgggactgagtgacctaaggcggcgggaccgaattcaggcagccgagactagctgcggcgaatgagagtgaggggaaaataacttgaaaattcacaacgacttcacggggaggggttggggtccgccaatgacccttgaggcgcaaggggagaaggcaggcagaggactgagagggagtgcgcggcgggccggagatggcgaccacgcgaggaagacgaacgctcacctcccttcgcagcggcgacctgagacggaaagaggaaggcgaggggcgaggcgacgcctttaataccgtacacgcatttccgcttcctctccgggcgggcacgacaggagttgtcggtccccacctccgaggcggctcgatgatgttcggctgcttccgccgaaaattcgctcaacgctcgggaatattcggaactcttcggttagagggccgagagcgtattccgggaaccgttcggaagttttcgaaactctaccgctggatttccgagtggctccaattcgagaggtcctgggacccatacctcagcgttatctctccagtattgctcacccagcacttgtcactgtgattggcatatgatgggcgctcaacaaacatttgttttatgaatgaactggtgaatgcgtgaactatataagcctagccccggcacctttggatatttccggtcttcgtaagccctcgcggtgatggccaatgagggcgccgaggcccgctcgggtattttcggaaccctccggaaacgctcttgggagaggtgtgtatgttcggaaatactccgtcttcattcggaatccctcggctaatcctggcagccctcttgcagttcgccctccccagggttttcttgaaataaaactcttaaactgtttaagcctggggagaacctacacggaaacttctcgctgactgccaccccaggggagcgcggatgccctctaagggagaattgtttggagggagggagatttgcatgtggcttctcttggctccctttaggattctatagatttgccggtcctcttccctgccctccacctgtgcctccagcctatggtgtgcctgtcacaccccatcagctccctgggaggttatgatccgttgtcagggccaccctaagggggcaggagccttgcctgatatttctctgtgtcctcggcctcacccacgcggcatggtgctggggaggcctcagagactcctactgaacaaaaggaatgagggtgcctgtgtcacctccccagggctccttaacttgcggttacacccgggcactccttggggcaggggcttcgtctggtccataggactatcctccataggacagtcggggttcgcccagcttcctccacgggtgcgctctggacctgatgggtctcgtccgtccttgtgcccgtggcttcattcgctgaacacaggagaccccagaagacacgcgctgagtgaaggaaactcagcttccgcggaacccggagcttcccctcttagatcaccccgactactggttctcgcgtcccagagctccttggtgtctaaaggccttgtctgatctgcactgtctgatctgcacaggcttcgggaggcggacactgagcagaaacaacgccacgcccggctccgagtgtcccatgctgccaccactaaaatgccctgatttttggccatatgtgacctccctgggtggcacgggccctaggcacccgtggctgtgcgcctggctaccaccagctcaggcctctgagcaatagcccctgcacggaaaccacgaccagggtaaccccggccgcgccggttcgcgcccagcccggttcaggtgaccaggcgggagcttggcacacctggcgccgtcccctgaccccgccccggaccgggccgcaccccggaacgctctctctgggcgccagcggcggcggtgcagggccatggcggcggcgccagcggtgtgcgcctcgcaggggagcccgccgggtgcaccgtccgcgccggcggccgcgccagcacccgcggccggcctgggccgctgccggatggcgctgctgctggccgtggcgctggatgtggcgggcatggcggcgctgctgaccggcgtgttcgcgcagctgcaggtgcgcggccgcgacttcggggacctgctcatctactcgggcgcgctgctggtgttcctgagcctgctgggctggatcctctggtacaccggcaacatcgagatctcgcgccaggagctggagcgcgactacggcctgcggccct

SEQ ID NO: 1561002 - DNA, 4001 bp, Homo sapiens
cttactgcttagaacccggcatcactgtgtatcgccggtccccaggaagccctttcgttcctggaggttagcacacctgctgccctcccacaggcccaggcagggctgaccctgactctgcccccaggccaagcgcgcaggggtgacgtgcatcgtcctgccagccgagaacaagaaggacttctacgacctggcagccttcatcaccgagggcctggaggtgcacttcgtggaacactaccgggagatcttcgacatcgccttcccggacgagcaggcagaggcgctggccgtggaacggtgacggccaccccgggactgcaggcggcggatgtcaggccctgtctgggccagaactgagcgctgtggggagcgcgcccggacctggcagtggagccaccgagcgagcagctcggtccagtgacccagatcccagggacctcagtcggcttaatcagagtgtggcatagaagctatttaatgattaaagtcatttgcagtacggcggcttcctcacctgctgccccgggaagggtgggcgggccacggcttttgattcacgaccaggcagcacccggagagggtgtggctcagagcgggcaccagacaggggactgcgggcccccgacacacccacacccacccacggacagcaggagagccagggcttctgtcaagctgttctttatttcagggagagggcaggggaggggctcagtctttcttggcagcagctttcctcatggcggccagtacgttgctcagctcctcccgcttcctcttggcgcggatgtgcgtccccacctgccagggacgaggccgccgtcagcccggccctgactcccatcccaccccgcccctcggccggcagcgcccacctacccttttcttgataaatttgagggcccgtttgtccttggagaccttcagtaactccatggcgcgccgctcgtacggggcaaagccacacacctcccgaatcatgtcccgcacgaacttggtgtgtttggtcagacgctaggggggaaaggggcggccgtcagggtagggggatccctgcattctagttaagcagcttctctcgcgctgccgcgatttccctggctacttcctcccctctgtgggtagctgtgagaaccaaggtattaacgcctagcgcttttcgccgcgcccggagcagctcccatcctccctaagtcccagtctccgcaacactggcaggacgcacctggagtctgggctgcctgctgaataaaggcgcccaatacactgacacacctgaaatccctcaacctcacacaccgcaacctcgggccagctccatgagcgaactccttactcctgcgtcagaaccccaaacccgctgcccgcttaataaaggcgcccaatacactgacacacctgaaatccctcaacctcacacaccgcaacctcgggccagctccatgagcgaactcctactcctgcgtcagaaccccaaacccgctgccccgcgccgctctcaaggtgctccctctgccccagcgtggattgcacggttgggaaaaacccagatgggtgcccgccttcgagcaccaggcaggaagtcccactcccccaccccatctcttccattcaagccccccttagttctgcgcccgaacgcgcgttctttcaggtcgagagcctttgcccaagccatgccctccgccctccaagaaacccccgacaacctccgcgcggcacccgcactcaccccgcggcgtcggctgtgcctgggcttgctcacgttcttggtcactttgtggcccttgttgaggcccacggccatagggtagcgtagggccatggctgcggacagcgacggggagaaggggcggaggtgagtaccggctcagttcccgaggcccagagccccgcgtcccggctccttcagcctcgctcgccacaaccaaccatcctccaacctgcacagaggacccgggagtccggatggcggcggataccggcagtgcgggaaaccacttacctgctgctctccagagacggccgtggcggaagggctggcgccgcgcggaactccgggatatctactcggctcaggaggcgcaggccagagaggcaagaacggcacgcgctccccctggcggctggagtcttccccgccgttgcgctgagcatgcgcgaccgagctccctgagcatgcgcgtttactcctgcgagcccgggagctggagtcggaaccagtggaggtggctatggctgctctcctccctctgcctgtgaaatgagttcgaatcccaactccgcctatttcgggccgaccctgcatcgacgacatcacctctcagaatttcttcacttgtagagcgggaataataataccaaactgtatgaactgttaaaacgcccattaggccgggcgcggtggctcacgcctgtaatctcagcactttgggaggtcgaggcatgtggatcacgaggtcaggagctcgagaccagcctaatacggtgaaaccccgtctctactaaaaatacaaaaaattagccaggcgtggtggtgggcacctgtagtcccagctactcgggaggccgaggcaggagaatggcgtgaacccaggaggcagagcttgcagtgagccgagatcgtgccactgcactccagcctgggcgacagagcaagactccgtctcaataaataaataaataaataaataaataaataaatagccaggcgtggtggcatgctcctgtaatcccagctacgcaggaggctgaggcaggagaattgcttgagcccaagaggcagaggttgcagtgagccgagatcgcaccactgcactccagcctgggcgacagagcgaaactccatttaaaaaaaaaggtattggttttgttatcaattggtcaagctctagactaggtctgaatacagcaacgtgtaatagtgccccttgcggacatctgatgtaatttaggtggtgtagggacgggacgctaaataactgaatcgggtggcagaaacacacaagtttccagtttttctcctttaatgctactaatatacaagaagagagtctcaatttagggctgctctaattagggttagcgctttcatgttttttccagacagggtcttgctctgtcgcccaggctagagtgcactgctgtaatcatagcttattgtagccttgacttccagggctcaagtgatcctcctgccttagcctccttagctgggaccacaggcacatgccaccacgcctggctaattttttaattaaaatatttgtttgtggccgggtgcagtggctgacacctgtaatcccagcactttgagaggccgagacagggggatcacctaaggctaggagttcgagaccagcctggccgacatggtaaaaccccgtctctactaaaaatacaaaaagtcaggcgttgtgacccacacctgtaatctgaactatttgggaggctgaggcacaagaatcgcttgaaccccggaggcagaggttgcagtgagcctagatcgcaccactgcactccagcctgggcgatagagtgagactccgtctaataaataaataaataaagacagggtttcaccatgttggccaggctggtctcaaactcctgacctcaagtgatctgcccaccttgacctctcaaagtgctgggattataggcgtgagccactgctcctggccctctcagcctccatttccccacctgtgaaatgggattgagagtcaaggcccctgatacacacaccccctcccgctgcccgctggctgctagcaaattggaattaccaaggaatttgaacaacagatatgcaagagaagaagagtttttattctcgaacaagaggctgggtccagctcagaacacactctttccctcctcctcccgctcagaccctgccaccaggtagacgaacagtgtagacgcccctgcaggtgtgaagagtaccagagaccccagctaggggaagctggcaggagttgggggggttcctccca

SEQ ID NO: 1561003 - DNA, 4001 bp, Homo sapiens
acctgctgccctcccacaggcccaggcagggctgaccctgactctgcccccaggccaagcgcgcaggggtgacgtgcatcgtcctgccagccgagaacaagaaggacttctacgacctggcagccttcatcaccgagggcctggaggtgcacttcgtggaacactaccgggagatcttcgacatcgccttcccggacgagcaggcagaggcgctggccgtggaacggtgacggccaccccgggactgcaggcggcggatgtcaggccctgtctgggccagaactgagcgctgtggggagcgcgcccggacctggcagtggagccaccgagcgagcagctcggtccagtgacccagatcccagggacctcagtcggcttaatcagagtgtggcatagaagctatttaatgattaaagtcatttgcagtacggcggcttcctcacctgctgccccgggaagggtgggcgggccacggcttttgattcacgaccaggcagcacccggagagggtgtggctcagagcgggcaccagacaggggactgcgggcccccgacacacccacacccacccacggacagcaggagagccagggcttctgtcaagctgttctttatttcagggagagggcaggggaggggctcagtctttcttggcagcagctttcctcatggcggccagtacgttgctcagctcctcccgcttcctcttggcgcggatgtgcgtccccacctgccagggacgaggccgccgtcagcccggccctgactcccatcccaccccgcccctcggccggcagcgcccacctacccttttcttgataaatttgagggcccgtttgtccttggagaccttcagtaactccatggcgcgccgctcgtacggggcaaagccacacacctcccgaatcatgtcccgcacgaacttggtgtgtttggtcagacgctaggggggaaaggggcggccgtcagggtagggggatccctgcattctagttaagcagcttctctcgcgctgccgcgatttccctggctacttcctcccctctgtgggtagctgtgagaaccaaggtattaacgcctagcgcttttcgccgcgcccggagcagctcccatcctccctaagtcccagtctccgcaacactggcaggacgcacctggagtctgggctgcctgctgaataaaggcgcccaatacactgacacacctgaaatccctcaacctcacacaccgcaacctcgggccagctccatgagcgaactccttactcctgcgtcagaaccccaaacccgctgcccgcttaataaaggcgcccaatacactgacacacctgaaatccctcaacctcacacaccgcaacctcgggccagctccatgagcgaactcctactcctgcgtcagaaccccaaacccgctgccccgcgccgctctcaaggtgctccctctgccccagcgtggattgcacggttgggaaaaacccagatgggtgcccgccttcgagcaccaggcaggaagtcccactcccccaccccatctcttccattcaagccccccttagttctgcgcccgaacgcgcgttctttcaggtcgagagcctttgcccaagccatgccctccgccctccaagaaacccccgacaacctccgcgcggcacccgcactcaccccgcggcgtcggctgtgcctgggcttgctcacgttcttggtcactttgtggcccttgttgaggcccacggccatagggtagcgtagggccatggctgcggacagcgacggggagaaggggcggaggtgagtaccggctcagttcccgaggcccagagccccgcgtcccggctccttcagcctcgctcgccacaaccaaccatcctccaacctgcacagaggacccgggagtccggatggcggcggataccggcagtgcgggaaaccacttacctgctgctctccagagacggccgtggcggaagggctggcgccgcgcggaactccgggatatctactcggctcaggaggcgcaggccagagaggcaagaacggcacgcgctccccctggcggctggagtcttccccgccgttgcgctgagcatgcgcgaccgagctccctgagcatgcgcgtttactcctgcgagcccgggagctggagtcggaaccagtggaggtggctatggctgctctcctccctctgcctgtgaaatgagttcgaatcccaactccgcctatttcgggccgaccctgcatcgacgacatcacctctcagaatttcttcacttgtagagcgggaataataataccaaactgtatgaactgttaaaacgcccattaggccgggcgcggtggctcacgcctgtaatctcagcactttgggaggtcgaggcatgtggatcacgaggtcaggagctcgagaccagcctaatacggtgaaaccccgtctctactaaaaatacaaaaaattagccaggcgtggtggtgggcacctgtagtcccagctactcgggaggccgaggcaggagaatggcgtgaacccaggaggcagagcttgcagtgagccgagatcgtgccactgcactccagcctgggcgacagagcaagactccgtctcaataaataaataaataaataaataaataaataaatagccaggcgtggtggcatgctcctgtaatcccagctacgcaggaggctgaggcaggagaattgcttgagcccaagaggcagaggttgcagtgagccgagatcgcaccactgcactccagcctgggcgacagagcgaaactccatttaaaaaaaaaggtattggttttgttatcaattggtcaagctctagactaggtctgaatacagcaacgtgtaatagtgccccttgcggacatctgatgtaatttaggtggtgtagggacgggacgctaaataactgaatcgggtggcagaaacacacaagtttccagtttttctcctttaatgctactaatatacaagaagagagtctcaatttagggctgctctaattagggttagcgctttcatgttttttccagacagggtcttgctctgtcgcccaggctagagtgcactgctgtaatcatagcttattgtagccttgacttccagggctcaagtgatcctcctgccttagcctccttagctgggaccacaggcacatgccaccacgcctggctaattttttaattaaaatatttgtttgtggccgggtgcagtggctgacacctgtaatcccagcactttgagaggccgagacagggggatcacctaaggctaggagttcgagaccagcctggccgacatggtaaaaccccgtctctactaaaaatacaaaaagtcaggcgttgtgacccacacctgtaatctgaactatttgggaggctgaggcacaagaatcgcttgaaccccggaggcagaggttgcagtgagcctagatcgcaccactgcactccagcctgggcgatagagtgagactccgtctaataaataaataaataaagacagggtttcaccatgttggccaggctggtctcaaactcctgacctcaagtgatctgcccaccttgacctctcaaagtgctgggattataggcgtgagccactgctcctggccctctcagcctccatttccccacctgtgaaatgggattgagagtcaaggcccctgatacacacaccccctcccgctgcccgctggctgctagcaaattggaattaccaaggaatttgaacaacagatatgcaagagaagaagagtttttattctcgaacaagaggctgggtccagctcagaacacactctttccctcctcctcccgctcagaccctgccaccaggtagacgaacagtgtagacgcccctgcaggtgtgaagagtaccagagaccccagctaggggaagctggcaggagttgggggggttcctcccagatggaatgaatggaaagaataaatcagggacttaaaggcgcaggcaggagatggagaggggtccatgggtggc

SEQ ID NO: 1561004 - DNA, 4001 bp, Homo sapiens
ctactttcaggctatgtgaataaggtgtatatgaaacaaatgagcttcttgtttagacctatgtcacatccccaaaacatctcactatgtatgcgagaacattccaaaatctggttccaagcatttcaggtagagatattcaccctgtagaacgctttgattctgaagaacatatgatatacaaatcctgagattctggggcttcccagagatgccacctcagtctttccctccctcagttggccttaaattggtccgatctggaatctgaaggctgagagagcgtggcctgagcaacctgatgggccactgcgctcacctgaagcagggggacaggtgtacagacatgttcttgtggcgcttctcgaagcggttgtacttgcggatgtagtgcagatagtctcggcggatgacaatggtcctctgcatcttcatcttggtcaccacgcctaggagcgggggccgatcataggtcaggtcccatgggaaagagggccataggtaacccagggcatgctgggactcagaagcagctgagcagggatcccaaaaagccccatttccggcatcagttttaccaagtggctttctcagcagtgcccacgtgggcatctgaagaccatcgtgaaaacaaacatcatctgccaatgtacctggacctacaagtttgcattcctaaccacccctctcacccaggacccaggagtctgggccccaagacccttctttcagtatttcaggccccagacaccagtaactcccgcacttaccagagaggatccgccctcgaatggacacattaccagtgaaggggcatttcttgtcaatgtaggtgccctcaatagcctgaaaggataggaaagataaaggagtgagccttgggcgggcggttccttaaaagagccaggggcgtggcctcagggaagcaactacaattcccagcagccccagaagccacttagatgcaggcagggcaactcgtcgtgggcacacgtgcaggaacgccaggttccccttctttcttctgaggttccccgcacctccttgggtgtcttgaagcccagaccgatgttcttgtagtaccgcgggagcttctccttgccagtttctcccagcaggaccctcttcttgttttgaaagatggtcggctgcttttggtaggcacgctcagtctacagattatgaggagaaaactgatgagctgctaagtttgaagccggcagccaaccagccctagagaccttcccagaacctcccagaccccatgctctacatttacttgcaaagcgccggcgtccaaggcctggtgccccagaatcaccctctaagacatgaccaccctgaccttacctgtaattcatactcagatctaagcccgaggttatttcaatttatatactccagaaggcctctcagggattgcaaaattcatcctctaaaccaggatcaaccctctcacaccctggacacctttcagcgaggatcattctccaagacccaagatcgcccacccaggattcactccttatgtagtacataaggattcagaattaaataccagacggcaggctccctggattagcccttaggagtccgtttccacagaattacccctgaagaccggagaactccaaaaaaaccttcttaaacttggtttttaagaaggtaagtcctaaaacgcttgagcctccattaacgccaggagcccccaggaattaggaagcactcatctagaaacaaaagcaagcgccctccactccagttaatctctagaaaataatcacggacgcccggaattaacccccgaacttggccgccgggctctgccctcccggacgcgcccctgaaggccaaggcggaccccgcaccctggcatccaaccccgagtccgcacctgaatgtccgccatcttcccggccgcctgaaaaaaagaaaggggcagcagcgtccgggtttccttatcgattacgcaggggctggagaggaagtgacgtaaggagaaacgcagcacggccttgggcggggcctcgagagctgctctgattgacaggctgcacttaaaccagcgggcgattcgggcactgtgaaggactgacgggcgggaagtgctagacggtgtctcgcgagagtcttaggccccacaacgccgggcgcgattatttaggcagggaagatgtgaccagccttcagcccgcccgtattatcgcgagagtcgtacggagtccatcctgtttcggcgtggcgtaggctcccgtgggatttggataccgcgtggctctgttcgttcagccttcaaaccggatgaggcggctgccatctttttgaagggtgggcggccggggagtgctaggagcatgtgtggcggcgtcgccatctttgttaggggcaggagctgcccacgaactttcagaggtgcagtgaaagttactctcggcctagcgcggtggctcacgcctgtaatcccaacactttgggaggctaaggcaggcggatcacctgaggtcaggggttcaacaccagcctggccaacatggtgaaaccccgtctctactaaaaatacaaaaattagccgggcgtggtggcgggcccctgtaatcccagctacttggaaggctgaggcaggagaatcgcttgaacctgggaggcgaaggttgcagtgagctgagatcgcgccatggcactccagcctggccgacagacagcctgggcgacagagcaagactccgtatcaaacaaaacaaacaaacaaacaaaaaacgggctcggtggctcacgcctgtaatcccagcactttgggaggccgaggtgggcggatcacctgaggacaggagttcgagaccagcctgaccaacatggagaaacgccgtctctactaaaaatacaaaattagtcgggcatggtggcgcatgcctgtaatcccagctactcaggaggctgaggcaggagaatctcttgaacctgggaggcggaggttgcagtgagccgagatcgcgccattgcactccaggctgggcaacaacagcaaaaccgtctcaaaaaaaaaaaaaagaaagaaagaaagttactctcgccgagtgcagtgcgcctcgcctgtaatcccaacactttgtgaggtcgagggaggaggatcgcttgagctggggaggtcgtggctacagtgagctatcattgcgccactgcattccagcctgggcgacggagcgagaccgtctcaaaaaaaaaaaaaaagagaaagaaagctactctctcctcatttcatccgcagacgatgatttaattggtgccaggggttggcgtggagcgatccttctgccgtttttctgaagataacaggatcgtctagtagaactttatgtgatggaaattttctatatctgcgctggtggacacggtagtcactggcactctaaatgtggcttttatgactgaggacataaatgtttaactttgattgtgttatatctaaatagccacatgtggctaaaggctactgtgttgaacagcacaagtctatagctgaatattacggtttttttttttttttttttttggacggagtctcgctctgtcacccaggctggagggcagtggtgcgatctcggttcactacaagctccgcctcccgggttcacgccattctcctgcctcagcctctccgagtagctgggactacaaggcgcctgccaccacgcccggctaattttttgtatttttagtagagacggggtttcaccgtggtctcgatctcctgacctcgtgatccgcccgcctcggcctcccaaagtgctgggattacaagcgtgagccaccacgcccggccggtattttatttatttttagagactccctagggtatctctctgtcgcccaggctagagtacagtggctcaatcatagctcactgcagcctcgacctccccagcctcaggtagtcctcccacctcagccttgcaagtagctgggactacaggcatgtgtcaccatgcccagctaatttattt

SEQ ID NO: 1561005 - DNA, 4001 bp, Homo sapiens
ggccgatcatctcgggctgcgggagaccaagagcaaagctgggtgtcagctgatcccgcctgcatcaggcgaccccagcccaccccagccggcagggacggccgcacacaccttgatctccacctggttgaaggtcttgccgttgtagacgcccaccatgctgcccaccatctcgggtaggatgatcatgtcccgcaggtgcgtcttcaccacttccggcttctccatgggcggcgcctccttcttggccttgcgcaggcgcttcagcagggagtgctgcttccgccgcaggccccggttcagccgccgccgctggcgcgcactgtacagctgcatcagctgctcgctggggaggatgcaccaggcagttttgtgagcggcccggcctggggagaccctacgcactccggcggacagagaactaaggcttggttctctccagggacagagccgcagtggacctgtcactgtccattgtagtgactacaatgaacacgccaagtccctctggcacccccgccagatatgcgcgactcacccctcacatgcaagagccaccgtgtgactgcagagattcagagagaacaagcggcccggagaccacagcctcagacaaggtgctgcagcgtacagctcgggccaaaggcctctaaaaacgcaggggaaggcaggtagggcgcagtggctcccgcctgtgatcccagcacttcgggaggttgaggcgggagggtcgcttgagcccaggagttcaagaccaacctggacgacacagagaaacgctgtttccacaaataatcaaaaatcaaggtcgggcgcggtgttcacgcctgtaatcccagcactttgggaggccgaggcaggtggatcacctgaggtcaggagtttgagaccagcctgggcaacactgaaactcgtctctactaaaaatacaaaaattagccggacgtggtgggggggccctctaatcccagctactcgagaggctgaggcaagagaatcgcttgaacccgggagtgggaggctgcagtgagctgggacggagccattgcactccagcctgggcgacaggatgagactccgcctcaaaataatcaaaaattaaaaaataaaagcgcaagccagatgcccaccaccaccctgcctggaaaggacccagcgacctccaccgcccttaaaatctaaggagtctaacgcagccccttattctaagtcacgtgggctacagacaggggctacaccttccaactaagccgcggaaaagtgaacaacggggggcaggttgcaaataagcaaaaacctcaacgtctctggacagttttctgggcgcaagaccacactcagttccaaacccgcgcggagaccgtgcccgcccaccgccgcagaggcgcttggacccccgccccgccgccctcacccggacaagccccaccgctggcccagcccctgcccgcgacccccgcggccgcccttactaggacatgtccagcagctggtcgaggtccacgccgcggtaggtgaacttgcggaaggtccgcttcttcttctgctctacttctgcctgtgcgggcgcggatcgggcgtcagcgggatcccgacacccatctcccggggccaccgggcccgaggacaccgcggaagacgcgcggcgccgccggggacagaagcccgacagggacacaccgcttcgacccgtccccggggatcactcgcggctccgggttacgaggacccggacatgaaggcccggacaggccttcccagccccgcgtcgtcccgacacccaccaagtccgcccctcgccccaacatccagccgcctgcagggtcgggagcaagccgccgtagccgcggggacgaactgcggcccccgcgagacggtcagaggttggatggagccggataggcccggcagagacgcgccaaatcgcaacactcaccatcttgccggatcctcagaagagatcgctttggtccgcgcctgcgcagttatcgcgagactgccggcatgtcccgccccctcggccgtgcgcgcacacgcgcttccgctttcccggcggcgaacacgcgccctctgccgtctggagggcaaaacacaggctgcagggattagagcagccgccgcctgaggtctgcagagccgcttcctccacggagtgggactttggacaagtcgccgcccctgtctgagcctcgggttcgtgctccgtcatctacacgatggcacccacatcaacaagtatttatggagcgcctaccgtttgctcgtaggtgcggtttggcggttcaggtcccactgtgggaggaacacgagaattcattacagatactggagcagggacagggcctcgctgaaaagaaccattccggctttaacagataaaattttgtatataaagttagtaaggacaacacagtgagactgcctctctacaaaaaaatacaaaaatttgtgtacacacggacataaaagaataaaaagtacaaaaaattcccagctactcgggaggctgagccttcagcccaggaggtcaaggctgcagtgagccgtgatcgcgccaacggcactccagcctgggcgacagagcaagaccctgcctcaaaaataaagttaggaatatcactgggtttgttaagatatgtaaatgtaatgtgaataatgatagctcaaagagaaggagtaactagaactatgtaggagtgacttttttttttttttgagacagagtttcactcttgttgccctggctggagtgcagtggtgtgatctcggctcactgcaacctctgcctcctgggttcaagcgattctcctgcctcagcctcccaagtagctgggattacaggcacctgttaccgtgcccggctaattttgtatttttagtaaagacacggtttctccatgttggccaggccatgttggtctcgaactcctgacctcaggtgatccacccgctttggcctcccaaagtgctgggattacaggcgtgagccaccgcgcctggcctaggagtgatgtttctgtatcttactggaattaagtataaagttgaaggtgactattaactatggatgtggcacctggctgggcgtggtggcttatgcttgtaattccagcactttgggaggccgaggcgggcggatcacctgaggtcaagagttcaagaccaagctgaccaaccctaactctactaaaaatacaaaaaattagccaggcgtggtggtgggtgcctgtaatcccagctccttgggaggctgaggcaggagaaccgcttgaacccgggaggcggaggttgcagtgagctgagatcgcaccactgcactccagcctgggcgacagagactccttctcaaaaaaaaaaaaaaaaaaaaaaaagaaaaagaaaaaaaaaaagcacaaaacctctgggaacccgagcttagctgtggcactgtccagggagctgagctctccccagccgtccccacagtcccaagggaagccaattacactgtactcagggagggctgagtctccgtcccgaggagcacaggacctatgtgtcgggcccgtccatgttacccattttcctgcagcagagtgtcctggctggaaagctgattttgtgagtgctgctctttggctgggggagctaatgtaacgggaggggctgacactcaacaccatgatgacctgtggtgtggatagacagccgcccccgcctggccctcctgggagctggggcagcagctcctgaggacatgggagaaggctctgacggcagggaatggagctggcttcctgggctgaggcgttgaggggtactgtctcagtgaggaaactgcactgcacagggatgttgggggtaccccttctcttggttctctccaaactaagtcaaaccttccctgtccccaaaatatgaactggggcgggggggggtggttctggctgtcgcctgaacagtctcacgcctggcacgctgtaggcttccagtttgggacttcatggtcctttttttttctt

SEQ ID NO: 1561006 - DNA, 4001 bp, Homo sapiens
caaggtaaagggaacaagatctgggctccctcctacttgtgtccctcactggacctcagacaccctacctctaagactggttcttagaaggctgaacagtaaggagcattccaatagcttctgaaactcccaaggctgtttcaagtagtcgaaagccatccctggactgttcaggtgccttttctatttcccacctgagctctctgccctttctttgagcctcacaggtttccagaattacagtacaacctgtccctggtccctagacccttcccagctccaggtcttttaccagtgcctctgtctggatacttcctttacctgctttcagctcacaggtctccttccccagttctgaccactttggatcagcttctggtattgggcccagtccttctccccaactaggctggcaggtccatgaaggcaagaccttaagtcatctggatcactgctatgtccccaaaactcaacagagggtacacatacaaatccttcaaatacagtgacagccaataacagtaacattcaacatctgctacacaaaggaaatctcagaatttttattaaattctaggccaggcatggtgatcacacctgtaatcccagtccaggcagaaggatcacatgagaccaaggaccagcctgggcaataaagtgagaccccacgtctacagaaaaatatttctcaaatgagccaggcgtggtgatgtgcctgtagtcttggcaaccgaaaggctgaggtgggaggatctccaactcaggagtttaaggctgcagttcattaggattgtgctattgcactccagggtaggtgacagcaagatactgtttttaaaaaagaaccttataactcaaaaaaaatttttttaactgaccctgcaatgtagatattctttcttttaaaagtagtagagttcagaaggggcagaaatcagactctggtttctttccattctgagccaaagaaattgagagtcccaaaaagggaacagaggaaccccttttacaagcaagcatttaaacagacccaaattcggccgcacacggtggctgacgcctgcaatcccagcacttcgggaggccgaggctggtggatcacctgaggtaatgagttcgagaccactctggccaatatggcgaaaccccgtctctactaaaaatacaaaaattagccgggcgtggtggtgcatgcctgtaatctcagctactcaagaggctgaggcaggagaatcgctttaacccgggaggcgaaggttgcagtgatccgagatcgcgccactacactccagcctgggcgacacagcgagactccctctcaaaacaaataaataaaataaaaaatagtcggtgtcccttcaccctttgggtccccccgccccagtgaggtgagcttcctaacatcccagttctcaaagcaaacccttaatcttcaacaaccccatctcagcttttacatcttctgaaccccaagcccagctctattgccaaataccccactgttctacacccaacacaacttctaaacatcccgttgctgatgccagcccccccagctttcaagagctacaacatctctgtctccaagagtcctccatccactcaacgccggtgccggatcccagcaccttgtactgtagcgtgcgcggctcaatcatctccaggggccgcccgttcaccttgatgagaccattgccgcgtttgcagtgcgccacagctgtcgctgtcttctgtaagatacaagagaaacaggggccccgtgagctccggctccagctcccatgttaccccctagattcctgcccaccgacctctcccagaccctggccttctccttcccctccccttcccatccggcgtctggctcaccttgcgtccgaagacctgcacagactgcagcgggcccttggacggcatggctccgagcgtggactagacaacctcaccgcgcggcgccgcaaccggaaaaggaaagctaggggccaccctggccgcttttcagggtctgcgcaggcgccttgagcactgcgtcgcgacgggagagagctttacggcttctgttgcggctaacgggcggggcgtctggtcagcggcgggaaggcccttaggcgctcagagcgggcgggccctgtgaggcggaagtggcgggctctgtgggcggaaggggcggggcctgggagtgtcgtgtgcggactgaagggaaggctgcgggagtgtgcttcgcgtcctctgtagtcgactaccgcagctcttctttgcattctggctctttaataatctcccttcgccctttctttaaatcagttcccaccctcccaacacctgtaatctttctcccctctggactccctcctccccgaatcccccgcatcagaatcttcctttggaatctactgcaagaaatctggctggattctcagattaaggacttccagaatcctatcctccctagaatccccctccttggggatcctctcccagaatccttttcccctcagagccccttcccctcagaatctccctttcaccagaatgtccttcctttcagtttcctcttcccagaatgtttcccatccttctctcagatggccaaccccaaatgtccctcttaagagtgctcaacttagaccccccttttccctgaatctccctccattcggtcctcgtcccctcagtcacccttcccagaatctttctcttgtcaggacccagtacccctggaatctccctcctccagaatctccctttcccggcaaatccccctttcccggcaaatccccctttcccagaacaccccgccccgcaaatccacaaaaacttttctctcagagacccgtccctcaaaatctacctttctcctgagtttatttcccttccgagactcctcttcccagcaactgccttccctggagttttccctccgttagaatccccctctcctaagagaccctcccccaagaattaacctcttccccgtccccaccctagaatctctctcttttttttgagacggagtttcgctcgttgccctggctagagtgcagtggtgcgatctcgtctcactgcaacctccgcctcccgggttcaagagattctcctgccttaggctcccgagtagctggaattacaggcgtctaccaccacgccctggtcgttttttgtatttttagtagaaatggggtttcaccacgttggccaggctggtctcgaactcctgacctcaggtgatgtgatccgcctcagcctcccagagtcctgggattacaggcgtgagccaccacgcccggccgaatctctctgttttttgttttttttttttcttttttttgagacagagtcctgctctgtcgcccaggctggagtgcagtggcatgatctctgctcactgcaacctctgcctccccggttaaagcgattctcctgcctcagcctcttgagtagctgagattacaggcatgcaccaccacgcccggctaatttttgtatttgtagtagagacggggtttcaccatattggccagactggtctcgaactcctgacatcaaatgatccactcatctcagcctcccaaagtgctgggattacaggcgtgagccaccgcgcccagcccctagaatctctttctccagaatctcccagtcatctttttcctctcccccaaatcaccctccacttaagcctcctccccacagaattctccatccccagccccccaaccccacctgaggaaccccaggattgggttgtcctctggttccccggcagatgtccctgcgtctcaccccatcaagagtctccccagcgaagaggttcctctctcagagctagagggagcccacagttgcctcagtttctctggcagtacagggtctgggatccagggttcaaaagggcgtcgtggtgcaccttgccaaagagggtggagacagggagacactggagggcaggtctggggccagagggaaaagccagcccggagtccagctctaaaagggtgagg

SEQ ID NO: 1561007 - DNA, 4001 bp, Homo sapiens
ctaacactagtcagggactgtacataaattattattggaagattgaaaagagacggggctggcacgaggttgcagggtgtccataagatcagaagtcaagatttaaagcagggactgacctggccagatctccaaccatttagttagaaacagcctgttagagatatggagaaggctaacttgatgatctgagcaatagtaaagacaactggctttttcctgaataactactgtgcaacagacacgttctaaacactctgctttaaattcattcaatccttgcaatactctagtactggtacaataattagtcccattttggggatgagagagtgcacaggcaggttaaccaacttgccagaggacacacagccagatgtaaaagatggatccaaacccagggagtctgcctccgtgtatatagaaaggattaaaccacctgtaagcaaaatatgaacattcatctgtctctggtttcccctgaggctcaaagccacaggtcctcctctcacaaagctcttagaatgtcataaaaacttggagtaccaagttatcgaatgtcacatcacacaaagcaagtggtgacacaaccaagggtttctctccctcttggggcgggaaagagctcagaggagacagggaagtatggtttgtgccaggggtcacccagctccccactctccagccaaagacctaagttcctcaccagctcgcgtgtagaaccagttctcatcgtagggagcaagctctttgtgcttggccagcttgacggtatccacccattcggggactttcagcttcccggacctaagaccaaaacagtgggaaaagcacgattcagtcatctccacaaactaccccatatcccaaatgccctcccctcaacacaactatgctgtgcccagagtacaaagagaggctggaaccggaacacaagccaggcctcacgctgaaaggagccacggaggccccaaacaagcctcgcctgccagggaccggcaaacactggggctcagatgggcaggccaaggcgacagcctccacccgttttgaacctcagtccccaaactcactttttgaggaaggctgccagagctctgacgaactcctgctggttcacgtcttttacagtaactccaggcatctgagggagaaagtcaagcatgtgaacacaggcctggcagagacgactgccaagagcacggaccccaccccaatcctttcgctccagcgcatcctaaaccgtggtaccccccgttacttcccacggccccttcaacgccgggctccggctcctgcgggtctgaaggagctcaccgacgcccacggcctctctggatcgcactaacagagcccggcccctgcgtgtgaggatcctgcgcgaccccactccccagccccgggactccggacgccccacgcaccccgccgctgccccccggggcccacgctcggttcccggacggcgctgaccgggcatgtccgggcctgccgctcgcacgtggccgcggctctagggggcgggacgggcccgcgccgggcgcctcggggccctcaggcacgcgctctgaggcttcggcgtccggccctgccgcctcgcgcccggtccagctcggagcccccgcttaccgtgcggcctccgcgctgccagccaggggaaagggaacgacggggtttcccgggcgcacaagtcgggcgtagggtctcgcgagagttccgaaagctcgcgagagcgagggtagacgctgaggctccgcctctctcagggcgaaagttcgtccccgcctagaggggagggtgtctagtgaggggtggagaggtaaaggggagggccaaggggtcgcgcgtggaggcctgggtttcctcccgcgtttccttctcccggagtgtaatagagagaggatagagagctcctgttcggagctgggggaacttggcttcgtttgcgtcgttcgtggctggaaggaacagtggtggagaatactatgatggcgaaagtacggggcaggatgggtgggccacagctggcgccccacggcggaacaaccccttttccgggtggaagtggctgttccctggccggaagtgggagtagtaagggcggaactgtgacagggaacctaggggaagggcgaggaagaaatgtggctatcatcttccgtccttcaccgccaggagtcgcgagagcgggagacggaagccccacccttctcagggcggaagttgcttcagcacggccggggcgagcgaaaagggaatgaggcgctggaggaggggagaagataagggcgggacaaagcggcagaggcgggaccttagcagaagttagttcagctctgccttctagtgtcggagtctgttcgctcagcccttactttgccaatttagatttacctgccccgctgacctgtgtagctttaggcagtccatttgccttctcagggcttgtctcaccattaaaaaaaaaaaaaaaaaatgagatccccgtttgtccatttaaagtggctcctctggttcatggcgcgtcacatgctctaaaaaatattttttgagtgcctgctctgtgccaggcacaggtaaatattatttggacatttatcatgtggctgttactgtagtgttacatgcatgatctcatttaatccttacaaggcccaacaactaaataacgtggtccaataaaattatgttaacttgttgcaaaaaggaaacactgaaatgtgtgtagctattttcttatgttggaaagactgagaatttaaaacataagagcaaatattagaattttaccccacactgatactgtggctgcaaaatgtgttaattattaataagccaagactcgtatctgttagaaaaattaaaaccaaccatgcttctagcataagatcatatatttaaatcaaggttttacattcatgtagaatgttgttgaaacctatctcatactgtttctaaaacttgagaaaatattttcattatctcaattgtttttccagaaccaacacatacatatttccatatgtattcaaagtgggtaatatatgcatgtctaactggaaatctccaggtacttgggtaatttatattcactttttataatttaagtaattattatttaattttttttgagttggagtctcgctttgtcgcccaggcgggagtgcaatgatgtgatcttggttcactgcaacctccacctcccgggttcaagcgattctccggcctcaggctcccaggtagctgggattacaggtgcctgccaccacacctggctaatttttgtatttttatagagacgggttttcaccacgttggccaggctggtctcgaactcctgacctcaggtgatccacctgcgttggcctcccaaaatgctgggattacaggtgtgagccaccgtgcctggcccccacttttaataatttctaataccagttctgaatcatttacacttaattcatttaagtcatttcattgaatttaatttttttttttaaagctctccagaggaactctggagtgcctgaccaaaggaagagacagggtgaatataggattttgggaagagtgaagcttaggtaaaatttatataaagcagagttttgatggacataaggcaaagcaggcatgtatttatgcaacggagctaacatcatgcctgggcgaggagcagacccaggattctgcttccttggacattagaaagtttagataaatgtacaatgttgtctctaaaaaccgcttctctgagatcatgactgcttctctgtgtcaaagtgacttagactttccaggtaagaatgagatgtcccattttcactattgttatgattttaaagatttttaaaaattctggcagtctgtgattttagagaacacagtttctcagcactgtgtccctggtgttaatttttgtacatgttagtttttacaggttcataattgacaactctgtgaggtggttatagaccagtcaactgagccttagagtcaagtca

SEQ ID NO: 1561008 - DNA, 4001 bp, Homo sapiens
tccacctcccaggttcaagaaattctcctgcctcagcctcccaagtagctgggattacaacagctgtgagccatcgcgcctggcacaacttacaattttttgacttcatgatagcataaaagcaatgtgtgcttagtaaaaaccacacttcagcagagtattcaataaattacataagacattcaatactttattaaaacaggcttcgtgttagacgagtttccccaactacaggctaaggcgttctgaacaagcttaagatggaccatgctaagctgtgatgtttgggagattaggtgtattaaacacatttcaacttgcaatactttcaacctatgatgtactcaccggaatgtaacccattgtaaactgaggaacacctgtactcaccccactggaagggatgtgggaggaaggtcaagcgcctcttccaggtcagaaggggcagaggttggatacaaaccaggcagcctgggtccatggtaaaagaacctccactaagtgaggctggggctgaatcccacgtttcctgcctcaaggagattgcagcaggcccccctcttttcccctctctccagagcgagtcaccccctggctcccagacagccacacctggtgaaggagaatgcggtgacaatggagagaacccccaggttcagtaagctgcctcgtctggctcactacacctagctgtggggagatctcctcgtcagtcacctcagcctttggcgcacagaagggtccagggtcccctgctcagaggctaacactggccgaagagaaaggcaatttcagttggggtgactgtggcaggaaggggctcactctggccccaccaaggtgaggtggggaccaagtgatagagccctgatccacccactctctgaaacttctttgctaataaaacattcctactacgcttgtgttttgtttggggtagagggtgcaatcgacaaacacgaccccccgcctcaaaaaggaaaagcttcgtttggcaagaccgcacggccaggatttccagagtgcggaggatcggtgaccgcctgggagccactcaagaaacctggagaaaccctagtcgtataacccagacaagaacctgagttaacttgaaacacaaacgctttatttaaaggagcatctcagttacgtgtggcggacaaaaaaaaggagcagactgtgacagaccattcccatcggccaagtggtcgaacccgacatccaagaccctgtaaacagacccaaacatgagatgttgacaggccccgcagcaattggcaaactcccgcctccctcttgtcagtctctgtatgtagactctgcctcccaaaccctctcaccctgggcttaacgaagcctccctaccaccaaccaaaggtctatcaaaggggtgtcctctttgcacccaccagcgagcagccaagctcagcgcaacctccgggcttctcgctctgactccaaaagggtgagcacgtcgccctcgcgcacggggccttttacattgcggatgatggatcggctcgtgtcgtccatgaattccacgcgcacctacgggtccccaccggagtggaggaagaagtaagggcgggccgcggaaaggcaccgcggagtgggaagcagatatgaattcagagaacgtgtcggggccagaatacagatcgttaaagggaaccatcagaaccccgtgatgaaatgagaatcggctcccggattccggctggcaggggttagggcagggtagaggtcacatcagggtttaggtcgccggcagtcggccaaatgcccccacccgattacctgcgtgcactgtccctgagaaccggtcctgcccaggaccttggtgacctggaggaaagaagctgggttcagacccggcccgtttggctcctctaatccctccccctgcccccaaattcgggcccccacctcaccctggccagcttgataggctgcacacggctggtgtccatgatggcggcgcggcggcggtctggcggagaggagtcacgtgcttcggggagagcctttataggacgttctagcaccgcccactcccgtctcgcgataccacgccgcgtctttcccagcagccccagcggtggagacgtcaccggctgcgcccttcagtatcgcggacggaagatggcgtccgccacccgtctcatccagcggctgcggaactgggcgtccggggtgcgcggggcggacagggctgcaccatggggggcttcgggctccgtgtgtccgggacccgctcctgctcctcacctccctcctaagccgggacccttcgctctccccgaatctccctgggaacccccagctagtcaccccttcagcccgggaccctctcctggcctgggaaccactcaggcctgggatttccccagtccccgaccttcttagccttggatctgtgggcccggactctggctttgctcttcacctgcaggacccacatccgtttccccgagtgttcatcccctgccttcccttaaaatgcgcatccccggaccatccctggtcccttgccctctcctttcctctctcctggggtgccttgcaggccgacctctcctctcctcttcccacagcatgacctgcaggggaagctgcagctacgctaccaggagatctccaagcggtgagcaggccccgctcgctgcccagcctctggctctgtcctttctccaccaaaaacgaaatctgtgttcctttagacccctgaaacggagggctgacatcctgccaccagtcccctgccaggctgtggaggcagaggtttgcctttaaccttgctgaactccggaggacagccctcctgaaacagcgaggccgggcgtgcattctgactggcaatcaggctagatttgcagtgctcagcgtggccatgttagtcagtgttatccccaagctacagatgaaaaaagaggtccagagaggcgaaatcatttgcctcaagtcactcagaagctaaaaagtggcagcggggacttgaacccagaagtgtcctgatttcagactcatttatattaaaatattagttgatatttacaagcccccgtcatgtatgacctcagccttgggtttaactttgtgaaccaggaaagttcttatccacattctttcatggacgccacattctagggagaagcatagtagggaaacaaacacagcaggtagtattgttctggaatgctttgaagacaaaacaaaataagtggaagctggagggtggctacgtaaagtcagatgattgggaaagatctttctttggaaattgacagttgagtcccctgaatgatgggaaggacccattcaaagaataattattgaaaaaacattctgaccgggcgcggtggctcacgcttgtgatcccagcacttggggaggctgaggcaggcggatcacgaggtcaggagtttgagaccagcctggccaacacagtgaaacacagtaaaaccccctctctactagaaatacaaaaattagccgggcgtggtggcgcgcgcgggtagtcccagctactcgggaggttgaggcaggagaatcgcttgaacacaggaggtggatattgcagtgagctgagatcgcaccactgcactccagcctgggtgacagaacaacactctgtctcaaaaaaataaaaaagaaaaaacattctgagcagagggaacaggaagggctaagagtgtcaggctggacagagcctgagtggaaggaggccagtatggatggaacccattgagggaaagggataatggtataatctatgaagtcaaagggtaggcagaggtaaggcagtcattgaggattataatgaaaggaagaaaaatagcattaaaataatgaaatttatgtaaatgcctatatgttgtgactaattccaaatattagaagtatcaaactttgttttcaacttttttttttttttttttttgagacggagttttgctcttattgcccaggctggagtgcaatggcacaatctcagctcactg

SEQ ID NO: 1561009 - DNA, 4001 bp, Homo sapiens
taaaaaaaaagaggaggaaagtgaataaagtgcaacccaagttatattcatctttatatcaatgcagtcacaaaatataatttcaaacactttcttttaatggaggaagggctcacaaaagctaaagttcttaaggcccacaaaattcttaatgatgccttcatggggaggggaaaaaaagggtatgtgtaaaaccgtacggagtaggaacaaagtaggacaactcacacttcccaattgcaaaacttaatacaaagcaagaaagtgtggtactggcatagagacagacatatagaccagtggaatataactgaaagtctgtaatgaaacccatacatctgggccgggcgcggtggctcacgcctgtaatcccagcactttgggaggccgagacgggcggatcacgaggtcaggagatcgagaccatcctggctaactcggtgaaaccctgtctctactaaaaataaaaaaaaaaaaatcagccaggtgcagtggcgggcacctgtagtcccagctactcaggaggctgaggcaggagaatggtgtgaacccggtaggcagatcgcgtcactgcactccagcccagggaacagagtgagactccgtctcaaaaaaaaaaaaaaaaaaaaaaaactacggccagctgatttatgacaagtggccaaggccattcaattgagggaaaaaaaacatctctttaggagatggtactggataactggatattcacatgcaaaagaatgacactggatgttatgtattttactacaaaaacagtaacaaaaataccatatgtgagatgtgatgctccttctggtgaaggagtcctctcatgacagaagttgtagtcatctttgaacaggacgtaagagcagatgtggtagatgtggtggtcaagggatcccttctttacctgttatgatctctattcttgacttaatggcacagcaacaagtttgatgtgtgccttcctggaataatgtccgcccccagccaggaaggccaatcaccaagttcccctcacctgcagggaaatgtcattgatctgcacatcatcggtgctccacttcccaaagagcttgatgtctggggtctctgccaccgctggtgctgctgtctcccactcggtcatcctgggacagggtgatgacaggaaaaaaacgtcagagctcagctagcatggagcaaaggcgcactcattcccaactctgaggctagccgccatctagtgatgaactggggggtcgcaaaggaccaagaaaggccgtgaacgtgttttcaagcactagaaaaattactcagctgtcagcaagaagcatctgtctttcacctagaacccctgggcccaagacttggcagccaccagtcaacagctgctgcactgggaccaaggtataatggctcagcagatgccatacgtcctcacactgcatgggctgtaattcaaaccacaatctcgcgatttacatggtctttgacccaagtcaacgttccgtctcggactgtttctttggccgtgaggcgggaccgttatatgacatcaaggaccacggtaggtaccgtgtggcacaatcaacccaaaggtttcgattcttgaccgacagtatgaaggctctaggggctgctattacggggggaaagttacacagagcaaaagagggcatcgtgtccctaagaaatggaaacttcctatctcagagtacaaccgcatagttcaaaccaagttccccaagccccgctatggggaaaagctagaagcggcggagcaccagaaagaagtcaagagtaactcggcccgcgcccgtttcttctacattttcttttccagagacagaaatgagacctaatgagaaaaggcccaggccgcggggcactatccccgaaagaccatgaaccgtccctaggatccccggccccgcggcggtctcacctgagaacacagcctgagcgtctctgtcactcggcgtagaccacgcgccgccctggtacagacaggaagaggccgcgcgccgcgggccaacacttttaactgggaagaaaacttccgggtcagcacgggtgacgcttgcgtaaaaggccatcgtgtccctatagaccaatccggaggaaggttgtagaggaaccttttgggctagacggaatgggtgcagcccaagcgcatgcgcagttgcagaagcggccctagaagcgtgcctggcggatgtccgctaccccgtagttgccctgtcttgtgggcgcctgcaaaagcgcagagatttccgtgagaccaacgcagccatgtctaataaagaaaaaagtctggccagcgctcgcttctttgttcagctgctgaccttaaatcccacctgccgcgggagtagccagttcagttccctctgactcctcgccgcggccacagccgcctcaccggcacgcgcctgatgcggacctgggttagcggagtgaggcccagtggtcaccgccgccctccgcaggtccaggttgccgtgcgcatgtgcctgccacacgcggcccctcccccaccgcccggcccaggagcaccacgctcgcgagccccggatcccgagcctctggctgggcctgtttccctgctcgacctttcctgccataccacgctgggttcccccacagcctccgcgcccttcacctctgctatgcagtaatctcgcccgtggaagaggggagaccgccggcacgagggcccggggttgcggcggcgggagcagcgcgacccgtctctgggtggagcgcggaggtagcctacaggctacgcgcggtgtccgggaggagggggtcggcaggtcggggacccttcgtgtttgtccttgtgtcctccacggccggggagcccgcgcgaggggttgcagccccctgccctcagggctcacgtcacgaggccctcgtgtctgcagacgtggctctcaggggtgcctcttgaactggccgacctctccaagggtcagaaacgtaggtttctggccaaaggttgaaaggagggatggaagatttagccatgagatgaaggagattattcccgccagcacacaatcccctgccccccaacttctgtcccttcccccagctgcctctgaacaggtagggcctctgaacagctcagccctggctgggagcagacagcgaaccctctcacagggcctgaactattgcgtgggattgaggatgtgggccttcgacccggggtcctcatccgtgcgtggggttggcacggtagtgagtgccccagctcactctactcacttggccaccctggcagccagtgtggacagtctgcctgcccatgaccccttcatacccctctgcctgtcccagcctcttagatctaggctcatgagcagaactgggactttccagaggtagcaactactttgactgtgtctctgcctgcagcaggcatagacataacctttacgaggcgactccaggaccacctggggccgccctgtctctgatgcccatctctgcctccaaggggttatccctccaactcgggatccgaagggcccagccacctgacccaggtcccagggctgggcctgccccctactcccatccctgaggcgtgcacatagcaggtgcccagcagctgtgtttcttcactgcctgactgtaaaggctcttcttaccccaattctggggcgtttctgtccaaatatgctgaggactccccacagtgggcccttggactgtggtcagtcacagctcatgaaaggacacatgccctgaagctgggctggtcaaggggtcagacctcagcctctggtgaggggcacggcctactgccaccgcctaatggcctttacccctgccctccatcctgtgcagagtagcagccttggggctcccactggggtctgtgtggttgcaggaggggctaggtgggcttctccctggtcttgagtgaggggcatgggggtgctggttgtagggagggtgggagaaaacaggcagcactcatcaggacagtgagcccacccctctga

SEQ ID NO: 1561010 - DNA, 4001 bp, Homo sapiens
atctgcaagcctgggacaaactgtgataatctgtagctaaacatgcgccaggactttctcaacgcctaacatggatgaccactctcatgcctaacagtcagggctcaggtgtagagactgcttttcaccataaatcatgactacccaaactcaggcaaaagcagcgtctcaggatatacaaatgccaatcttggtcatgccaatctgctgtagaaagcactccaataacaccgcatctcagagtagattttaaaacaagatggttaagatggtacattttcaatttaatgtgtatttcaccacaattagtaaagtaagcctaagtctatgtgatctgcatgccctcctaaagtcatcacctgaaatgctgttccctgagacattttacaggttctctcctgttcaggcctttgctaaataccacctaaatgtccttgaccagcttaaaaaaacaagcaccagcctggacaacatggtgaaaacccatctccactaataatagaaaattagccaggcttggtggcccatgcctgtgattccagctacttaggaggctaagacaggagaatcgcttgaactctggaggcggagtttgcagtgagccaagattgcgacaactacactccagcatgggcaatggagcgagactccgtctcaaaagtaaaattagccaggtgtggtggcgtgcgcctgtctgtagtcccagctacttgggaggctaagataggagaattgtttgaacccaggaggcgggggttgcagtaagccgaaatggcgccacggcactccagcctgggcaacagagcaagactccgtctcaaaagactaaataaaacgagaaaacttaattaaaaaaacaataaaccaagcaaatgtgcaaaccctgttatcaccatcacttagcccagaaattccacttcatagtctactctcatccactagcaaacaggccacataaacagaatataaagatatagacgggtgcccaggtgtgccaggcctatctttagctctggtcattactaaactgaaggtccaataactgggcaaaaaagccacacacctaagaaacagggcaaagactgatccagatacacttttcctactccacaagtgccactaaaagttagaaggctggttccatttatccaatgacacaactctcatcactggaacagaggcaacagaagggagaatgaacctcacaagccctgcaccccatccctctgctgtggactcccatacgcaccttcgaacagacgccgtgggtccttctcatcaagcgtcagcagttcccgggcggccttgcggatcttggccagggtaaatttgaccctccagacctcacgtttgttccggagcccatactcgcctggtggggagaagggggtggacaagtgtagtcccacgtactggcacaacaactagactggcagctttggaatcacaaaaccttcctaaaccacgaatagtaccaaatttaggggacggactagatagagtacatgggcaccttcatccacgtgctaaccgcctcccggaagccgaaccacttcccggaagccttggccactcaccgatcagcttcagctcttggtcgagacgagatttctcgaagggtctccgcggggtcacataagttttgcgacaaacccagctccgggccactggcatgttggctccgcttccccgtctgcgcctgcgcgggagagaagtgtgagcgtaagggatccaaacggcgcctgcgcagtcccacaactacgccaaaacctcgcggagcccagatccgatctcgcgagaataacctccaacgctctcatagtcagtatctgcccccacaaccgtgctgcactcccgttcaaccaccctgctctgtttcctaacgtctttagcttactcatggaaactcggaaggcccgggccaccatccaacccaaaccctagagaaaaagcacaccaccgcacctcacctaagcaaaccacccggtcactgagaaagaggcgcggaagcgccacggctgcgctcttatagtaacgccggcgtctcgtgacgttttcacgcaccacgcacgtcagagccaatcagaagaggcgttggctggctgagaagcagtggagacgtgaggctgggctagagcggcgtgctaacctgggaggactaggttttttccggccagggagtggaaacctgagaagtagggagaaccttccttctccgcccctggacggtggtttttctttttctttctgagacagggtctcgctccgtcgcccaggctggagtgcagtggcgtgatttcggctcactgaggccccgaccaacctctcgggctcgagcgatcctcccacctcctccccagtagctgggattacaggcacacgccacgacgcccgggtagcattttttttttttaacagtcggcgtcttgccatgttgcccaggctggtcttgaactcccggcctcgagagagcctcccgccgtggcccccccaaagtgctgggattacaggcgtgagccaccgcgcccagccgagattatttctgtcactaacaataatgtggcattctggaacgctatgtgccacatactgttctaagaattttaaatgtatttactcaatcttcaatacatacttacagagcactctcagagaagttgcccccccacccatggtactattattatcaatagccacttaaggggtattagtactattatcagtaatttattttatttttgagacggagtttttcgctctcgtcacccaggctggagtgcagtggtgcgatctcggctcactgcaacctccgcttcccgggttcaatcgattctcgtgcctcagcctcccgagaagctgggactacaggcgcccaccaccatgcccggctaatttttaaatttttagtagagacggggttttgaactcctggtctccaacgcctgacctcaagtgatccacccgcctcagcctcccaaagtgctaagattacaggtgtgagccaccgcgcctgacctagagttctctttttatatatagtctggttattgtctgtctgtacacccatctctccactccgaatgcgatggtctgtctccacagctcgtgttcttcagttgtcttccctacgctgctgcctcggcagtcactatctcctcaggaagcagtcccacccgcccctttctcttccacggcatccacaccatccggatgcctggattcaaatgccacgtcaccacttgccagctgcagtgccttcgacaagtttctcaatcactctgtgcctcagcgtcctcctctgtaaaacggcgaatgatggtagcgcctacctcataagcttgtgaggattaagtgagagtctatccagtgttgaggagagtggcataaataaagcgcctagtggtagctaccatcgtcattattgtcatctgcattgtacttccatatcttacaaactaccttgttcagttttatgggttttttgtttgtttgttttgttgttttgagacggggttttgccatattgcccaggctggtcttgaactcctgggctcaagtgatccactcgcctcagcctccccaagtgctgggattacaggtgtaagccaccatgcctggccaaattttatgcatttttgtatcttgaacacgcgtatattattcatctggaagggggaaacgtggaaggaaaaaacttccataagttttcactcccttcaggatgaagtccaagctccacaaattccgggtgcctcgtgattacagagatggttttataatggtggttgaacctgtaggttctcaagtcttaaaaaagatctgcgtttgaacctcagcagtcactgacgagctcttgatcttaggcaaattagcctcttcaagagtgctaaatgggagaaagtaacaggactttcctcatagggtttgatgatttagagtaaaaaaaaaaaaaaaagaaaagaaaaccagcacagagtcttgtgtactgaaggtgcttaata

SEQ ID NO: 1561011 - DNA, 4001 bp, Homo sapiens
cccaggggaaggtcccggttccaatccggctgcggagaggctgccccaccctcgggccccagcccctcccttcctgcctgggtcctgcccgctgccagccaagcctttggccagctctgggactgcctctgggtgcaaggggcccagggctggggcctttctctacacaagcagggcttcctcccaggcccttgaaggggtctcttggtgggggtgaggggggtgtcctggggccccggggcctctgcggtagcatgtcaggccaagacacttttctaggatttctttgaagctgggaggacctccctcaggaatggggaggaggtttcctgggctggggtggaatttcaggaaagggggtgatgtggaggctaggggtctgaaggctgcatctgtcggttagaggggtgcttggtgaggggcttgtcctggagggaggctgtaaggatcaagccctgggagggattgtggctctgggggtagttaggggcgtgacctcagagcacagcgtgagaagctcagggctgagaactgggagccagcccggaggtggctcaggggttttgggaggttatagtatatacagtcttagaaacattgagttcatttatggggtcagagaaactcccaaggaatagatctttctgggggtgccaagaatctgggggcttcttccatggagatgatttgagagctattcagggtttctgagaggggctcagggagttgcagcggagaaagcatgggatggaggaggggctggttttccttgggggtggggtgggagagtggaggtttgggcctccgggaatgggggattgtcaggacttggggtcttggagatttctggaatggccaaggggcaggatgtctttttaaatctcgggtcggagagcaggactctcttaggactgggtagtcccagaagagtctcagggccagggtctgggtagaatttctagattctgggggcagtcatggaaggggctaagaatcaaacgtggggccgggcacggtggctcatgcctgtaatcccagcactttgggagtccaaggcaggccgatcacgaggtcaggagttcgagaccagtccaatatggtgaaaccccgtctctactaaaaaatacaaaaattagccaggcatggtggcactcgcctgtagtctcagctacttgggaggctgaggcaggagaattgcttgaatccaggaggcagaggttgcagtgagccaacatcgcaccactgcactccaccgcactccagcctgggtgacagagtgagtgagactctgtctcaaaaaaaaaaaaaaagaaaaaaaagaatcgaacgtggtggaatctcaaaggtgctgggcactggcattctcccaggaaggctctcaatggcttagaggggaagttggggactgggatttgggggagatagggctcagggtggtggaaggtggcaccaagggcgtggtgggggtcctgggagtgcttagggtccgaatggggtgagtattttgtatttagcatgctcccaggaggtgctcaaagccaggtcagcaggtaagcggggtcttaggcactgggagagggaatagtgggtctcgggatgcgagtgcagaaggaagggtcccccgtgcaggggatggaggctctccaagagtttaggttacaatctgtggggatcttttaagattagagggccttataggagggtctcagtgatgggtcaagggggaaaaggggtctcggggatccccccaagggctcagttctgggtcccgggggacaccctcccgggtgagggcccactacctggatgaactggatggtcagcgcgctcttgcccacgccgccgccgcccacgaccaccagcttgtgtgtctcgctgggcggggggtccccgggcccaggtcccccgccccggggccgcccccgccctgtcccggacgccgccccgctgctcatgtcgccaccgctgctgctgccttcgctaccgcctgcgggggagccgggcgggacccgggggggcgggctacgctaatgaggctactgcataatcatgagctctggcaaggagggctcgcgtctccggacacttaaggagggggacgggccaaagaaagggaggagctatgttaataagggaaagggaacggcgttcgctgcgaaggggaattccgaatgaggcggggctatgctaatgagagacctgtgctttgccctgagcggcgccacgcgctctcagcgggagggcggtctgtgggcgtggctatgctaataagaatttattctttcagcagacggggcggaaagttcctcaggggaggggctatgcaaataaggacccctgtgacactgctgcttggggcatcgtctccgaggccttagtatggtaggcggagctcgtcgactcgcgcgcgcggccgtatatagggcgctccgaggaagcagcaggttttgaggagtagctccacctccctcctgggatcctagccaagctttcgaccccggcgtctgggttagaagctagagtctccgcccgctaagggacccaggcttccggttcccgctgtcccagccaagcggaagacagactgggaggagagtggggccctagagggggacagcagggtaacggggcagggaggggccgtgagatcactgcattcctaatccatgagccagctcgcccaagtagggatgcctgggtcatgaagagcctggggccaggatttctgggtcttgaaggagaaggaagcagagggcccagactcctgggtccttaggagaaaatggggctggagatgtggactcctgggtcctggggaggagggtgtcagggaggaaggtagacaggttccttcgtactaggttcggtaaaggagggagccgggggcctggactcttaggtccaggaattggagaggctggggacccaggattctggatccgagcgagggcactggcttggggggacccgaattcgtatgtgagagcttgagaccaggactagtctgggagaccgactcttggatccgaggaaggaagaatcagactcctgagtcggagggaggagggaaataggagtctggacactgctctgagtgagaggattcggaattcagacttctctgtactgaacgaggcggctatggggtcgggcttctaggttctaagtttatttttatttgtttatttttgagacggagtttccgtcttgtagcccatgctggagtgcaatggcgcgatcttggcccactgcaacctccgcttcccgggttcaagcgattctcctacctcagcctcccgagtagctgggattacaggcgttagccaccacgccaggctaatttttgtatttttagtagagactgggtttcaccatgttggtcaggctggtcttgaactcctgatatcagatgatccgcctgcttcggcctcccaaagtgctgggattacagacgtgagccaccgcgcctggcctatttttatttttttagaggcggggtctccctatattgcctaggctggcttctaacttctaggctcaagccatccttccgcctcagtctcccgagtgggactacggtgtgcgccactgcatcccgtctggttctaaatttaggggggcctagaggatctggattctgagagccccagaatgtgggcagcacaacatccagcaagtcgtgctcactccgccggactacaattcccttgcgtctgttctgcctggcgcctcttacgtcacctcctgttccgccaccctttccgcgcgcgcgcagggcactgtggggcgtcatcgcgggctaccgcggccccgcccacttcacctctcaccccattagctgtccccgcgcgacagaggcggtgcgcggactacgcctcccggcgtgcatcgcgcggaccccgccccatgtgtcccattggcttctgggaaaccgagtgcggttgccttcccgccggccttcacgtcgccgtgctcggtacttgaaatcccggcaagctcgg

SEQ ID NO: 1561012 - DNA, 4001 bp, Homo sapiens
caatttatttttttgagatggagtctcgctctgttgcccaggctggagtgcagtggcacgatctcggctcactgcaacctctgccgcccgggttcaagtgattctcctgcctcaacctcccgaggagctgggattacaggcccatgctaccatgccctgataatttttgtattttttagtagagacagggtttcgccatgttggcaaggctggtctcgaactcctgacctcaggtgatccgcccgtcttggcctcctcaagtgctgggataacaggcgtgagccaccgcacctggttggacccccactatttcatgtgttccctagccctcttagcctcccttatttttcacctgagtccttagcttcagtttatcactttttctgtttcttgtccactctcctagaatgagagcatcctgggtatctaatggaggctgagagcagtgttttgtgactgtagctaagtggctttggcaagtatcttcctcaggcagggaggtttagttgcaggataagagggtctcaggagggctgggcacggtggttcatgcctgcaatcctagcactttgggaggctgagatgggcggatcacttgaggtcgagtttgagactagcctgggcaacatggtgaaatcttgcctctactaaaaatacaaaaattagctgggtgaagtggagcgcgcctgtaaccccaactactcgggaggctgaagcagaagaatcacttgaacttgggaaggagaggttgccctaagccaagaccacgccactgtgctccagcctgggtgacagggtgagactatgtctgggggaaaaaaaaagcaagagggcttggggagccaaatcacgtgttctggaatcctgactctgccatatcctagctgtgtagttttgggtaagcgacccaacttctctgtgtctcggtctcctcctctgtaaagtaggatgagctgatgtgctcatctccggtgagaattaggtgagtgtgtgcagtgccagcacatgtctgggaagtgaatgctagctgttgttggcattgattccgactcagctgaattagagtcactggttttccatgagggatgatcccttgtctgactgactgaggcaggcacttcgggtggggcccctccctgcctgggtcccccacccgccccactcctagcccctgctcacaggctgaggtcgcaattgatgctggtctgcagcaggtaggccttggcgttctgcacggccagctccagaggctcgggctcaggcacctgggcactgtagtgtgggaagcccagctcagagggcaagaactgaagggcagggtcatcccttatgtaaggcccgtgctgggcaccttcagagaactggtctgtctggtagaggttgaactggcccaaggggttgactgggggctcctggaaggtggggtccagttgctggaacaggctgctttggccctgctggagccgctgcagcattaggctggtggtgagctcggcgacctgcatcctgctttcatcagagtaaggctgaggctggaactctgagggaaagcccgtgttcacagatgggtactccatgccacccagccgggcttcctcagcctggaagacctggggcatcagcaagttctcctgttgggacaggctgcccctctgtgaccaaccaggggcgtttcgctgggcgtctggaggtatctgctgcctctcctcggggtccgctgccagggcctgagcttggtcccgactgtgccgcctctgggaggcctgagaagtcctccggcccggaggctgctgggcagggcgctcagggtagggcggcaggtctcccatggttcgccaggaggcacagatctctaggagaaaggcttgcagacaaggaggccaagcgagagccacctgtcgacaccgccggtttctgagcaccgagagagggggccgttacccgtggagggcgcggggagcgggccagggtgggttccgcgcaggctctgggcgcgcactcccgatcccgcgcagccccacggtggacgtcgcgccagactcgagacggcacccgcgccccaggcccgccatccctttttttttttcttttcagtaacttgcccaagttcacatcttttatttctttttaaggcaaagcacccgcaggtcaagccccgccccgtcccccagccccgagtccctgtcccaccccctttccccctcgagccccgtcagctgttccccttggcctcgggttccctggcgtcctcggcagccgggctgggagtcttcatagcatcttctccaacaggtgcgagggtctgggggctccgctcctccttcaaggtcagcccgcccgctgccgtctcctggtgaccggggaaggaaagggcagccgggtggagggcgcggtcacctccacgctccccttcaggccctgccccctgatggcccctcctcccccaccttcaccccggcccagatccggcttcttccttcgcagcggaggctgctctccctaccttgggtagggggccctcgagactagagtccaacagcgcggcctcggtcagccccgagtcgtcatccatgctgatgaagatgcccggggtctcgcactcaggcccctcctcccggaaatccatggcttcctcagacgggggcgggcctggccgggccgacggagagggagagggggaggaagaggagggggctcccactcctcccggcttcagcttctgttcctcctccagctgccgctttaaggccttctcctgggccagtcgcaggccgatgaggtcctgagggggccggggtgctggggccggggccaaggtcaggggctccagatcatcctggggatagggagggccacacagaagctcagaggtgggtggctcagaggacggccggaaagagaaggaaccaccctgaggtggtctttgagttcttcaccaagagcatggggaggaaggggcagttgtcccccagacccccaactcccagcaggagcatcccctgggagacgggtggcccagaggcaggggtggcctgagtctctcggggtcaggaggaggccatggtgagccttgctggcttggggtagggggtgggagtctggggatccagatgggtgggctgcagggccctcacctcctccaagggccccgcaggcgcctccttggcctctggctcctgcttgccgctggcctccaagatggtcatgatggagttagggatgtgagcttgctgggtggagagcaggaagggggcgctgggggcagctctggcacagagaccccatttgcacacctcaggtccgggggccctaaccctccagaactcccagcagtgcagggccttcttgtgtccgcctccatccagtccccaccaaccagagggacccagggggccgcccaccgcacaccctgggtggggggaaagggtacctggtggggggaaggggtacctggtggggggtgaaggagcggacatgggccagcaggggctcccggagctctgggcacttgtcaaagacggctcccagctgctggggcggcagctgcaggatgacctggaagctctggggctttgtgcgctggcagcacttgatgaagccctcccacaccttggggtacttccacacctgaaccagggagggagggagccgtcgggagaggcacacaggcatccccccgagccttgacactgggagaaagaccttgccaagaccatgcccaaatcccaccatccaagattcctctggatgggcaacaagcagccccgacctccctccagaggcctttgtcttcccgatccaggcggctggaccacgagggcaacttgggaagggggtggaagaaaactcagccgccttttaccagagctccccctgggccaggcccaggctaagtgctgcgggagcacctctcatgacattctcacggcagcctccagggggcgaaattacccctgctaaacagcggaggtccgtgccggtgccgggacctgtcctgggtc

SEQ ID NO: 1561013 - DNA, 4001 bp, Homo sapiens
aaagaaaagaaatcgcagggctatgaaaagccacattgccatatggcaggtatcttaaaagctgggggcttctcatgcctcgcccctatctacctgggctctaaacattaagctgcatctcttaaaccttggccctgttggaggccactcccctttacacagaaggccaagcaaactgcaggctccgccctcttccccgcccaagtcacaacccacgccccttgcccccgcgtctcctaccaggcctggcagagctcctcgcagagcggctgtgcctggcgtacccccaatagccgcaggcggaagcgactgcgaagggcacgttggaggtgttccaggaaggattcgcatctggacgttgggagagatagggtcggatgggtcaggacccgagggagttcctgggcaatgggcaaagtacgcgagaaaacggtggagggtgctgtactcactcagggctcggcactccacagcgttctggatggtttccagggcccgatgtctctgttgtgtccatctctgagggacaacaaggtcctggcaaaggggaaccctgtgagctagggtcttggatattcaggtaaggtttgggaactgaggcctggggatcccctggacaggggagacaacaattacatcaatcctcacaaacccataacttaagacccttcctttggaatgcaaatgcagcttcaagtagtaataatcatttcttgtttataataatcaacttacttgtcatgtgcctggtagtgacacatatacttaatccttttccttttttttttttctttttttcttttgagacagggcctcactctgtcacccaggctggagtgcagtggcgtgatcttggctcactgcaacctccacctcccaggttcaaacaattctcgtgcctaagcctcccaagtagctgggatttcaggcgcatgccacctcgtccagctaatttttgtattattagtagagacaggggtttcaccatgctggccaggctggtctcaaactcctgacctcaaatgatctgcccactgcagcctcccaaagtgctgggattataggcgtgagccaccgagccctgctcatatgcttatatgcttaatcttaacaacagctctgcgaggtatatttgttatttctctctttttgggggtccatgtgagacccagagaggttaaatgacttcctcaggatcacacagctacaaagtggcagagttgggatttgaacccaggcagtctaattcttatccaccattcttcagcactatccgtgcctcccaccttggtggccatgctaggcccctctcataaggaaattctaacattgtcatggcagggtaggtgtgggtttctgggtgttggtggtgaggcagggtctggggtgctcacctgccaggtgcagcttgcctttgcccagatcagctgccagcccatggtgttgctgggacctggcttggagtgggcggctccctccacaggcttctagcaggatccatgccaaggtcagttgcagcacccacgtcaggccgatgggtcgcatgtggaccctgcagtccatgtccacctgagataagagctggcaggcatagggtggggttcagccatccctttctgtgagcttagggtggcacccacccagtgcatacccaagaagcagtgccaggcagagtagggaaagtgcagctgaggaggaggctggggcagtggccaaggacgttcaaatcccaggagaccatcagggcctgcctccaacctaggagcccccctcccatcagaaccatgtcctctatgtcccttcagtgccaccccaaccaagcttagaccacagtggccctcctcccatccagcaggatctcccacctttttagtcttcaagagaccccttcttttctcagaatgaaggggacctccctaggtcttccaatccccctctcctgttcagtaattcctccctctcttctatgcggcctccctcctccctctctcgctccctgccggcccttctctgggtcaccttctctcggcccacaatcggcttaggggccacccagagctggacctttgggaccaaggctggtgtggcagggctcaggttctgtcactggggcccaaagccccgaggcagggacagctagcggtctgtggagacaagactgtccccttcccgcctccccgcattcagcccctcacctgttggctggattggggtctagaggccgctaagacacctcaggatccagtccaggaaactggctgctgaaaggggcgtggcttaatgcaggggcgggacctcccaccgtcctgcccacactccagctgaccaaaggctggccgacttggggctggtgtgtatatatccttgtgtttgtttttatgttcagcttgtggcttaagctctgtatctatatatgtggggagtgtgtgtgtgtgtgtgtgtgtgtatgtgtgtgaggaaggtgtgtttgtgtggcctatagcctgtgtgtgttcccaggcacctgtgtcttttgtttgtgtggctgtgtgtgtgttgagcatgtatgtgtgtttttgttgtatgaggttatgtttatgtgtgtttcttggtggagtggttgtgtgtgtgtgtgtgtgtgtgtgtgtgtgtgtgtgtgtgtatacgttcagaatctgggggaggattgtgtgtcccaagcaatgtgtttgcagttgaataaaacaggatcttaataaatgtgagaaggggaaatgtagcattgggttagtgtccctgcaaaaatgttggaagtcagtggataaaggtttttgaccatgaaggttgaccatgaatgaacaaagaaatgtcatgtgctgagcaggatgtgtttgtgtgcacacattatgtgtccttctgaagtttctgtgaatgtgtgttgcttgtgaacactcctttaactcatccattcattcaacaaacatttattgagcacctactgtgtgctagattctggggatgcagtagtgaacaagacatgaaaatttcagccaggcatggtggttcacacctgtaatcccagcacattgggaagctgaagtagaaggatcgtttgagcccaggagtttgaaaccaggctggccaacgtggtgaaaccccatctctactaaaaataatcaaaaatagctgggcatggtggcacatgcttgtaatctcagcagttcaggaggctgaggcatgaaaatagtttgaacctgggaagcagaggttgcagtgaatcaagattgttccactgcactccagcctgtgcaacagagtgaaactctgtctcaaaaacaaacaaacaaacaaaaactcaaaataaaagacacaaaaatctcaggtttcatagagctgacattctagggggagaatcagatgagaaaaacatccctgcagagggtatgggtgtgtatgtctatgtgttgtgttgggagaataatttgtctgttttagatgataatttgtgtgcaactggacatcccttggttttggaactatgtgactgtgcttccattggttaagtgtttatatgtgttgtttgtgtgtgtttgcattggatgactgtgtgtatgtctgtgtttcctaagtatgtgtttgtatggctgcagatgtgagtttgtgtgtatctgtatttttggatgtttgcgtgtgtctgcatttgctgagtatgtgtttgtatgtgtgttaatttgcagaatgtgtgggtctgtgtttgtggagtatatgtttgcagagtatgttcgaataaatgtttgtgtgtctgtgtttactgaatatgtgactgtgagtgttcgtgtgcctctcatctcagggcaagagaggcttttgtctctcttttattgctgtattccctcccagatcccaaaacactacgttgcacacagtaggtactcaatatgtggtaagtgaacaaatcagtagataccgtctctgggtccctctgtgtacacccagtgatgtgctggaggcctcagtaagcaagacctgccggacctagcttt

SEQ ID NO: 1561014 - DNA, 4001 bp, Homo sapiens
ggaaagtcacctctcagggaccatatctattaggaatgattttcagggttgggggagttcttgattggacagggcgtccctgtggaaactatctccccctgggaatgtgtctcaccaagggggtctctgggggatgaatgtagagggaatgtatctcagggagaaggcttcctttggggtgtttcttgactgagggttctacccctgagaatatctctcctctggggtgtctctttttatagtggtctctcggcagcttggctcccatgggggcaccaggaggctccgcccccccgcccgccccttccccccgccagcgcgggcagcggtggctgagcccgggctcgggcgcccagacgcagtgacggcgccgggcccgccccacttcgctccgcccccgcccccgccacccctcccctcagccgccgccgccgccgccgccgcggtccccgcggcttctcactccctccctcctccctcctcccgccgccgctacctccctcctccctccccgggccgaagtcgccgccgctgccgccatggacgattcgggcctcatccgccgccggaggctgcaggtacgcggctgcctgggccccgggtggagaggaaggggtcggcgccctggggcggggctgggcaggaggcgggagaacttgcactagggtcagccgggacgcccccacccataggttcgggacgctaaccgcggggaacgctgtggccgcgcgtcccgccgcgctggggaccccgcccctcaggcgccgcccggcgatccagggagctgccggaggggtgcagcctagcgctccccctcgaggatcgcctgaggggcgcctggcccgccctagggggatggggctggggccgaagtcatcgccctggcgcctcgccaggctaggggtgagggggcgcagagcaaagttattgccctagggctcatgcccctcggggccatcggcgccgctggaggcgtaaacatgtttgtgcggcaacctcgcccctcaccaccccaggagccccctcccgaggcataggacgccctgcgtcccccacgcacctgcctggccatcaggattcttcctactgccctaattggacaggcacctagacagctttctcactcttcattccacctcctccactacaacatccgcccccccaccgcgatcctcaagtccagcccagcttgtgggtgggcgggagcgatttttagctccttgcagccttagaagatgctggtctcgaggctgcgcaggcgcaggagccgtgcgtccactgcacggagtgggacactgaggatcgctgtggagtgtggggaaggcggggacaaactcaggtgtcaggagctcctacctccaaggtggggagggattctgtagccgagaagcgtcctctgctcgtcttcagctgcgtttctgaggggttagtacggaagttcagggttaatacggaggtccggtcccaaacatcccagaggggaaggtgatgatatctgtgccccaaggccctgcctggggtctggcccttctgagcctccttggggctcagccccaggcttggtaatctggagtttagataaagccgagaatgggcccagactcaggctccatccccagcctgaatcttgggaaaagaggattcaaaccctcacctagggcttcgtccatttctagactcccctaatccatcattcccgaggttgaaggccaaggggagctgattggtcagtgcagcaggaaaaatggtgatcagactgcaggaaggaccttccaggcgtctgggtaacgccggagccagacatgagttggaaaactaatttgctttcagagcccagatggcccgatctccggagcctaggcctctctgaagtgctcccacattctctccgcctctcgggggtgggttaggagagtgggttccgagagaagggaggcagctgcggcaaagttagagcaagtactgcagcagccaggttgggtccgcgccgtcgggtttctgagaaaagggaggaaagaggcggggcctgcacggtgtgtccccgccctccaggccggcgtcaactctcattggctcagcgccacgcgggactttaaactcccgctcgagacaccgcccccaacgcggaatgcttccactcacccacccacccactcaaccccaggcttgctctgggtccggcgatccctgtcggagtcctgtccccaccgcttcccttctggcgggattaaccacttcgctgcctggatacacccacatacgttggtgcatcctcttaggaactgtcgcatcactgctgagcgcccgagggtcccctgtgtgcagctaggctcttttttttttttttttttttgaaacggagtctcgctctgttgcccaggctggagtgcagtgacgcaatctcggctcactgcaacctccgcctcccgggtttaagagattcttctgcctcagcctcgctagtagctgggattacaggctcatgccaacatgcccggctagttttgtatttttagtagagagtgggtttcaccatgttggccagcctggtcttgaacttctgacctcaggtgatccacccgcctcggcctcccaaagcgctggaattacaggcgtgagccaccacgccctgggatcttatatgtagacagcatcctgagttcgaatgccctgtctgcagtgtcaactattaatcctgtgcgggagaagcggaatccacttggccgagcggctctgcagctgagattggaggtggcgtctgtttacactgacgccaaagacccgaacttccgccgctccagtttgaccctttcttcgtccctagaatgtttgggggcgctagcgggtggggctgggttccaggtcttcttcgggtggtgcttaaaagccctccaggggcttaccctccaaggccggttacccggatctggacaccctgggctctgtggccagaaaatccaggtcttgatttcgcttgggccattgcagacacgcagccaggtcgactggtcctcattcactccggtcatgcaaagacagagggaaaacctggtttggattatcggtcacccgtggctcgggagggcagggctgccctttggccccgcctatatgtttgtccgttgtacaacggggtgggaggacgctgtggcccatcctctgtcatgcagcatgtccctccttaataacgcctgttctccagacttagtatttattgagcacttgctatgtgctaggcaccatgctaaggggctaggcatctgcatcaactcctaagatcctcaaggagacacgggactattggaaggtcatttgccaaggtcataaaaagcagaattgagatttgaacctaggctttttgcttttagagatcctagaaatgtctaggacatccctcattttccttttgttggagtcccctccaaaggccttttgaaactctcccccaaatctttccacctgcagccccactcagtttccttccttccacctcaccctgtggatagaaaactggctggcaggtgttgccccttgtaccccattcctttcctcagaaaaaagccaagaccccatatctcctgatccctacagtgacttcctaagagcttgacaaatggaaggtgaccttcttcaaatgcagacacataaagttaatactcactaattattattattgtcattataaaaaatgactatgcggccatcacctgaatttccatttttatttttttattttttaaactttttattatttatttatttattgttaattgagagggtgtcttactccagcagtggtgcaatcatagttcactataacctcgacctcctgagctcaagagattctcccacctcagcctccgtggttcccattttaaatctcagttgtgagtcactctacttacctaccccccaccccctaccccaactctatgactctagctgggagtcagatagatctgctgaggtgtagatgagtcattcattctttcaacctttca

SEQ ID NO: 1561015 - DNA, 4001 bp, Homo sapiens
gaccagcaccaaggagagctcccgcggtcgccatcgtgagataggtcgccaggggcggagtccgggccatggacggagagatgtgccagcaagggactcagcgagacggcgacacaaatgtgccgacaaacatatacagagacagacagagataacccaggcaaaggcgcggacttgaggcgacaagctcctggtgaatacccggacccagcctcgccgtcgcccccgtcgtccagcaggggtcgctgttacccagcgaccgcgccctccgggaccttggggccagatactggccaccaccccttgggaagcccttctgtcccccagtgccaagactgggagttcggagggctcggacactctcctctccaactttgggaagcatggtgggtttggcctcacctgtgtgaacatggaggagcggcgagggagctgaaaagcgctttaactgcccccctctccaactaccagctaatcgctcctataaatacagacggcctggcctggctccttaatcctgaccgtgagggaggggtcgctagaggggctgcagggttccctgaggaggctctgattgtggggcaggtgggtgggggggcataatatgtatgcacatgtttttctgaggttgcgtctcctgtgaagacgggtctcctcagtgaaaatgtttctctgtaagcatgagatctctcctggggctgtagaggtctcgtgggtggggacagtttcccacagaggatatggcttttaggggtctctgattgggggtatcctttacacgggaattgttactcctgggatctttctcttcggggaatgcctctttcgtggggagggggatggcttttgagaggaaagtcacctctcagggaccatatctattaggaatgattttcagggttgggggagttcttgattggacagggcgtccctgtggaaactatctccccctgggaatgtgtctcaccaagggggtctctgggggatgaatgtagagggaatgtatctcagggagaaggcttcctttggggtgtttcttgactgagggttctacccctgagaatatctctcctctggggtgtctctttttatagtggtctctcggcagcttggctcccatgggggcaccaggaggctccgcccccccgcccgccccttccccccgccagcgcgggcagcggtggctgagcccgggctcgggcgcccagacgcagtgacggcgccgggcccgccccacttcgctccgcccccgcccccgccacccctcccctcagccgccgccgccgccgccgccgcggtccccgcggcttctcactccctccctcctccctcctcccgccgccgctacctccctcctccctccccgggccgaagtcgccgccgctgccgccatggacgattcgggcctcatccgccgccggaggctgcaggtacgcggctgcctgggccccgggtggagaggaaggggtcggcgccctggggcggggctgggcaggaggcgggagaacttgcactagggtcagccgggacgcccccacccataggttcgggacgctaaccgcggggaacgctgtggccgcgcgtcccgccgcgctggggaccccgcccctcaggcgccgcccggcgatccagggagctgccggaggggtgcagcctagcgctccccctcgaggatcgcctgaggggcgcctggcccgccctagggggatggggctggggccgaagtcatcgccctggcgcctcgccaggctaggggtgagggggcgcagagcaaagttattgccctagggctcatgcccctcggggccatcggcgccgctggaggcgtaaacatgtttgtgcggcaacctcgcccctcaccaccccaggagccccctcccgaggcataggacgccctgcgtcccccacgcacctgcctggccatcaggattcttcctactgccctaattggacaggcacctagacagctttctcactcttcattccacctcctccactacaacatccgcccccccaccgcgatcctcaagtccagcccagcttgtgggtgggcgggagcgatttttagctccttgcagccttagaagatgctggtctcgaggctgcgcaggcgcaggagccgtgcgtccactgcacggagtgggacactgaggatcgctgtggagtgtggggaaggcggggacaaactcaggtgtcaggagctcctacctccaaggtggggagggattctgtagccgagaagcgtcctctgctcgtcttcagctgcgtttctgaggggttagtacggaagttcagggttaatacggaggtccggtcccaaacatcccagaggggaaggtgatgatatctgtgccccaaggccctgcctggggtctggcccttctgagcctccttggggctcagccccaggcttggtaatctggagtttagataaagccgagaatgggcccagactcaggctccatccccagcctgaatcttgggaaaagaggattcaaaccctcacctagggcttcgtccatttctagactcccctaatccatcattcccgaggttgaaggccaaggggagctgattggtcagtgcagcaggaaaaatggtgatcagactgcaggaaggaccttccaggcgtctgggtaacgccggagccagacatgagttggaaaactaatttgctttcagagcccagatggcccgatctccggagcctaggcctctctgaagtgctcccacattctctccgcctctcgggggtgggttaggagagtgggttccgagagaagggaggcagctgcggcaaagttagagcaagtactgcagcagccaggttgggtccgcgccgtcgggtttctgagaaaagggaggaaagaggcggggcctgcacggtgtgtccccgccctccaggccggcgtcaactctcattggctcagcgccacgcgggactttaaactcccgctcgagacaccgcccccaacgcggaatgcttccactcacccacccacccactcaaccccaggcttgctctgggtccggcgatccctgtcggagtcctgtccccaccgcttcccttctggcgggattaaccacttcgctgcctggatacacccacatacgttggtgcatcctcttaggaactgtcgcatcactgctgagcgcccgagggtcccctgtgtgcagctaggctcttttttttttttttttttttgaaacggagtctcgctctgttgcccaggctggagtgcagtgacgcaatctcggctcactgcaacctccgcctcccgggtttaagagattcttctgcctcagcctcgctagtagctgggattacaggctcatgccaacatgcccggctagttttgtatttttagtagagagtgggtttcaccatgttggccagcctggtcttgaacttctgacctcaggtgatccacccgcctcggcctcccaaagcgctggaattacaggcgtgagccaccacgccctgggatcttatatgtagacagcatcctgagttcgaatgccctgtctgcagtgtcaactattaatcctgtgcgggagaagcggaatccacttggccgagcggctctgcagctgagattggaggtggcgtctgtttacactgacgccaaagacccgaacttccgccgctccagtttgaccctttcttcgtccctagaatgtttgggggcgctagcgggtggggctgggttccaggtcttcttcgggtggtgcttaaaagccctccaggggcttaccctccaaggccggttacccggatctggacaccctgggctctgtggccagaaaatccaggtcttgatttcgcttgggccattgcagacacgcagccaggtcgactggtcctcattcactccggtcatgcaaagacagagggaaaacctggtttggattatcggtcacccgtggctcgggagggcagggctgccctttggccccgcctatatgtttgtccgttgtacaacggggtgggaggacgctgt

SEQ ID NO: 1561016 - DNA, 4001 bp, Homo sapiens
cgcagagcggctgtgcctggcgtacccccaatagccgcaggcggaagcgactgcgaagggcacgttggaggtgttccaggaaggattcgcatctggacgttgggagagatagggtcggatgggtcaggacccgagggagttcctgggcaatgggcaaagtacgcgagaaaacggtggagggtgctgtactcactcagggctcggcactccacagcgttctggatggtttccagggcccgatgtctctgttgtgtccatctctgagggacaacaaggtcctggcaaaggggaaccctgtgagctagggtcttggatattcaggtaaggtttgggaactgaggcctggggatcccctggacaggggagacaacaattacatcaatcctcacaaacccataacttaagacccttcctttggaatgcaaatgcagcttcaagtagtaataatcatttcttgtttataataatcaacttacttgtcatgtgcctggtagtgacacatatacttaatccttttccttttttttttttctttttttcttttgagacagggcctcactctgtcacccaggctggagtgcagtggcgtgatcttggctcactgcaacctccacctcccaggttcaaacaattctcgtgcctaagcctcccaagtagctgggatttcaggcgcatgccacctcgtccagctaatttttgtattattagtagagacaggggtttcaccatgctggccaggctggtctcaaactcctgacctcaaatgatctgcccactgcagcctcccaaagtgctgggattataggcgtgagccaccgagccctgctcatatgcttatatgcttaatcttaacaacagctctgcgaggtatatttgttatttctctctttttgggggtccatgtgagacccagagaggttaaatgacttcctcaggatcacacagctacaaagtggcagagttgggatttgaacccaggcagtctaattcttatccaccattcttcagcactatccgtgcctcccaccttggtggccatgctaggcccctctcataaggaaattctaacattgtcatggcagggtaggtgtgggtttctgggtgttggtggtgaggcagggtctggggtgctcacctgccaggtgcagcttgcctttgcccagatcagctgccagcccatggtgttgctgggacctggcttggagtgggcggctccctccacaggcttctagcaggatccatgccaaggtcagttgcagcacccacgtcaggccgatgggtcgcatgtggaccctgcagtccatgtccacctgagataagagctggcaggcatagggtggggttcagccatccctttctgtgagcttagggtggcacccacccagtgcatacccaagaagcagtgccaggcagagtagggaaagtgcagctgaggaggaggctggggcagtggccaaggacgttcaaatcccaggagaccatcagggcctgcctccaacctaggagcccccctcccatcagaaccatgtcctctatgtcccttcagtgccaccccaaccaagcttagaccacagtggccctcctcccatccagcaggatctcccacctttttagtcttcaagagaccccttcttttctcagaatgaaggggacctccctaggtcttccaatccccctctcctgttcagtaattcctccctctcttctatgcggcctccctcctccctctctcgctccctgccggcccttctctgggtcaccttctctcggcccacaatcggcttaggggccacccagagctggacctttgggaccaaggctggtgtggcagggctcaggttctgtcactggggcccaaagccccgaggcagggacagctagcggtctgtggagacaagactgtccccttcccgcctccccgcattcagcccctcacctgttggctggattggggtctagaggccgctaagacacctcaggatccagtccaggaaactggctgctgaaaggggcgtggcttaatgcaggggcgggacctcccaccgtcctgcccacactccagctgaccaaaggctggccgacttggggctggtgtgtatatatccttgtgtttgtttttatgttcagcttgtggcttaagctctgtatctatatatgtggggagtgtgtgtgtgtgtgtgtgtgtgtatgtgtgtgaggaaggtgtgtttgtgtggcctatagcctgtgtgtgttcccaggcacctgtgtcttttgtttgtgtggctgtgtgtgtgttgagcatgtatgtgtgtttttgttgtatgaggttatgtttatgtgtgtttcttggtggagtggttgtgtgtgtgtgtgtgtgtgtgtgtgtgtgtgtgtgtgtgtatacgttcagaatctgggggaggattgtgtgtcccaagcaatgtgtttgcagttgaataaaacaggatcttaataaatgtgagaaggggaaatgtagcattgggttagtgtccctgcaaaaatgttggaagtcagtggataaaggtttttgaccatgaaggttgaccatgaatgaacaaagaaatgtcatgtgctgagcaggatgtgtttgtgtgcacacattatgtgtccttctgaagtttctgtgaatgtgtgttgcttgtgaacactcctttaactcatccattcattcaacaaacatttattgagcacctactgtgtgctagattctggggatgcagtagtgaacaagacatgaaaatttcagccaggcatggtggttcacacctgtaatcccagcacattgggaagctgaagtagaaggatcgtttgagcccaggagtttgaaaccaggctggccaacgtggtgaaaccccatctctactaaaaataatcaaaaatagctgggcatggtggcacatgcttgtaatctcagcagttcaggaggctgaggcatgaaaatagtttgaacctgggaagcagaggttgcagtgaatcaagattgttccactgcactccagcctgtgcaacagagtgaaactctgtctcaaaaacaaacaaacaaacaaaaactcaaaataaaagacacaaaaatctcaggtttcatagagctgacattctagggggagaatcagatgagaaaaacatccctgcagagggtatgggtgtgtatgtctatgtgttgtgttgggagaataatttgtctgttttagatgataatttgtgtgcaactggacatcccttggttttggaactatgtgactgtgcttccattggttaagtgtttatatgtgttgtttgtgtgtgtttgcattggatgactgtgtgtatgtctgtgtttcctaagtatgtgtttgtatggctgcagatgtgagtttgtgtgtatctgtatttttggatgtttgcgtgtgtctgcatttgctgagtatgtgtttgtatgtgtgttaatttgcagaatgtgtgggtctgtgtttgtggagtatatgtttgcagagtatgttcgaataaatgtttgtgtgtctgtgtttactgaatatgtgactgtgagtgttcgtgtgcctctcatctcagggcaagagaggcttttgtctctcttttattgctgtattccctcccagatcccaaaacactacgttgcacacagtaggtactcaatatgtggtaagtgaacaaatcagtagataccgtctctgggtccctctgtgtacacccagtgatgtgctggaggcctcagtaagcaagacctgccggacctagctttcccctggtccatcttgaggtggtccaggatgcttgtgggtcagatttgttcagcctctgggctatgcctcacgccagagcctccgcaccctttctccttccctaatctcagcccccgaccctgcgcttggatttcagcaccgcggacaggagcgcgcgagaccagcaccaaggagagctcccgcggtcgccatcgtgagataggtcgccaggggcggagtccgggccatggacggagagatgtgccagcaagggactca

SEQ ID NO: 1561017 - DNA, 4001 bp, Homo sapiens
cccagccctgagccccttcacatgctccccaccacttaccttctgtggaatcaggagttgaggaggctgtagacggagcttcttctgcgagagggaaagaatcgaagactcttagaagcttagactgtccgaatcacagaagtgtcccagtcctggaatcttagaatatttgaatcacgggatttttagaacattctgcacacagactctaaaacctagcatcactgcctgatgaagctcagagtctttgaagtccaaatccaggaatcttaatcttagagtcttcaaagtaggaatcttaggaggtttcaattcattcattcgttcaacaaccacttattgagcacctactatgtgccaggcactgttctaggtcctggggatacagctgtgaagaaaacagacaaaatccctgccctcctagagctgacactctttgggatagacaaacaataaacaagtgaatatatgacgtcgggtgcagatgagcatagggagcaaagtaaagaagggtaggggaagagaaagtgaaggggtgctgtttctcatagggtggtcaagaaggcttctctgataagatgacgtttgagcagagatctgaaggaagtgaggaagccatgcagatgttcagggacgtcttccaggtagagaagaaagccagtgcaaaggccctgagccaggcaccatgcttggcatctgaggaactgagaggtgcgaagatatgactggagaagagtgactgaggaggagaggagtgggaggtgagaacagagaggtaagggcggtggggagagacagacgaggtggtcctccctttgtaatctgaagttaacgacaagatcatagaatgttgggatgatactcgaaaatgctgaaatcaccaattcttagaattttggcatctggacacgcgagacatggaaatggctagatctaagggtgttgaaatccccagctgtcagaacccccatgtgtgggacagagaacggtagacatggactgttatagctgtgagctcagagattgtgaggctaggcgttttcagctgggaatccagccccttagagctagttcagagctttgcacatagatgatgctcaatgcggtttggaaattgaaatctgacgccctgtgccctcacctcgtttcctcagctggggaataggaggcctggaatggtgtgggtcttccccaggattaccattaaccagtggtaaagaccgctaagaacccatgagtccttgcccccaaaccacggatggctgttttcccgggacagggttggacagtttgggcgaggtcggggctgcctcttggacagaaaacggggatgggatgcgaaggcaagtgattgggagccagacccctgttttccatcctggctctaccctccgttcaaccccctccccgccagctgcggccagcaccagagccaggggacagctccccgcgcgcgtcctcgctcccgggcggggccgggcggtacgtcccagagcgcagcgcgccccccgcctgctgtctcagtgccccctcacctccgccctgtttcgtccaggtcctccgggtcaggctacccccgtcgccgccagagcgcgggggaggggagagcttcctttgtctcctatgcctcctccccccatcccggctctcctgcgggcaagcgccgaggggacaccggggagtaccccacctgaacctctggggcccacaccaggccccagtcttcctctactcactgcagtgggcgaagaccggcaggacctgccccatggcccccctcgggcctgcatcgggacccccgcccactccggctgtgccgccctgggcccggggtcgcgggcgctcatctccgccgcgcccacgacgccgctgccattctcgccgcctcctcctcccgggctgctccagccgccgccgccgccgccgccgccgccgccgccctggtgctcggctcggcgggggcgggcggggccgaggtggggaaggcactgcagcgcgcggccgggggcggggccagaagacgggcggggcggtaccagagggagggtgaggggcggggaaacgccgaggatcaggcggaggggcgtggccttcttactaaaggggcggaaccaagagggtgggctacggagccaggaaggaggggaaagcggcctgaagggcggggcctagatcgcagagggcgcagcctttaggggaagagggaaggaggcctggagtctggcgagggacttgggagaggatggtgaacgagccacggcagagaggatgagagcgtggatccctgggtgggttggggtggtgctcggggtgccattgaggagggggtggaaagattctaatgctctgaggtagggtccgagcctagatttgcagagggagcgagaaagggggccgaatgaaacgattcagaaacttttggggcacgcggaggagctcaaacgtgggcagggctaaagcaacagggaattattcaaatataactgggtggggtcggattccaggcgattccaggtctgcgaaaattagaagggtctggagctgtgtgcctgaatcctggatgggcggggcctggaagagaaaataagcgaagccccagaggggaggggtcgaactaaaaacagtaaagaaaaaaaaaatatgtatatatatatatatatatatatatatatatatatatatatatctttttgagacagggtctcgctctgttgcccaggctggagtgcagtgatacgatcacggctcactgcagcctcgacctcccgggctcaggtgatcctcccacctaagcctcctgagtagctgggatcacaggtgtgttccaccgcgcctggctaaatgttaatttttgtagagacggggtctcgctatgtttcccaggctggtctcaaactcctgggcttaagcgatccgcctgcctcggcctccctaagtgctggggttataggcgtgagccaccgcgcccggccaagtatggtatttacaggttttgaggctgggggctgtaccactgaggtgggaggagcttggactgagtgttgtgttgagaacacagattctagaattagtttccctggaacaccggttacttctgtgactctgtttcttcttccatatgtaaactggagatgatgatgtataacagtgtgtgacacattagtactatgtaatagtttgccactggtacagtattatcttttttctttttttttcctgattcagatcccaaaccccgctttgtaggtgcaggaaacaggagacccagaagtgtaattccttctagtgacccgcctaaagagcaggtcaaaggacaggaaggagatttagatggtttaaaatctcacagcggaggggattaatggagggggcgggcaggtgtacagggtggagccttcctgatcccagggctgaaggatggcggtcctggcccgccagctgcagcgtctcctctggaccgcttgcaagaaaaaggagagggagaaggaggggagggaggaagaggaggaggaggaggcggggcgcagggcccccgaagggcctcggtctctgttgacagcgccgcgccgcgcccagcggccgcacgggggtgccgaggcgtctgggggcctgcgcttcggggcgagcgcagcgcaaggctggcgcgcgcgcatggaggatgctcactgcacttggctttcgttacctggtctgcccccgggctgggccttgtttgccgtcctcgacggccacggtggggctcgagctgcccgcttcggtgcacgccatttgccaggccatgtgctccaggagctgggcccggagcctagcgagcccgagggcgtgcgcgaggcgctgcgccgagccttcttgagcgccgacgagcgcctgcgctccctctggccccgcgtggaaacgggcggctgcacggccgtggtgttgctggtctccccgcggtttctgtacctggcgcactgcggtgactcccgcgcggtgctgagccgcgctggcgccgtggcctt

SEQ ID NO: 1561018 - DNA, 4001 bp, Homo sapiens
agtgcagtggcgtgatcatggctcactacagcctctacctcccagagtcaagcaaacctcctacctcggcctcctagcagctgggactacaggtggcaccacgatatcgtgctaatttttttttttttttttttggacaaagtcttcctctgtcacccaggctggagtacagtggcatgatctcagctcactgcagcctctgcctcccgagttcaagagattcttgtgcctcagcctcccaactagctgggatcacaggcatgagctgccatgcctggcctggctaatttttttttttttttttgaggcagaatctcgctctgttgcccaagctggagtgcagtggcgcgatctcagctcactgcaagctctgcctcccgggttcacgccattctcctgcctcagcctcccgagtagctgggactacaggcgcccgtcaccatgcccggctaattttttgtattttagtagagacggggtttcaccatgttagccaggatggtctcgatctcctgaccttgtgatctgcccacctcgacctcctaaacctggctaatttttaaatgttttgtagagatagggtctcgctatgttgcccaggttgaattcctggcttcaagtgatcctcccacctcggcctcccaaagtgttgggattacaggcatgagccaccgcgctcggtcatatatatttttttaatgtcataaattttgaaacactgcttactagtaagaccataacagttcttatttccacaagaagcaagagaaagatcttttcccagcatcctgccctgcagtgggttgcagttctttttaacttttgccaatctgtcaggtgtaaagtgatatccccttgatacccttagcaacacatgtttctaagtcctaaatgtattaatcacgccatactcctttccagggcctaactcaaatttctgacccctttctgagaccctaaaacacacctcctaaacccaacctcagccctgaccagtgacctttgtaccccaaccttcatctcatctgtctaaactttaggctcactcctgtaatcacaacactttgggaggccgaggcgggaggatcacctgaggcctggacaacatagtgagaccctgtctctacaaacaaaataagaaaattagcagggcgtggtggcctgtggctctagtcccaactacttgggaggctgaggtgggaggatcacttgtgcccaggtgttggaggctgcagtgagctatgatcccaccactgcactccagaaagggcgacagagggagactctgtggcttaaaaagaaaaagaaactttagtaatctgctttcctttgagtcctgaaaaccaggaactcagtacctttctatttctttccagatcctctctatcctcccacactccctccaactgacccctccgaccggtccctcttagaggctcacccctcacttccgtctccttccaatgcatctcctctcatttacctccaaatagggcagcccctccctccccatagcagggccctcccaggcaggctcctagtggccggcgccggtggatgggggaggggccaggtcgcctgaggcgggggctaagtttaggcacgctggggggagggggcctccccgcagctgttctggcccgtctggcccctgagtgacagcgctgcctggggccgaggctgggggagggggtcctccctgctcctgggccccaaagtgctggctcgaaggagaagggaccccatgctccctctgggtcctccctatactgcccctcggccccctagccccagcctgcagcgctgcggaagcagatcagtaataaaaatgctccggatgtgcaggagataagggcgagtttggaccccgttccgccgacctcagcccccgtccagcccgttccgcaagcccacctttactccccatatcggctccgagtgagaggctggggacaccgctgcttctcggggattttgcccacttcagtagaacccggaggacaggagtagggggggtggggcccctttggacccagccaatggctgtccacagaggtggggacaattccaaaattggaaccgtcttgtaaacagccaaaagcaatgatgtctttaaccattccatagctgttcctggaggcggagcatattttaaagtaaggctgggtcattttacaactggccaatagatgtggtcaggaaaaagagggtttttgtttgttttttcaaatagagatcgagtctccctatgttgcccaggctggtcttgcactcttggcttcaaaggatcctcccgcctcggcctcccaaagtgtttaggattacaggcatgagccactgcgcccggccaaaaagaagagtttttaaaaggcacagagtttacttataaatattctacggccacatctaaataaggagagaactgtattttttcagggatttggcctgtccaaaatcagccactaggaggagcactccagaagagggaggattattttattttatttttattttttgagacggagtctcgctctgtcgcccaggctggagtgcagtggcgcgatcttggctcactgcaacctctgccttccaggttcaagcgattctcctgcctcagcctcccgagtacagacggggtttcaccatgttggccaggctgatctcgaactcctcacctcaagtgatccgcccgcctcggcctcccaaagggctgggattacaggcatgagccaccgcgcccggccggggaaatttttttaaaaagcggagtttatcacgtctagccagatgtgatatcacgtctatctcttcccttttccactatgtactgttcctttgcgaggttggtccctttaattcaaaatcctctcaccttttgccttctgtgggccaatgcagcatcttcatacacgttgcttacctagaaggcgtggctccaccgtgaattctaattggtccgtgctatcgaggcactgtccccttactggctctcgctccagtggcccccactgcttttcttcctcttccagcaatggctcttcgggcccagagttcgaatctcgcgatcgggatggggacggagtaccggcctggggtgtcccagagcccggactgagctggggagtcaagacctcgggcgatgagggctgagcaagtcggagtcgtaggtccagttctgatacggtagagagaggaggccgtgagctttcttcttggaggtgccccaaggagaaaccacccacccctcttggctttggtcccagcacctcggacatctcaccttccccagcttctcctgtctccaatctgttgggttcttggggttcttcgtcttccagcggggtggagctgctggtggaagagtcctccccggatcccgttccccgggccacccagcccagatggtccaaccgaagcctcaggtcttccagagggcgctcggatggaggcgcggtgtcaggatcaccccgtcgtccaggctccggggattggctcaggctggggatgctctccaagctgtcgcccaggctgggctgagggtgctggtctcgtggttccgagactgagcggccctgggggcgggggcggcgggcagttgaatccctgcggcccccggagcccactacaccatcaaaggcgatgtaggagaaggtcagctcccggggggtgccccagtcctgcgacgtggtctcctcctcgtcctcctctgagaattcccgggctgtgtgcagctctcgaaaatcagagtcgtcgttccctcctgcagtgggtgaaggagagccttgtttccctcagcaggtccctgagctgcccagccctgagccccttcacatgctccccaccacttaccttctgtggaatcaggagttgaggaggctgtagacggagcttcttctgcgagagggaaagaatcgaagactcttagaagcttagactgtccgaatcacagaagtgtcccagtcctggaatcttagaatatttgaatcacgggatttttagaa

SEQ ID NO: 1561019 - DNA, 4001 bp, Homo sapiens
ttctcctgcctcagcctccagagtagttgggactacaggcatgtgccaccacgcccggctaattttttttgtatttttaataaagacggggtttcaccatattagccaggctgctctcaaactcctgacctcatgacctgcccgcctcgaccccccaaagtgctgggattacaggtgtgagccaccgcacccggcctaattttcttatttttttgtagagacagggtttcgctatgttgccagggctagtcttaaattcctgggctcaagcaatccttctacctcggactcccaaagtgtgggattacaggcgtgagccactgtgcccagcccacaggtctttcttctcttcttcccctagagaggacatgcagttatccagcccagaggaagcctcctccctctggagccaatcgtttagactttctggccatcaatggtcacaagctttccctgtcactgtgtgaaccttcccacctaccgtctcctataggaagctggaacccaggagcatagaacattacccccagactacaagcagaagactaggcatccccaccccacaaaaaagacatgaatccaggaatcccaaatgtagctctctcaacataaacaggccccttaccaaggactgtctcctataaagactttctctttcatcataagtctctccaaaaccttgctgcccgctgttcccatgaaaaccaaggtcatttcaaaactcagcacacaccgtcccctcatacttccaatactttctccacggtagttctggtcatagccttcctcttctacttccctatccacctcctcctcctccttgccctggtgacagcaacagactcaaatctcatccccagctaccaacaactttctccccctcccttcctccatcttgactgggctcatcatggaaattgaggcacctgtaagcccagcccagtccctaagttcaggtcacattacctttttttttttggagacagagtctcgctttgtcgcccaggctggaatgcagtggcgcgatcttggctcactgcaacttctgcctcccaggttcaagcgattctcctgcctcagccttctgagtagctgggattacaggcctgcaccaccacacctggctaatttttgtatttttaatagagacggggtttcgcaatgttggccacgaactcctgacctgaagtgatccgcccgcctcggcctcccaaagtgctgggattacaggcatgagccaccacgccaggccaaaatcgcttctttattcaggtaattgagcaggtgccaggccaagtttcctggcctctccttcattcacatgtattcattcattcaaatattcaagtgataatttattgagcatttacactgagacgtagcccgtgtgaaatactggaaatatgaaaatggccaaaacggtagcatgacaagatcccgatttctgggtccctaatccttcagtcctctccactaagactctcttgttcctcgacaatttcttcccactaaaggctcactaggcgccctcgcgctctcagacacactgaacaggtacctgcctgtgcttccagcttggaactcaagtgccattggcaccactaacaatccaaggctcccaaatggctcgaagcgcaaggtcctacaaccctcctcatcacacactggcgccaaggactgcggaaccggccgttgcgccaagatgattttgaaagttggagttcctatagcatgatggggccagacccgagattctgggatcccagccccctccccgcctcagatccagaagtccagcccccatgtccccttctcccccagatctgggtggccgagcttcctcctctttcagacccaggagtctgaacccccagatcccccctccctcagacccaggagtcagggcctccagcatcctcctctctcaaactcgagactgctagctcgctcctcaccctccatgcacccacacttacaacggttgccatgatgctcaccaactgccagagtcctagcggaaacggaaacgcgcgaggagcgagatgttctggctcctctaggctagctggttcttcaaagatctcgatggttcctcataaatatgtaaatattgtgggggcgtggcgggactttatgccccgccctcccaccgaggctgcgctggaagacgggcgtccggaactcctgggtccattcccaatgtctcctggctcctcctccttttgctcagccccaccaccgccccgctcaggccgattgcaaaattcttagctgttctttgagtaaccacacgtcctccacgctcctttcctctttatcccaccctcctcctcctccccactttgaggcctccagctccagattgacagagctgaaggccactcgtttccgtaaagcgcagcggcaagctccgccccctggaggtctcacggccgaggcggggccgggacacagcgactccaacccgttccaccaatgaggacacgcggaaatccccgcccccgggcgtgggccaatggcgctggctggggggggcggccaccgcctcctggcggctgcgaggtttcactgcaggggcgccagtgggctcagtgacgctgcggcctccttctgcctaggtcccaacgcttcggggcaggggtgcggtcttgcaataggaagccgagcgtcttgcaagcttcccgtcgggcaccagctactcggccccgcaccctacctggtgcattccctagacacctccggggtccctacctggagatccccggagccccccttcctgcgccagccatgcctttaaaccgcactttgtccatgtcctcactgccaggactggaggactgggaggatgaattcgacctggagaacgcagtgctcttcgaagtggcctgggaggtggctaacaagggtgagcacgccaggcgtcggggcccttgacgagaaggacagtagtggatgggggcccggaactctgagttgtaggaggacggggctactaggggaacccttgtgacctgggcaaggaggctgtgtccttgaggaggggctgggaagccggaggtgggtgggagagggatggttcgtttgacttaagatgaaaggaggctggaagcccgggttctgggtcctagggaagagggcgctaaaatgagactcctaggtcctggaggcaggcttccgagagactagatacctgggtcctgaacagggaaggggatggggggatgggatttctgcgtgcaaacctgggaagctgccggggtttcagacctatgaccctaacagcatggtctaggggataaaactccagatttgagagagagctgactgggagataggaggcctgagcggcggtgggaggacctgaggatctggctgcttaagaataaagatgggacgggctggagactgtaatgaatgcctgggctttgaaggagctgagggcctgagctattagttcctaggagtagaggagcccatggcctgggacacatgcgtactggaataggggaaggctgggaagtcctaagttagtcagaggctgggccctaggatgggaggggctaggagcctgcatttctgtgtcttgggcttcagaaagctgaggttctggccttggagaaggctggggctgaaatccccaggaacaagccaatctcacacctcaaagagcagggtctggggggttgctttgctgggtcttggaggagaaagggactgtgtctcccaggaggagagggggcccgtgaacacccagccgggtatcgccagggcctgggctccaggatgggaggaggctgggggctggggctcctgggtctgggatagggtcatgggagaggcagagccctgcatgctggtgtccctagtcagggagaggaaattgggaggcaggtcagcaaggtccctgggggcagggaatgaccatgcaggcttctcttgggcaatggtgagaagctggattggccatgagggggtctccctcactgggttttggagcctgg

SEQ ID NO: 1561020 - DNA, 4001 bp, Homo sapiens
gcagtggcgcaatctcggctcactgcaacctctgcctcccaggttcaagcaatcctcccacttcagcctcccgagtagctaagattacaggcatgcaccaccacgcctggctaatatttttttgtatttttagtagagacggggtttcaccatgttggccaggctggtctcaaactcctgacctcaagtgatccgctcaccttggcctcccaaagtgctgagattacaggcatgagccactgagcccagcctccagaaagttttgagaaatccaccacgacctcagtaacaatcagaaaaactgacccagtctggggtggagagattccagggccaagcctccagaaccctaacgctgactactttggcaagtctgggcccagattttctctggtgaaggcaatggggctgggcaccaggggcatccagagatgccacttcctggccttgaccttgggtgagtgattctaccattcgggccttggtttccctcaaatctgtcagggagataaagataggaccctacctcagaagacagggcagcaaggatataattagatgtctcaggaggcagaggcccagggcacagggcctggtttagagcgacagctcaagagccagtggccatggccatggtcttattagggctggggagggcccgacccatggtgtctgctgaggggctggggctggggagagagtctcggctgaagctaggccccttcccagctgtccccatccttcactaccagccccagctgtttgttcctctctcccaggaaaccggacccggctcgccagggtcctattctggggcaggaatgctgtgtcagcatttcctgtgtggctccagggccccggggggaggggcggggctagcgtctggtcagcagacctagcccagaggagaggacgtcccctcccatatttacgaccccacaccctgcggagccactgggaggggaagatgggaaggacaaggagatggcagcccctcctccctctcatcccctccccatcccctgcccaggccccagaaaagccggctattctgggagggacacctgttgttccaattcccatccctgcccccagctggggctcagatgcagggagtaacccagctagagagacagcgaaaatcagagggccttaagctaagaaacagagacagggagactgagatggaggaagagacagagacatggagacacccaaagagacagatggggagagacaccacccagagaccctgcaagaccattagcagccattgggagcagccctcctgcccaaaacgaagaaggaaagaaagacccagaacccaagagatccctcccccacaagaccctcaagggctaggagttggaagcagctgtgtcctccagctcactccagctcccttctcaagaatttaaataggtcagagtctggagcaaaaagagaattagggctaaggtgggggtggggggatggctaaatcaagcccaggaattagaaccaccttccccaagtgcctgcttccaagatggtgtgagggtgtgctccctcgggggtccttcttgtgggggacaaatcgctaaagtcagaagagagggcaaccgaagatccctttcccattctggagtccccaatcctactaattctctgtagtgagaaaggtgaaggagactaaaagacagagtgacagtcactcaaagtgacataggaagagacctcgagtctcagagaccaccagcaagccggacagggacattcagagacagagagaccctcagagagccccaagagatagccccacaggcccctaacccagagatacgcaccgtccgcaggaactggacctcgtcttcgccttctgcgtcacccatgatgtcgaggtcggaagcccagggtctgaggtcggggaacagagggagggggctgcgggctgggcgggagggctgggggcgggctggggtcggagacctctggagacaccagaggcacccgcgaggtagatggaactgcgaggagtacacgcatgctggacagagatgggaggaagtccccgcccccgggccccattggaccaggactccccggccactccccttcgccggagccctgcccacataccccaaatcttggctggaggtttgcttggccgttggccgccggaggtggggtgggagagagagtatctaggaggtacctgcgctttctccccaccacggtaagtaacgtgccatcattctcccatttcacagagggcagactgaggctctgagtggggaagttcttgcaagatatcacgcagcagagcagggatgtgcaccagatctcctgactttaaaaagcaccaaacatagtgattaagaacaaggactccggccgggagtggtggctcacccctgtaatctcagcactttgggacgccgaggtgggtggatcacttgaggtcaggagttcgaggccagcctggccaacatggtgaaacccccgtctctactaaaagtacaaaaattagccaggcgtggtgacacatgcttgtaatcccagccacttgggaaactgaggcaggagaattgcttgaactccttgaattcgggaggcagaagctgcagtgagccgagattgagccactgcactccagcctgggcgagacttcgtctgaaaaaaaaaaaaaaaagaacaaggactccgactccaagccagataatctggatctgaatcccacccagccttgccacttccttgagttacatggataagccacttagcttctctgtgcctcggtttccccatccagtaaggggaatattaatagtaccgacctcacgtggttgttgggagagttaaatgagataattaattaaatgagataaaacttaaaacagtgccagtgcctggttaatgtaatgtaagtgttgctattattattatttatttatttatttatttattttgagacggactcttgctcttgttgcccagactggagtgcagtggcaagatcttgactcactgcaacctccacctcccaggttcaaacgattctcctcctcagcctcctgagtagctgggattacaggcacctgccaacacacccggctaatttttgtatttttggtagagacggggtttcaccatgttggccaggctggtctcgaactcctgacctcatgattcgcccacctcagcctcccaaagtgctgggattacaggtgtaaaccaccacgtccagccctattaaaattattactaggccagacacagtggctcatgcctgtaatcccagcacgttgggaggccaaggcagacagatcacttgaagccaggaatttgagaccagcttggtcaacatggtgaaactctgactctactaaaaacacagaaattagctgggcatggtgtcacacgactctaatcccagctacttgggaggctgaggaacaagaatcatttaagcccaggaggcagaggttgtagtgagccgagattgtaccactacactccagcccaggtgacagagcaaggctccacctcaaaaaaaaaaaaaaaaattttttttattaacatgtagtggtatacagtaagttatataaaacaatatcccatagttaaacaaaattacatagaaaccgttcttcaaggtatagcaggtttctaggtgttccataattaaatactgatgttaacacaactgcaataaatagcacaaaagtttgtgtcatattatggaattatataatttggcattatataatgtataattatataattatatatttaggctaatataattatacagtacaatacaattctatgttgtatctgttatacattatccaacgcatagttgtatattaaatattgtttttccctaaaactttatgtaaatgtaaaatgattctgtgtcattgagcattatatcataagatattaatagtgtttcttatttttgtcagtcatcattatgtgttttaagacctacccttgttgctctgtggacacctggt

SEQ ID NO: 1561021 - DNA, 4001 bp, Homo sapiens
cactctttttctcaaaaaaaaaattttttttttttgagacagagtctcactctgttgcccaggctagagtgcagtggtgtgatctcggctcaccacaacctctgcctcctgagttcaagcgattctcctgcctcagcctcctgagtagctgggattataggtgcctaccaccacacctggctaatttttgtatttttagtagagatggggtttcaccatgttggccaggctggtctggaactcctgacttcaggtgattcacctgcctaagcctaggaaagtgctgggattacaggcgtgagccaccacgcctggcctttcctcaaatctttgaatgactgtctccccatctttcagaaaggcaggccctgtggttacagttccccctggtcacccatggagcccgtggtagccaccctaccttatagaaagtgacctttctatttaaaggtcacttcctcagaggggactcccctgacccccagtctacaatagcagccatctccaagccttttctaatcacagaatctcgttttattatctgcacagcgcttgccactatgggaaactatcatgatatctttccttttctgtctggcttccacctagacagtcaatgcctaaggccagggagcaagtcagttatcagcccctacagggatgcctggcacaaataaaacactcagaaaacgtgtggaatgggcaaatgaatgaatgaatgaatgaaccaatgaacaaaggagaccctagtgggttcccaagggtggaaactcctaagctcagcccagacccaaacagcaacaaaggagcctggagacacctctggtccgcgggcagcgcccccatcgcccaccatcaaccaggcaaagcccagcgtgtctccatggagatggcagcaggacccgaccccgtgctggcccgcactctcggcctccttatctggtttaggaatgcgcggtatccacgctcgctcgcgcgggagccacgcctcctctcccccccgcccccgagaccgccacacgcgcggggcccccacgtctccaagcggcactggaaggattcctctccgtcccgccaggggtcccgcctcgagattctgggaagactgggggtgggggaccagatcgcagcagcagctgcaccgcgagttccgcgcctggccgtgtcgccccacgagggggactgtgggctcagcgcgtggggcccggagcatctgacaaggacagagacagaggagggggtggaaatccccgggtgagtcaacccgtgcctgagaagggggcgagttccgacgctccgcccggctcggggccacgcgaggtccgcgccacgcgcgccttcacccacgacccatccctgagccggagttgaaagaggaggcgtctgagccacgcagtcactttctctttccttacaaaacaaagccacgccccccgccgggggaccggaggaggcaaacaacttggggaaaccgaggcagaaagcccgacgtccgaccgccctccccgtgggtgccgccccttggcttggaggctccacggcgcgcacatccttttgccctcgctcagccggagtcagccaggaggggtgttgcccccccccaaacacactccccaagaccccggtccccgagcacggcgtcctgcctcccaaagactccagtcgaaagcgctcggattcagccttctccccggcgccaacttcctgccgctgagaaaggcggggagcacagtctgcgggttcgcggccgaggcagtgggggccgcccggattcttggagagggcgcactgtgaccacccgctccgtgcagcaggaacccaggcggcgcgtgcgcgccccagccccccgattggggcccctcagctcggatcccgagacctcaggggaccaggcccgccttttctgcctccttgtcgccacgcgcgctcacctggctaggccggcccggctcccggccctggccggaggggccttggcgtctgcgtccccagggcggccgcggctggggctggggttgccagccgggctcggctaagtcccggggctgggacgagggacagaggggggggcggagagccgccgcctctgccccccgctcgccccgccctcctctcctcccctttccggcggcggctgcaatgaattccagatgtgaccggccggctggccggggcgcacgcgggggccgacaggagctgcacggagggccctttgtccgccccccccacccgatctctcactctgcccctcccagcccccacccgtgagaaccggccggcgcgaaacgtcacgcagcctggtgacgtcacagtactcctggccaggtggcctcaacctgaaacaactgtcttcaaccccaggttacctctgggcttacccctgggaccctggacttggaagaaaacacgaggtcacatttattgactcaacaaagagccttggaagtacctactaggtgtcaacgcagcaaataggcattaagtgcctactgtgtgtccacccaacaaataaattcctactaagtgcgatgtcctgtcccaaagacaaaattgatctctttttttttttctttttttgagacatggtcttgctctgtcatccaggccagagtgtggtggctcaatcatagctcacgggagcctcagcctcctgcctcagcctccagagtagctgggactacaggtgcgccatcatgcctggctaattttttgcagttttttgtagagatggggtctcgctgtgttgcccaggctggtcttgaactgctgcattcaagcaatcctactgcctcagcctcccaaagtgctggaatgacaggcgtgagccactgtgcctgaccagtctctcccttgataggacctccagaattcaggtgctgccctgtttcccttgggggactggggacactccacactctttcctgcctctgtagatcactgtcccctctggcggggcccagtttgtgcctgccttccagcgtcgggcccagtcttctatccagatttccaattttcactaattcctgggcatttctgtgtgcctgcctgcggaaatgatggacactacaccttcatcgaatgatgtgtgtgtgtgtgtgtgtgtgtgtgtgtgtgtgtgtgtgtgtaaccagcagttcgacaacaggataggaaagcccctcattccagcaacaaaatttttttgtttgagacagagtcttcctttatctcccaggctggggtgcagtggtgccatctcagctcactgcaacctctgcctcccaggttcaagctattcctgtgcctcagcttcacaagtagctggaaatacaggcgcgtgccaccacgcctggctgatttttttgtatttttagtaaagacagggtttcaccatgttggccaggctggtctcgaactcgtgacctcaagtgatccgcctgcctcggcctccccaagtgctgggattacaaatgtaaaccacagcacctggcaacaaatattttttatgcacctactgggcacagcagtgaacaacaacaacagcaacaaaaaggaaaaactccttgaccagatggatttttttttttttttgagacagagtctagctctgtcgccaggctggaatgtagtggcactatctcggctcactgcaacctctgcctcccgggttcaagcgattcttctgcctcagcctcctgagtagctgggattacaggcatgcgccaccatgcccagctaatttttgtagttttagtagagatggaggtttcaccatgttggccaggatggtttcgatctcctgacctcatgatctgcccgccttggcctcccaaagtgctgggattacaggcatgaacaaccgtgcctggccaacccagtggatcttatgttcaggtgggaaatatggctttttatgagggtaccatttgtgaaaatgtagacattatatgttataaacataatctggccaggcacggtggctcacgactgtaatcccaacagtttgggaagccaaggtgggt

SEQ ID NO: 1561022 - DNA, 4001 bp, Homo sapiens
tgttttacccaccgggaaagccgaggccgttcatgctgaaggggatgtgagggaagattcccccagcccaggaagccaaggtggtgcctctgccagccccagagagtgggtccccaaaagatgcagaggccagagatggggcatgggccctgccatttctaaaggggaagtgaacaagaagaggcggcattaactgtcattgtcacccccacttcccgcaacgcccagaggttgtccacacacacacacacacacacacacacacacacacactccaccctcacagggcactggcccgtggccctctctagcaaagacacacccggctgcccctagatccacagcccccctgagccacggcccccacgcatgcacgcaccagggaataagaggccgcaacatcacgtaccatgatcgaacttcaatgttgccagggcatgcatcccacagtccaccccttgcagcctgggagccctactgaggcccagagaggggccgggacttccccagaatcacacagaagcggggttgtggggaacccactcgcccccacaccagggtgctctctgctcctacggggaggtggggtggttgcctccttgtccagggtgaccatgggaagcccatttggcgtcagaagccccgagaggccaccgggaagaccatgggggcctgtcccgttccctgctccccatacaggcgaggctgcgtgcacacagcttcctgtaccccaggagggcctgcctggcacgcacccggtggctgcaccatccacacgcaagactgcaacttcagatgctccgcacgctggagatgctggacaggggctcccgcatccgaaagctgagcgagcgggagccgcgaaagctgtcccttggcctcagagagctgtcggtggtggaagctccggagtgagcctcgacggcccgggccaggcagtccccgggccctcgcatgcccagccggagacacccgcagcagaggaagctgagcacggctctgcacacctccctgctgcggaaggagtagatgatggggttgaccgccgagttgaggacggccagggccaggatccagtccatgccccgcaggtactcctgggcccagaggttggagccaaagacgtcggccagcagcagcccgaagagtgggccccagcacaccaggaaggccagcaggatcatcagcaccgtcttcagcaggcggcgggccttgcggcgggccgctgggcgtggggccttctgcccgctggcctgcaccaggcggaagatggccccatagaggcccatgatggtggccaggacgccggcgaagatcaccaggcagaagaggatgtagcgcttggagtagaggggcagaaggctggagcagcggtcaaaggcgcacaggcagttccagcccagcaaaggcagcatccccagcagcgcggccagcagccagcagaggccgatgaagccgtagacgcggctggtcttggtggccccgctctcggccaccggccgcaccatggtggcaaagcgctcccctgcagtgaagagcaggctgaaggtggaggcggccagggcggtgaagagcaggccctcccgtaggaaccactgggcgggcgccagacggaaggtgcgggcccccgacagcagcacgttggccaggtaggccgcgcccgtgagcaggtcactcagcgtgatgttcaccaggcaatagtagacccagcgtcgcgaccgcatgtggctggtgatggccgccagcaccagcaagttctccagcaccaccaggcagctggcggccaccgacagcccccgcagggcccccaggccgccatcctccggccccccgcgcccggccagccggcccgagtggttgtagtgcagaacaatgagccggctgtgcccgccggccgccagctgttggcaggactcgggggccaccggggtccccgtggcgttcatggcctcccccgggggctgactgaggcccgacgcagggtggagccacccgccttgctggtcttggtttcctgttatttgaaatttcctgttatgttcaaggtgccctccagggtggaggtaaggccgaggacagggaggggcaccccaacggtcggcccccacccgggctcctggagccaacgcgctggggctgccctggctgtgaggacccccacccctgccctggctgccttcttcctgtcctcgaaagccggagacccgcagggagccccggagccgtcagtcacggaggggaaatgagtccccactcgggatgggccacccctttccagccggacgactcctccccaccagccctgatcacccccgaagcacccgtcggctccactgaggtctccccacatgctccaccggcgctcagcacacagcaggtgcctaataaatgtcaagtgcctgcatgcccttgagcactgactcatccgacttgatccccgaaacagggcctgatgcgttacagaagaggaaactgaggcccagagagcccggtgcgttgcagaaggggaaactgaggcccagagagcccgatgcgttgcagaaggggaaactgaggcccagagagcccgatgcgttgcagaaggggaaactgaggcccagagagcccgaggcgttgcagaaggggaaactgaggcccagagagcccgaggcgttgcagaaggggaaactgaggcccagagagcccgatgcgttgcagaaggggaaactgaggcccagagagcccgatgcgttgcagaaggggaaactgaggcccagagagcccgatgcgttgcagaaggggaaactgaggcccagagagcccgaggcgttgcagaaggggaaactgaggcccagagagcccgaggcgttgcagaaggggaaactgaggcccagagagcccgatgcgttgcagaaggggaaactgaggcccagagagcccgaggcgttgcagaaggggaaactgaggcccagagagcccgatgcgttgcagaaggggaaactgaggcccagagagcccgatgcgttgcagaaggggaaactgaggcccagagagcccgatgcgttgcagaaggggaaactgaggcccagagagcctgatgcgttacagaagggaaaactgaggcccacaaaggcggcctgaggccaactttctgcccatgggaggacacacaggtccagggagagagacccccagggacaagctggtagggtctcggggccaggcgcccattttgggattcatggttgcctctcctgcccctgagctcaccctgctgggagcagagctgctggccccctggggcagccccccactgggattgaggtgcataggaaaagtagggacttgctcaccccatccccatggccctgctgacaacggctcacggtgactcagcctgaggtgaggtggctgtgggtctaagtgggagacacaccctgctctggcgtctgaggagggaggcaggctctgccctggcgtctgagggggaagcttggacctgcctggggtctgaggggggagggttggccttgccctaggttctgagaggggaggcatgaccttaccctggggtctgagcggagaggctcagccttgtcctggggtctgaggagggatgcgaggccctgtgctgtggtctgagaggggagacacaccctgccctgggtctgaggagggaggtatgccctgccctgaggtttgagcggggaggcttgaacctgcctggggtctaggggtgagggttggccttgccttggggtctgagtggggaggcatggccctgtcctgagtctgaggggggaggcgaggccctgccttggggtctgaggggagaggtgaggccctgtcctggggtccaagggaggaggcgaggccctaccctgaggtctgagtggggatgctcagccttgccctggggtctgaggagggaggctcagccttgccctggggtctggggcatgtaggggcttggacatcatctgtcacggatggagtgtgaggtctctgctctccagctcccc

SEQ ID NO: 1561023 - DNA, 4001 bp, Homo sapiens
acgcacacaaacgcaacacacacagaaagagacacacaaatacagcgacacactacaagggcaaaacacacagtcacacactatcagggaaactaaaaaatacatcatacaggaacagagtgacgcaggcagaaaaacacagcgaccaaaattcagtcacacgaatacagggtctcccacccagtggcacaggccacaatttcacaacctccactcacactagcctggggcccagtgcaccacactccacactcttgtctcactgcatacaaagctttttcctgccaaaaccccctcatccacccaaaaccccatgagaaagttgctccttggccaggcacagtggctttcgcctgtaatcccagcactttgggaggccgaggtgggagtatcacttgagcccaggagttcgacaccagcttgggcaacatactaagacttcatctctacaaaaaaatttaaaaattagccaggtgtggtgttatgcccctatagtcccagctactcaagagactgaggcgggaggatcacttgagcctgggaggccgaggctgcagtgagccatgatcgcacccctgctctccagcctgggtgacaagagagaaactccgtctcaaaaaaaaaaaaaaaaaaaaaagttgatcctattcactcattttactaaggcagagcctgaggacaggagagagaatccacaagaggcaaacagactcttacagaggggcacacatgtcattaaactgtaataacactcctcacctgcctctgtgaccttattaatccccacttcctttagtcctaatttacagatgagaaaactgaagctcaaaagaaatgcttcgtatcgaagcaggcgcaaaggtttccatgctcccacacaaacatccatgcacaaatagtccccatgcaagtccagatgagaaagccaaggcctggggaggggaatggatctcttttgcacaaggcagggatgcggacatcccagagagcttcagtcacacacagagaatcaaggcaggcaaacatagacaggaagtcgctggctcacccatgctggaggtggggagcccaaatacagggagacagggttacacatgctctgagggggaggccaaccccatccgcccagcttgcccggcagcaggactgaagtatggaaacttgcagtggcccggccaggagggggtggccaggggattccagccaccttcaccccgtatcccaggtcctgcacccagctggggagcccccagcttccccctccccagaggcctccaggaaaagttcggagaactccctgcaaggagtggtgcgcctttttagaccgggaaagtggccgccagggcgaccccctccgggtcaggcccagcccagcgcccccaaaggtccagtgcagtccactcactctgcgccctggtcgtgcgccacccgcagtcgcgctgccttgaaccgagtgagcggacgccgctccgggggcggggctggagctggcaggcgagggggcgggccagcgacgcaaagggccggcggtcgccagcagttgccccctccccttgggtcccgggcactcagcccatggctgccagcctgtgccactcgccgcggcaccggagcgcgccccggcggcgactggcacaggcgagccctcagctgccccctccgggcctgggctgtcctcccagggacgctccatcgcggtgggaggactcggagaggcgggaaagggagggttctgcagcagggcggtcgcagcctgagcctcttctccccagcggaggggtctcctctgtcctgggtgtccgggcactgcgccctcccattgcccacccacctgtgaactgagcttcctgggctgcaccccaaggacgccccgtcgatgattcggaggggtcttcagtgggttgcttagcaggagtcttcagtgggggccaccttagcctgagtcctctcccaccagcagataggttcccgctgctcccgggcacaggcccctcccaatttcccgctcccgcccccggctcagggcgagtgggggtggggcgggcccgggcaggattgtgatgggaacttgccgctcctcagataaggagggtctctcctgtcccaccccctggattccgtgttcccccgaccgattctctcccacccttatcgctgacgacaaagtgatttactcattaatggtgtttctgggctgtgtccttagcagacagtaaaccccagcaatgtaagaatttcttttttttttttttttttgagacaagatcttgctctgtggcccagagtggagtgcagtggcaacatcataagtcactgcagtctcgacctccgcggctcaagccatcctcccatctcagccggctgaacgtagctgctgggactccagtcgcttgcaaccatgcccagataatgaatgagtgtctccctcacttcctctgtatctctctcaggaggatctcagagtctctcgcctgcgtgtctctttgtctctgcgtgtctctttgcctctgcgtgtctctttgttgctgtctgtgatgctctcccacgcctctcccaggccactgctcctccaacgaccagtcccgctggccccgaaacgcccccaccccgacttcccaggaacttccagacggtcccagctcttccaccctcagattcaggaagggaggctgggtcccgctgctgcgaccttctccaggaccgtgccctttgcccctgatgcttcaggccctgctggccgcgggtggggtgagggcgccccaggagagatgagccagaggctgagaataagtgtggatccgggataccctcgtgggaggaaactcagggggcactcaggccgggtcaggcccccatgtagccccttggggatcccagccctcctgcccccgctgttccctcggtgggcagaacctttcctgcctgctctgctcaaagacacagccaatgggacccgcagggtgggacggtgttaacccttcagtgccaggttccccagtcctgtggaccaagccaactccaatggtgcccactgggatgacccctgaagatctcccagcatggctgtggctggcacccagtaggtgctcaataaatgacctccttctgtaaaggggaagccgcgccccagggtggggaggtggctgcttcacacctcccaggcgccaatctcacttctctcgaaaatggggctcttccggctgcgggtcccgggctcagcaacctgcctctccagctgcctccctgaacttctttcccacgaattgggaccctggggactcaggctccaggatctcgacagatgttgggagtcccatccctagctgccactccacactcctggccacagttcttaaaactcagatcacatttcttttctgctccaaaccctcccgtggctccctgtgtttctcagagtaagtgatcaagtcctcagtgaggaccccgcaaggacaaggccatatgccgtcctgatttgtctctttctgttacttctgtgcctctctctgctccactctgcttctgcctcccgggctcctccgagttccacacacacttcaagacttttgaacttgggggccaggtggcctggagcacccttctccccaccccttcccagctggtcagctggtcacctcctcagagagaccttccctgatctgtccctcatctcaaatggcagttggcattatctgaaatcaccttgcttttgctttttttttttttttgtaatctccctttattgcccaggctggagtgcagtggtgcgatttgggctcactgcaaacttcgcctctgcaacctccgcctcctggcttcaagcaattctcctgcctcagcctccagagtagctgggattacaggaatgcaccaccccgcccagctaatttttgtatttttagtagaggcggggtttcaccatgttggccaggctggtctccaactcctgacttcagatgaatcgcccgcctccccctcccaaagtgctgggattacaggcg

SEQ ID NO: 1561024 - DNA, 4001 bp, Homo sapiens
aaaacacaaaaaattagccaggcatggtggcacgtgcctgtagtcccagctactccagaggctgaggcagaagaatcatttgaacccaggaggcggaggttgcagtgagccgagatcgcatcactgcactccaacctaggtggcagagcgagactctgtctcaaaacaccccccctccccaccaaacacacacacggctgggtgtggtggctcactcctgtaattccagcactttgggaggctgaggcgggaggattgtttgaggcccaggagttcgagattagcctggacaacataggagaaccccgtttctacaaaaattagccgggacgtgttggtgtatgcctatagtccaagctactcagtggagtcccagctgaggtgagaggatcacttgagcccgcggggtcaaggctgcagtcagtgagcattgattgtgccactgtactccagccaggacaacagagcaagactttgtctcaaacacacacacacaaacacacaagcagggagttccagagacgtaacagtaaacacacagaacgcacacaaacgcaacacacacagaaagagacacacaaatacagcgacacactacaagggcaaaacacacagtcacacactatcagggaaactaaaaaatacatcatacaggaacagagtgacgcaggcagaaaaacacagcgaccaaaattcagtcacacgaatacagggtctcccacccagtggcacaggccacaatttcacaacctccactcacactagcctggggcccagtgcaccacactccacactcttgtctcactgcatacaaagctttttcctgccaaaaccccctcatccacccaaaaccccatgagaaagttgctccttggccaggcacagtggctttcgcctgtaatcccagcactttgggaggccgaggtgggagtatcacttgagcccaggagttcgacaccagcttgggcaacatactaagacttcatctctacaaaaaaatttaaaaattagccaggtgtggtgttatgcccctatagtcccagctactcaagagactgaggcgggaggatcacttgagcctgggaggccgaggctgcagtgagccatgatcgcacccctgctctccagcctgggtgacaagagagaaactccgtctcaaaaaaaaaaaaaaaaaaaaaagttgatcctattcactcattttactaaggcagagcctgaggacaggagagagaatccacaagaggcaaacagactcttacagaggggcacacatgtcattaaactgtaataacactcctcacctgcctctgtgaccttattaatccccacttcctttagtcctaatttacagatgagaaaactgaagctcaaaagaaatgcttcgtatcgaagcaggcgcaaaggtttccatgctcccacacaaacatccatgcacaaatagtccccatgcaagtccagatgagaaagccaaggcctggggaggggaatggatctcttttgcacaaggcagggatgcggacatcccagagagcttcagtcacacacagagaatcaaggcaggcaaacatagacaggaagtcgctggctcacccatgctggaggtggggagcccaaatacagggagacagggttacacatgctctgagggggaggccaaccccatccgcccagcttgcccggcagcaggactgaagtatggaaacttgcagtggcccggccaggagggggtggccaggggattccagccaccttcaccccgtatcccaggtcctgcacccagctggggagcccccagcttccccctccccagaggcctccaggaaaagttcggagaactccctgcaaggagtggtgcgcctttttagaccgggaaagtggccgccagggcgaccccctccgggtcaggcccagcccagcgcccccaaaggtccagtgcagtccactcactctgcgccctggtcgtgcgccacccgcagtcgcgctgccttgaaccgagtgagcggacgccgctccgggggcggggctggagctggcaggcgagggggcgggccagcgacgcaaagggccggcggtcgccagcagttgccccctccccttgggtcccgggcactcagcccatggctgccagcctgtgccactcgccgcggcaccggagcgcgccccggcggcgactggcacaggcgagccctcagctgccccctccgggcctgggctgtcctcccagggacgctccatcgcggtgggaggactcggagaggcgggaaagggagggttctgcagcagggcggtcgcagcctgagcctcttctccccagcggaggggtctcctctgtcctgggtgtccgggcactgcgccctcccattgcccacccacctgtgaactgagcttcctgggctgcaccccaaggacgccccgtcgatgattcggaggggtcttcagtgggttgcttagcaggagtcttcagtgggggccaccttagcctgagtcctctcccaccagcagataggttcccgctgctcccgggcacaggcccctcccaatttcccgctcccgcccccggctcagggcgagtgggggtggggcgggcccgggcaggattgtgatgggaacttgccgctcctcagataaggagggtctctcctgtcccaccccctggattccgtgttcccccgaccgattctctcccacccttatcgctgacgacaaagtgatttactcattaatggtgtttctgggctgtgtccttagcagacagtaaaccccagcaatgtaagaatttcttttttttttttttttttgagacaagatcttgctctgtggcccagagtggagtgcagtggcaacatcataagtcactgcagtctcgacctccgcggctcaagccatcctcccatctcagccggctgaacgtagctgctgggactccagtcgcttgcaaccatgcccagataatgaatgagtgtctccctcacttcctctgtatctctctcaggaggatctcagagtctctcgcctgcgtgtctctttgtctctgcgtgtctctttgcctctgcgtgtctctttgttgctgtctgtgatgctctcccacgcctctcccaggccactgctcctccaacgaccagtcccgctggccccgaaacgcccccaccccgacttcccaggaacttccagacggtcccagctcttccaccctcagattcaggaagggaggctgggtcccgctgctgcgaccttctccaggaccgtgccctttgcccctgatgcttcaggccctgctggccgcgggtggggtgagggcgccccaggagagatgagccagaggctgagaataagtgtggatccgggataccctcgtgggaggaaactcagggggcactcaggccgggtcaggcccccatgtagccccttggggatcccagccctcctgcccccgctgttccctcggtgggcagaacctttcctgcctgctctgctcaaagacacagccaatgggacccgcagggtgggacggtgttaacccttcagtgccaggttccccagtcctgtggaccaagccaactccaatggtgcccactgggatgacccctgaagatctcccagcatggctgtggctggcacccagtaggtgctcaataaatgacctccttctgtaaaggggaagccgcgccccagggtggggaggtggctgcttcacacctcccaggcgccaatctcacttctctcgaaaatggggctcttccggctgcgggtcccgggctcagcaacctgcctctccagctgcctccctgaacttctttcccacgaattgggaccctggggactcaggctccaggatctcgacagatgttgggagtcccatccctagctgccactccacactcctggccacagttcttaaaactcagatcacatttcttttctgctccaaaccctcccgtggctccctgtgtttctcagagtaagtgatcaagtcctcagtgaggaccccgcaaggacaaggc

SEQ ID NO: 1561025 - DNA, 4001 bp, Homo sapiens
ccacctcccaggggctcaggtgatgctcccacctcagtctcctgacaagctgggactataaacttatgtcaccatgcctggctaatttttgtatttttttgtagagactgggtttggcaacattacccaggctagtctcaaactcctgggctcaagaggtcccctccccccaactcagcttcccaaagtgctgggattacaggtgtgagtcactgcgtccaggctaagtaaaaatattgatcaatgaggccaggcatggtagctcatgcctgtaatcccagcattttaggagtctgagatggggggagatctcttgaggccgaggatcgcttgagcttgggagttcaagaccagtctgggcaacatggcaaaaccccatcctacaaaaaaaaaaaaaaacaaaaattagtcggatgatgtggtggggcacgcctgtagtcccagctacttgggaggctgaagagggaatatcccttgagccttggaggttgaggctacagtgagctgtgatcccaccactgcactccactgggccacagagaaagaaaaaaaaaaaaaacaagctgggcacagtggctcacgtctgtaatccaaccactttgggaggctgtggcgggcagatcacttgaggtccggagtttgagaccagcctggccaacatggtgaaaacccatgtctactaaaaatacaaaaattagccaggcatggtggcgcgagcctgtaatcccagctactcagaagactgaggtgagaggaagtcttgaacccgggaggccagaggctgcagtgaaccgaggtcacccaactgcacaaaacaaaagacgtcctggcgcggtggctcactcctgtaatcccagcacttcaggaggccgaggcgggtggatcacttgaggtaaggagatcgagaccagtctcgtcaatatggcgaaaccccgtgtctactaaaaatacaaaaattagccgggcgtgctggcgggcccctataatcccagctactcgggaggctgagttaggagaatcgcttgaatccgggaggcagaggttgcagtgagccgagatcgcgccactgccctccagcctgggcgacagagagagactatctcaaaaaaaaaaaaaaaaaaaaaaagaattccctaagctactccacaatgcccaaactacgtctcctgtcctatcaagacacagccccataccaaacacaagcaaccttttcgggagcctacggccgtccccctccagcctctccgagcctctcaagattcccatttgagataacttgctccaaaactcctcaaaacccgcattctctcagactggcccgcccgtgagctcccacaagagtgtaagctcccgtctgtccggttggccagtccagtctcccctgtgtgcagcacggaaccaggtcccataccctcgaatgaatgaactgcgtccctcacctcaccctttccacgtatccccagcccctcttatcccctaaccgcgatcaaaccccacaatcaccgctttcgggcctcggatttcctgagtttgaattctcccgctctctcaggactccccaacgcccccttcagagctcccatccttcggaacggccctcccaaccacttcccagaccttccagaaacatccccaatcaactcctccagtccccccaagagagagacgatcccagagcacagaattcccgcctcctcccttcaaatcacaccttcccgctccttccgggccgcaaacgcctcagaatagacgccccctccagaccctagcggcctcaagccgcgccggccctgaccgtttctgggcctccagtccccacaggcggatctgccggtcatactgtgccgcctcctcctcgctaatgccgccgccagcctcctccttctccaccatggcgccggctcttcctgcctcagctccggtcccgctcaagccaaccgcccgccggacccgcgcgccacctaccgccgccggcagcacgcccggagtgcttctgcgcatgcgcagaccctcccacgcctgcgcagtacctcgtccgcggagcctgggaccaaaagtacctcacgagactcaaaggcgatccggcgactgcatgtcacgtgacggagggtccaaccaatcctagccccaaaaatggcgcggcttaaggccccgagggcgttgcccacgtggtcacttatgtggcacttaaattctgcaaatatttaaggagtgcatactgagatcccagcaatagggatgttgtaaaataacggtattgagtgaaatcgacaaagccctgtcctcatggagtttacgatccagtgagaaaagcccgaagagaaataaatataaacccagcgatgataaatgctttggagaaaaataaagcaggacatggggctacagagtaacaggggtggtcagggaaggcttatcagaggtgacattgaactgtcaatttttttttttttttttcatagagatggggtccctctgttgcctaggctggtctccaactcctggcctcaagccatcctcccgcctctgcctcccaaagtgctgggattacaaccatgagccactgtgcccagcctttcatgtccctactatgtgttgcactttgtgcccagccctggacatacaataataataaaaatgaacacatctctgccttagaggcagtcacggcccagtgggagagaggagcgttaagaaaacaggaataggccaggcacggtgactcgcacctgtaatctcagcacttcggaaggccaaggcaggcagattactttaaatcaggagttggagaccagcctggctaatgtggtgaaatcccgtctttagtaaaaataaaaaaattagcagggcatggtggctcacacttgtagtcccagctacttggaaggctgaggtaggataattgcttgaatccgggaggcggaggttgtagtaagccaagatcatgcctctgcactccaacctgggtaacagagcaagactctgtaaaaaaaaaaaaaaaagaaagaaagaaagaaaggaaggaaggagggagggaaagagagagggaaaggaaggaaggaagggaaaaaaaaaaaaaaccagggatggccccaggtggtcaatatagggaaacgctatctctattaaaaatacaaaaattagcttggtgtggtggtactgagtctatagtcccagctacgtgggaggctgaggtggaaggatttctgatgttagaatcataggctttttggcagggcacagtggctcatgcctgtaatcccagcactttgggacgccagggagggcagatcacgaagtcaggagttcgagaccagcccggccaagatggtgaaacccccatctctactaatactaaaaaattagccgggcgtggtggcacacgcctgtagtctcagccaattgggaggctgaggccggagaatcgcttgaacctgggaggcagaggttgcagtgagccaagatcctgccactgcactccagcatggatgacagagactcccgtctaaaaaaaaaaaaaaaaaagccaccatgcccacctaacttttgtatttttagtagagacagggattgcaccatgttggccaggctggtctcgaactcctgaacttgtgatccacccgcctcggcctcccaaagtgcacggattacaggtgtgagccaccatgcctggcggaatcatagatttttatttaagaattgcttaggccggaggtggtggctcacgcctgtaatcccagcattttgggaggcagaggtgggcggatcacgaggtcaggagttcgagatcagcctggctaacatggtgaaaccttgtctctactaaaactacaaaaaattagccgggcgtggtggcaggcgcatgtagtcccagctactgaggaggctgaggcaagagaatagcatgaacctgggagatggagcttgcagtgagccgagttcgcgccactgcactccagcctgggcaacagagcaagactccgtctcagaaaaaaataaat

SEQ ID NO: 1561026 - DNA, 4001 bp, Homo sapiens
gagtgatgggaagtctcagtcaccagcttgacaggaagatcacagcagcttttcaggcctatggaccgtccagggagaaaaaaaggataaagcctcttaatttggcttagctgatgggaggccctggtggcggggcaccacacctgaccagccgccaatctccactctctgcattttctctgggtaaatatgtagatcagtgggcttcctgccttatctgagtaaagagaatccatagtgaaaagaaacacaagcttgagcttttaaaaggcccatgtgactctggccgagacaactatccacccttgagcccagggtttctcatcaggaaaaaaaaaaaaaaaaaaatccctacttcttctcatcaccaattaataataaagccctgtgatctccgtagttccggagtcaggatggtgggatgtgtcaacagccccactgcctgcaggggctggggggtgggcggccaggcggagcaactacaggggagaggtcccagagtagccaggtggaaaaaaggcagagaaaaaaagctacaggaataaggaaaccgcaggtggctaacctttacttgcctctctgcttttcctagggatccctttgaatcccccaagggaggcgttagagcccccgatctgcaaatgaggactcgtggtggcacagagaggaaaagcgaatcgtgatggcaaccacacaccgagtgtttacatgcgccaggcagcacgccaagcctgctccacgcaaacttatttaatccccaaatcaaagtcctattgcttttttgcttcttacaggagaaaaaaaaaaaaaaagaatagaaaagaggactcagaaggggttcaaggtctcctatgcccaagatcaggccaccgagagctggcagggtccccaagtccagagagactgacggagctgggggagcccaggctctgcccgcctcccgggcagttctgaggctggttttaaagtccacccggggtctcccctcatttcacatttctgatcactaccgtcaacaccacttttccttcctgccacgttacttcaccgagcgagtaccggcaaaccgtgaaaactggattgtggtgggtttttttctatttttccctttgagtatgtcctacgggtgtttcctttgtaaatcagccccgattcaggctggtcggtcccctgtgggtcacaaagcatcttccctggggaaaccaagcagccgaatcaggaatcccagggcctgggttcaaatcccgacgctgcccgtcctcggccgtgtgaccttggccgagtcccttcccctcgcctgggaagtgagggtttcagggtctcccctccaggtacggaggaggggacgagacgaggggagaaccctcctctcagtggacgatgtcacccgtcaccgtttctcctgcacgcgtgccgtttttgtggttctcctggccccattgcggcgttaggatttgaacccaggcccagccggccaaggaactctctccggggcctcggaggagccgggggacgcgagagcgccaggtccggcgaggccgcgaacgcggccgggggcggacgccagggcccgcgagccaccgtcgcggccaagaggaccccagacccaccctgtgcccgccctcggggccccaaatccaccttcttcagccgctccatcaaaacgctcttgttgccgctcgagtccacattccgtttcctcagctccgcccgcagatcgatcactcgcaggtcgctgaggcgccgcgtcccggtctctgacgaggcggagctcagagccgccgcgcccgccgctccagaatcacctaggcctgacagagtctccgccattccagggaccctggctccgccgcccactttccacagaaccgggccggttttatcaggctcctagcacaaaatggcgccgcctgcgagggaaccgctccagtcgccccagcgcgcctcgcttctgcgcaggcgcaccaagcgtaggttctagtatcccggttgcaactgcacatgcgcagtgagaacaacgcggggatgtgcgcagacgcgttgcgtctcgtcagcctcccgccgggaactgccgggacgcatgcgagctgcagattcagcgcttgcgcgttgtgccggggaacccgcggttggtggacgcgcgagcgtccttgctgctaagtacgctagtgggggcggtgcgcgtgcgcgtgcgcggccgcaaagcggggcgggaggaaacgagtgcgttttcctcttaggcggcgccattttgtgttcagagccgctatagctgccggcggtgtgcgactgagtcggtggcgaagacgggaacgcgacgatggcggagactctgcccgggtcgggcgactcgggccctggcacggcttctctcggcccgggcgttgcggagactgggacgaggcggctcagcgagctgcgggtgatcgatctgcgggcggagctgaagaagcggaacctggacacgggcggcaacaagagcgtcctgatggagcggctcaagaaggtgaggcggcgcggggctcgggggtggcgcaggaggcccgggcacgcccccgcctgcacctgtcaccgcggctcccggacccggggcgccctgggttcgccccgcgtcttggccgaccccggttcgaggtgtcgggcacccagggggccggctgtgtgaccttggcccgtcaccgctcctctctgtgcctcccttcctatcctctttccaccttttctcctcaagcgcgctcagcgtgcggtcttctccgctaccagggtggccccgggacccctcctggggctcccgatcgagccttggctctgtgaccttgggcaggtgcctttctctctgtgcctcagtttcctcctccggagaatgggtgtctggcggactccagagcatttacaggaaagggggcggtgcttgttcttgccccagggctttggcctttacgaagctgtccacccgggtcccccagatcttctcgtggccggccccttgttgtcattttgggtctgcctgagacatcaccttcctgagcgcccttcctaatgcgctgccccacctccttgccagctcatcctgcgtttgtgtcgcacctcgctgaaagcaggggctaaatgcaaaatattaaggggttgggaattgtctgtttccgcaactggaacaaacaacttgagcatagggagggagcttgtgggtacccagtcctggacccggcaggtggcaggcactgagggacctgttgaatctccccaggctggctgctgttcctcctcaccagcggtggccagcccttcaccgaggccgggccaagtgcagcctctctgttctaatttgtcccatcatataactttaaagtcgaaggtttggcattgtcgagttgagttgccattttggaactggtccttgaccccaattctggagctcctgctcacagcctccctctcctttgtcatttggacccagagagacccaagttgtgcggggttcctcctccgccttttgggcttgcggcccagatagctgacccggagttgctctttgcaaggacgggtttgcctttgtttcatgggaggttgttacttgtaaggaacagtgtgtgccctgcagctcttaatgatgttgtaaaactcatctctccctaataggcggttaaagaagaggggcaagatcctgatgaaattggcatcgagttagaagccaccagcaagaagtcagccaagagatgtgttaaaggtattgtacatatgctgcttggggcttgagtgttcagagaatttagagaaatggtgtgtagtgtgctcttcccgccttctaggctgggagaatttctctggtactcggtgtccctccactaagagttagctttgctcgtcaccacctaacaggtagctctgtcaagggcacagggaggaggaaagagatgtacaggtgccaagtgcaattaaaatatacgaaaaacgtttcagcttctgccattgggattaaaagtcaactagagaaagacaag

SEQ ID NO: 1561027 - DNA, 4001 bp, Homo sapiens
tctcaggttggtgtccttttctttgggttaagacctattttttgaaccaggaaggaagccaagtaggtacatttggttcctcagacccgtagaagtagctttaagagcttgtctttctctagttgacttttaatcccaatggcagaagctgaaacgtttttcgtatattttaattgcacttggcacctgtacatctctttcctcctccctgtgcccttgacagagctacctgttaggtggtgacgagcaaagctaactcttagtggagggacaccgagtaccagagaaattctcccagcctagaaggcgggaagagcacactacacaccatttctctaaattctctgaacactcaagccccaagcagcatatgtacaatacctttaacacatctcttggctgacttcttgctggtggcttctaactcgatgccaatttcatcaggatcttgcccctcttctttaaccgcctattagggagagatgagttttacaacatcattaagagctgcagggcacacactgttccttacaagtaacaacctcccatgaaacaaaggcaaacccgtccttgcaaagagcaactccgggtcagctatctgggccgcaagcccaaaaggcggaggaggaaccccgcacaacttgggtctctctgggtccaaatgacaaaggagagggaggctgtgagcaggagctccagaattggggtcaaggaccagttccaaaatggcaactcaactcgacaatgccaaaccttcgactttaaagttatatgatgggacaaattagaacagagaggctgcacttggcccggcctcggtgaagggctggccaccgctggtgaggaggaacagcagccagcctggggagattcaacaggtccctcagtgcctgccacctgccgggtccaggactgggtacccacaagctccctccctatgctcaagttgtttgttccagttgcggaaacagacaattcccaaccccttaatattttgcatttagcccctgctttcagcgaggtgcgacacaaacgcaggatgagctggcaaggaggtggggcagcgcattaggaagggcgctcaggaaggtgatgtctcaggcagacccaaaatgacaacaaggggccggccacgagaagatctgggggacccgggtggacagcttcgtaaaggccaaagccctggggcaagaacaagcaccgccccctttcctgtaaatgctctggagtccgccagacacccattctccggaggaggaaactgaggcacagagagaaaggcacctgcccaaggtcacagagccaaggctcgatcgggagccccaggaggggtcccggggccaccctggtagcggagaagaccgcacgctgagcgcgcttgaggagaaaaggtggaaagaggataggaagggaggcacagagaggagcggtgacgggccaaggtcacacagccggccccctgggtgcccgacacctcgaaccggggtcggccaagacgcggggcgaacccagggcgccccgggtccgggagccgcggtgacaggtgcaggcgggggcgtgcccgggcctcctgcgccacccccgagccccgcgccgcctcaccttcttgagccgctccatcaggacgctcttgttgccgcccgtgtccaggttccgcttcttcagctccgcccgcagatcgatcacccgcagctcgctgagccgcctcgtcccagtctccgcaacgcccgggccgagagaagccgtgccagggcccgagtcgcccgacccgggcagagtctccgccatcgtcgcgttcccgtcttcgccaccgactcagtcgcacaccgccggcagctatagcggctctgaacacaaaatggcgccgcctaagaggaaaacgcactcgtttcctcccgccccgctttgcggccgcgcacgcgcacgcgcaccgcccccactagcgtacttagcagcaaggacgctcgcgcgtccaccaaccgcgggttccccggcacaacgcgcaagcgctgaatctgcagctcgcatgcgtcccggcagttcccggcgggaggctgacgagacgcaacgcgtctgcgcacatccccgcgttgttctcactgcgcatgtgcagttgcaaccgggatactagaacctacgcttggtgcgcctgcgcagaagcgaggcgcgctggggcgactggagcggttccctcgcaggcggcgccattttgtgctaggagcctgataaaaccggcccggttctgtggaaagtgggcggcggagccagggtccctggaatggcggagactctgtcaggcctaggtgattctggagcggcgggcgcggcggctctgagctccgcctcgtcagagaccgggacgcggcgcctcagcgacctgcgagtgatcgatctgcgggcggagctgaggaaacggaatgtggactcgagcggcaacaagagcgttttgatggagcggctgaagaaggtggatttggggccccgagggcgggcacagggtgggtctggggtcctcttggccgcgacggtggctcgcgggccctggcgtccgcccccggccgcgttcgcggcctcgccggacctggcgctctcgcgtcccccggctcctccgaggccccggagagagttccttggccggctgggcctgggttcaaatcctaacgccgcaatggggccaggagaaccacaaaaacggcacgcgtgcaggagaaacggtgacgggtgacatcgtccactgagaggagggttctcccctcgtctcgtcccctcctccgtacctggaggggagaccctgaaaccctcacttcccaggcgaggggaagggactcggccaaggtcacacggccgaggacgggcagcgtcgggatttgaacccaggccctgggattcctgattcggctgcttggtttccccagggaagatgctttgtgacccacaggggaccgaccagcctgaatcggggctgatttacaaaggaaacacccgtaggacatactcaaagggaaaaatagaaaaaaacccaccacaatccagttttcacggtttgccggtactcgctcggtgaagtaacgtggcaggaaggaaaagtggtgttgacggtagtgatcagaaatgtgaaatgaggggagaccccgggtggactttaaaaccagcctcagaactgcccgggaggcgggcagagcctgggctcccccagctccgtcagtctctctggacttggggaccctgccagctctcggtggcctgatcttgggcataggagaccttgaaccccttctgagtcctcttttctattctttttttttttttttctcctgtaagaagcaaaaaagcaataggactttgatttggggattaaataagtttgcgtggagcaggcttggcgtgctgcctggcgcatgtaaacactcggtgtgtggttgccatcacgattcgcttttcctctctgtgccaccacgagtcctcatttgcagatcgggggctctaacgcctcccttgggggattcaaagggatccctaggaaaagcagagaggcaagtaaaggttagccacctgcggtttccttattcctgtagctttttttctctgccttttttccacctggctactctgggacctctcccctgtagttgctccgcctggccgcccaccccccagcccctgcaggcagtggggctgttgacacatcccaccatcctgactccggaactacggagatcacagggctttattattaattggtgatgagaagaagtagggatttttttttttttttttttcctgatgagaaaccctgggctcaagggtggatagttgtctcggccagagtcacatgggccttttaaaagctcaagcttgtgtttcttttcactatggattctctttactcagataaggcaggaagcccactgatctacatatttacccagagaaaatgcagagagtggagattggcggctggtcaggtgtggtgccccgccaccagggcctcccatcagcta

SEQ ID NO: 1561028 - DNA, 4001 bp, Homo sapiens
cctaagaagccatcggggtcatcatcctcaaagtggccttgctgaagcaccttgatgtggtgctcgtagattttcagggctggcccgaggcggatggacaggccggtgagcacatctgtgcgctgcatgagcagcaaagatttgccatcaatttcctgggtgggacaggaacagagagagccgggatcagggcacatcccagggaggccctctgtgtctgtcagtgtgtagtcctgggctggaaactcacctgctcttggaaagctgtcgcctgctccgggaatccagcctcagtaaaatattcgacgacatccatcacggtccactcgacgggatcagatggcttctctttgcgcccgggactgcatcaaaacaaacagacaccagtgaacacggatgtctctctggctgtaccacacacctgagcagcacccccatgtctccaataccccaacttacggacagccaaagggggtcccgtcggccccaggtagggctggtttgcctgggggcaaaggcacgggggacggggagtctggcccggtggcaacagaagctgggaaggaaaaaaacacctgtctttggctttgtcttcgggctgagttcctctccacctagcactcttccccacccagagggatccttacctgttcccccttccttgttcatggctgccatggagaacacctggcgggtgccgctgcccggggctggcccccgcccttcatcctggccctggtgcggtccgcagggggtccactccttgaccctctccttggcactctgaggtccccgctcgccgttaagctggtggtgctgggcacctgcaggacggtcactctcgggcacttcagagccctctgacacatcatcttcttcatcttcatcttcatcatcatcttcttcctcttctttctcaagtactcgctcttctccacctctctggagccgaggagagaagcatgcaaaattagtagctgttctaatcccagaccctgactgtggcgtccgggcggtggggaggaggaaccgattccacctttaagaacaatacggactaacttttacgcattcactccgtgccaggctctgtgttaactaaagccctcgacaaccaaatcttactaaactcgctcaacaaccccaaggggtcgctactgttattaaaccgcgtttacagcggaggaaactgaggctccgggagattcaatcacttgccaaggtcaccacgcaccgagcccgcaggaaacgcgcgcaaagccccagccacccgccacccagttcctcccgggactcgcgcccccgccaccaacttcgcccgcacctgcccaccgcgcggcgcccccgctccccggcgcgctcaccttgctgcgagacgggcgggcgctggcggccggcggcgcccgtccgggcctgtccccgcggggcagcgcaagcgctccgagacgggtgcgctccagacggcctcgagccgccgcctcctcctccagcagcccctgcacgcggccgcgggttaggcgaccgccggcgccgccgctgcccccgaggtagcgcacgacttcccgcaggctcacgggccgcgccgcgccgccggcccgcaccgcgcccccctccggcggcggctgtggctgcggcggcggcggctgctgctgctgtggcggcgccggcggggccggcggggtggctccgcgccggggcggctggacgcgcgccgcgttgcggtacgagatgctccccttgtagctgacccggagcacggcgcgctgctggatcagtttctcgagctcggcgcgcgtgcgctccggctccgggccgtgccgccgccgcaccatccggcagatgcgctccaggtccggccgcgccttgcgcgagcgcagcgagtcgatggtgtccaggatccactcttggtagtgcggggaagcggcggacgacgaggcggcggccgccgtggtggcggccgccgccgtctccggcgggggtagggccgggggccccgccatgcctcccgcccggcccggctgcaccgtgcgcgctgcctccctcccagcgcggcgcccccctccccggctcccctccctccgccgctgcccgcctcctccgcctccccccccggggggcgcagcgcctcggcggagcggcggcggcgctgctgtttctttgcaaaaaaaaaaaaaaaaaaaagagagagagagggagagagagagagaggaaaaaacagtgagagagaaagaaaagagagaaaaaaatatgcacacactcactcactcgcacgcacgcacacacagacccgcttctgctgggcgcgcgcggggccggggatgcgagggggaggaggggagcgcggcgcggccggcccctccccgccgccgccgccgccgcacgcgcgccctgcgcccgggacactccggccccccttccttccctccctccctcctccccgccgcccgccttcctccctcccacccccacgcgcccgcttttaaggtggagcccgggccccccgcccgccccctttaccctgcgctctcgctcactccggctcgctccggcccccccttacaactcccgcgcgctttttaaggaggcgccgcggagttggcccggggcgggggcgggggaaagcggcgggcgggggagggggaggggagtgccggggggagtggagagggggcgggcagggcgggcgggcggcgctcggccgccctccagccattgggcgcgggacccagacgtccccggcgcccagcccccctctccacgcctctccagcgcgctccgctctcgggaccgcacttaccgggaactcgccgcccgcgggccggggctgccgcgctcgcagggtgctgcggggaccctcctgctgccgccgcccccgcgtccctcaggcgcgcctggcccggcgctgaggatgcgggaaggggggcgcgcaccctctcccccttctactccccctgccagggccgcccccgccgccgctcggcctcctggcgcgccagccccagcgcctccctagagcgccctctcggtcccgggctggacgccgagggggcgcgccgcagatttggggaccccgaatctggggtcaaagggcagtttgacgctcgtttctcctgcggggccgaaggagtgccggaatttcagctaaaccctggttacaaggacttcaagccaggacctgatcggcctgcacgctggggtccgaaattccctttccaaccccctgggggtgtgtgggtgggtgatcgaagtcgagaacaccagcgacactttttttttaaacaaaactttattggtaatagttttcaaatatgtttacaacagcacactgttcaagaggaagtctcgtccttcgcagcacacaggttgaatcgcccccgcacccacccggggccccaccccaggcctgagaactcctcctgggatggggagaagttatgagagggggaaatacggggatgaatggggtggctccccagcggctccccacttttctattacgagagaaaaaagcacaaatgagaaagtgggggagaggtgatggacagctgacagctaagctggaggaggggcgcccaggatgggggaggcggaagctggtgggtgagtaaaacaggcagcccctccccagcagctctagccttgaaccccgggccgtggcttggggggacttggcctcttctgttcccttttgcagggatgccctccccactcagctgagggaaggctggacgttaaaatctagcggagaataaaattaaggagttggggggaaacgctgctgggaggaaagacttgggcttggggctccccctctgtctttttgggggatgactcctctttggcagggagaggggcagctgctttgtctggctttcaaagcccaagggtgaagacaggtctgttggggaaaaagagagcggaggcttcctaaaggggcctagaccctcgcaggattggcagagaggattccccggggaggggcccaggggagattagcagcg

SEQ ID NO: 1561029 - DNA, 4001 bp, Homo sapiens
atttgggagaaaattctctaaaaagtgtctgaggaaggtgtggtcttctgagactggtcctggagtgggatgacagagggatgtttttaggaaaaactcttcagagatctcagttgaggagaaagctgagtaaagtctccaaaagagtatatggggaaggcggggtcttctgagagagtgtcagaggagagggtttttcagaaagaattataggactttctcagagcaagagctcgggttattttgggggaaaattaggtgtgtgtgagggtcttcttcaagggattctagaggatttaggggacctgtgtgagcaagttcagggagggatatctctagaaaagtcccttagtaaggcagaagtattgattcaaggggttctggtggtgtcaggaaggtcttggagggatttcaagaacatacgtcaggagggctccagggggtcgctggggtctctaagctgtgtgtgtgtgtggggggggggggtcctgaaaacctgcatatcagaggggtcaccaagagaatcttacggtcttacaggggttgtgaggaggatcttcagaaaattcctctaaaaccggtctgcaaggggggattctgaggtgttagtgaaggggagttctacgggatctgagagaaaaaccatgaggaaagttttcaggatccttaaacaatttttggagcgtgtgatgtgggggactggaaaagatgtggagtatgtaaaagggattttggaagaagcttttggaatatgatgctgagagtcctctggagatttcaggcaattgctggagatttttagaatgagtgggggtggggaaggggatcccggtgaagatcactgggctacatgagggtgatctctagggcattttagggtggtgagaccagggggagacaggaggcctctgggggagacttttgggatctgtggaaaggtccagagggatacgtgaagggggagtgtgtatgagagatggttgcaatacggtggggagggggatggagtcttctaggtgagtttttgggatctgggggcatttcacaaagtctgtgaggaagatttattttggggatatgggaaggagatcttcagggaagatgatcacggtccgtcgggggcattctgaaggacttctgggagggggaatcagaaatgcagggggtatgagcggaaaatctccaaggaggtttctggaatggggtaagtgggagggaaaattcttaggatccgggagggggaagtcgggtgagcctgttgggctgtgagaggcagggctccgggggagagttctggaatggacaggggtccggagggagccttggggaggtgtgcagggctcgtgagggaggctcctggagcagctatgagagccacgctgtggaatggacgaggagtggcctccgaggactatttctggagacaggaggaggacgggggcttcggggccaaagggcgggggtctgcgaggaaagctgctgggacccatgaagggctcgaggaggcgactccacgggaggggtgggttttgcggggacctttcagggcgcacacgggggatcggcaggctttccggggctctccgagggggatgtgcggggggtcctgaggagaggcccccggcccggcccctcggcaatcccgagggcatgagaaagatttcggagggaagcttcggccagggcccaggagggagactggggacgggcgcggggcttctcccgtggggcccggccccccgaggcccgcgttccgcacccgcccgccgccgccgcccgcggttcggggtccctgagggggcggggccgcccgcgcggcctgggtcgccctgaggggagccccgcgcgccccgactcgccgccgccccgcgccggcccggcccgagactcaccgcctcggccttcgccgccaccgccgccgctcgggcctcctcaggccaccgccgccgccgtcgccccctctcgggcccgcaagctcccctccctcctcccgcaccgaccaccgccgccgccgccgccgccgccgtcgcgctgcgtcaccgcgccgtgcgtcaccgcccctggccccgccccgacgggggccgccgcgcgccggcattagctcacgcccgggtgacgaacggcgcgccagccaacgggcggcgagggcagcccgaagggcgggaggtgtgagccgagtaaggcggggtcgcggcgaggggggagcgacggtggtggaacggggcccaagaggcccgccccctcctcggcgggattggtcggacgtgggggtgacgggcagtcggccaggcctggggtttggggctggggggcggggaaggggcggggcgcgcggggcgttgcccagggcaacgggcccggcggagtctgaggttgggcctccaggcccgcagggggcaggctcgcgcgcgtccaccccagctgccccgagcgaagtcacagttcctgattcaggcgttccaggcctcctcttccccgccccttgggtggcccgcctcacccaaggctgtcctcagtgggcgtctgcactcgggcttctgggcgctcggctttctcatcgcgctgttctcagccttgccgcttgctctctccgatgggaatggcgaggcgagatctagcctttagggtgggaagagaatgcacagaaagcgctaaggatcaaggaggctgtcaataaacgggagttgttgctgtgactttggttgtgatctgtgcgttccacaaactgtattgggtccgggtgaactaatcagagggacctgtgttcagaaggctctcggtgacagagatctggcttgttacaggcacttagagaggcagtcgggatggagggtcgagttgaagacagggaggggtgaggaacgagcagaggccagttgtttggccacttgagggagtttggacttgtcccgagggcactagggagccgtgaagggcttcaagccggggaggatcatggtgagtctggggttttggagagatgtctctctggcttatacatggagggcggattggagggaatgaaacgggatcgggagtccagggaggcagctgggggagggggtggggaagaaagagggggtttgcacgagggagggactgtggggagggaaggaggtgcaggtgggagggacgccctggaggcagagcgaacgggccctgacactggctggctatggagtggaagggggagaaaagtttaggaccaggcccctctagccgggagactgggcgccagaagcaggttgggaagatactaagcccaatgtggatgcctagtagcgaggtccaggaggtgcacaaaccctgggtctggagcttaagggagaaattgaggctggagaccaagatttaaggatcgtcaaagatggtaattgaggctgtgggagttaggggtctagcccggggagggtatgaagggtcactggagacagggactgaacagaaccctgaaacagagaggcaggatttgagcaaaggaattgacgctgtcgatgaatattgcaaaaggcagccagagagaggaaaaccaggagagtgtggcattatagacgctttgaggaaaggctgtttcaccagggtggggccatgtcacaaaccccatccactacctcctgcatttaagcaacagccttcacactgcatagaattattgtgctcattaactgctggttcattaattcattcaataatatttcttgactatctaatatgtgccaggctctgcttaaggtgctagaaacacaacaataggatgagcgcggtggctcacacctgtaatcccagcattttgggaggccgaggcaggtgttcgagaccagcctgaccaacatggtgaaatcccatctctactaaaaatacaaaattagcggggcgtggtggcacatgcctgtagtcccagctacttgggaggctgaggcaagagaatcgcttgaacccgggtggcggaggttgcagtgagccaagatcgtgccattgcactccagcctgggcaacaacag

SEQ ID NO: 1561030 - DNA, 4001 bp, Homo sapiens
tagtatatatgtatagttgtatatgttaaatgtcttttagtggggcatggtggctcacatctgtactcctagcactttgggaggccaaggtgggtggatcacttgaggtcaagagttcgagaccagcctggccaacatggtgaaaccccgtctctactaaaaatacaaaaattatgcagatgtggtggcatgtgcctgtaatcccagctactcgggaggctgaggtgggagaatcacttcaacctgggaggcagaagtcgcagcgcactccagcctgggagacaagagcaaaactccatctcaaaaaaaaaatgtcttttactagactgtgaactcagatcatgagagggcacagcagggtacttaagattgtggagtctgggtgtggtggctcatgcctgtaatctcagcattttgggaggccagggtgggaggatcacttgggcgcaggagttcaagaccagcctgggcaacatagtatgtccctgtctcaacaaaaaatacaaaagtttagccgggcgtggtggtgtctgcctgtagtcccagctacacgggaggctgagtgggaggattatttgagctcaggaattcaaggttccagtgagctataattgtaccactgtactccatcctgccatcctgggcgacagaacaacaccctatctcaaaaaaaaaaaaaaaaaaagtggattctaggccagaaagcacaggttaaaattcccactctgccacttcccagttgcatgacctagcgcaagtgaattagcttctcgaagccttagtttcccctctgataaaatgggagaaataatggcacctacttcatagagttgctgtgaaaattaaacgaggttaaagtgaataaagcacttcaaacaggctgggaggggagtccaagagaggaatgggaagacgtggggaccccactatcgttagcacctcaacacagagatattgtgaacccggtcctaattcccttttataagtgctagcaattttattattattcaccgcatatttgcaacatctagaacaccggaatatagcagttgcaccttaagtatcagtttaatagaaccattcattaatggattcattcattcattcattaactctatttaactgcctgctatgtgtggcggaggtgcacaactctccctacctctctctctaaacgcaagagctccaccacaccccagccctgaccccgtccgattcacacttggctccccattttcctttgtggtcttagggaaaggctggcatgaggttgcagcacggagggcaatgtcacatagcaagttcctaaaggacaggaggtacccagcgagcagtatgaaacaagcgcataatgggtgtccaggacacagtaggcattcttggcacatagtagggcctcagcactcactggacaactggcacataagtgggtgccatgcacaagacgttggctaacttgggaaataactaaaattcctactacaggttcgccccctgccggagggcatcttgcaaacccaattcttccgtaaagcaaacgtctgcgccccccggccggcgcaggcgcactcacgatcgcgggcaggtccgccgagcgcagctcccccttgcggagctccagggcgtgtgcggcctcttctgggcatgcgcagaaccgctctatgtccagctgagggagtgcgctgtagccctcgcgcgcatactcgtacaggaggttccggtttcgtttctctgtagtgaaacttctccttggactatcgttggagatgcagcctccccggggccggaacccccgacgagtcagcaaaggccacaagcgccgcgccatggacgcagccatcttggaccgggaacaaggcggcacttcgtcccgcccactccgcgtttagaccaattgcaaggcagcgaacctgaccgtgacgagccaatcagatcctgaggaaagttgaccgcgatagagtccttcgtcgcccaatcgtcgtctgtgtcccgcctcttcagtgacgcgaggcagaaccagccaatccctgcacggatagcgcccggaagaggctagaagctggattcagcgtgtccgcgacctcacctttaggtcctgtgaggtcggtggaatcctggggtcctccaaatctaccaggccatctccccagtttcccagttcttcctgcgtgcgggcgagagtggttgggccctcgggaacccactcagagcgaggctaaatttacggagggactttctgttagcagcatgagggcctgtggttagacctatagaggtatttcctttgatttaagccagaaagtcctgagagcggatcggggagcatttgcggatcggtcactttttcctcctttctgagtctcttatcccctaccacagggacggcccaggtggcaggatgtcctggtctggccttctccatggcctcaacacgtccctaacttgtggtaagtgggggacttgggcttcagggacgaggctagagggggagggttattcgctcttggacttgtgtgcctccgtcggagccccgagggaaacgggggtggaaaaacacggtggggttttggcagagctagggctgctagagcaagaggtgggaagcagctgcatggagggctactgcgtgtcaagcggcgtttgggtcagttttattatttatttatttaagatctccctctgtcgcccaggctgaagtgcagcggtgtgatcacagctcactgcagtctcgacctcctgggctcaagtgatcctcccgcctcagcctcccaagtagctgggaccacaggcctgcagaaccacaaccagctaactttttgattctttgtagagagggaggtctccctgtgtcgcccagtctggccttaactcctgagctcaagtgaccctccacagcctccaaaagtgctaggattacatgcatgagccactgagcctactattattttaaacagcattaaaaataatgcttcctggccagccgtggtggctcacgcctgtaatcccagcactttgagaggccgaggtcaggagttcgagaccagcctgaccaacatggtgaaaccccgtctctacttaaaaatacgaagattagccgagcgtggtggtgggtgcctgtagtcccagctgctcaggaggctgagacaggagaattgcttgaacccaggaggcagaggttgcagtgggccaagattgaggtactgcactccagcctgggcgacagagtgagactttgtctcaaaaaaaaaaaagaaaaaaaaaaaaaaggtaatgcttccttgaagaataaagagttacttttgtctgtagataacattagatgtgaacaaatgcatctttgtaaagtgctttaaacaatgcctaaaacaccaaaattgagttgctactactctaagatctgttctctgggataataacccctttcggccctctccaggcccagctctggttccccggctctgggctacctgctccatggctaccctgaaccagatgcaccgcctggggccccccaagcggccgcctcggaagctgggccccacggaaggccggccgcagctgaagggtgtggtcctgtgcacgtttacccgcaagccgaagaagcccaactcagccaatcgcaagtgctgtcgagtgcggctcagcactggccgcgaggccgtctgcttcatccctggggagggccacaccctgcaggagcaccagattgtccttgtggagggcggccgcacccaggacctgccaggcgtcaagctcaccgttgtgcgtggcaagtacgactgtggccacgtgcagaagaagtgacggctgggggcacagtgggctgggcgcccctgcagaacatgaaccttccgctcctggctgccacagggtcctccgatgctggcctttgcgcctctagaggcagccactcatggattcaagtcctggctccgcctcttccatcaggaccactattaagccataggagtcctgggggtgcaaagggtgcccctctgtca

SEQ ID NO: 1561031 - DNA, 4001 bp, Homo sapiens
ccatgtgaggacacagggagaagacggccaaatgcaagccaaggagagaggcctcaggagaaccaaccctgctgacatcttgatctcgggcttccagcctccaaagctgtgaggaaacagagctctgttgttggccaggcacggtggcgcacacctgtaatcccagcactttgggaggctgaggcaggaggaccacttgaggccagtttgagaccagcctgggcaacacagtgagaccccatcttaaaaaaaacatttaaaaattagccgggcatggtggcatgcgcctgtagtctcagctacttgcagagctgaggtgggaggatcccttgagcccaggaggtcaaagctgcagtgagctatgattgtgccactgcactccagcctggacaacagcgagaccctgtctcaaaaaaaaaaaaaaaagaaaaaaaaagaaaagaaaaaaggccaggcacagtggctcacacctgtaatcccagcattttgggaggctgaggcaggaggatcacttgaaataaggagttcaagactagcctggctaacatggtgaaaccccatctctactaaaaatacaaaaatgagctgggcatggtggcatgcacctgtaatcccagctactcggggggctgaggcacaagaatcacttgaacttggaaagcggaggttgcagtgagctgagattgtgctactgcactccagcctgggcaacagagcgagactccatttcaaaaaaaaaaaagaaagaaaaaagtcaaaagttctgttgtggaagcgcctgcctttgttatggcagccccagcagatgaatgcacactttttctgcattcatgctaggagatttttgaaggcagggactggctctggttcaattctgggtccactgcccgcccaacccccccagcacagggctggcctcagaaggcgtgccctgaactgactgacctcaggttgcctccctattttccgtttcatggaaggacacggtgcttggcagaaaggcccagggtagtggggagctgtcctgcgcacccactgtgtgccggccttgctaagtgcttagcagacagcatcactctgcatcatcccacggtgaccactacagccgccacaggaggctcctgagctgggagctctgtcttacccagcattatacaaccccagcaactagagcagtccacattcactcagaggatccaccattcttccaagtagaaatcatcacccacattttccaaaggaggaagctgagactcagagagggcaagggagttcctcaaaacacagtttttggcagggcaccgtggctcatgcctgtaatcccagcaattgggaggctgaggcaggcggatcactggaggccaggagtacgagaccaccctggccaacagagtgaaacctcatctctactaagaaagaaaaatacacacacacacaaatgtagctgggtgtggtagtgcatgcctatagtcctagctacatgggaggctgaggcaggaggaacacttgaacctgggaggtggaagttgcagtgagattgtgccactgcactccagcctgggcggcagagccagactgtctcaaaaacaaccaaccaaccaaaagaacaaaaaacaaaaaacacacagctttggagggcagaggtaagacttgattcaggcctgccagcctccccagcctgggctaccccaggcccgtgccccgcccccagctgaaccctgccacctctggccccacagcctcgtacctttctgacgatgggtgaccagaaggacgcggccatagcaaccctggcccaggggacgcacttcctcgtagagctcgtccacctcggctcggaccagggtctgagcactcagcgtcatcatgtcctccagcgcgcgggcagcctcctggccctgctggagctcctctaatgtcaggccgcccagaccctcctcctcgctgtcctccgaagcccctgcctccgccggcccttcctcagactgtttgccgggcatctctgcgagaacagagaggggtgcccaggctcaggtcccaggcccaagggaggaggggactgggggtctggactcctgggtctgagggaggaggggctgggggctcatcgcgcttctcattgtgactcagtctccctcttggtgagaggtggggagacaagtctggtgtgagttcaagccccaggtcacagatgtccctgcccgcgtgccgccgccgccacccgcccaccctgaggttgaaagatgaaccagataactgagactcccccatcttgtttccaaagcaaacagacttgggccctgggggtggatgagtagactctgtctcctgagaacaaacaggtgctcttgggctcagggctgggagggcgggctgtgcagagggcctgggacgcctgggtcctgcatgggaccgagcacttgggatcagtccccaagctcctgacaggcctggggtcccactttcacagcccacccacctccctccgacccagccccccagcccctcctccgccaggcccaggggtccaggcccccagcccacctctctcccggaacctcatacaattcacacaactggggaccccctgattctgtttccctcaccctccaccgctctacagcctccaggtgcagcccaggctcccctgagggaccgaggactcgggccacctggtacagtcaccctcaggtgctgcccacctcaggccagggcaccttgcccacctcccaacctgggctcagacctccagacctcacctcctccaaggccctcctgaccctccggccgccggctgtggtcagtgcccggcacttagggctcatgccagcagaggcctgcctaggagcaagaccccgccccgactttgggggtcgtaaggccccgcccctgggcccgccccttctgcccccactgggagcagagcgacatcgtgtgatgactcctggaactggctgtggtcaggtgaataccctgacccaagagttgagccctcctccttcagacccaggagtccaggccccagcccctcctcctccctcagactcaggagtccaggcccccagcgcctcctccctcagacccaggaatccagtctcccagtgcctcctccctcagacccaggagtccaggccccagcccctcctccctcagacccaggagtccaggcccccagctcttcttccctcagacccaggaatccaggcccccagctttccctccctcagacccaggaatccagtcccccagtgcctcctccctcagacccaggagtctagaccccagcccctcctccctcagacccaggagtctaggtctccagcccctcctccctcagacccaggaattcaggtctccagcccctcctccctcagacctaggagtccagacccccagcccctcctccctcagacccaggagtccaggccccagcccctcctccctcagacccaggagtccaggccccagtccctcctccctcagacccaggagtccaggcctcagcctcccccacccatctgaagttttccggcagaactgaggcctccccaccccctcaaggcctctcttcccagttgctccagcacctgcttcccgcccctctgagtctgaggtcatcccacactgcatcgttctggaatctcattgtctcattctttccccaaactagaccccagcatctgatcccctggacacccctctccaagcacttgtgtctgacctgtcaatggggcattgatggggcagctgggtggggtcaaggcaggggtgggttccagaaatgatttcattttctacacgggacccggactcctgggcctgatggaggagggggttgaggacctggactcctaggtctgagggaggagggggttgaggacccggactcctgggcctgagggtggagggggttgaggacctggactcctgggcctgagggaggagggggttgaggacctggactcctgggtctgagggaggagggcctgagggctcctgat

SEQ ID NO: 1561032 - DNA, 4001 bp, Homo sapiens
tcctgaaactatccctacccctaatctccaaactcgagagaccctagaatatcatgggttctgtcctgacctggtctcctttctagaagaaaccccattatagcccatctccaactcagtctatatacacatcctcaaccgtctctgcttctctctgcagcccattcatgcttttctccatactcacgatgaatctataatcaactctaaactcaacccacccaactccacccatgcccacaccctaacctcagagtcaactaaaatcccaaccctgtctccctccccacccccttcattgactccagtccatcctcaatcccacccccagctccctgcctttccacgattgtgtttgggtgattggatggattagggttgaggtcaggcatggaacctcgttgagaattagaaagggggaggtcatgtgggggctcagggtggagatggattgggcgggccctgatttggggtcagagttggagacagagacggggcttgggacagagttggacctgggataagcactcccaacctttgtccctcgtggcctcaccctttcctgcagcatcccgctgaggtccccacagggcgcgtactcctgggcgaaggcaaaatagcggggggtctgtaggggtcctgccagggtctgcagcaggcctgggtgtgcagagacgcagcggcccacacagaactccctcaggaaggtgcttctcaggaccaaatcccgacgcaggagcttcagagccacagctggacctgccagggagatgggtcggagggacactcaggcggctccagtcctgctgtggggcctgagggaagccgtgtaaactctctgagcctcacacttctcatgggcagcacgggctcccctgtctgtgaagtgtgggtgggaggagaccttctttgaagaccctccctgctctgcctcggactgcggcgtgggcttgcacagccgcctcaccctctccgggcctcagtttcccctggcatcaagtaagagacacggtggtgacttgggttccaacttgagttgcatacctgtcctgctgtgggaccgtaggcagtccctcgccctctctggggtggggcctgtgtttctcagaagatcccagagctcttaactttcagagtacccccactgagaagggtccccatcagctcctcctgggaatgccccctgtctgggtggcttccgagaatgcttattgtggggcagttggggaggctgcccttgggtggctgaactcacccccctggtgaggctgggcaaggagcacgcggccgtaggagccggagcccagcttccggatgaggtggtactggtcccgaaggctcctcaccggggtcaccctgctggtcgtcagctccaccagccgttggagggctgtggctgtgtcctcctacgggagaggggcagggtgaggagggggcgcgtctggggtccactgagagtggtgggggaggaggtcacggcgcagccccaggatggagggtggggcaggggacaggggtcactgtccccagagaggaggatgagtcacagtgactcacccggactcgggccacctgtttttgtgtcctggagaggttaggggtcactgccacagaggccccgcctgcccctgtctgtgggagcaggccaggagcccccagccccgagtgggggtgcatcctcagcccacacagtccccctgcccaccctggtctctctctccaccgtcctcttcccctgtgcatcccgctgtgtgtttctgagtccaattctctgggggccttggtctcgctgtgtgtccttggatctctgtcatcctctctccctgggtctgggtctctgaggtctttgcgtttccctgttttctgtttctcttcctctctctccccgtgttgcctcctgcctctctctccttcttttctctctctgtcttcctcccctggctcccgtctctcacctctgggtccccatcctcaggggtctcggaggccctgcgctccatctcagggcttcctgatgtggggtggcccttgggcgggacccccccgtcagggctccccagaaagcaaccagccccctgcaccccacaggttctcgctgcgcagagccaagggatggaagctcgtctgcaaggtcagcctcagtcgccccttgtctgtccggctctgtctagctggaggagtgtctctgcctctctgtgccctcctgccaccctctgggtgtattccctgctgtgcttcccaggtgatagcccttactccccacaccctctcttcccctctctttagccaaccccagtctctccttccttctacaggaacacctttctgtcagcctctctcttgctccgtctatcctctctctttgtgcgtctttgtctccttctctccccgtctctctctctccaccctccctgtctctgtctcgcacttgggtctctggggtgggactccccctccctgtcccgtctctgtgggtcgccggcccctctcccctgtccgcacactgtctccactctttctccaccaactctgggggtgtctccacgctctgctccctgcctgctcccctctctctgtctgtctgtttcccgtctctcccggcccctctgggcatctccgtccgctctccccagtgtctctgcgtctctctcctcctctttgttcctgactctctctcaaagcctttgtccctccctttctctgggcctgggacaggggtgtgtgtgacagctcagagacagagacatcctgtccccccacacccctccctcaccccctctgaccgctgccccctccctctcccttccaaacttagaccagcttggactctgggctccagtcccaggacagacgggacaaaacatattgtgaacccccaacaaggcccaggcctgagggcagaggaaagggtgggacagacccctccacacacctgagctgggatgactggcccagagctgagcacctctgtcttgccccagaggccaggagcgctggtgtccagggaccagggaacagttcccaaagccctcctccttcacaccaggagtgctggccccagctcctcctccctcacacccaggagtccaggtccccagttcctccatcctcagacccaggagtctaggccccaagccccacctccctcagacccaagagtccaggcctccagctcctcctccctcagatccaggagtctaggcccccagcccctcctccctcagacccaggagtccaggaccccagcccttcctccctcagacccaggagtccaggcctccagcccctcctccctcacacccaggagtccaggtccccagttcctccatcctcagacccaggagtccaggccccagcccctcctccctcagacccaggagtccaggtctccagcacctcctccctcacacccaggagtccaggtccccagtttctccaccctcagacccaggagtccagactccagctcctcctccctcagacccaggagtccaggccccagcccctcctccctcagacccaggagtccaggctcccagccccttctccctcagacccaggagtacagactcccagcctctccttcctcagacccaggtccccagcccctcctccctcagacccaggagtccaggcccagcccctcctcctgcaggactcaggagctgaagtagctgtgggaagcgccagggacagaggtgctctcatgttctcagcacctgttccgcgcctagccctgtgcggggctttacactggatcctcccagctgcccaaagggtcagtatttatccccagtttacggagcaggaaactgaggttccgagaaacgatcgtgttacacaaggtcagaaggggagcgggccccgggccaggcctgtgtgactcagaggcctgctgcctgccccactcgtgtttccactactactacagccctgctattaataaagacacagcaacggcagcgacgcgtaggcgctggaaggatctgcaggaaacaggc

SEQ ID NO: 1561033 - DNA, 4001 bp, Homo sapiens
agtgggtgcacggggactctctgcactgtccctgcagcttttctgtcattctaaaacagtttgaaaagttaaagtcaagtcgggcaggggggagctcacgtctgctactcaggaggctgaggcaggaggatccgttgagcccaggtggtcgaggctgcagtgagctataattgcgccactgcacgccagcctgggagacagagcgagaccctatctcaaaaaaaaagttaaaagtcaagcagggcgtagtggctcatgcctgtaatcctactgttttagagccaaggtgaaagaatcacttgagcccaggagttcaagaccagcctgggcaacacagcaagactccatgtctacagaacgtttaaaaattagctgggcatggcagcatgtgcctgcagtcccagctactcaggaggctgaggtgggaggattgcttcaacccagttggtggaggttgcagggagccgagatcgtgccactgcacaccagcctgggtgacagagcaagtccctgtcacaaaaacaaataaataaaagtgaaagtctaataatgagggagtgcttgcagctttcaggcttcaagaacgcagcctcgaggccccgccctgctccccgtccggtccttcccagcacaggacaccccaccaggtgcatgagccctcgaagccttcacttctagcaggtgccctcagcgattagggacagagggagacggggttcccagggctggccctgttcacatgtgggaagctgaacagagccaggccagctccccccacagtggctccgtcctctgcccacatctggatttgactcctagcagccaccagctcacctcagagacagcctaagtcccacccgcgcctgtgtgtccctccacagcccctccaggccggcccaggctcctgcatccttcaccacatgacccacccaccctccagcctcagctcagcggacccagtgcctccccagggaaccgggcccctctgcagtctgtagtgagggcaagcaccaaggcccctcaagggtgacacttgcatccctccccgccagcccccagttctggggccccagggagggccggggctgcccgctgtggttcttgtctctgtagcatttcaggagccctgggctgaggtggggagctgggaggacctggctgggaggacctggctctgcccgcttcaaaagcagcagacacagctcctcctgccctgggcagccaactccagacctgactccagaactgactccagacctgatgtgctgccgctgccctgtgctccaggacccatggggagccacagagccacagggatttgccggcctgcgccaccagagccagccctgaccaggcccacccagcctccgctccctacaagagccccataagacacccagagcccctccacctgaggcttctccagaggaaagccacagctctgggtcctaccccaggggcagaaggagggggacgcagccctcccgacagccactgccactgtcactgagggcccccgtccgggcagggctgagcccgacccccccactccgctcgggtcccccagcctacgcacagggcgccgctcccagcccgaagtcttaaatctctgcctcggaaccttccggcagattccctctcactgccagaagagacggacggggcggggtggggatttttttagatcctggcggcctcggactctaggatgagatgccggctgctccggcagggggcccggccgtcctgaatggggtcccacctcccagacccctgcccccgagggcctcgcccgccccgggaagggagtgttaccttgttcagagcctcaaactgcagccacagctgcagctgggacatggtcccggcgctcggggggccaggggtcccccaggaagcgctgcccgggagcggctccctcatgaccgcggcagcagccccagcattgggtcggccggggcggacgggggcggctctccgcccggctgcatttgcatgtcggtttagtcaccgccgccggcgcctacttcctctaaggccggggctgactttcaggaaatgatgccggccccgtaagtcagggcaattaccggcagtgcgaggagaattactgtacggggcggatctcccacaggcgctgtcaacacgcaaccccacccgtgccccgccgcaggaccagccccctttggggcacccggcggacgtgcagaatgcccaggtgggcatgggcctcggtctccccagactgcagggagctgggttccgttccacggggaccagctgctgttcctggtgcccccaaaccacaggcagggaaactgcggccaagaccgcctcccttcacccagcaccccacgcatgccaagcgcacctcaggccctgctgcgcccccctggggctctccccaccccacccctgcaggctgaggtccccgagaagcccctgccgccgaagcaaagtcccctccctgctctttccctgctgtccgtgcccagggggttcagcgggccccgtggcctcccttgatctggggctggcggagggagagctgagcctgggcccctcctctccaggctctggccagacccggcctcggccccctgggcaggaacaagtggtagcgtcctgggaaaagaacgttctcgctttggtagaaaaccaagtgtcaatgatgcacttgctggggcaaccccgggccgcgagcccgcccgcggccacactcttgcccgcactgtgaggaccctggcgcatcacaggggcctagacaccgcggggcagacacctgatgggacctcacattgggccacaggcggtcattctcggtgtccttggaggagctggggaggccccagggccagagggggtgggaggacggccgggctgtggagaggacgggccccatctgcctgtactcagcgactgacggggcagaggccgcattgcccacgagaccgcggccgagaccgcgcaggtggccacggctcctcctctgtgaggggaggaagggcccggccctgtggccaggggccctgggaaagaaggaaaccgccccgagaggccaggggagcccgtggctgggccggagggctcgggacagttctgggcttgtaagactcccgccagggctctgaggggagagtgggaccagggggccctcaaaccctgtgcactccgccccctcgggctcaccctgttctagaccctgaggccctgtgccagccccactggggccccgcgaccaggcaccgcagcagcggaggctggtgcagactgtcgcccacaccccttgccacgacccatcacctcctggaggctgggcgacaacacgggtccgtgccgctggggcgaggggcccgcctgccaggcaccccgcccgccaatggaaaacaaccaatggggaagaaacccacggagccgctcaatccggcagccaatcacagccaccgctcaacctagcagccaatcacagccaccgctcaacccagtagccaatcacagccaccgctcaacccagcagccaatcacagccactcccagagacagctccacaccagctccacgcaaaaaacccacaaccacaagcgctgctgaggacgcggggcagtggcctgggaaccatcctgcagctcctcaaaagaggcgaatggggagtaacaacccagcagctgcactcccacgtgccatcaggaggacccacagctcacaaaagcctgaacctacagctcaggagtggacccacagcccacaggacccacagctcaagggtggactcacagctcacaggacccatagctcatgggtggacccacagctcataggcgcctggacccacagctcatgggtggacccacagcccataggacccacagctcacgggtggactcacagctcacgggtggactcacagctcacgggtggactcacagctcacaggtggacccacagctcacaggacctacagctcacgggtggactcacagctcataggcacctggacccac

SEQ ID NO: 1561034 - DNA, 4001 bp, Homo sapiens
ctccatcccacccaccaaggggtccagatctcaaattcgccctttctcggcaagaactctgaaggtggcccggagcaggccactgtgagaagccatcaccccacgaccagggtcacccctgggaaaatctggggccgggcagccagatccctgaaggccagaggatgtctgggaagaaagggcgtggacggcacctgctgggcctgccacaaactctctgggtcccatgtccccgctgctcctcttccagggccgagtcagggagagacatcccagggagggcacccgaaacagcacagcacccctcagtcaggaagcagtgccggctgccctggcccggaggaagaggcctggaagaaagtttgaagcctgtaatccccgtgtaatcgggctggctgcccacggggtctgcggccctgggtcctcggcccctcccatgctcttctcttgaacctcggcttcctctgcccctctgtaaaacactcactgcaaccgccccccccgccccggcaaactggcagccagcatcagcacaggccagctccgaggccgggcactctcgctgacagggcgtgcaacagatggcaccaaacctatcccgtcccgtcccagcagtcacaggcaggaaggacgttctgagcaggcgggaacaacaggcattccgggaagaagcagccaggggaggccccggctacacatttaagagattttttttttttttttttaacttttcagaatgttaatcagttcatccagggagacacccaccgtccctgccccagcaccatccgtgcccggcgtccctggaggcgctgggtgggctctccacaacgcctgccccccacgccccaggtcagtctggggattggtccctccaggccccacctgccttattcttcgggactctggggtggtgggaagagtgccctacgggggacaggacccaccaggaggcctgcgcttccccttcaccgacacacgctgctcccgggccccactcgggccatctcagcccgctaccctccctcccgcctgtccctggaagccgggtttgaatgcgacccgcactcccacccccaacacgctctgcagactccgcccagacggccccggggtcacctaatatcagcaagcccccatcccaaaccgggggacctccatgcagaaaccgaaaaaccatctgccccagaagagaagtcggaggccccaggagcgggaggggcggggagcaaggggagggagggagacagggctgcgctgcggggccgagaaggcaagggtcctgggaccggggacaaggaggaggaaggggcacgaacgcccgaggagcctggagtcaggaatcggggcggcgggagagaccgggggtcactcccaggaaggggtcgaggtcacgaggcgcatggagtcgagagtccccaaaagggaaggccaggataccgaggaaaagcgggtgcggggtcaccaaggggctcgggggcaccgatgagtgcggggtcaagggttaccagaaaacgaaaggtcgggggtcaccaagctgcgcggtacagggagtcacccggaagagcgggaaggaaaggttgggagggttgtcgtggaaggtagggttaaggttcacggcagggggtcgccggggggcgggggggcaggtcaaggttcacggcggtggtcgcggggcagcgcggggtcaacgttggcggcgaagggcggggtcggaaggggtcgcggcggagggcgggggtcccgccgcgctcgcccccgccccacggcccccagaacccccagccccgggcgcaggggtccgcggggagcgccggacccacaagcggggtcgggccaggcaggggtcgcggtggagccggggcgggggtcgcaaccagagcctcacctcgggcccgggtccggccgggcgcggagcccgcggcgcctgtttctccgagcctcgcagctgccgccgctcacttccgggtttcgggcgccatcttgggggccccgcgcacttccggtcatgccgcggggcggggcctccacctgcgggggcgtggtctcggttcgggggcggggccaccttccaagccaatcccttgaggtccttccgctattcggaaggggctgggactcctacggctctgggttcgaatcccgccctgcctggttctcttgagaccccagcatgtgctttcacctcctcaagcctcagtttcctcttctgcaccgtgctggtgaaatggaatctgctttgtggtacagcatccccttttttcctccttcctcagaaccccctccaagcctctgcatgtgccacgtcccccactggggctcactcacccgagacttttaaactgagactccctcaaaagctactaagacgatcaccagccgggcgcagtggctcacgcctgtaatcgcagcactttgagaggctgaggcggatggatcacttgaggtcgggagtttgaggccaacctggacaatatgatgaaaccccgtctctactaaatatacaaaaattagctgggcgtgatggcgggcacctgtaatcccagctactcaggaggctgaggcagtagtatcgcttgaacctgggaggtagttattgcagtgagctgagatcgcaccactgcactccagcccgggcaacagagtgagactccatctcaaaaataaataaataaataacgaaataaaataaaatgaaataaaatcatcacctctgggcctgtcagacatactctctcacgaaaagttatctctgttcattaatctctctccctaaccaaatacagttctggacgcttcagcatggtgactggcacatgggggtttgggtaagtcccaggggctacccccaagagagcaggatcctttcaggcagggccacgggggcctgaggggctcctcctctcggtggctgtggtgggaggctgccctgcgtggggagctggagtctcagggcacttttcctgtgacttgagccagtgaaggcagatccagtgtgggaggcaccaccgcctccccagcccaatttcagccatgacaatactgatacagctccctggacccaagcagccacaagccagaggcctctgcccccattccaaccccctgaaactagagttgatttctccatgactttgttaattcattcagtgacttctaatcgatgctgctctgtgcttggtcatgagctgggaaaacccagggtctcacagaggactcagctgtctgtcccaacatcagaaagcccctggtctaggggagagagaaccaggaccagacactccaatatgcgggatctctgggagggttgaaatgtctgcctagggcttcatagagggctgcatgctgaagagtgtgttgaagctggggttttgaagttcaagtaggagtgtaccaggtagacaagagtaggaagaacagtccgggcaaagaaggcctggtaaggcagataataagcaggtttaagatattttagcacctctctaaaaaactgaggccaaaagccaggcacggtggctcacgcctgtaatcccagcactacgggagtctgaggcaggaggaacacctgaggtcagcggtttgagaccagcctggccaacatggtgaaaccccatctctactaaaagtacaaaaaagttagctgggcatggtggtgcctgcctgtattcccagctactagggaggctgaggcaggagaatcgcttgaacccaggaggtagaggttgcagtgagctgagatcacaccactgcactccagcctgggcgatagagtgaggttcggtctcaaaaaaacaaacaaacaaaaaacggtggctcacgcctgtaatcccaacactttgggaggctgaggtgggtgaatcacctaggtcagaagttcaacaccagcctgacgaacatggtgaaaccctgtctctactaaaaatacaaaaattagccaggcgtggtagtgggtgcctgtaatcctgactactcaggaggctgaggcaggagaatcacttgaa

SEQ ID NO: 1561035 - DNA, 4001 bp, Homo sapiens
cttgaggcccccttaaccaggagggcagctccctgaaggtgggacagggtgcccgccaccctgtctgatacgtgctttgcagataaggtggctcaccccatctgaccagctgccaccagctcctttgtaagggagatggggaagggggaggaacccagtgatatagctgcccaagcttctttcaccaaacaaaggctacgcggacccccccgccccgccaaatgtcccaggggtttaacctttccctcccccaacccccctgtcccccatctccccatccctgttcacctacattcagcagctggttggcctccttgctggcttggttgaccccattatgagcattctgcagctccttcccggcctggccagcagcatggtgggcaccttggccaagcttctccacttcctttccagcctggtcagcagcatggttgaccccttggccaagtttctctgcttccttcccagcctggtggaccccagtgtggaacccttggaccgctttgtctgcttccttcccggcctgttcaagggtatggtgaactccctggccaaactgccctgcctccttcccggcctcgtggaccccaggttggacaccatgaactgctatgtctccctctttcccagcctgccctgctgtgtggtgaatgtcgtggccaaactgccccgcctcccttccagcctgactaacgccatgatggaggccttggaccactctgtcttcctccttccccacctgcgaggcagcatggtggacaccctggccaaacttctctgcttccttccaggcctcattaaccccatggtggaccccatggccgagcttctctgtttccttcccaaactgactggcagcatggtggaccccctggccaaacttctctgtctccttccagccctcactgagaccatggtggaccccctggccaaacctcccagcctcatttccggcctgccccgcagcatggtgggccccctggccaaatctccctgcctcatttccggcctgccccgcagcatggtgggccccctggccaaacttctctgcctccttcccaacctgaccagcagtatggtggaccccctggccaaacttctctgtctccttccagccctcactgagaccatggtggaccccctggccaaatctccctgcctcatttccggcctgccccgcagcatggtgggccccctggccaaacttctctgcctccttcccaacctgaccggcagcatggtggatcccctggccaaacttctctgtctccttccagccctcactgagaccatggtgggccccctggccaaatctcccagcctcatttccggcctgccctgcagcatggtggactccctggccaaacctcccagcctcatttccggcctgccctgcagcatggtggactccctggccaaacctcccagcctcatttccagcctgccctgcagcattgtcgactccctggccaaacttccctgcctcacttcccgcctggttggccccgtgatggaccccatgatggatcagtttgtctgcctccttcccaacctgtccagcagcgttgttgaccccatggccaagcttctctgcttcctttcctgcttgtccaataccatggttgatctcatgggcaaccttgtccatgccgtggttgagcccctggacgcctttgtccaactccttgccggtgtggctccccatgttgctaagtccgttgaaaaccttctccacttcccttccggcatgcgtgattccactgttgatgccatccagggccttgcccacctctctctctgcattgctcagccctcggttgatcccttcaatgaccttctcaatggggtcatcgctggccgcccatccagacagggcccccagtagcagaaggagggagcaggagccgaccagacgtgcaagatgcatattgctgggaaggtcgggaaggatgcagagaggagccagggaagccacgctgctatttatcctctctccctctcgccctcttctccacccctcatgactcaattacccctgtgaggcactgagttggtcttcagtcaaggaggtgtttcccagggagatttggagttgagcaatggagaggaggaggaagagagggtgagtcatggatggagaagaactctggcatctttgctccttgccctccaccccagagatgggtgtctgcccttccaaccacctcctctttcattcctcacccactgtccaggcctcctctctcgcaaacccaccttccaccatgctccatccctgggatgcaggcaattcttcaacacctcactcctctcaggcatctaagcctccagctccccaggcagtgaggggctagaatgatgggaggcaccgtctggagaggggagaacactaggtgggatgaaggagtcatcagacctcgttcttgtgggccagcccctgccctcactcattccattccagccacacaggccttctccctgttccacaaacacaccaagctcattcctgctgcagggcctttgcacatgctcctctctctgcctggaatgcagaacccagatcttcacgtggctggctcctcctcatccgtacttgacttaaatgccaacttcgcaagaaaacctctcctgaccataacatggcattaattatactctgtagtatcacccttttgttttcacagaaaaaaaaaatctgaaattacctttattttttattgcctgtctcacctactagcaatgtaaattggtcgtgttgatcactgctgtattcctagcttcttgaacactgcctggggttcagtaaatatttattgactggacaaatggatggattcgaacaggccaaggaaagagactccgagcccgagtctgggtctcacagggtgctggagggaagggcgcctgggtcgccagggcagcatagagtcccttgtggagtgccgcagattttggaggcaggatcccattcctgtcgcagaacccagacctcctgcctcccagcccttgggcaagggcagggggctgattgccacgagctggaacaggacgcagtgtctcctgaaaagccggttgaggcagccacggggaggggccgaagacccagggcagcaggagcctgtgagccagaacctgggctggggccaggccctcatccttcctgccctcccgacatggggcctcctaagccccaacctgaagccccaagtgttgacatattggctcgggttggaggggaaacagctgagagtctggcctcaggcatgaaaagggcatcggaaggaagggcaggtggtggtgggcaggcttggggcagcagatgcatctagaagccagttgggagggaggctaagaccagaacgagagccagtgggtgggtacagtaggtgcaggggtgaaagatatttgggttttggtgccaaggggagagactgagagaggggtggaggtgggattgctggtgggaaggccaggcaggaacaatgtgcagggtgtgagcagctggaggtggcagagctatgtgtgtgggtgcccaggtgtggcgagaatctgcacgtgttttcaggctttgctcaaacaaaggcgccaaggcccactcccctcagaggacccggggttcctctccagctcctggacacttgactccacccaaagacaggcatcccaggacagatatccagaagcttctgccttctctgggctctgcctatagagggtgactaagtgtgccacctctccaagcttgagctcatcaaatctgtttcccggtttcacactccagggacaaagccaaattcctgggcaaactcaggtgtggtttttctgccctggtccagggccgaaatgatggagtttcccataccaggaggtggctgggcagagaagagtgggtgatgagtgtcagaatcctaacccacccagagatcaagaggtgggatttctcccactttgaactgtgttccatcttctttttgtgtttttggagggagagtctcact

SEQ ID NO: 1561036 - DNA, 4001 bp, Homo sapiens
tatgcttaattgtaaatgcacgaaataggagcatctatctcagagaatggctgtgaatactcaaagcctgacttctgccacacatttagagcacctcaagtgctcaatacggatgaagaggaatgacactattagcccttaacgcccaggtttcccctacatctgtctcctcgcttcccccacagcatgcctgcaaagacaaggccctggtcctgttctagatcccatatagattttcaaaccatgccaagcctccatattcagcctcccagctccacctaattcctaacttcctaagacacacccaaccctgatagtctattacatcccagcctctttcaccaatactcaataagctcagccccagttcctggccctggaactgctctccagcacctcccggggaagcacatgctacctacaacagtgactgtcacatatcagaagcttaatcaacatctgctgactacaggctgagggatccccaaaccctctgcagtatacaaagatgcttgcttgctcatttagaaagcaccaggcttcgcagacacaccctcagctactgagatcttctgaacagaagaatgctctgcagatactgctaggtcctatctggatcagtggtttccccaacaacagggtcatataccagtttagtgcttcacaaatagcttgttttaaaaagtaaatagaacaaaatagttcttcacagcacagcacaagtagtaagtggaaatgtcaattcgtggaaggtgagttaatgttaatacattatgttatataatgttaaatacattatgactgtctgtaccaggtctcaatgaaaaaatgtatcttaatgcagatcacggtcaacatggcccaggtttccccttgaaaagcactgtaatagtgggtctagatgaccctccagactcttccagactaatgtagattaattctaactctctcaataacccccagggtaatgcagaatcttaaaacatttttcatttgaattactgtctgaagggcaagtatatctaagctgggcaaaatttcctcattctctttccgtattattattcgccacaagctgctctgaccccaaaggcattcgaatttgctccaggcatcaaaactgcattcctgcagtcacattaaagccatctagatggttccaggtccttctaactgcccccagcctcctgtcacccattattagacactacccataccttggagaccccagaccctcagtacatctcaatatttggcgcccttccctggtgggcataacccaaccccctagggggccctaaatgacttcttagcccttgaacactccttctaggcctgataaatggccccagacttatgcagaccagttgcatcctcaggccagcccatgcagacactttccagccctaaaagacataccccaggcctctagatggctctgaagatactcttcaggtcttgcagaccctccttcacccctgggacatatctcaagatctcaagatggccccagaaccctctaaccagaccctagcctccggtcagcccaaaaagacaatctacagtgtctacagacacgatccaggccagctgtgtgatggagggcaggccttaggctcggtctaggcccagagacgccccaagtcctctcggagacgccccatagacgcccccaggaacccacggatgcgtcccggggccctgagaaggcccccctctcggcgccaggtttcgccgcagctgccgggcccgagaccgccccgagaagccctctaggacccgtggcttgtggggaggaccccgggacaactagcgacccaactccgccccgcccaccccaataggcccgagccccgcggcccggactgccgccgccatcttaccccgccgctcgggctgcggctccggccccggcgcggggcggggcgggctggggcggggttcgtgagcaaaggaggagagaggcggagctaaagcgccgccgagcttgccgggatttcaagtaccgagcacggcgacgtgaaggccggcgggaaggcaaccgcactcggtttcccagaagccaatgggacacatggggcggggtccgcgcgatgcacgccgggaggcgtagtccgcgcaccgcctctgtcgcgcggggacagctaatggggtgagaggtgaagtgggcggggccgcggtagcccgcgatgacgccccacagtgccctgcgcgcgcgcggaaagggtggcggaacaggaggtgacgtaagaggcgccaggcagaacagacgcaagggaattgtagtccggcggagtgagcacgacttgctggatgttgtgctgcccacattctggggctctcagaatccagatcctctaggcccccctaaatttagaaccagacgggatgcagtggcgcacaccgtagtcccactcgggagactgaggcggaaggatggcttgagcctagaagttagaagccagcctaggcaatatagggagaccccgcctctaaaaaaataaaaataggccaggcgcggtggctcacgtctgtaatcccagcactttgggaggccgaagcaggcggatcatctgatatcaggagttcaagaccagcctgaccaacatggtgaaacccagtctctactaaaaatacaaaaattagcctggcgtggtggctaacgcctgtaatcccagctactcgggaggctgaggtaggagaatcgcttgaacccgggaagcggaggttgcagtgggccaagatcgcgccattgcactccagcatgggctacaagacggaaactccgtctcaaaaataaacaaataaaaataaacttagaacctagaagcccgaccccatagccgcctcgttcagtacagagaagtctgaattccgaatcctctcactcagagcagtgtccagactcctatttccctcctccctccgactcaggagtctgattcttccttcctcggatccaagagtcggtctcccagactagtcctggtctcaagctctcacatacgaattcgggtccccccaagccagtgccctcgctcggatccagaatcctgggtccccagcctctccaattcctggacctaagagtccaggcccccggctccctcctttaccgaacctagtacgaaggaacctgtctaccttcctccctgacaccctcctccccaggacccaggagtccacatctccagccccattttctcctaaggacccaggagtctgggccctctgcttccttctccttcaagacccagaaatcctggccccaggctcttcatgacccaggcatccctacttgggcgagctggctcatggattaggaatgcagtgatctcacggcccctccctgccccgttaccctgctgtccccctctagggccccactctcctcccagtctgtcttccgcttggctgggacagcgggaaccggaagcctgggtcccttagcgggcggagactctagcttctaacccagacgccggggtcgaaagcttggctaggatcccaggagggaggtggagctactcctcaaaacctgctgcttcctcggagcgccctatatacggccgcgcgcgcgagtcgacgagctccgcctaccatactaaggcctcggagacgatgccccaagcagcagtgtcacaggggtccttatttgcatagcccctcccctgaggaactttccgccccgtctgctgaaagaataaattcttattagcatagccacgcccacagaccgccctcccgctgagagcgcgtggcgccgctcagggcaaagcacaggtctctcattagcatagccccgcctcattcggaattccccttcgcagcgaacgccgttccctttcccttattaacatagctcctccctttctttggcccgtccccctccttaagtgtccggagacgcgagccctccttgccagagctcatgattatgcagtagcctcattagcgtagcccgcccccccgggtcccgcccggctcccccgcaggcggta

SEQ ID NO: 1561037 - DNA, 4001 bp, Homo sapiens
tacataagagaaaatggggggatggaggggcctgaccatcttcagcagaatccaggagggctcctcggaggcagtgacccacagcccagcctggaaggctggggaagtaggggagagaactcggagagggaacagctaatgctcagttccagggcacaccaatagtctgcgtgggggcttttttttttttgggacagtctcactctgtcccccaggctggagggcagtggcgcgatcctggctcactgcaacctctgcctccctggttcaagcaattctcctgccttagcctcccaagcagctgggacaacagatgtgcaccactatgcctggctaattttttatatttttagtagaggtgggatttcaccatattggtcaggctgctctcgaactcctgaccttgtgatatacctgcctaggccccccaaagtgctgggattacaggcgtgagccactgcgcccagcctggggcttgtttctttacacacacacacacacacacacaatttttttttttttttgagacggagtctcactctgtcgcccaggctggagtgcagtggcacgatcctggctcactgcaagctctgcctcctgagttcacaccattttcctgcctcagcctcctttgggagtagccgggaccacaggcgtccaccaccatgcctggcttttttttatttttagtagagacagggtttcaccgtgttagccaggatggtcttgatctcctgatctcgtgatccacccgccttggcctcccaaagtgctaggattacaggcgtgagccaccacggccggcgctacacgtatgtattttatttatttatttagagacagggtctcgctctgttgcccaggctggaatgcagtagtgccatcacagttcactgcagcctcaacctccggggctcaagcaatcctcctgcctcagcctcccaagtagctgggaccacagacatgtgtcaccatgcctggcttattaaaaaaaaatctttttttcttttttttggagagtgagtcttgctagcttgctcagcctggagtacaatggtgccatcttggctcactgcaacctccacctcccaagtccaagcgattctcctgccttggcctccccagtagctggttttacaggcgcgtgacaccacgcccagctaatttttgtatttttggcagagatggagtttcaccatgttagacaggctggtctcgaactccggacctcaggtgatccactcgccttggcctcccaaagtgctggggttatagggtgaggaactgcacccagccgtccttgtttccacggagtcgatcctctgtttctggccaccctacaaggaggccttctctgcaagacagcggggaacctcggtcctcggggtagtgtgtgggagataactgggggcctgtgatacaaaaacctgaaaaactcatactctaggtaacgatgaggaacgatggtcaattctggggatgtaccaaggcctaggggaatctccacataaaggcgaatcagagctggggaggaaggacgcgaaggctacggaaactcgcgagagcgcggttcagaggcaggggactgcgggacatgacctgaggaagggccaccggaagcagctggaggatacggggtctcccgcaccgaccataagggcgcacacgcgcagaaaggcgctaggcccgggggagcgcggtcctgaggcttcccccaggccagcgccgcgcgcgcgcgcgcacgcgcattcgcgccgcctccccgcgtcgcccaccggcccgcccgagacgcgcgcgaggctggcctgggccccccgttttctccccacaaacggccggcgcccctcaccgccgagaccccccatgtcagcccctactccccctctggggaagtctgagcctggagaacccgagacctcggggccgcgcgcttacctgagggatccgggcgcgagcgcagcgcttcgccaagtcttagcaaccggcccggcccaacccacctcaccccgcctcgtctccgcctggagccgcggagcacgacgggagcgtagttccaggggcgggatcttcgccaggccaaggtggggcaaggactacaattgctagtaggcactgcgcgccgccgcctcgccccgccccgctccggcactgcgctcacatgacctccgggcggcgggaggggaggagaggcggggccgctgcgctgggcgagcgctgagtttgcaggttcgaatcccatcaagcggccagggaaaactcggaacccgggggatctttggaaggttagcagagtgggaaggatgaggcagagggggtatatgacacccgtcccctgagtccgggatggggccaggttccagttctgcctgttactgcactccggcgtgggccgccctcaggtttgagttttctcaccagtaacgtaggtgaagaagacctcttgcctctcctgggccaaacaagcacatttttttttttttttttgagacgtagcctcagtctgtcacccaggctggagtgcagtgctaggctcactgcaacctccacctcctgggttcaagcgatttctggctagtttttgtacttttagtagagaaggggtttcaccaaaacatgcatattttatgagcaatttgttactccttccagttggacaggtttaaccaagtggttctcaacgggagggaatttgtcatcccctcccccaacagcttgacagtgcctggctgtaaccagctcaggctccgatgccagagtcttgacaaaccagtaaggaggaaaaagtgcagtgaaaggaaggtgacttcctttcagagttcgcagcagggaggcagctggtttaggcctccagaaaccccttcaaacttgaggctggggtgaggggctaaaaaaggggaactgggaatggtgggtgtgcaggggaggtgctgattataagctctgtgtgttcatgaattttggtggcttaaaagcgcaggctggcctcatcctaataagggccgggttgcagaccaccttgaggaaatctctgggattttgcaggtgggtctccgtgcttggcctgtctccagattagctctaaaacgttctttcttttttcttttttttcgagacagtctcgctcttgtcaccgaggctggagtgcagcagcacgatctcagctcaccgcaacctccacctcccagattcaagtgattctcctgcctcagcctcccgagtagctgggattacaggcacacgccaccacacctggctaattttgtatttttaatagagatggggtttctccatgttggtcaggctggtctcaaactcctgacttcaggtgatctgcccgcctcggcctcccaaagtgctgagattacaggcgtgagccaccgtgcccagcctgttcctggaacttttaggtaatcacataattagatgcatacagttaggtaaacctgcagagtgtgagggagtttatggtgagaaaggggaggacgtgtttcaaagaaagtgcatttcaaggtcggatgcggtggctcatgcctgtactcccagcactttgagaggccaaggtgggtggatcacctgaggtcaggggttcgagaccagcctggccaacatggcgaaaccccatctccactaaaaatacaaaaattagccaggcatggtggcaggggcctttaatcccagctgctgggaaggctgaggcaggagaatcacttgaacccgggagacgaaggttgcgatgagctgagatcgcaccattgcactctgttgcctgggcgacagagtgagactccatctcaaaaaaaaaaaaaaaaaaaaaaaaaaaaaaaaacagcattccaggaaactatttcgctctcagttgctttcttttttccttttctgaataaaaactcagactgctgtgagtttcactttttctttttttagcttaaatacacatctctccatccctggatgcctcatgcaaactagccaagagcccctgttttgctgatttgttttaa

SEQ ID NO: 1561038 - DNA, 4001 bp, Homo sapiens
ttggggagggacctcccccagaaggagttgatggagcctcatcagtgtattgaaggccactgagacctccatcgaggatgaaatcaactgaggggtgaggtgggagagaggggccgtgtttgagggtggcactcgttccctgtgacctcaatgtcaatgtcccctgtcatggtgacatggccacacagacccatggcctcatgcagattgcctggtcccaccagccccaggagcagagctgagctgcaggtatttatggggacgctgaggcttgtgacttagccaggagggtgtgatttcccagcctccagcatcccgagtcctggggagccctggaggttctgcattgaggggttgtggggtagaggtagggggagaaaaaaggacagcttgggtaggtagggatggagaagtgtgttaaggttgatttcctgggttccgaaaacaggcatatcgactggacacagtggctcatgcctctaaccctagcacgttggaggttgaggtaggtggatcatttgcggtcaggagtttgagaccagcctggccaacatggcaaaaccctgtctccactaaaaatacaaaaattagccaagcgtggtggtgtgtggctgtattctgctactcaggaggcagaggcaggagaatcgcttgaacccagaaggtggaggctgcagtgagccaagatcgcgccaatgcactccagccaccctcctccccgccaaaaagaaaacaggcatgtctatgctacacctgtagagtttttcctcagtcgcatattttcacactgggaccctggtcacactctgcatatgcggtcacagccaaccccacacagatgccagaacacagaactgagctgcaggtgttcattggggtctctgtagtgatgaacagagccaggccaggaacgcggggagccccaaggaaggcaggagggccaatatctgatctgcaggggtcctcagatcagaaggctgcttctatgcaatcgttgctctgaaggatcttcttctgttggaaaaagaagaaagagaggagccggtggcctctgtgaaaggctccccagactcatcgttattgcccggtccccgagctcagaggagctccttgagtgtgtctgcttgttggggatcccaggctctggacaaagatggtggatgtgggttgtgtctcctgcttgagtgtgactctgcatgtgttggtgtaacacgtgtatgcatgtgtgtgggcaggcatggggtgtgtgtgttgctgttaacagcgtcctgtgtgagtgtgtgttgctgtgtactcatcatcagtgctttggtgcagtgattgtggttccctgcatgcctaggcctctcccgggcaccaggggcagaggttctccccttgcagagttgcagcgtctgggtcgaggacttggagaggtgaggcaggagggccctgttggggcaggtggggaacttcatctgattttgcgcatcctgggatgtggcttcctgcttaaaacgtggaaagcaggatggaaggcaagtgcagggaagtgcaagcctgggacgtgtggccatgtagtgtgtgcaggtccccccgggcacactcacaataacaactgaatgagcaaatctttctgtcacggagacattggcaaagcattgctggacattgaggaaggactcctctgtcaggggactggggttgtaacgagcaagctcctccttcaggaggtcttgggacacatcaaacacaacattcgcaagcagtttatcgatatccaggcaggcatcccctgtggaggatgaggtgagataagaaaacagaggaggtcagaattcagcgaaacctcccatggccaatgagaccttgggatggtgatgagagtgaaggagcagggccaccgcttcctcccagccctgctcgcctctttcttacccagctggacgctgcagatcagagccagcagaagagcacaggtggcggatgtcaccctcatgacagcggagtctggtcccagcaggcacaggcagggaatttggcgatgggtgagctttatgtatatctgaacaaggcacatgcctcttcgtgtgtgtgtgtgtgtgtgtgtgtgtgtgtgtgtgtgtgtgtgtgtgtgtgaatgtggtcagggcaggtctgcagagagaccctcggccctgggccatgctgttggggtggcagcgtatcgggaactggactcagcatgcagtgggaggggttgggtgttgtgacattctctctgtcctccctggagctccctgggattgggagcaggctgaacactggtgtaagcctgcaagtctgagtgtgcatgcacatgtgaccctgtgtcttggcaaacgtgtgtctgcacttggcacgccctagcacagaatctgccactgagtgctggctcaacaaacatttgctaagtgagtatgtctgtctgaatggatagcacattaggtgcagcttttgagaaatcagtaaactgtaatttagattcaaagaacattatctggagtaaaacacagaacctaaaggacatgagatgtagcaagtgtgttagggacacatgtgacacagtgaagggatcctacatgttggggaccagcctcaacactacccgtagggtacccgaagtctggtggtgacaaaggattgagaaaagacaagttaagagtgaaaggtggggagccagggggccagtgcaaaatgtggaggctgcaaaaggtgccgagctctggtctccacactatttattgagtacagtcccttcgatctaagaagcagatgttcagggagaaacagtgaaagggtggcagtgcatcacaggcataatctatagcaatagcagtttaaatgagtctcctttgtgctcaaacagcataactttaacttgttggagagtagctagtaggagcggccttgactgggagcctgcacgtctgtccacattccagtgtttcaaagaagtgtctttctccctgagcacagtgtttacagagaagacagcgggtcttgctctgagcatgggaacatgatggcaattaggaggctttcctcctcagaggccttttgtggctttccacaacttattcccgtatttttatggccagtttatacaggcaccccacaagcccttttcccagcacctacatatgagggagctgatgtcactcacgtgatttttgtctcctgacaggaccctaaattgtaagtgtgaccccaggggcagaatcagcaggtggggacagctgggggtggggaaggcagcagggatgctgacgcttgtacactcgggtgccagtgccgctccaatagcggtttgtgccctactgtgtcaagggagggtctggctaggagcacctgagggacacgcccggtgcagaggacactcactgggctgctgagagccatgtagaaccgcagagcagttcctagattaggctgtgccacccagactgagtgggctcacctcggccaggcatgagccatcactgtgcacgtacagaacctcatagtagcgcccaggacttgggcctcttaaaggacctacccagcattgggtaggacttagagtggccgtcaccagtggcagggccctgaacgcccccacattccagttgtaaagttgagtggatgagttgacagttggactggcagacgctgaagcaggggctgtggctgagcagggaggatggaggccactgccactccctggccggccacctgctgtgtcgtccctgccacctgtggtcctgcagcctgggctgcaacctgcgcagtgcaggcgtccatgcgtgctgagactctcagccggctctgtggcctgtcatgttgtgtgtgcgggacgaggcttgggtgcacgtgtgtgagaatgggattttgtgtgtgtgtgagtggaatgcgctggcaggattccacccactatgtggggtggagggtctgtgattatatgaatatgaggttgtgattgtggctgggaggggctgtgtggctgcctctgcctctgcatctgg

SEQ ID NO: 1561039 - DNA, 4001 bp, Homo sapiens
aaactcctcagtgcccttctggcggaaggtccactcggtgaaggtctcagcgttggtctcgctgcggcgcttgcaggagatgcaaagaattttgaaggtcatcccatacacggcctcggtctccgagtccacctccacgcagcccccgcaggctgaggacactgtggggacagcaggctcaggtcaggcagaggcacccattgccctaagcaatgccagacccctcacaaaccatctgttcccccctcaatgattaccagcagacaggactggatgctaggctgagccctgtcactcactgcgtgacctcagcaagtcattcatccctgagtctcagtttccctctctcttgttgaaagaaatggtcctttgcttccagcaatggctgggcccattttcatacattaggtagggccttgtacatgggaggccccataagtgggactgtcaacgttgccggtaactcagactttatgctacccgagtgccccttcctcagaaagtcccttgctggaggaacccaagcatctaggtggtagaatgagaattccagctaagttagaagtttaaggtggcagtcattttcaccattaaattgtaaaaccagctagctccaggagaaatgggttgggagaaaaggtctgggggtgggggattgtggggaggtgggcactgaaaccggggctgacccacactcagcccctctccacagcccacaagcccctgtgtgagccatcccctccccggcctctcctgcctccatcatcccctcttccccaggctcctcgcctctagagctcttcccaccccaaccccatccactactcaaagctttcctgagctctctcctgccccagggcttttgcagcccactgaattccagtcttagaattccttcacactcttacctggcacctcctttctgcctcccagcactctgtagctaacgctgtgtctcttctgctgcagccctgtgctgtccttgtttcctgatcctcaggacttctcatccatccgcctcccctgcggtccctttcagactccctgagggcctctgtctcagtccctcctatctttgtccctctcaggggtctctctgaaggtccctccactttttgtccactctctgggctcagaaggagacctctcctaatctctttccacctttctacgtctatcccttttcaaactccatgcaagattctctcccggtgttcacgggcacccgcatctccctctctcttctctccatctccttctgcctttctcaagtttccctttctccatcgcgctcagtctcttaactctctctctctctctctctctccaatacccctctctctgtctccgtctcccccttgacccccatgtccccagcatcccagcggaccactccggtgcgctccgagtccttctctgtctctcgcccccttcctcccgtcttcatctctccctgtccctccgtctttcccgtcccagtctccgggcgccgccttccccccacccccctcccgcggctgtgggtgtcacattgcagcctgcggggctccgggagcagctgactccgcgtttcctcgcccccggctgggcgcctgcagccgccaggctgtgccagcccggcccccacccgctggagcccaccctcacctccactgccctccccaagcccggctcccgcgcgcacaacttctgaagctgacttggcggggcccggggatgggccgggggtggccctcgcgcggctgccccgtgtcccgagcgccactcccgccgccccgccagtgcccccgcggtgccccccggccgcgcgcgccccccgcgcactcacccagtgccgcgccgaccactaaggccagcagcctccccatggctgcgcggcgcgtgctgcgcccccctcccgggccgccggtattaatagcggggcgagaggcggcgggacctggcggcggttagaatgtccccgggagcgcgcgggcgcagcagctgcggctctgggaccggcgaggggggaggagggggggcgcggcccccccgctccggttaccgccgggggcccagccccggggcccggcgtccgggcatccccgccgcgcgggcggcggccgctgctcgggctgctgcgctggcgcgcgcagccgggcacatccgctaggtgcaccgaccccggtcccgctccggctcgggcgcgctcgggcgcggaccgcggtctcctgcgcactgcagcggcggcggcggcggcggcggcggcggcctagggagggacgagggaggagagggagggggcgggatgaatcaccgcggggggaaggcgcggccgcccagcctttgccgcagcggcccgggaggcgcccgctgcaccggcctctccgggtggcgcagggaccgcgacttctgggaacggggagggtggtctgtgtgtctccgaccccgctggggctctgaggaccacccccccccccccaccttcccagggagtctggaaaggtcacccccagagtcacaggaggacttagagcgcagtttgggggccgggtttccgacttcaaatgatggaggtcatcctcaggagttccagagggcgaacctccaagttatctcccctgagccctgatatccaggcctgggggtcaatgtgcagggaccccaagtaggcattagaggagggtggggggccgtcaggctaggactacagctacaatccggacctcacccaagcaggcggggcaccctggagagaagcagccccgggaatctggaggtgctgtttcaggaggaggaccccttcgtgatcccctgcacccatttatgtccctgatgtcaccttctacccctctttcctcccactccactctggctgttcaggccctcctgctgttcccaacacagggaacccgttcctgcctcagggccttggccccagctctcccctctgccccggctctccccccctgccccgcccctctccgtgggcctccatggctccaatgtcaccttcgtcaggtcttctgtgtcccttcagggtaaactgccttccccgctcctaacctgacctcctttactctttacctcttgttgagtgttttccacagcagcctcactacctgacattatgttctttttttttttttttttttttttttttttttgagatagggtctggctctgttgcccaggctggagtgcagtggctgatctcgtctcactgcaacctccgcctcccgggttcaagcgattatcctgccgcaacctcccaagtagctgggagtacaggtgtgcaccatcatgcctggctaatttttttattttttagtagagacagggtttcaccatgttgaccatgctgggattacagatgtgagccgccccccgctatcccagcactttgggaggccaaggggggcagatcacctgaggacaggagttcgagaccagcctgacgagcatggtgaaaccccgtctctactaacaatacaaaaaaaattagctgggagtggtggtgggcacctgtaatcccagttacttgggaggctgaggaagaatcgcttgaacccgggaggcagaggttgcagtgagccaagatcgcatcactgcactccagcctgggcaacaagagcgaaactccgtctcaaaaaaaaaggccgggcgcagtggctcacgcttgtaattccagcattctgggaggccgaggtgggcggatcacgaggtcaagagatcgagaccatcctggccaacatggtgaaaccccatctctactaaaaatacaaaaattagctgggcgtgggggcacatgcctgtagtcccagctactcaggaggctgaggcaggagaatcgcttgaacccgggaggcagaggtggcaatgagccgagatcacaccactgcactccagcctggtgacagagtgagactccatgtaaaaaaaaaaaaaaaaaaaaaaaaaaaaaatctcccaggtgaggatattgtcttgtgtctcttgcaccttgaactgttcctggcaca

SEQ ID NO: 1561040 - DNA, 4001 bp, Homo sapiens
gagacggggtttcaccatattggccaggctggtctggaactcctgacctcgtgatccgcccatcttggcctccaaaagtgctgggattacaggagtgagccactgcgcccagccttggtcttcttgcctagaagcctatcccggcaattaattcttcaaactgcaattccactttataaccatttgggaatgtggctcccccaccgggattagggcagtgactgtttctcttccgtccatcctccctttggtctgaggtctatgctccttacctgtggtcctcctacccacagctacatccacaagaactcatttccacttatttaactgatatgggtgcaaatatagctcagcgatgcaaaatgcatccctccacagaatgtctagggcaggcccatatggggacaccggagggagtatatctgtgatctatggggttcatctcccctctcctgccccagggccttgtcgttcactgtagctgaggctggacccttcagccaggtttgagaaatttccaggtctgagaccctcactactgcctcaggggctccgagccagttctcagctccaccatttcctcttccacacaaagatgttaaatcacttgccctccattagggagccaactggggtatctttgggggttaagccaggatgagccccctccacagatctgcccaggggagaaaactatgccgcttcaatcaatgtgccagtctacagggctccggaaggagtcagatccccacacctatcacctcccagatggtcccttccaggtgtctgtgtgcgtgtgtgtgtggtggcaggggggctgggggtgtttcaaaaatcctgaaatatataaaagctttaagaccaccaacagggaagtagacatatccccaattttattccctttgtccaacattccgagagggaaggggcaaatgagtcaatgttgcccctcaaaaccatcaagtaggggcctttgggggtcttcagttgatcaaccagggtgatagacccctaccccttcctcatggtcctggcttgtcacaattaatgggggaaagttttccagaaggggattccgggcttctcaccgctcatcagggcaccttcccaaaacgttctcagcaaaaagtctgcacttctcagagttaaatacaggagaggggagactccttgaggagccagaagtgggtatgttctcaggggtcaagagaagggcgtctcaggctctccctgtccaccgggggtcgtcctggctccccgtaccttcgggcaagtagctcttggcttgacactgtccagcccgccagcgtcccaggccgccccaagccctcatgggggaggagcaccgacctgtctccaagcatcggaaaaggcgggcctcccttgccgtccatcacggggctctctaggccccctgcgtcgccaaggaggagtctctgacatccccaattcgtcaagctagtctcttaagacctctcaccttaggcgggttccccagtccccccatgcagtcaggcgagcctcctggctccaccacgccatcgagcgagttcggctcttcgcctgtcaccgtccgtcggggcgggtctccggtgcccccgtgctgtcgtgggggttccttggactgtcgccgtcgtcaggctggcaacccacgccgccaggctccccggtcggggcccgcgggcgtacgaaggcgcccatggcggtggcgtggcccgagcgtagcagctgcagctggcgccgcccgcggcggtacaggtactcgatgcgcagcacgtcggaccgcggcaggcccgcatgctgccggaactctgcccgcactcgcgcctcggcgcccggcttcccacgcccggcgcgcagcagatcgcggtacaggctcagaacctgcctctgcagccggctgtgccggctcatgaccgcggctaagcagagacgctcagcgaacgacctgcgaaccgcggagccgccacacagccagcaaaggccaaagggcaaagccacagccacttccgcccagcgcttcccttggcctccaactcccgcctcccgccatccggcgctgccgcgtctgactggctgtcgttgcagttacgtaacagccggctgggagaagtgggcggagtcgctggtcgcggcctcccacgtaggggacgtgtgttcttgaggggacagcagttctggggatcctggcaccgcctggagggcgttatgtgttcggactcctaggtcttgggttggagggaacagagggtcctcacctaactcctgcattctgggagaagaggaagctaggggtttttttgtgtgtgacggggtctcgctgtcgcccaggctggagtgcagtggcgcgatcttggctcactgcagcctcgaactcctgggcccaagcgatcctcccacctcaactcccctagtagctggaaccacagacgcgcgcaaccgcgcccgctatttatttatttatttatttatttatttatttatttattattattattatttgcagagatgggtctccctatgttgcccagaatggctcgaactcctgggctcaaacgattctcagcctcccaaagtgttgggattccaggcgtgagccaccgcgcccggctaccggttcggactttgggtcccaagggcacggggcactgggagagacgccgggcacaagcgtgcttttgccgtcagttactgattcaaaccatcttgggaagctccgtgcgttccctcgtccggggcaggtctgtgtctggggtcccagccctgggcacgtgcagagggacgagaccccgtagggaaatggctctcggccggttggacaggcttctcgggccaggggaagacaagcagagagagtgtgggcgccaagcccccagaggcagcgtgtggctctaggagctgggttggtcgcgccctctgcgggtgggagtcggggcagtggacagcggtgtttgggtccttaccgactgttaaagcccggagtccgggacaccctgaacagtcgactagactgcaaccccgttgtcctcccaggagctttaggtggtaggccgcaatgccgttgttgtccccgcgggccgcctggaggtgtcctcgtagcgctagggaggcccgcaaggacacagcatcctcgggccccaccagcaccggagcttgggggacccctccacccagcgcgcaaccgcggctctgcacacttgggccggcaaccagctggggggtccattccccttcagagaggagaagctggtcaggggcggggattaggcttggagtcttggagtcaggggagaatcacaaaccactgtgaatcctgcctggcaggtgtatgtatctatcaaaaatacatgtcctagaacggtggctcacacctgtaattccagcacttttggaggccgaggcgggcggaccacctgaggtcgggagatcgacaccagcctgatccacatggtgaaacttctgcctctaggttcaagtgattctccctacctcagcctccccagtagctggaattacaggtatgtgccagcacactgggctaatttttgtatttttagtagaggcggggtttcaccatattggtgaaactacagccttgatctcctgggatcaagcaatcctctcgcctcaacatgtccagtggttaggattacgtgaacatcccaccacacccggctaattcttcttttattgttttttgtagagacagagtctcgctgtgttgcccaggcttcactctggaattttaaatatttattttttgttttgtttttagagacagggtcttgctatgtggcccagattggtcttgaactccggcctcatcctcccaagtagctgggataatagggatgagccaccatgctggcttgtactctggaatttaaacatctatctttttcctgtcaaatgacccttaatctccaagacaactatgtcaatcagcctagggggactttctttactttccagtggactcaaggagctgcaaaacctcaaag

SEQ ID NO: 1561041 - DNA, 4001 bp, Homo sapiens
gctgaggcaggaggactgcttgaatgtaggagttcaagaacagcctgggcaacatagtgatactgcccccgcaccccatccccgaccccatctctacaacaaaatttaaaaattaggggccaggcgcggtggctcacacctataatcccagcactttgggaggccaaggtgggtggatcacgaggtcagaagatcgagaccagcctggccaacatggtgaaaccccgtctctactaaaaaaaaatacaaaattagccgggcgtggtggcacatgcctgtggttccagctgttcgggaggctgaggcaggagaattgcttgaacccgggaggcagaggttgcagtgagcagaggtcgcgccattgcactccagcctgggcaacaagagtgaaactccgtctcaaaaaaaaaaaaaaaaaattaggcaggcatggtggtgcacacctgtagtcccagctactcaggaggctgaggtgggaagatcgcttgagccctggaggtcgaggctgcagtgagcagtgattgcaccactgcactccagcctgggcagtaaagcaagacctgtccgaaacacaaacaaaaacaaaagagagagagagtgaggtggggagacagagagacagagagtgggagagaccgcctgtgggcagagacagaagaggaggaagtgagagagagagagagagacaaggggccagagaggcttccagggcaggagagaggctgggaagggaagccagagcccctatcatgtgcggtgtctttgggttggtcttgctggggagcaaagtagatcgatctgctctactcagcaccccatctctagcacaggcctggcacttggcccgcggggcactcagaaacgaatgaatgaagctcagatccaaagcagggatttgaacctgaagctctcctgccccaaagagaatgagagacaagagcgggtttccaatctgggaactggaactctggggctcttcctgaatccctcccctcgccctaccccaaccctgacctccacgtccccggagacccagcccccactgccggccctgtccccgggggttgggagaggcatgtgtgaggtcctcaccagtaggtcactcgaatcaggaccctcttgtccagcgcgaagttctcgctggaggaggggaaggtttccgtacaattctgtaaggagatggccgacgggatggtccccaggatgggcgaggggacaggactgggaatggggggatccgccagcccgatggccgacgggtctgccctgaaggtgaagtccagggtgggcccgggtgagttcgcggccagcggggtgcgcgtgggaaggggccccggggcgggcccggcctcgctggagaccgacgggatgagcttcaggctcggcgccggctcagggtcctcctcgggcaacaaaggcagctccggagcaggttccgggggcggatccaaaggtagggccggggccaggtaggagtccaagacggggagcgcggcccgaatccctgccaggagctgggctggggctggggctgggacccggactggaggagtcagggtccgagccggagtcgggaccggagttgggttccggacgggaacgggagtcggcaccggagtagggatccaggccggagcaggaggcggaaccagacgggggatccgggccagagcgggagtggggaccagagtgggaatctgggctggagcaggagtcaggaccagaggggaagtcccggctggagacggagtcaggactggagtcagggtccggatgggggtccgagtccggaccggagtcggggtccggagtggagtcggtgtccgggtcggggtagaagcccggactgaggttgaagtccgcgccgaggagggggctggggtccgcgcctggttattcatggggcccagggggaccggggcaagccggttggggagtcccgcccgccttccctctttgggcggggagagcgtctcccgcaccgggttctgagacgcggcgcgaccactgggggctctgttacaccgagttccacctggcccccgggttccaccgcgcgacctcccgacctcgccgagtaattcccgcccccttaacccccgacgccaggctgagaaacacacagattgccccagtgcctccgcagctgtcggtgacactcaggtgttcagcatatgtgtactgagtgcctgctgcgtgcacacttctctgctgggtgaatttggggacagagcaggcatcaggaaagccctggtccctgccctcaccaggctccctgtccagtaggggacacatacccattaccaaagggctacagcccagagcgttcagggcagggatgagggagcccaggagctgtgggatcccagaataggttcagtcagcctgctgcaatcagagacggctcactagaaaaggggacaactgacatctggagactgatgatgagcaccacggcaacagtctcactctggcccaggctggagtgcagtggcatgatctcagctcactgcaacctcagccttctggattcaagagattctcctgcctcatcctcccaagtagctggaattacaggtgcccgccaccacacccagctagtgtttgtgttttcagtggagatggggtttcactatgttggccaggctcgaactcctagcctcaagtgacccacccgcctcagcctcccaaactactgggattacatgcgtgagccactgcgcccggctgagagttcacatttattacagtactaggcgctaaacatttgcccacagctagttaaatggcagagctgggattcaaactcaacccgtcaggctccagcatcctggggcttaaccactttgagaaggaatgtcaagctgtgagctcctcaaggatggggtcttgtccgtcttgtttactgctgtattcccagctcccagaataagatctggcatgtagtaggtgctcaataaatgtttatggcattaataaagagacaaagggttagccaggtaaaggaggagttagctggaggcagcaggactagagcccagacagtgagcacagcaaatatggccttggagtaaggggcagggccattaaccaaggatcttcttttattttttgtaagcacatcagacatgtactttttaaaacatttttttattttttgggaggacaggctgtcactctgtcacccaggctggagcacagtggtgcaatcacagctcactgcagcctcgacctcctaggctcaagcaatcctcccaccttggcctcccaaagttctgagactacagcatgtgctggccagtctttggttggttggttggtacggtagggggtggagagacttgttttcagtaatttgaaggaagccaagagaggggtgtctgtgtctaacagcctgatggttttacttccgaagcagaaaagtgttccagtgttagagactgatttaaaaaaaaaaaaaaaaaaaaaagcccctgatggggagcggtggctcacgccggtaattccaacactttgggagagcaagccggtggatcacctgaggtcaggagttcacgatcagcctggccaacatggtaaaaccctgcctgtaattgcagcacttctggagaccaaaccaagaggactgcttgagcccagggggactgcttgagcccaggggttcaagaccagactggacaacataccaggaacccctctctacaaaaaacttgaaacttagctaggtatgctggtatgcacccacagttccagctactcaggaggctgaggcaggaggatcacttgagcccagaagactgaggctgccatgagctatgatcacaccactgcactctagactgggtgacagaacaagagcaagactatgtctcttgaacaaaaacgaaaagcctggtggcctggatgtgtgccatgaacaaaaaagaaacctgtgattgtgtaagtcagtaagatttgagggaaatttgttattgcagcaaaacccaactctcttagttggc

SEQ ID NO: 1561042 - DNA, 4001 bp, Homo sapiens
tggtcccctggattccattctcgccccctcccagaagcagccaccagagggcgggcgcgtgtgagcacctgagtcaggtccagtccttcccctacctaaaaccctccgtggctcccaccttcctccgggtcaaagcctaagtcctcccaatggcccaacaggccctgcacgacctgctccatcccctccctgccctcgcctcctctctctctccccctcgctcattctgctcgtcacacaggcctccttgctgtccccagcaatacctgtccccaatgaacagcgtcctgttgacccgcaggactcgctggatgttgaggtcgtcagcaccttctgcgggggtcaggcgtccgggcccgctgcccacaaacacgggatagtggttcaggtctgagtgagggggtggagaggggtgtgagcaagggctgggggtgaagagagggtggcctgaggtcatgccccttctaggggtggctcctggactgcttgagtcccccagtgggggcagcagacccaactgggaacccagatactcccacgggactccacccccgcccaaagacacccccagactcacagtccctgggggccacgctaagcggcggcggctcctcaggaaagaggccgtgggcgccccccagtagcagcagcagaagcagcagggccgggcggggaggggacgctcgcggggtctgcatggcgagggccaggcgacaggaggaggtgacgcctgcgggcaaggggcggcgaggtgagcggcctgcagtcccgctcgtggccacaagacggcgggcgagagcagcagacgctccttcaaatcccagaaaaattcctcacggggataataattaataaaaacaataatggcaataataataataatacacagcactgatttaattatcagaacaactttatggccacgtgtgcgtgaaagcccaggaaacgacttcaaacaaaactgcattcggtaatttaaaactaataataattattataataatagatacaaatatcctaaaacatatatttaaaaatgcaatcgcaaaatacatgcataaaaatacttagaattaaaacacaaaaatattaaactcaaaggctaaaaaaaaaaagagtcaaaggctcttggaattttataagccacaagctggctgtgtgtggtggctcacgcctgtaatcccaacattttgggaggccgagatgggaggatcatctgaggtcaggagttcaagaccggcctgcctaacatagcgaaaccctgtctctacaaaaaaatacaaaaattagccaggtatggtggcctgtgcccgtaatccctgctactggagagctgaggcaggagaatcccttgaacccaggaggtggaggttgcagtgagccaagatcgcaccactgcactccagcctgggcaacagagcaagactccatccaaaaaaaaaaaaaaaaagccacaagctgggaatgacagtactacataaccacagaatcacagaatattccccatgccaagggcctctgtgaccctggtagatctgacctccttcccaaatccagccttttcattctccgcttgcacacctccatgacaggcacctcactacctctcacgggggactgcttcccactcccattcaaggtaactttgcagaaacttctaggtgtgtggagtggagacactctcccatccaggtaatgacatagcagcggaattcaccctctgaacccccgccctccatgctgaaggtcccagttcagagcaccccctaccagaaaggggtacagtccaggtcccggagccccgaatgagaagttcagcagcctcgtccttctgggaagtattgggcaagctccgagcccattttcctgtctgagcagcaggggtatcccccagccctgccctggccttctggctcagggattctgagcccccagaggtgaaggtgattcgcgacaatcggccctggggtgcctgccccctccaaaaacaggaagacctcgcatagcgcggctggacttcctcttcacgaccctgagcttccaggatttgtgactcagcgaacacccggattccacgtgtgttcagggcacggccctgtttccttcagaatttccttccctggctcctcccctgctctacagcctcctgtggctcccagggacccctgagtccaggccccagcctctccctgggattcaaggcccctgacctcagaccccacttcggcctaccctcccctcatgccacgggcctttctagccccctaccccagaacctaactaagagccctgtctgccctgtgcctttaaaaaaaaatggctaaaatatatataacataaaagctgtcatcttaaccattttcatttaactattattagtagtattattatttgagacagagtcttgctctgtcgcccaggctggagtgcagtggtgccatctcagctcactgcaacctccccctcccgggttcaagcgattcttctcagcctcccaggtagctgggactccaggtgcatgccaccatgcccggctaaatttttttgtatttttagtacacatggcgtttcaccatgttggtcaaactggttttgaactcctgacctcatgctatccacccacctcggcctcccaaactgctgggattacaggtgtgagccaccatgcccagcctccttcattcttattatttttttgagatggagtctcgctctgtcacccaggctggagtgcagtggcatgatcttggttcacagcaatctctgcctcccaggctcaagcgatcctcccgcctcaacttcccaagtacctgagaccacagccacgtgccaccacgcccagctaatttttgtatttttagtacagatggggtttcaccatgttggccaggctggtctcgaactcctgacctcaggtgatccactcgccttgccctctcaaagtgcgaggattacaggtgtgagccaccacgctcggccaccttttggttttttgacagtcgccatcctaatgggtatgacatgctgtgtctttcatcttgtgttttatcagaataatatttaattctagaaactatttctttaaacattaagagacagggtctggctctgttgcccaggctggagtacggtggcacaatcaccactcactgcagccttgaacttccaggctcaagcaatcctcctacctcaacctcccgagtagctaggaccataggtgtgcaccaccaagcctgacttttttttttgccgggggtgggggacgcaggggaaggtggacagagtctcactctgtcacccaggctgcgatgcagtggtatgatctcggctcactgcaacctccacctcccaggttcaagcaattctcgtgtctcagcctcctgaaaagctgggattacaggtgtgcactgccacgcccggttaatttttgtattaattttgtaaagcactttgtgaggccaaggcaagaggatcacttgagctcaggagtttgagaccagcctgggcaacatagcgagacacgcccccataatctctacagaacataaaaaattaaccaggcatggtggcacgtgcctgtagtcccagctacttgtgaggctgaagcaggatgattgcttgagcccaggagttcaagaatgcaatgagttataattggtccactgtactccagtctgggcgaccgagtgagaccctatctcaaaaaaaataaaattaatttaaattaaaacaacgacaaaaaaacacctagcaaacataaagcacttgctaggtgccaggcattatcataagtacttaaattaactcatttaatcttcacagcacccccaaggggtgagtgctcttttttttttttttttttttttttggagacaagagtcctgctctgtcgcccaggctggagtgcaatggcgtgatctcggctcactgcaacctcagcttcccgggttcaagcaattctcctgtctcagcctcccaagtagctgggatcacaagtgccc

SEQ ID NO: 1561043 - DNA, 4001 bp, Homo sapiens
agcagaagaggtgacagatgccctcaagagagaagacaggcaccagccaggcagagttttgggacacagcacagggggtggcgcggggacacacagagacacacagaaaaccaacaccaagcaagagacagagaagggggaggggaaaaaggggagagaggagacaaggagaccacaaatacgagagacggggacgggggaaaaccaggagaactggattaggagaagaacagcacacgtaaggtccccacccactccctgtgcccaccaccctcacccacagccctcgcagcactccaaggaaaaccctgcggctcctggattcttacaccacgcccagctaatttttgtattttcaccatgttggccaggctggtctcgaactcctaacctcaggggatcggcccgccccagcctcccaaagtgctgagattacaggcaggagccaccgcacccggccccgcagctcctagattctgaacaccttcccagtccccagggtgaaatacaggctcacccaacccccacagcaggctatttcgggactggaatctggtgtacaggcctggtaggcgtctcaaaatgtcactcttgcctctgctttgtcgagcaggcagagacgttggaaagctgccgacaaacccaggttccagttacccctgtcacctgcagtccagacttgaagctactgacctgcccccaccccagtcccagcctcagttttctcacctgtaacatagaactaaaattcctctctttaatttactttttttttttgagacagagtctcgctctgctgtccaggatggagtgcagtggcacgatttcagctcactgcaacttccgccttccgggctccagtgatcctcctgcctcagcctcccaagcagctgcgactacaggagtgcgccaccatgcccggctaactttttaagtttctgtagagacgaggggggggtctccctgggttgcccaggctggtctcgaactcttgggctcaagcgatccacccgcctcagcctcccagtgtttggattacaggcgtgatcaacggcacctggcctaaaattcccctctcttaagggattcctgggaggataaattcattgaacacgtatttattaaatacctacagcatgccacacagtattaggtgctggggagtggagagaacgtaatttatatcctatcctattatacccttcctgagacttgcagaaattaagcgtgttcggtattgacacagagcctccctcttgccacagacggaaaactgaggccagaaaaggagtggggttcgtggccaagggaacccactgggcagaggccaacaattcaagtgcttctgaaacacaggctgagacattctcgaaccttctgggctctcactgtccccaccccgcgactgttcgggatattgggggaggggaagccttagggtggaggagccttaggtccctttacaaagctgacccccagccccttccccagcggagccccggagtcgggggttcgaaattgacacacactcgtctcagccccaccttttataacccgagatgcccagcgtgtcacaagtcgaagacggggcctagggacgaccgccctctgtttttcgcccctccgtacgcccaccccacccacatacaggggctcccttttcccatacaagggctcccatgggtcctctccccggggctccctgaccccggctccgagaatcgggtcccggcgggggtcggggacgggggccgctggccgctgggcttaccaataaacgactcggacggcgagagccatggctcggggctgccacatccgctgaggagcggacgcccgggccacactaacctcccacctggacgcgctaggtctgcgcgagtgcggcgggaacctgcgcagaaaggatggagcctcggcttcccctggcgccaaccaatgccagggaggggcggtgggcggtgggcggagaggcgccaaggcggaggataaggaacccgcgacccgccagcccgaggcccccacacaagtctccttcccatcctcctgttgggctggagagagtctcgatacaggcagtccccgggggaagccctccgcgcgtcccctcccaggtccccccggccagaatggtacggcccacgggggcggtgatttacggctggccgctcccagctggacccggaatcagcctcaagggtggtcttttcactgcgtgggcttggggacggcgcggtggggacagaagcagggcgcgattcttgagtccctcacctcccctggagagggcgagggggcgagaggggaaggattcggggtagaccaggtgagggaggagacagggagttgagggggaggttttcagggagcggtccagggcccacagttgccttataaagacctgcagccgcagggcgcggtggctcacgcctgtaaccccagcgctttgggaggcagaggcaggaattcaagaccagcctgggcaacatagccagactgcgtctctacagaataataataataatacattagtggctgggtgcgttggctcacgcctgtaatcccaacactttggaaggccgaggcgggcggatcacttgaggtcaggagttcaagaccagcctggccaacatggaggaaccccgtctctattaaaaatacaaaaattagatgggcgtggtggcgcgtgcctgtagtcccagctactcggaaggctgaggcaggagaattacttgaacctgggaggcggaggttgcagtgagccaagatcaggccaatgcactccagcctgggtgacagagcgaggctccacctcaaataaataaatagataataaatcagccgggcgtggtggtgtgtgcctacagtcccaggctacttgagaggcttaggcaggaggctcgcttgagcgcaggagtttggaagctgctgtgagccgtgattgcaccactgcactccagcttaggccaccaagcaagaccctctctaaaaaaacaaaaggcctgctgcggctgggcacggtggcacatacctgtaatcccaatgctttgggaggccgaggcaggaggactgcttgagcccaagagtctgagaccagctggggcaacatagcaagaccccatctctacaaaaacttttaaaattagtccgtgtggtggcatgtacctgtactcccagttactggggaggctgaggtggaaggatcactttagcccaggagtttggggctgcagtgagccgtgattgtgccactgccaccccagcctggacaacagagtaagacactgtctcgaaaaaagaaagaaaggaaaaggcctggccaggcacagtgggtcacacctgaaatcccagcactttgggaggccagggtgggtggatcacctgaagtcaggagttcgagaccagcctggacaacatggcaaaaccccgtcgctactaaaaatatgaaaattagccaggcgtggtggcgcatgcctgtagtcccagctcttcgggaggctgaggcaggagaatcacttgaacccaggaggtacaggttgcagtgagccaagatcacgccattgcactcctgtttgggcgacaagagcaaaactcaactccatctcaaaaaaaaaaaaaaaaggaaaaggaaaaggcctactgccggacctggcacagcctggtcattcattacagaacaatagtcactccccatgaaccctctccgtgcagaggggatcgtcatggaaagtgctagaaacaggcagttgagttgaggagtgagggtgcaggggcttatctctgagcctgtttctccatttggaagttgggtgtaattgcctacaggaaatgttcactcatttaacaaataggtacttcataaccacctgcagtcccagtttccagggatacagcaatgaataaataaacaaagtcccttccttcatgggagtgatctggcaggtagagacaaagggcaggaaacaacatgaaaacagcacttccattagatggttgatgtg

SEQ ID NO: 1561044 - DNA, 4001 bp, Homo sapiens
cctatagacttcttaaattttaaattttatatttaagtatatttatagacttttttatctgaaaaaataaagatggggtctcactatattgcccaggctggtctcaaactcctggcctgaagcgatcctcccccctcagtcaataagtacttttttttttcccttttatttttttgtagagacatggtctcactatgttgcccagggtggtctcaaactccttgcctcaagccatcctccttcctcagcctcccaaagtactgagattacaagtgtgagctgcctcaccctgccaataagtacacttaatgataacattattatttcttcagtgaaccatgtggaatggccaatattcaactttttcccctacaaaagcagctgtttcacatattttattataataacataattatatctaaataagttataatattataaatactaaactagtttcacgtagtttaatatttattgtctactatgactatgtttcaaacagtaaataaataaggaaacacaggaaatgtacagagaattacaggaagacactaaaagttcctagagaccttttagatcatcagagaaggctcctgtaaggaggtgacatttgaatggagccctcaggccagagaagtcagccatgggagaccctgggaaaagcattccgggaggagggaacaacaaaaaaaggcagagaaaagcccagaggctggatgggcttgaactggaaagagaccagcatgggtggcacacagagagtgacatggtaggagaccagattggggagcagctaggggaacgggcacaagccaggtcacagaaagccacatatgcagaagtagggagtttggattttatcctgagtgtggtgggcagtcattaaaggaatttgagcagggagggaatggtgctgtgagctgattaggtttccggaagatcccccccatggctgcttcgaggaagactgtggggggcaaaaagaggggggatctgagacccactggtaggctgtactcgtttgggacggacgatggtgatggcctggagtaggagctggtagtggcatggaaggaagtcggtcgagtcaggacttatttgggaggcagaatagacagggcttgtcgggaaatcgtgatcggcaccgggttcagtcactgagataagtttgagggtccactgttcttggagtggcgggggtagggctggagttttggactcctggcgctacctacttttttgggccaggaagactgtagagtccagtttcggaaccctgcctagcaagattttaagaatggcccaccacactactcaaaacagggtcttcgtccccttccccgcagtccggggagtccggaaccgcaggaattccgcccccacccccgactccgcccccgggtcccggcgccccctagcggtgcccaggccggctttcccccggggattctggcccctctgaccccaggaccccttctactgccccgattcccggctgtgattcctgccggcctcccggcgccgtgcgagccgggacccctggcgggctgttctctgcgcccggcctccgctcgcttccggcagtggaggcggctcctcccgaagcggcggcggcgggggcgggtgagtcacgcagccggagccaagaagccggcgcctccgcccccttctcggactgcggcgtgattcacccggcccggccggggcagacagcacgtagaggtccgtgcgtctcgatcccgggcagccccggcgggcacctgtcggacccagggatcgaactctgtgaaggacccggccgctggtagcccttctgttcccaggccccttcatttacataccttgctcactagcggccaatcagaacgaagaggtagccacccacaaccaatcaggaaacggcggcggcagcatcgcttgttggctgtcctccggaaacccgcgcctgggtcgcgagacgcagttctgactccggctcacgactccagactcctaactacccttagcgaccgcccactctcgtggctgccccgccctccgccccagggattggccctgcatggtgatgggcggagcttgtagggggcggattctgaaggaggggcttcagggcgcatgcccgggcagctgcgcgagtgaggggtggaaagaggtggctttttactccggggaacggtggcgagtgggggcttttgcctctcaaaatacgagcccctcacaactacccatgcacctgccaaacccggcaattaagcttcttacacatccagccccgacaggggtctacactacagataatgcccgggttcaaattccgactccggattccccactcactggatgcgtgaccttggaaaaatgatcaacctcttcaagctacacaaagttaaatggggatcgtcttgcctacctcttgacaggatactttaagtaggatcgtatctataagaacacaataccacactcaagcaatgctggacagttggacttaattgtggttaaaggcgggagtgaggtgggagtgcgataccaacggaatcacatcccgggctccattccctaagcagctgtgtgacctgcggcaagtgttttaatcccttctggtctgtttctcctttaaaatgagagaaaatagcgcctagtttacaggattgtttttaaggattaaattaattcatgaaaaatcttcagagtggggtgcaacatgttttgtgttttttttttttttttcattttatttatttatttatttatttatttgagacagattctcactccgtcgcccaggctggagtgcaggggcacgatctcggttcactgtaacctccgcctcccaggttcaagcaattatcctgcctcagcctcccgagtagctgggactacaggcgtgcgccaccacgcccggttaatttttgtatttttagtagagatggggtttcaccatgttagccaggcaggtctcaaactcctcacctcaggtgatccgccctcctcggcccctgagtgttgggattacaggcgtgagctaccgcgcccagctgcttattatttttttctttactttttattttattttattttgcttttgagacagggtctcgctctgtcacccaggctgaagtgcaggggtgccatctcggctcactgcagcctcccaggttcaagccatcctcctgcctcagacccccaagcagctgggactacaggcgcacaccaccatgcctggttagcaacgttgtttctttgttagtagtaatagctgttgtaataagacaagctcttagttcaaggtggatagacatgcaggatggggctagaggtagacagggtataatactcctcccatggccggatgcagtggctcacgcctgaatactctctcacctagatttaattgatagttgttagctaggcaacaactgtaatccagtactttgggaggccaaggcaggagggtcacttgagtccaggagttcacttgagtccagcctgggcaacacagtgagatctcatcactacaaaaaaatttaagaattagccaggcgtgggccgggcgtggtggctcacgcctgtaatctcagcattttgggaggccgaggtgggcagatcacgaggtcaggagttcgagaccagcctggccaacatggtaaaaccctgtctctactaaaaatacaaaaaatcagccaggtgtggtggcaggcgcctgtaatcccagctactcaggaggctgaggcaggagaatagcttgaacccaggaggcagaggttgcagtgatccaagacagcgccactgcactccagactgggcaacagagcaagactctgtctcaaaaaaaaaaaaaaaaaaggattagccaggcgtggtagcatgttcttgtggtcccagctgcttgtggggctaaggtgggaggattccttgagcccaggaggtcaaggctgcagtgagccatgttcatgccgctgcactctagtctgagtaacagaacaagaccctgtatcaaa

SEQ ID NO: 1561045 - DNA, 4001 bp, Homo sapiens
ctcctttttgtattttttgtagaggcagtgtttcgccacatttcccaggctggcctcaagcagatcctcccaaagtgctaggattccaagtgggagctagagcactcagccaacaagcactcaataaatgtcatgtacaatgatacacctaccccagctatggcacggaagtggtgctgatgtttaggaacttaccaggtccctcccactgacccagtgaagtttagaaacattagacaacatccctccttccaaaatacttttatttaaaaaaattacaaacaatccaaaaaaaaaaaaaaaagccaccacaaactctgcctttcttttaaataacccggcatggagcagtttggtttccaccctattgcacgtggtccggcctggttatgaaatcaggaggctgctgagactggggtcctgccgaggaagtggggttcagcctggagggaggacaccagcccctcccaccccctcaaggtgcaagaggcagagcctgggtttctatagcaacctggcagcacatccctgtcatccttcgacaggcccagctttctttatcttccctgaggccccagtggtcacaggggagtgggaactagcaggaaaggtggaagaaatgtgtaagtggaaaatcagactcccagaaacagagtctcgttaaggcatttggaatagataaattaattcaggaagacccaccttcacagaaggtcggggtaaccagacacacacacacatgcaagacagtttgtggaaccctgaaatgggaacaaaggaggccatagtcactgcttcgagcccccacaaaaacacacacccagagttgcattcagggatccaggccaccgaagatgacatgaggaaggatcgatcccctctatcacagttttaggaccccagaatgatttccatgatgtgatccagttcattccactcccaagaacctggggcacagaagaggttgtgaggaggctctggtggggcccgtgcaggctccttttctaccgcagatgtgtcaatgtccagaaagaagtcatccaggccagagtcccccaagtaccgggagctcagagcttctaagaagactggatcaggctggggtggcacttcattctggaggccaaggggagtcactggattctgagggggctcagtcccatccatggaggtgtccagctccctgaggatagagccaatggtggctgacagggagaaatcctcctcgcccaggaagaggggctcggggggcagggcaggggcgggagccaggcgaagtgcagcctgcagctgttggagggtgttatggatgaggacatgcctgcggaggctgggtgctcgggggcccaggctgcgctggactttgtctagggagatgcggagcagggcttgctggtagctctgaaggcctgctggactccactcccacctctcctcctcctcttccaaatcagagtgtttcctcttcaagcctcccaccatgatgccctgtagagagaagaggcgcataggggaaggtcagacaccagacaccgtagtgctggctcatatcccactttctcaggcctattgagttgttagtgatttttaatcatcggaatctcagtttactgatgtataaaatgaaggctgtctgaatcctacaagtttaagaaggtgagtacatatacgattaagaaaataagatctggcgttacgtacagctagatttaaatctcacttacttgcctgttgtggcctcaaacagtgaatttacatccatgagaatcaatttcctcatctgccaagtacggatcctaactcaagttcctctaagccttaaaactgttcttccacaatattaatttcttcaaacatggagcacgaaagacaagtgtggagcacagagacctggattggaagtagggaaccccaaatctgaattctgtattggaaactgctcagctgcgtgatcatgggaagtgatctgaatgagtcaattctcagggcctcagtttcctcatctgtaaaatagggactgtaaaaaaatacttctcaccacctctgtcaaggagatgccacgtatctatagggcccaccacaccggaagtgcttaatgaacaagagttgtgtttgttttttgttagagacagggtctcgctctgtcgcccagggctgagtgcagcagcgctatcacagctcactgcagtctcgaagtcctgggctcaagcgatcctcccgcctcagcttcctgagtagctgggattaccaccacacccggcctcgatcaagagttaattgccagttattcgctcaacagatttactgagtgcctactatattcgaaatctcctggagccctgttggggaacctatgttgagattcttcttcaacagtcgggatatttctatgtcctcttccttaaccgactgggagcgctcccaagagtaggaaaggggcctgtctcattccctctgcccacgctttcagattcccccaaagcgcgccccataggaaaacttgctagaactcagctcagaccaagccccgccccctcggaggtcccactcaatcagaccgcgacactgtaaggccccgcccccccatgggtccttacagagcatccaggaacgccccaatttggcccaggggcttctgggaaacgggggccaacagccgccaggtacacgaattgacgtcgagcacgcactacaatccccagagggctccgcccgtccaggggacgagccacccccctcaccccgctctccctcagggcatgcgcacaggggcacaggcgggtgggggaagggaacctggacgtccagctgccggcgcctgccgagccccgccctccattgcctccggggccgcgagtctgagctccaggcccggaacacccctcccccaccccagactccggctctaaatttgctttctcccggtccctctgttccttgaaagtccgcgattctccttccaaactgcccttggatccagagacccagatccgaacacatcgctcaaagacgacaatgctccgatctagttcgggagactacgtatcctaattctgatacttcctcccacttctcctagtctcctgactttcaaacgcccctggacttcacctccaaactcgctgtccggctccaagacccgaacattgaactcttcccggcaacctccttcccccgccagtgcgtcttggagtcccaagaatccttgaccctagttctctcgcttctccaaatactcagaatctcagctccgtacctctcacaccttttccagaacacgataaagccccgaattcaacccgtccggaagacccaagtggaatcgaatctccaggttccctgtctcaaaagttcctcccctctgttctctcgcttctccaaaagcccaacgtcccagcttcaaactccctccacttgaaaatactgccccaacaacctcgcctcccctcctgggtcttgaactcagtctcaggtccccagaccctccctatcatcaccctgaatctgaggccccctcccccggtcccacccagaccccgcctccgcaagtccccggggcgcgcttctctctcccccagcctaaggtaaattcccaagccaggcgaccactcctcaccgcagctgccaggttcgccacgaccacctcctggaacgcccacagcgttgcgacccgccagtgccaggacccaccagtgaccggttggagcctcgctcacctcggcggggcctctccgtctggcctctggcccaccagccccgccccggagccgagccgcgagccgcgattggctggagtcccgcccgccgcggggcgtcgattggctgggcggagccatccgcccgtgccccgagacgccggatccgcccacccctccctagcgccccgggccatttaaagaagtgcaactggcagggggcggggcagcgactccggggtggagggcggccggtccaacagaaccgcttccttccactcagctacagtcctcgctccaagatcg

SEQ ID NO: 1561046 - DNA, 4001 bp, Homo sapiens
catctgccaagtacggatcctaactcaagttcctctaagccttaaaactgttcttccacaatattaatttcttcaaacatggagcacgaaagacaagtgtggagcacagagacctggattggaagtagggaaccccaaatctgaattctgtattggaaactgctcagctgcgtgatcatgggaagtgatctgaatgagtcaattctcagggcctcagtttcctcatctgtaaaatagggactgtaaaaaaatacttctcaccacctctgtcaaggagatgccacgtatctatagggcccaccacaccggaagtgcttaatgaacaagagttgtgtttgttttttgttagagacagggtctcgctctgtcgcccagggctgagtgcagcagcgctatcacagctcactgcagtctcgaagtcctgggctcaagcgatcctcccgcctcagcttcctgagtagctgggattaccaccacacccggcctcgatcaagagttaattgccagttattcgctcaacagatttactgagtgcctactatattcgaaatctcctggagccctgttggggaacctatgttgagattcttcttcaacagtcgggatatttctatgtcctcttccttaaccgactgggagcgctcccaagagtaggaaaggggcctgtctcattccctctgcccacgctttcagattcccccaaagcgcgccccataggaaaacttgctagaactcagctcagaccaagccccgccccctcggaggtcccactcaatcagaccgcgacactgtaaggccccgcccccccatgggtccttacagagcatccaggaacgccccaatttggcccaggggcttctgggaaacgggggccaacagccgccaggtacacgaattgacgtcgagcacgcactacaatccccagagggctccgcccgtccaggggacgagccacccccctcaccccgctctccctcagggcatgcgcacaggggcacaggcgggtgggggaagggaacctggacgtccagctgccggcgcctgccgagccccgccctccattgcctccggggccgcgagtctgagctccaggcccggaacacccctcccccaccccagactccggctctaaatttgctttctcccggtccctctgttccttgaaagtccgcgattctccttccaaactgcccttggatccagagacccagatccgaacacatcgctcaaagacgacaatgctccgatctagttcgggagactacgtatcctaattctgatacttcctcccacttctcctagtctcctgactttcaaacgcccctggacttcacctccaaactcgctgtccggctccaagacccgaacattgaactcttcccggcaacctccttcccccgccagtgcgtcttggagtcccaagaatccttgaccctagttctctcgcttctccaaatactcagaatctcagctccgtacctctcacaccttttccagaacacgataaagccccgaattcaacccgtccggaagacccaagtggaatcgaatctccaggttccctgtctcaaaagttcctcccctctgttctctcgcttctccaaaagcccaacgtcccagcttcaaactccctccacttgaaaatactgccccaacaacctcgcctcccctcctgggtcttgaactcagtctcaggtccccagaccctccctatcatcaccctgaatctgaggccccctcccccggtcccacccagaccccgcctccgcaagtccccggggcgcgcttctctctcccccagcctaaggtaaattcccaagccaggcgaccactcctcaccgcagctgccaggttcgccacgaccacctcctggaacgcccacagcgttgcgacccgccagtgccaggacccaccagtgaccggttggagcctcgctcacctcggcggggcctctccgtctggcctctggcccaccagccccgccccggagccgagccgcgagccgcgattggctggagtcccgcccgccgcggggcgtcgattggctgggcggagccatccgcccgtgccccgagacgccggatccgcccacccctccctagcgccccgggccatttaaagaagtgcaactggcagggggcggggcagcgactccggggtggagggcggccggtccaacagaaccgcttccttccactcagctacagtcctcgctccaagatcgtcaccattgctccctgcggttcctttatggtaggcctggactccaccgtggagccagaggggctggcatgcccctccccaagtcgctgtgcaggcgggcggggccgagcaaccggaggaggccgcgcccccggggttccgagggaggacgctggggcgcgggggatgacgtagcggaagaccagccaatagagtggcgcggcccgcgttgcctaggcgatcgtagcctcgcccccttgctgcccctcccgccccctatacgttaccgcgcggccccttcttaatcctcaggttttctcagcacgtcctctggtggtcccacctgggtcttctgacaccctctttccttccccgctccatcaagatgactcctctgctactgttcatggcttcctacccaccccgaatacaaacttcaaactccttccttttgccacaaagcccctcacgaccttgcttgatgcgttctcctggttctctccgatcctgccccattgagtcacttccagtttttctaaaatggcttcaagctcccattcaccccatcaggaaaacgaaaggattttctctgtttgttttcttccctgctttaccccagtgtctacaacaatgccaggtacataataagttcgcaaacatgacaataaaaggcctctggatctttattattaatattattttttgccgggcgcagtggcgcacgcctgtaatcccagcactttgggaggcggaggcgggcagatcacttgaggtcaggagtttgagaccagcctggccaacaatggtgaaaccccgtctctactaaaaatacaaaaattagctgggcgtggtggcgcacgcttgtaatctcagccacttgggaggctgaggcaggagaatcgcttgaacctgggaggttgaggttgcagtgaaggcgagatcgtgccactgcactccagcctgggtgacagagagatgggggaggggggaggggggttttcttgtgttgcccaggttggttttgaactcctggcctcaagcaatcttctcgcctctggatatttaaacttgtttcctcatcctcaaaatataccctcaattcccaggctgcttctcagaacacatttcaaaggtttcctcctctccgaagccctccctggcagtccaggttgggttaggatccattctaggattccatggcctcctgtgccgccatcccagtcctggactgtcagttactatatggactgaggaacgccccgccgagggcaggtaccaaggatatctctgtcaaccacctcttggtctgcaggatcacctagcacagggctggacacgtagcaggtcccagtgaaagtttgctaaatgctcaggaatgtgacagaaaaataaggcagaaagaagacactgctagtgtcctgaaagcccacacccgtaatgctccgcccctacaacgagtttccctaaggggaggaggcagttttctccaggccacctctgggaagggaggtttaagcctcctcagaccagttcttgccggttggagtttgtcaaccaagtcatcctgatgtttgcaggataaatgggaggggaataggtaggtgggtggtgtgggttggaggtagggagagagaagtgtcttagctcacccaggcctagggaaggtgtccctgggaaaaaaagaaagggacagtaggttccaaaaaaggacataattaggaaggagcaattcttccccttcctcctccaaaacctgcgcctcctatagggtccacaactcaggaaagccctactgcatt

SEQ ID NO: 1561047 - DNA, 4001 bp, Homo sapiens
atttggaggaggaggataagggggtcttggagggaagtggtgaggggagatcaatttatttaaacctatgcaaaatacaactgataggtgtgtgagaggtgggagctttgtggggaaaaaacaaacagcaggtaaaagaaaatcaggctcatggtaaaaacaaagttaattagctttaagggaagatagaatggtacaagaaaagcctagctgaacatattacttgttttagcagccaacaatattttgcatcttatttagaaaacacaaccaatgaccaactatgctcatgacataaactcattcaggatatggaaggtgaaggtgcagtgggtggatgggagggagaagatctcaacagccgtgacaagaaatcagcagatgatgtctacaaattgataaatccatgaagaaatctgttacttactaaggtaaagatcaggggacagcctggccaacctggtaaaaccccatctctacaaaaaatacaaaaattagccgggtgcagtggctcatgcctgtaatcctaccactttgggaggccgtggcaggtggatcacctggtcaggagttcgagaccagcctgggcaacatggcgaaacctcgtctctacaaaaaatacaaaaattcgccggacatggtggtgagcacctgtgatcccagctactcgagaggttgaggcaggaggatggcttgagcatgggagtttgaggctggagtaagctgtgattgcaccactgcactcactccagcctgggtgacagagcaagaccctgtctcaaaacaaacaaaaaaccgatgacgaccaggggaaatgagcttaagaattgaggaaaagtggcctctgggacctgggactagaccattgagaaggaattagtttttcgtggcaacaccgttctctccttaacctagccaacaacctattttccagagctccgcctggctgtttggtgtcgtccaaggatacacaagaacaacggtcacagcggggtgcacctgcaaaatggggccagctaacgtgttctggtcgcctttggcatgatgttgaagccgtcactcccattttaagggaactgaggctcacaggaattacatcacagagccccagtcaactaacaggtatagatgagcatacagaagcgttctcggctacaaggaaggcggccgaaaccatttcagccgcgatcccgattcgaccccaacgaatcttggttgtttcttttttattttgtcaaacagggtcttgctctgttgtccaggctggagtgcaacggcacaatcacaactcactgcagcctcgacctcctggactcaagcgatcttcccgcttcagcctccagagtagctgggactacaggcgcgcgtcaccaaccacgcccggctaattttttttttttttttttttgcagtgatggggtctcgctatgttgcccaggctggagtgcagtggtgggatcatggctcactgcagcctcgacattccgagctcaagcgatcctctcgagtagctgggcctacaggtacaaccaccactcctggctaattttttaaaattttttgtagagatgggggtctcggtgtgttgtccaggctggtctcgaactcctggcctcaagcgatcctcccgccaaggcctccctgagcagtgagattacaggcgtgaggccccgcgcgcggcctcccaacaggagtttggaaatagagttcctggcgggcccgaccctccaggcccgcccagcgcggggcctcaggatgcacaaggccggacgctcacgggaggagggaggggagcgacgccgccgccccaccctcggcccgcggcctgtcgcaagcgcctctctcctacgtccgctgtcccccagggaacccccggtccgcgtcggccgccgccctcaaccgcctctactcctcaccagagcccaaggccgcgttatctcctcctcgtttcgccacctccacgacttcgtttggcgaacggcgggcaaagaaagcacttccggggcaaatgagacgggccctctggtgtgcgcatgcctggcccgcccagcggcgtgagtcagagggtcccgaggcgcgaaggaaaaggctggagggggagaggctgaaagcgcggcctggaaggcaaactgcgcgtgcgcacaacgctctcaacgaaccctcggtccgctgcggccgcacggggccaactttcgcgagggagcggctgacactctccgggcgacgttatcgctccctccgcctgcgcctggccgctctagaaaggggtgccagccatcgctggggtgccttgattctgttccaccttggtccggtttatttcagtttaatggttatgtaacaacggtccgtctctcctaccaaccggtaccccgcccacgccagcagccacgggtcgccagcgccacgcagcggaggcgggcggcatggctggcccaaggtgcgcaggcgcactagccctgggggtgcttccgtgtctgcgccctgagacatttttggcgccggccccagcctgagcggggacggcggccgggagggcgcggcccgggttcccgttccccgcggagccatgcggtacaacgagaaggagctgcaggctctgtcccggcagccggccgagatggcggccgagctgggcatgaggggccccaagaagggcagcggtgagcgggacccgggagaccgagacagtgccaggggcgggaggccggggccggggtctgggcgggggtgccggaggccggagtccgggtcggggcgccggggacgggaggccggggtccgggcgggggctgcctgcgcccctgagtgcgcgctgtgcccgcagtgctgaagcggcggctggtgaagctggtggtgaatttcctcttctactttcggacagacgaggccgaggtaggggcgtcccgggcgcgcgggcgggtcccaggctgggcccctcggaggccgggtgctcactgccccgtcccggcgcccgtgtctcctccagcccgtcggagccctgctgctggagcgctgcagagtcgtccgggaagagcccggcaccttctccatcagtgagtggggctagggaagccagcggcgcttcccgcagcccggggcacccgcagcgccgcactttcccctccccgggcgcccaaggtctcctctgtgtccccagcctggcgccaccctcctcaaacacaagagtgcattgtccacgggcagctcaaggtcaagttctcctggcgggcaccacccttcccacctgccgagtccacttaagcttgggtccctcccagactctgctctttgttccctgtgggcccaggctgtacttacagggcaggtgggccagccccacccaaagcgtttccccagctgccaagagtagcatgggtctagcattgttatatggccccgggctggaaatcccaggtgggggtaggaggagtgagaggggggtgttctcctgggtcttaagagattcccttctgcggggaaagatggagtccctgctagtttgcccagagtggctgtcaaaattccacaggccaggtggcttaaatatcagaaacattctctacagttctggaggccagaaatcctagatgaaggtgtgggtggggccgaatccttctgaggccgaggggaatctcccagttcctagtggtggccagtatcctccaggttccttggcttgtggaagcgtcaccttgtcctccttgcatcacgtctgtgcccacatttccccttctacacagacgccaagcagaatttagggcccaccctgacaacccctttttacttcactttattattttatttgcttattttttgagacagggtcttggtatgtcgcccaggctggagtgcagtggtgcaatctcggctccctgtaacttccccctctcgggttcaagtgattctcctgcctcagcctcccgagtagctggtactacaggcacgcgccaccatgcccagctaatttttgtatttttagtagagacggggtttcgcca

SEQ ID NO: 1561048 - DNA, 4001 bp, Homo sapiens
ggtttttctgaaaagggccagattgtcttcagctctgcaggcgttaagttccctatggcaactgttcaactgtgccttcttagctcgaaatcaactacaggtaacgcataaaccaaggagtgtggctgtgttcctacaaaccttcattcacaaaaacaggccagaggtggatttggccttctggtcagtttgctgataccttgcctggtttaatcctcacacacctgaggtggttactattataatccccattccacagaagaaaaactgaggcttggaaagatggggaccacccgagaccacccagctccgaggatgaaaatgaggagttctgaacccaggcagtctgacttgagaagctaaactccaaagtacccatttctctctgcacgaaattgggtgcacacacaaaactttgtacacgatttcccgggcccacacagtcccagctgcccatgctggtgaagaatcactgatctagggtagattttttttttttatttttgacagggtctcgctctgtcgcccaggctggagtgcagtggcatgatgttgggtcactgcaacctctgcctcctgggttcaagggattctcctgcctcagcctcctgagtagctgggattacaggtgcacaccaccatgcccagctaattttcatattttcagtagagacggggtttcaccacgttggctaggctggtcttgaactcctgacctcaggtcatcagcccgtatggtagggtttttaaagcattattgacatttaaagctggatcattttctggggtgaggccgtcctgggtactgcagggtgccgagcagcaaccctggcctccaccaactccaaaccagggggtcccccaaatcatgacaagcacaaatgtcaccaagaatccctggggcacagaattgttcctggttgagaaccactggtcaagggagggaaaaggcagacaaaaggaataatcagagacagaaacaaaagaaaatgggacaatcattcaacctctgaagggcacactacactgcaattttctggcacctaataacaaaaacagctattctcaagccagctctctcttatcaagttccaggcacctgatcaaataattgaatgtgggtttatcctcataatgaccctccgaggcatctgcttttacaactcgtttgcgaaagaaggaacagtttgctcagagagggaaggcgactcacccaggtttacacagcgggtgggaggtggtggtggacggtcctgaatcccagatttcccccacctctagcacgatatgcagaagaagactctaaacatgatataagacgaacgcctgctaattctttggagttctcagattccgctggaccctgcggctctccttctcctaggcagggacttttgaacaacgcccgttttacagaggggaaaactgaggctccgagaagccaagaggctgggcaaggtcacccaggtagggactggcggcgctggaaccagagttccgacttcagtccccacaaacgggggtccctgagtcacagggacgacgtttccaggcggttaataagagcggaacggcagcgaacacccagcgagcgctcactacatgcggggcgccttcccctcccgccgtcctcgccaccaggccgcggaccagcatttccaggacctggggcctggggaagggagatcagggctcgaagggcctgcccgatggcgcccggcctcagtttcccctccgcaccgcctactcacaggaccccgcgggtcgcggtgaccctggcctcacgatccccaaactcttacgagctttggggccccgtgggccccgagccgcagaccccagacccaccaggctcagcgcagtgcccctcactcacctctcaggcgaccgatccccgacccaccgacggttgcgcttgcgcaccgcggtgccgcccggccccggccccagggcgcgacgcctgcgcaaaagaaaggcgcccggagttgcttcccttctgcacaggcgcgttaatgatggaggcgggcgtggaaggaagtgacgcaacgtagaggcgggaaccagctggttgttagggcaactgacctctgcgacctaatggaggccggaaatcgggtctggtttgccctctagagcgggaatgaagcggtgcacggtggaacagtggctgactccagccggtcgccgagctgaccacgtggtgctgggccggccacgtggtgcagccgcgtttggacacctggactccagagcgtcacagctgcgcaatgaatgggagtcagtgttacccgcttactatctttgttcatttattcacccacccatctactcacccacaaatgcattctttcatgcagtgtgagacgtttgtgagtatagagccatttgtagacagcaggtgcctaatattcattcaatatttattgcaaagcagccataaaaaccagcaaagtgtctactctcattattttgcattggggtagacggactataaactaataaactagtacataaatagagaaacaaatttcacagcaaacactaagaaaaaaaaaatgaaggtagtgtgattgtcactgggagctaagtcgcatgggatgggtaggaaagatcatcctttacatttggatttcaaggataggaaagtccaaacggaccccaggcacagggaacagcgaaaatgaacgccgatgtaaaattaatcttggtgttgctcaagacatgtgatgagacatttccaaggacgacagaaaactgatcaccatctaagttacagttgccagaaatgttctcccaattcattttcgtcctactcaaaatacatgcacgattaatggcgtggattattttaatttcttttgcagaaataaaggaggtgaggccggccgtggtggctcacgcctgtaatcccagcactttgggaggccagggggcagatcacttgatgtcaggagttcgagaccagcctggccaacacggtgaaaccctgtatctactaaaaatgcaaaaattagccgggcgtggtgcgggcatttgtagtcccagctactcgggacgctgagacaggagaatcgcttgaacccgagaggcagaggttgcagcgagccgagatcgcgccattgcactccagcctgggcgactgagcgagactccctccagcccctccaaagcaaaagaaaacaaaacaaaaacaaaaaaagggaagaaaggaggtcggttgttttggtttttgccagtttaattgtagtacattgttttttctgggtgccctaacagttcaagacagatggttcaagatgttttttgttttaacccacaacactgcatgtaggtcaggctactgcactgttccacaacacctgttatttgacatgaatccgtttacttgcttttgtttctgacaaaaaaaaaaaaaaaaaaaaaaacttggcccggcgcggtggctcacacctgtaatcccagcactttgggaggccgaggcgggcggatcacgaggtcaagagatcaagaccatcctggccaacatggtgaaaccccctctttactaaaaatacaaaaattagccggggtgggggctggcgcctgtagtcccagctcctggaaaggctgaggcaggaaaattacttgaaccagggaggcggaggttgcagtgagccgagattgctgctactgcactccagcctgggcgacagagcgagactccgtctcaaaaacaaccaaagcaccaaaacttctggttaatttaattgattcgtcggattcagatgctggaaagtgggcctgggatatacagtaagcgatcaataataacactggcccaacacacagctataagaagcgaggcaagtacacattaacgcggtagcctgaagcccaagcgaagtctcagcgcaatgagccgcgcagaggctcagaggcgtcagcggcgtgcgcggtttccaaggaaaccgtccgtcctagccaccccagcggctctggaatggtagagcaagaggctccgc

SEQ ID NO: 1561049 - DNA, 4001 bp, Homo sapiens
agaggtgggtggatcatctgaggtcaggagtttgagaccagcctggtcaacacagtgaaaccccgtctctactaaaaatacaaaaattagccaggcatggtggcgtgtgcctgtagtcccagctactcaggaggctgaggagagagaatcgcttgaatccaggaggcagaccctgcagtgaaccgagatcacaccactgcactccagcctgggtgacagagcaagactccgtctcaaaaaaaaaaaaaaaaaaaagaatgtaaccccagggttaagatttttaaaaggtcacattttgtagcaatgtcagcaaacagcaatgttgcctttgcagatccttctatttcggagcccatacatgtggttatcatgatgattgaatttggatctcagacattttggtagtttcccgataatctcacaggcctcagggccagtgtgtctcaggtgtctggtgggggagatttctctggatggtccagaagaagataatctgcttcttactctcctgcaagctctccctgcagccctgcaaagtcttctggtggggtctgcagagaaattcctgcctcctgagtcagcaggaagttcccagaccagccctaggtggctttaggggaggagcgctgggcagggagccagctgccagtgccgcatacctgaagccaggtgtgtctttgcaatgcctgcgcacttcctgtttgtcacctggaccagggctagcctcggtcgcagagtttcccaaccccaagttcctgtcttgtgtctcccttagtgagagtgaagttgagtcaatggcaaggttctggttagtttgaggacacagggtggccataggtcagccaaaggccaactaagccatctcctgcctctgagtcctttgggatcatttattcgggcacggaagagaagaaacgggcagaatcaggaatcagaccaagcatagagagaggagagaggggattattcatgttccagttggatcataaacatgtgtccacgtgtggggaggacgtggagggtgggaaccaccagcacaggcaacacaaacacagatgtaggcaggactcgcttttgacgttggacgaccattgctggagcacttgctgtgcaccaggctctgttctaggacctagagatacagtgactaaggagattaaagctcggcaccaccctgccctccagagcttgcagtcggctgcgcaagacagactgcaaacgagcacaagatgaatggagaagacagaccatttctaagagttatcaatgaaagtgataagccagggagatgtgatagaggaggctggacaggacagcctctcctataaagtgacattggaactgagacctcagtacagaaggaggcagttaggcaaagatttggaggagtcgcctgggtgaggggtacagtaagggtaaaggcctggagctgagatggacttgctttttacattttacatcatcaaggcggctggtgtagccggaatacgatgaggaaggagtagataggagggcaatgaggttggagagatcaggaggagagactaggcaaaaactagtggactttgaattttaatctctatgacccaagggttttaagtgaaggaggggcccgatctgattcgccgtttaagaggatcactcaggcaaaaatggaaacaatggctttctgtgctgcacaggaaatacacttagagaggcacgcccaggtgagcccgagcacaccgacacgcgtaacgcacagcgaccctctcattcgcgaggcgacctcttctaccccagatcctccctgcgagccggtgaccccacctggaaagagaggactccccatcccaataatcctggttctggatctgccctggggctccactcacctgggcaggacccgcggggctcccacgaggctgggtccaggcggaagctgaggctccgcggctccgggctgctgtcacccccgccctccaccttgccaccgccccagccttcccagaccacacctagtgggaactcagcccagttacctgaccacacctcctgcagaccccgccccctgcgggccccgcctcaaactaacttcccaggcccttgctccgcccccttaaaaccattttttttgctactagccacgcctccttctgcatcgcaccgctttctccatagaccccgcccactaggggagcaccacgcatcctttcctgccagtggcccctccccttgtatatagccacgaccaccgccgaatgactacgcccacccgcagccacctccttctcagccccgccccttagggcaatagaagaaatttcatcccaacgttcccgccccttagaaccctgcccctcccttccacccaggcggccccaagcacccatggccctttgggaccagggcggggtggagtggggtgcctctctcccctccccgccaaggctccgggtcagggcagggcaactccctcgggctcttacgccaggctggggtagctgcggcagctgtgacgtaaggaggggtacgcttcctccagaccgccctcccggattttccggaaagaagccccatttaggtggcgggttttgtggagagacgtccgggaaaacgcgacagcttccttcagtgacagcacgctggagcggggcgggactttggtggaggtggaaggcaaatcattcaggtggtttcccaggtgggaagaagggtgggggggacttccatcgtgatgcctggagacgaacaagagaaaaggtgacagggacctagtgcaagagagaggactctttggccacgtttattgatgagttcctcatattaacatcagtcttgtcttgtagagacagggtcttgctatattgcccaggccggagtgcagtggtgatcatagctcactgtagcctcaacctcctgggcttaagctatcctcccgcttcagccttccaagcagctgagactaaaggtgcacaccaccacacccagctgattttattttattttttgtagatgtggcgtcttactatgctgcccaggctctggaactcctgggctcatgcgaacttcctgccttggcctcccagagcgctgagattacaagcaagcatgaaccactgtgcttggccccagtaaccacagtcttaaaagcagtagcagcagctaacatttattgagcacttactgtacacaagggctgttctgtcaacttgcctttattttattttattttattttttgagatggagtttcactctcgttgcccagactggagtgcagtggcagcagtctcagctcactgcaacctccacctccccggttcaagcgattctccggctgtagactcccgagtagctgggattacaggctaatttttgtatttttagtagagatggggtctcggccagactggtctcaaactcctgacctcatgtgatccacctgcctcggcctcccaaagtgctggggttacaggcatgaggcctctattttaattttcaaacagaccaccctgtaagggtggtaggtagtattttcatcacttccattttccagatggagaaactgaggcacagggcaactaaaccatttgcccaagttaacctggcttgtaagtggtagaggcgaaattcaaacccggagctctggagctttatcctgtctgcctccttttcaatcttcgcatgcccactttctccacgatgctgctttgcggtgaaagttactcacccaccattttacagatgaggaaattgaggcctagagggccaacgatgcttggggatgaaaagttttgatgcctgtaggttgcaaagcagggaatttccagactgggctcccccgactggccctggcaaatatggaagagactccaggctcaagaggggaagaaagtttcttccttatccctcaccggtctggtattggtacagtcagagggtaggggcatgttcagggaaggggtctagcgcctcctcgtggttataataatttaaaaagagggcccagcactttgggag

SEQ ID NO: 1561050 - DNA, 4001 bp, Homo sapiens
tgccatgttgcccaggctgctctcaaactcctggcttcaagtgatccgcccgcctcggcctcccaaactgctgggattccaggcatgagccaccgcgcccggccaaatttgaggcttcttgcattcgaaattgcaaagtgaaaattttaaatgtgcccagttttctggagagtggatccacagctttcaccagattcatgagcagtgggccctggagtttccaaaaaaaaccctttatctgtccatatcaaatgcacttaggctgggatgcagcattctacttctgggaattcatcctataaaactaatcccactggtgagcaaagatattcactggctatttattgtagtaatggtaacagaaaattccggtaaacaatagagatatctatcaactgacaactggttaaataaattatggtatatgtcatggaatgaaatacaatgtacccattaaaaagagccaagtaggccaggcaggtggcttacgtcgataatcccagcatgttgggaagccgaagcaggcggattacttgaggccaggagttcgagaccaccctggggcacatggagaaaccctgtctctgctaaaattacaaaaagtagccgggcgtggtggcgcatgcctgtagtcccagctactggggaggctgaggcaggagaattgcttgaacacaggaggcggagcttgcagtgagccgagattgcaccactgccctccagctggggcgacagagcatgactccctctcaaaaaaaaaaaaaaaaaaaaaaatccaagaagtgtggagtatggtctagagcagtagtcctgggggacaggaaaggaagggaggaaggaaagaagagaagggagggagggagagaggcaaggagggagggaggaaggaaggaaagaaggaaggaaggaacgaagggagggaaggaggactgattctaaggggacacacggtgatgtctcaagatatttttggttgtcacgacttgggggtgctcctggcccggagtgggtggaggccaggggcgctgctcagcaccccgcagtgcccaggacggccccaccacggagaacaatccagccccagatgtcaacagtgccgacggagggggagaaatcccgctccagtgtgatctccaagcaatgaaaaacacagcacacaggattctgtggcatatgctatcacagggtacgtgtttttaaaggaaaggcacacacgtatcttaggaaagggacatacggagtcgatgacagtcgcttgtctctggggagaagggctggctgcccgaggagcagagaggggaaactgacttcttcctctaccttttcaactttgtaccttgcccatccagaggattttgaacgtaactgctctagacgcaacttttccctggctctgggttatctggcaagagtcctgtgtcgacagcctcgggactcctctcttccccttctctccccgcaccccgcctttgcagcggagagaaggaggggagaggtccgcgtccctgggcagcccagggtgcctctcccctcctcccaggggctctgtccccgcttctggagcccgcatggcgggcagggcctgggccacctcgtcgcccccgtccgtcccttggtcttcccacctggcaggggacacgcgccaacgtccccacctcggtccccccggccccctcccgggccaggtcgggcctggctccctcatccgggcagcccggggcccggtactcggctcccgcctgggcctgcgctcacctggctcgccttgtagaactgcttcttcagccccgccaccgacatgctgccgcccgccgccgagcctcccgcccggaccgcgccagcgacaggctcccgggcgccgccgaccctctgcgcgcctcagcagtccccgtcggcgccgcctccgccacccgcttgccagctccgcgcccgccccggcgccgcctcagccgctcgcgcgcccgcgcggccaggatattacatggcaaccgcacgcttccggtgccggcccccgcgcgcgcccccggcccccgcgcgcgcccccggccccgtctgcgcacgcgcgccctctgccggctgaagagcgcacgtgcacattgtctaccgcgggagaggccgcctctgtcagtgagttgagcggggcgagcctagaggggccgtagcagttgcagcgccccctggagtcgtggaggtgaccctaacgtcttggaaaacgcgcttagtttaaacctggccagggaggttgggaagtagaaggggcccctgcttacgattcttcagattcctgtttactcatcttagctaaatccagttcgtctaagtgttcagccccctcccatttttatttatttatttattttttttttgagacggagtcttgctttgtctcccaggctggagtgcagtggcgtgatctcggctcactgcaacctccgcctcccgggttcaagcgattctcctgcctcagcctcccaagtagctgagattacaggcgcgcaccaccatgctaggctaatttttgtatttttagtagagacagtgtttcgccatgttggccaggctggtctcgaactcctgacctcaggtgatccaacccccaacccccccaccaaatccagcctcccaaagtactggtctcacaggtatgagccaccgtgcccggccacctctcttcctctctctctctgtcctgtgttcatccattcagttgcccacgtgacacatctagacatctaggtctgtcttcatgccttgaccatactttccaccagtcctcccctccaattcttccttgtcatggcagccagaaagatgcttctagaatgcaattcagggccaggggcggtggctcacgcctgtaatcccagcactttgggaggcctaggtgggcggatcacgaggtcaggagattgagaccatcctggctaacacggtgaaaccctgtctctactaaaaaatagaaaaaattagccggacgtggtggcgggcgcctgtggtcccagctactagggactccgtctcaagaaaaaagaaagaaagaaaggaaggaaggaaggaaggaaggaaggaaggaaggaagaaagaaagaaagaaaacctgtttctacactcacaggctgacactgaagttctctgttttgtgtgaggcttttaatctgcttgatctacacagttcaatcaaatatttatacattcactcaaacatttattgacctggtaaatatgatcagttactaacaggtcctggggttccagtgaggaatgagtcctaccctcgccagaactaatgacaaaaggcagaaattaattcattagtcaaataacaaactaataaatagacacagctgtaattgctttaaggaaaagaacagtgttgtaggcacttgatattgtcagggttggggaagaaaaggcttcctggggtgacgatctaagatctgaaaagtataaattagccaggaaaagagctgcgaaaagattgttctaggcagagaaaacagcatgtgccaatttcctgaggattaaaccagaaacgatccatttcgtccatttcgttcactcattctacatgttatttactgaatgtcaaatacttccgaagcgctccccagacttcgttttattgttcttgtagaaagcaatttataattttaattgctgttgctatatttagccgatgtcccattaggataaactcaaaactccaggttcctcatctaaatcccactttcaagttgtcatctgcgccttgcgtaaaatgttctggtgacgtaagagcctgggcctccctcctcttagggactatcccacgcgatcagccagtcgcagcgcagagcaatgagcttgacacctccttcctccaatcgcagggcagctcctcccagccaatgacaggcctccgaggggaagcccagtccctcgcggatatgtcaatgggcgagccctgggaggaatggaagtcacggatctcgcgaggatgcccccggcgcccctcaattcccg

SEQ ID NO: 1561051 - DNA, 4001 bp, Homo sapiens
gtcacccaggctggagtgcagtggtgcaatctcggctcactgcaacctctgcctgccggattcaagagattctcctgtctcaccctccttagtagctggggttacaggcaaaaatacaaaatttttgtattgttagtagagatggggttttgccatgttgcccaggctgctctcaaactcctggcttcaagtgatccgcccgcctcggcctcccaaactgctgggattccaggcatgagccaccgcgcccggccaaatttgaggcttcttgcattcgaaattgcaaagtgaaaattttaaatgtgcccagttttctggagagtggatccacagctttcaccagattcatgagcagtgggccctggagtttccaaaaaaaaccctttatctgtccatatcaaatgcacttaggctgggatgcagcattctacttctgggaattcatcctataaaactaatcccactggtgagcaaagatattcactggctatttattgtagtaatggtaacagaaaattccggtaaacaatagagatatctatcaactgacaactggttaaataaattatggtatatgtcatggaatgaaatacaatgtacccattaaaaagagccaagtaggccaggcaggtggcttacgtcgataatcccagcatgttgggaagccgaagcaggcggattacttgaggccaggagttcgagaccaccctggggcacatggagaaaccctgtctctgctaaaattacaaaaagtagccgggcgtggtggcgcatgcctgtagtcccagctactggggaggctgaggcaggagaattgcttgaacacaggaggcggagcttgcagtgagccgagattgcaccactgccctccagctggggcgacagagcatgactccctctcaaaaaaaaaaaaaaaaaaaaaaatccaagaagtgtggagtatggtctagagcagtagtcctgggggacaggaaaggaagggaggaaggaaagaagagaagggagggagggagagaggcaaggagggagggaggaaggaaggaaagaaggaaggaaggaacgaagggagggaaggaggactgattctaaggggacacacggtgatgtctcaagatatttttggttgtcacgacttgggggtgctcctggcccggagtgggtggaggccaggggcgctgctcagcaccccgcagtgcccaggacggccccaccacggagaacaatccagccccagatgtcaacagtgccgacggagggggagaaatcccgctccagtgtgatctccaagcaatgaaaaacacagcacacaggattctgtggcatatgctatcacagggtacgtgtttttaaaggaaaggcacacacgtatcttaggaaagggacatacggagtcgatgacagtcgcttgtctctggggagaagggctggctgcccgaggagcagagaggggaaactgacttcttcctctaccttttcaactttgtaccttgcccatccagaggattttgaacgtaactgctctagacgcaacttttccctggctctgggttatctggcaagagtcctgtgtcgacagcctcgggactcctctcttccccttctctccccgcaccccgcctttgcagcggagagaaggaggggagaggtccgcgtccctgggcagcccagggtgcctctcccctcctcccaggggctctgtccccgcttctggagcccgcatggcgggcagggcctgggccacctcgtcgcccccgtccgtcccttggtcttcccacctggcaggggacacgcgccaacgtccccacctcggtccccccggccccctcccgggccaggtcgggcctggctccctcatccgggcagcccggggcccggtactcggctcccgcctgggcctgcgctcacctggctcgccttgtagaactgcttcttcagccccgccaccgacatgctgccgcccgccgccgagcctcccgcccggaccgcgccagcgacaggctcccgggcgccgccgaccctctgcgcgcctcagcagtccccgtcggcgccgcctccgccacccgcttgccagctccgcgcccgccccggcgccgcctcagccgctcgcgcgcccgcgcggccaggatattacatggcaaccgcacgcttccggtgccggcccccgcgcgcgcccccggcccccgcgcgcgcccccggccccgtctgcgcacgcgcgccctctgccggctgaagagcgcacgtgcacattgtctaccgcgggagaggccgcctctgtcagtgagttgagcggggcgagcctagaggggccgtagcagttgcagcgccccctggagtcgtggaggtgaccctaacgtcttggaaaacgcgcttagtttaaacctggccagggaggttgggaagtagaaggggcccctgcttacgattcttcagattcctgtttactcatcttagctaaatccagttcgtctaagtgttcagccccctcccatttttatttatttatttattttttttttgagacggagtcttgctttgtctcccaggctggagtgcagtggcgtgatctcggctcactgcaacctccgcctcccgggttcaagcgattctcctgcctcagcctcccaagtagctgagattacaggcgcgcaccaccatgctaggctaatttttgtatttttagtagagacagtgtttcgccatgttggccaggctggtctcgaactcctgacctcaggtgatccaacccccaacccccccaccaaatccagcctcccaaagtactggtctcacaggtatgagccaccgtgcccggccacctctcttcctctctctctctgtcctgtgttcatccattcagttgcccacgtgacacatctagacatctaggtctgtcttcatgccttgaccatactttccaccagtcctcccctccaattcttccttgtcatggcagccagaaagatgcttctagaatgcaattcagggccaggggcggtggctcacgcctgtaatcccagcactttgggaggcctaggtgggcggatcacgaggtcaggagattgagaccatcctggctaacacggtgaaaccctgtctctactaaaaaatagaaaaaattagccggacgtggtggcgggcgcctgtggtcccagctactagggactccgtctcaagaaaaaagaaagaaagaaaggaaggaaggaaggaaggaaggaaggaaggaaggaagaaagaaagaaagaaaacctgtttctacactcacaggctgacactgaagttctctgttttgtgtgaggcttttaatctgcttgatctacacagttcaatcaaatatttatacattcactcaaacatttattgacctggtaaatatgatcagttactaacaggtcctggggttccagtgaggaatgagtcctaccctcgccagaactaatgacaaaaggcagaaattaattcattagtcaaataacaaactaataaatagacacagctgtaattgctttaaggaaaagaacagtgttgtaggcacttgatattgtcagggttggggaagaaaaggcttcctggggtgacgatctaagatctgaaaagtataaattagccaggaaaagagctgcgaaaagattgttctaggcagagaaaacagcatgtgccaatttcctgaggattaaaccagaaacgatccatttcgtccatttcgttcactcattctacatgttatttactgaatgtcaaatacttccgaagcgctccccagacttcgttttattgttcttgtagaaagcaatttataattttaattgctgttgctatatttagccgatgtcccattaggataaactcaaaactccaggttcctcatctaaatcccactttcaagttgtcatctgcgccttgcgtaaaatgttctggtgacgtaagagcctgggcctccctcctcttagggactatcccacgcgatcagccagtcgcagcgcagagcaatgagcttgacacct

SEQ ID NO: 1561052 - DNA, 4001 bp, Homo sapiens
cacacttggccagtggttcccaaagtggaccgtgaaagtctggagggatggaacatttaggggaggaaagagttcaatgcatgctgtggtggggagagggtagacaaggagggactgggagtttttccttctcaaggatcaagagttcttcatttctgaccaaagcagttcccgatttcctcccagctctcaccatcgagacacaggacagacaggggctgaggactggcgggcaaggtaccaggaggacagatatggctggaaaggggggtgtaatggttggattttgcagagattcaggctatgaggttgggagaaatgtagcctgtctttgaaatagactctaggcagaaggaccttcagtgtcagggtcctaggccaaggtggggaagtaaagaggccttggatggatatggggggaggcaggggaagagaagggagactcaaaggaggccaggtgggaatgatgtgggcccaggcagagggatgaagggcaaaagaggaaagtaagaaggggttgtgatggggataatggggggtatttgtggttgtctcaaatgtggtacagcatcccaagttaagcgggggcagtggccagagggatcgctggcttggggaatgtggaggtctattgggaagaggtggggagagaaagtggttgggtagggggctccagtggtagggggctataggggatagatgccagcagggttttctcaccttcgtgtgcaacttggccagctgcttctcatccaggttggtctgtttgtaaactcgggtcttgtatcggaactgaggtcaagggtagggtagtgagagagacacagagacttggaatcaggggcctggggagaaggcttggggtaggggaaggtctgatccccttctaattccccggggtagctcagggtgggagtgaaaacagccctggaaccttggtctaggcggtagatgggtggcagtggcttttccgacagtgctgggtattatggtatatgtgcactgcaacccctgccttgaaggaggaggagtctggaccccacagggaatgttctagagtgcctactgtaattgggaatcctcccccaatttgatgggtgaggagaagcttggggcaggaaagtgacttggccaaggccacttagctggtcagaagcagaacagatggtaatttgaactcaggactctctgacttccctgtgatgcttagaaggtctggactcgcacactgggtgccccctcgttaaggtttcgagtgtgttaaaaagtgggtggggggcagatgtgttttagggcatgccttctcttatcagtgaaggagttggggaagcttcacctccaggtaggggacccccttctcaaaggactgggggtactcccgcagcagcctctcctcctccaggaagttggcatcgcggccggaggtggccggttggaacaggccatagttgagcacatcctgcaggctctcgctcagggcacagagcacctgctgcttggccgtccagatggtggcatcggggttgaagcgaaggcatttctggttggggaagagataggggctagggtgggccaggggccagaggagagcctgaggtgggttgggaagtgagccaggagctgagtgtgggggtgattcctgggaggatacccagcaccagtggactccccatgtcggttggggcactgtccctctcctgccgctggccagtgggcaggtactcactgtctggtgcaggtccgggatgccaatcctgaagaccatcatgctgaagtgggcgtcgtctgggacggacattgagcggccctggaggcctctaacagaggccaggctaccaggtgccccactgccctggccccgggtcccccgggggcctcgacctggcccgtctggggagctgtcggactctgagcccccctcgggacactcgctggcactgtggcgttcctcgtcctcgcttgtcgcggggctgtgggtcattgtggggccacggggcgacgggggacggcagcatcacaggcggctgcaggggccaagggcggccatcagactaggagcccgggacccctcagaggccgcaggcgctattcggtggtcaagcggtcaagggcagcctacccccactgcccaagataggcaggaaggaggctggacacaccctcggcctgcacggcctcccctgccgcctcctcccacgctggcacgcacacacccctgtccctgacatgcttctggcatgtgtctccttccctgcccttggccccgcttgcagcccgccccctgcgccccactttgctggtgacccagcgtggccgtgtcccagaaaccgcagaatcaccgcgggagctactggcccactttgccaggccacagaaaatgcagctaaaattagctaaggacagacaggtggacaaactgacaggcatcctgccctcctggccccagcctggcccctcatcccagggccggggggtggggttggggagaagctgaggctgacactgagatgtagtaagggggagagggaggtgtggtgagcctggagcgggtggagctggtgacttcactcaagtgtggctgacaacgcgtggcatgccgaatagtgctggggaatctgccgtcccaggggagcaaggggcactgagatgggggtgtcatgggcagagcatttggcctagggtgtccccaagggaaccacaagaggtggcttttggagactggggcatcttgagagggtgtgcgggtaggtggggaggtcggcctggggagtgctgtccaggtgacagtggtgtggtggcccgggtagatgtgggtggctgcagatgacctgtagctcttttctaggactgcagggtgggtgggctggcttgctgggtactaggggctccactctgaggactgggggtgttaggagggaggctaagaagtgagaggagggtctggggaactgagtgggggatcatctctagatccttgctgttctcccttgaggtggccttatgagggtggagccccttccaaatggggtccgcctcccttctgttctcccccaactcccaccccagcaccggaaaccagaatgtctggtctggtccctccccccaacaccaggcccggttcctgcaccgttgccatggagatgggaagcagtggagggtactgctgactttgggggagtggggatgggctggggggttgggaaagggaagactaaatgtgtgtggtgggaggagagttccaggaggtgtgggcgagcgagcctctaacccagggccggcggacccctcccccacgcgcggcagcgctgcgaagccccctccccctccaggtacccagccacgccgccccacctcgtccctgcggagaccccggctgcctcctccctgccccgccgcacagcccacctcgcgatctggggcccgcagacactccccctcggctgaccctggctgacccccagcctcaaccccgctcggagggggtggccggtgggatgaaagaaaagctggctagggccccccgcgcgtacggctgccccagcccccccgggccggctccggcccctccccctcagggctcgcgggagggagcgggcacgctccgccggggcggcatgaatcaaacgctccgcggctaagaatagctggcacgcagctggtaccgagacgggctgaggaatcggcgaggggggtggtggaggacgcgagagagggggtgccctgggaggctgtggggggacagggggcggctggcgtggccgagagcggggccggggagaatgaatggaggcggagggaggcggggaggggcggggagagagagccggagccgaggctgggaaactggtgggggagaacccggccggggagaggggcggggggcaccggggagcaggagtcgggggcgggagccgagggggcgcgccggccggcggtgtagggactggagacctggtggggacgcagggagcttggacaggggtggaaagggactggaggag

SEQ ID NO: 1561053 - DNA, 4001 bp, Homo sapiens
gcctgtctcctaacggcccgctcctctgtgcatctgagtctaaagttccttctccttacagagacccctgatccaggtaggcctcatcttgactaggttacatctgcaaggaccctgttcccaatataaggtaataaggtcagactcctacggcacaggaattgtagggggacccttctcaactcggtgtagggggaaggaccccactgaacccagcgtagggggaaggaccccactgaacccagcgtagggggaaggacccctctcaactcggtgtagggggaaggaccccactgaagccagcgtagggggaaggaccccactgaacccagcgtagggggaaggaccccactgaagccagcgtagggggaaggaccccactgaagccagcgtagggggaaggaccccactgaacccagcgtagggggaaggaccccactgaacccagcgtagggggaaggacccctctcaactcagcgtagggggaaggaccccactgaacccagcgtagggggaaggacccttctcaactcagtgtagagggaaggaccctactgaactcagcgtagggggaaggaccccactgaactcagcgtagggggaaggaccccactgaactcagtgtaaggggaaggacccttctcaactcagtgtagagggaaggaccctactgaactcagtgtccagaaaagcaaagacacaacccaatgtgaacacaggctaatgttcctggccgcagaggccgggaggagctgggagcacccaccggtagtggcgtgcgggagtggctgatcattttcccagacgccgtaatgactgcagctgtaggacagctgctctctcagaagacgggggactatgcacggcgctgtcacccctgcaggtgacttcacacggtttactataaaccacagagaggggcagacccgtcagcagaggggaaggttaccctcctaggtggaggcgtgctgtgtccaggcgcccgacttccccgtgtgtttgaaaaggttcatttatcataagacccaaggtaaataaacaaaggccgcttccttggccgccctggaagtccctgctgcctcccatctggaatcctggggtctgtccgggcgccagcccctttccaaacaccccttcccgcacccccaccgcaggccagcgtctcgggccccgtctgtcattcgtgaacagctgtccggggggctccggtggcagagacgccccggccgctcgccgctctcggcctcgcccgcccagtccgagtggggggcggtgcacctgcgcatgcgcgcccctcccccgccgccctctccccgcccctccccacgtgacgccgtgggaacccggaccccagcgcctccgggtgggggcagccgccggccgccggccggggatgggggtccggggtggcgggagagcaggaaggatggggaggggacacctggctcgcggggtccgggggtcccggaggagagggtgggggaggggaggccgccgcgaacgggctcccggggggggtgggggggactcacccgcacgacgtaggagaccccgggccccaggaccctggcgtcggggtgtagccagccgtgcgcgggtttgtggatgaagctgcccttccggatccactcggcggcggcggcggcgtccccggaccccgccgccccccgcccgccccgcgacccccgcgaccccgcgccccgacagcggctgagcgcgggcaggggacagggcgcggcgcagcggggctcgcaggcgcccaggacggcggccgccagcgccgggacgccccccgggcccgccggctcgggttgggggtccgcgccccccgaggccccagccgcccgcgccgccgccgggccgcggcccaggaagccgcccggggccgcgaacttccactgcggcattcggggcagcaacgcgcagaaggtggtgggcgcctcgggctcggggggcgcggggggcgccgggggcgcgcgcccgcccggaccctgcgtcatggccgcggccgcccgacggagcccgaccgggcgctgcgcctggcgcggaggaagccctcccgctccgcccgctccctcccgccccccggcccggtgatgtcatccgcccggcccagcgcgcagccgcggggggctgcgcccctgggaccccggccctcctcgtcccggagcctggccgcgaggctggggaaactgaggccctccgaggacaccgggcgctggcctggaacccgcagccaaggcgggacggggctttgaacccagaaccccgtcagcgaccctccccgctgcgccccccacccccgcccgccgcccaagttcgcagaaggaccgagctggagaagcttagaaattccacatcccttctttcccctatttcctagtggggaaactgaggccccgggaggcgcggccagggaaaagagaaccccagaccctaaggtcagcccctccctctccgttgttgcagctagaaggtaccttagggtcacccctatttcttagtggggaaactgaggcgcggggaggggaaggggcgcggccgagggctcacagacgaagctcaaacccaggagtgccggctcgggggtggggggggggggcggggctaggagcggagccgggcccctgctctgcggcctgtcccggcctcagtttctccggctgtaactcaggggagcgggctggagggtcgcggcccttcttccctcacttctggggagcccagtcccgcaccagctcatctgagctctgggcctcagcctcccaggccggtcgctccatccccagcctcaacctctccgagaccggccgcaccttccctggcctcaagggtcggttccttctgcaccagaaaacggggtgtcactgtcaccccgggacccagcctcctggcccgacttggctggagctcccctgcacctgccccgccccaagcagggctgattgccgggaacaaagggaggggccgggacgcgctggcaggtggggagggagggaggggcgaggctgcccggagcccgatcgataattcaggggatgagatcacagccggcgccgcccgcggggccggggaggtgggggaggggagcgaggcgcgcggtcgcgatcggccgtctctgccgcggcgcgtgtcggactcagcccctgcgcgtccgcgggaggagcagatcgtgggcgcgattggtcgggctggagccgcggctggacctgcgcgcggtgtgtgtgttgtgcgcagggtgtacgctgtgtctgggtgcgtgtccaggcatatgcaggggatccaggctgctgggtcctggggtgtgttcacctaatgggtaaagggtgggacaggtttggcggccctaggctgagggctgtgggctgaggagagagcagccccaccaccccctctctgcgccctgcatgcctcccaggctgcatccctcagggaggtcccggggcagtgtcgcaccctcccaagctccgggattagggtctttctggatgggaggtttgtaaggtggtccaggtgccatccctccctggcacacagagggctcagtcacacggcacccccggtgtgtttccttcctgtcccttggagacagtggcaggaactcagtccaacatccagagttcaaatcctgacatcagactgaggtgggggctcacagcatgccccaggacaaatgtccagtctctccaaagcaccatttcctctcagtagatgcccctggtcctgagttgctatgaagcctagatgatctttattaatatccaaaacatagcaagcagctactgatggcagatattagaatacctcaagctcctatacatccttcaaaacccagcttcaatattgcctcttccaggaagcctacctggctgcctgctcaaaagcttggctccacctccggcctcccctcgccctgggtctctcttctggtctctcagaccccctggccactggagggctacgggtctggctctggagggcggcgttcgggtctcttttct

SEQ ID NO: 1561054 - DNA, 4001 bp, Homo sapiens
tgagccgagatcccaccactgcactccagcctgggtgacagggggagactgtctcaaaataaataaatacataaaaagaacagacttccccaagcaggtggaggtctggaggactgggaagggtctgtctggtgccccagtcccctcctgtgatcacacataaaataagctctccacgatccagagagcccatcctgagcctcccctccacccagtctccccaggccacccagccacgcacctcctccccggggccgcccagaagggccttggctctggccatatccgcagcctccaccttgatgagccggtgcttgggagaaccatacttggcatctccggggttcttggagtccccagggcccgcggggtccggctccaagcggctctccgcgtcctcataggggtcctcgaagtccaggttcttctgcgcgcggtaggccctcaggatgtcgctctcggtgtagtccggggtgggcggctgcggagggggcctccgacccccaaagctcaggtagtcccgtagccacttggccatttgggcgcctgtcaccccaatcgggccactgtcagaggggcccccacatgcccttctccgggcccctttccccaaggaggaggaggaggtggagaggaagggaagagcagggaaggatgagaaagatcaggtgcgccctttggcggggctctggatggatagagggaaggaaaaggtgaacgagggggaggaaaaggaggcgacagaggagggaggaagagaagcccgccttagcccagcttgggaagcaccgcgggggaaggggggacctcgcagggccccgaaccccgcgcgctgggggctagggcgaggggcatccgcggaggcgcgcggagtttccgcgggcagcgcggttccctggagcgacacggccgcccgccgcctccaggaagctccgggatcccttcctggggtcgggagatccgggccagcgccacctgcggacgctcccggcccctctcccagcccggacgcctgggttctcagcgcagcgggcgggctccccaggggcgcgggcgccgcgcgcaaagttgggccgcggagactgtgaccccggcgggacgcatcctttgtcgcgctcctctcggctcagcggggagcccccagtcccgcggcccccgccgcctcgatccggccccagccacccgcacaaagggaaataaaaacctcctccaatcccccttcacgctttcggagagactttccccgccgccgccgggaggtgggacgctggggaggggggcgcgcaggaggacgcccctgttcccaccagccccgggccgcgtcccgggcagcagcgtcaaggctcccccacctcccctccgccgcgtcccccgcccctcccctccccctgcgctcccctcggaggtgactgagaccttcagctgttctggggagggagggagccgctgcccgcggagggaaggggggctgggggcgggagtcgccggggccgaggccgcggcagctggacactgaccgggacgcccgagactggccgcagcgagcgcggagcgcgggaggtggggagcagctgggagtgacactgctggggaggggaggggagagggagaaggaggggagggggaaattgcccgggaaatgggggactgcacttgaccgccaaaaggggtgaaattgaccagcagagggggtgggaatgaccgccagtgagggtcgaaatggaaccgatgtctggcggtgaaacggaccgggagagtggggatgtgcaaattggtggagaggtcactggctgaaattgatattggagcagcagaaggaagaggggggcaaaggaagggtgggtgcggatcgggcttcccctcccccaagagggctctgctctgtgccccgctcccgccccagaggactaattgcgggcagggggagggttgggggcagctggcttggggaagggagatggtatctgtgcctggcgcctgtcctctgcatctgtccttttgtggcttctgggggcggggtgggggggagcggtggcgggaagaggggcagaagtgagaggggtctggcctgaactggctgcctgttgtcagctgtcgttgtctgagggtgagggcactgagaggtttggggggtgggagaggaaaagggagccactggccaattttccagtgcagaaccgttttttttctttccccataagggggcttgcccagttcctcctaatgaggggagtgagagaggggtggtcaggaaggatgggaccccagattctctcctcttgtggccagccccctggtcaggcacaggtcatagcttggagagcacagttggaggacaagacagaagtcagaaccaacactgctatgactggggcctcctggcagcccggcggggctgagggcagggtctgtcactccctgagtcttggttttccttatttgaaagatgtggtttctaacaggaaatcccagacagctctaggaaggattccaggagggaccgagctatcacctggcttcctcattttatggatggggaaaccgaggcacagagatgggagggacttgttcagagccactccacagctgattctgcctgcacatcgccgtggggcctggcctagggtggcactggagtctctctttttatttttttgagacggagccttgctctgtcctccaggctggagtgccgtgttgcgatctcagctcactgaaacctccacctcccaggtccaaccaattctcctgcctcagcctcctgagtagctgggattactgccaccacgcccagctaatttttatataattttatatttttagtagagatggggtttcaccacattggccaggctggtctggaactcctgacctcaggtgatctgccggcctcggcctcccaaaatgctcttcatggaatcggttctgcaactcctctccacgatgagctccattatccagatgggaaaactgaggcctggagccaacaaggcaaagcccctgaaggatgcaggcgtctagacccttctgttcctccccttccctgcactggctgtgtcccccaacacagacctgttgaactccttcctccctcctgaagtgcatggccacccccgcttccccccaccctttcagatcagcgacaaggctgcgtccctgggggcggccagggagcacagcgggtaattgtcctgctttctgtcagccgcaaggcaattccgggccacggggatgagctgttgacagatctcatcaaatccaagtcgtctccctgccggataaaactagatgtctgaggtataaatatttgaaaggggccttctaattacaatctgtgtcaggaatagcaattagaggccccggggccggaatcaaacggcatttgactttcctgtgctttggagctggcttctcctggggctgcaccccgaccctaccccaaggaggggagtggggagaggctggcagggagaggcaggaggattaggtagaagagaaagagatccaggctaggggtccagtcaccttcccctgtgaccttgaatcagccacgtaaccttgtgagatttggatttttcttttctcccttttttttttttttttgagacagggtctctcgctctgttgcccaggctggagatgcaatcacagctcactgcagcctcacattcaacatcctgggctcaaatgatcctcccatctcagcctcctggtagctaggaccacaggtgcataccacaaaacccggctttttttttgcttttttttttttcttacgcagagtctcactttgttgcccgggcctggagtgcagtggtgcgatctcggctcactgcaagctccgcctcccgggttcacaccattctcctgcctcagcctcccgagtagctgggactacaggcacccgccaccatgcccggctacttttttgtatttttagtagagatggggtttcactgttagccaggatggtctcgatctcctgaccttgtgatcctccc

SEQ ID NO: 1561055 - DNA, 4001 bp, Homo sapiens
ctgtcactcagcctgcctttttcgccattggccacgcccctttctcgttggccacgccccctagaatgaccccctttctcaggccacacttcctgcttgaagcgctgctgccttaactcgtgtggaagccatcgcttctgtggtccctctcacttccctgtgggctcgccccaccctgaatctgggaccccattcccgttccttttgcagccttccccatggcaacaaagggtgctccatttacccagtgatgcggacctcaaacattaaatcaccttgactcttctttcccccaccttcatacctttcagcaatcctacggatcgaacctccaaaacatatcccaaatcagaccactactcaccacctctgcaatctctcacctggatcattgcaacagccccctcacgggtctccccactcccaccctagccccgtacactccagtctcacgcgcagcccgcataatttaaaaaatggacagatggcatcacgcccgagctcaggaccctgcagtggccccatcacacttaggataaacccgggcccgcctacttctcctcacctcctgctgcccaccgccgccagctgcacgggcgcttccctgccctgcaggccaccgagggcctttgcacgcggttcccctgcccaaaacctctcgcccacagatctctgcgtggttcgctccctcccttcgggtctccgttcagaggccttttcggatcacttcctctaatccagcgccctctctctcaacactttccgctgattttcttcacagcagtcatctaaaattacactgcacatgcttacggactgggccactgatagttaatgagcccttaccgtgtgccaggaccctgcacgaatcaactcagttaattacaatccgaataggtggggacgatgattagtctcattgtgcggacaggaaactgaggaacagagacgttaagcaactcatccactgtcacatagcctgtaggctgtgaacttggatttggaagtcaggcttttccaccagggcagagaccttgttttgttcactggtgtatccccagctcctggcccacagaaggtgctcaagaaatatgtgtcgaatgaatgagagtctgggcttctccctctccctgcatcactccgcaacagccgggccggctctggcgcgactttctcagcccctgcccaccttcagctacgccggcggccgccacctgggtctctgaccaccacgccctatccctgcagcccctcctcctcggatggctccacctcccttgctgggccccgccccaggctcgcagtcctcccgcccgagagcacacgcacctgggcacgttgatatcccggtgcgcccggggcgcacgggacgccttgctgaaggccactttggcgccgacgcccacggccagggcgaagctgatgaccccgcacacgacgtaggctgtgctgcccccggggccctcgcccccgcggcccccggcacccccagtccggcccccttccaaccacccggcctggccgggccctggccccccgcccgcacccccagcgcccccggcgcccccagctagcggcggcggcgtggtggcccagcgcggcgtgtcgtagttggagcaggaggcctgcgccaggcgcatgtgacggtgctcacagcagaagcggtagtggcaggtgccacagcagaagcggtaggagccggtgctgcagttgaaggtggcgtcgtactggcccatgacatcgtagtagccgtggcagagctcggcgggagggggcgcccgggccgccgcgcccgccccgcccgcggggccggtcctggtgccgttggcgcctgggctcgccgcgcccccgccgcccgtcagcgccccggtcaggcgccgcaggtgcgccagcagggcgggcagcgggcccgcgggctcggcgctcgtggcgttggacgggcgcgccctggcctggccggcgctagaggccaggagtacgaggagcaggagggccggcatggggcttgcagggggtcgcactgggccgccaggctgcggggagaacgagagcagaggttggagcgctgggcgggagagaaacggtcagagggtgagaaacgtagagatgggtgggcagagaggctggggagggcgggcggggggcggcagagtgtggggagcaacaggcgccaggaggcaggaagggcggagggagctgagctgcgtgggcccaagttggccgccccacgcgcggtgggcgacgatgggagagtaatggaaacgcgcccgggcacggctgggggagagaaatgagcatgggcggacagaaccgggatcaggcgagagatgaatgcgggagaagcgattgggagggtcgacagacaccagaggggtgtgcagacattaggacgaggagcgaggcgaggcgcgatgtaaggagaagaaacgggggcggcgaagaggagagggcaggggaggcagctggagggaggcgcgcgaaggggaggggagggtggcgaggggagtggggaccgcggagggagggaaggaagcgagacagatgaggggtgggtgggaaaggaggagtcagggagacggggaaggagggagaaaagaaggggaggaggaggagggggaggagagggagggaggaggagagagagaagttgagaatttgagtttatagaccaggcaagtgggaagaggcagtgcacggtttttcaacactgacattcggggaccgatgctgctttgtggtgagcgcctgtcctgagcgctgtaggatgtttagcagcgccctctccatgccagcagcaccacattcccccgagttgtgacaatgtaagatgtttccaggcattgccaaatgttcccctggtgggaggaggccacagctgcccccgtggagaaccactgacttacacccctatggtcctcagtgccccgaaatgccaatttctctcccttagttagatctgataatcaagggatcttaggtgccctccctccctccctctctctccctctctctctctctctccctggcatgcacacgcacacacacaccactgttacggcgtcgggtttgaagggtctctgtccacagctgaaccacaaccacagcagggtggttcccctgccgactggacctcctgccagctgcctgacactgacaggctcttatctaagctccctgtgccccaagtcccccatctgtaaaatggggataaggatggttatctctgagtggtcaggaggatgaactgagggaatatgtgtaaagagcttagaacagtgcctggcatattgcaggtgaaatatgaaagtgtttgctgctgctgctatttcagaagggagatacaggctgagaaagggtcgtccgggtgcggcggctcacgcctgtaaatcccagcactctgggaggccaaggtgggcaaattgctcaagcaggagaccagccagcctcgccaacacagcaaaaccgtgtctttacaaaaaaaaaaaaaaaaaaaattagcccggcgtggtcgtgcgcacctatagtcccaggtactcaggacgctgaggtgggaggataacttgagtcccagagatcaaggctgctgggagctgtgatttcaccaccgcactccagcctgagttgacagagtgagaccctgtctcaaaagagagagaaaaggtgatgcagaagagaggtgggagttggtggtggtggtggtgggcacgtcttccagctgtttctatggcaacagtccagccaagtcccagacacgcccacccccgtggacctagagggatgatagaggtgggaaggatgcctggcctcgggttccgggagaaggaaacgtctgagctctacctgcaggaggaaccccccaggggtctggggtgactgcccacggagtcttacatttcctctctgcaagaacctgatctgaacagcccctgccctgagctagctgccgagaggctgccatagagcttcccaggagcaggcatgatgcgcggggtgtgcattcg

SEQ ID NO: 1561056 - DNA, 4001 bp, Homo sapiens
atttctcccctccatacgaagaatcccaggtcttccaaagccccccctacaaagaaaccaaacccggactacaactcccatggggctccaggacatccttctgagcctcaagagttagctggcccattgtctcatgggaaatgctgtgtccaacttcctttccaagcatcagcccaagcatctgatagggaactacacctcccactgtatctcaggacgcacagcacaggcacccgagagctgcagccttatgggaaatgtagtctttggcccacctccgcgcccctccattccattgggagtgcctacctggtggcggcaggtaaccattgaagaggacgtttccacaagaagatcgatccaactcctctcgaagctgcaggcgacgaactgcaacaggaggacttaaaggctgggacttagggagatgctgaggccaccccatttccccctccccatttctttctacacagagtaccaatactcctcccagtacgaatacagacccggccagggccataaccagtcctcccacctctaccccagccctctttcaggagagaaggggaagaggggcaggtagcatcacagagttggttttctatacaatgaggatgatagctgggggctcccacttacccagaggagtgagcccatagaactgggcttcatggaggaggctggaaccgtggacacccctgggtagtagaattgactagaggtcagggtctaggtgtgggggtgaacagagaatgctgagagggtaattttcaaaactgcacagagaatgtcaaggggtagaaagttttgatggaataaagatgctaaggagtgatgatatgggtggaggaaatgttgagtgtgtgtgtgtgtgtgtgtgtgtgtgtgtgtgtgtgtgtgtgtagggagaaatcgaaggacataaaattttaacatgatcaagattctcatgaagttttgcctgtttgcttttttagagaaggggtctcgctatgttgcccaggctagtctccaaatcctgggctcaagtgatcctcccacctcggcctcccaaagtgttgggattacaggcgtgagcaatcccggcgcgcccggcctgtgatcaaggttctgaatgagaattctaatagaatggagctcacgtggacattcagaggaggtgaaagaactcctcagggactgaagacagtgagggactccctcccctttttccatgccaacctgggatccaactctttggtgcgcaggaagttgaggatgggggcgaagactgtagggtccctgtcgatgaagatctgcgggaaaggggggcagaggatggatggggtaaaaggcaggactgagtggggtcctgcccctcttcctaccaacccctcccccccatcccatttcagttcttgtccgactcactgctccggtctcatctttcagcgtcgagatgcgtccgctcagaagactgcagggaagggacaccgagcaggcgtcacgggccgggggagtggatattaggtctcccacgccctctccatccctcctaccctcgccccaaactcgctctcccgatcacctggagaagaaggagtctgggatccaggtgagagtctggcgagaggtactgaatctgggcggggaaggtaaacggacgcaagagatgaagaggagcgggtgaggaatgcgtccccctcccgcaggatccagggttccctccccttccccctcccccggcgtttttccagaatctcgcgcctccaaagggggggggggcggagcaacccttgatggacagggattcccccaggagaggcggatactcccaccccgcttcccgcccccgaggatgggacctcaggagtctcccacactcacctcttgcctcccacattcagatgaatgacttccccgggaggcccccgactggggaccccctcggctgcagtagccgctgctgccatggcccccgggcgagccggctggcccgcacccacttccgggtgtgcacccggaccccgcctccataggctgctcattgggccagagactccaggagtcactagcgattggacagagcgcctgcccatcgcggttaacttttccgcctccttaaaggggtccgcctttcctgaacttgacggggcggacccggagtctcctttggggaagtttattacgaagcataacgaaatattctccatccctctaggttctcgtcaaggggcgtgtgtttagaccccgaaattaagtccacataaaagggtacatctggatgttctccgcagccacggtacccccgtgcccctctccccaccccgcacccacccctacagccaccacagccctcctttcaatcctcccgggcgcagcccagaaaacccaaacaaaggaccatagaccgtcaaagccaaagggtttattataggtacatacagtgtgcgcccgccacaccgccccacacccccgggccccagcggcttctccaggcggccatggggactgcccacaacccaatcccccgactccccagggaggtgctccagccagaagcatgcaggggtgggcttcccctcgcccctcccctcatgaagtggcatttacaactggaggggggaggagagaggaaaacagttttgagctttgacgcccctcccattaaaagccttcgcggatgcggggcgggggaggaggagatcgacgttttgcaaaaataaactaagtcaggaattaaccgcatggctctgaggcggcggagtgcagggggctagggccccttcactcccccctcccagacagagatcaaggcagcattggaagtgaggtaaaggcggggagggggtgtcccctccctgccccctagcaccctggatggtccaggggacctcaccagcgcccccgtgcccatccctagggcagagaggggggcaggaattactgcccccaccaccccagcttcttggggcaggatctgcagatcggggctgggggcttggctcaactggccccctgcccacccccatcaagctcagttattgcataaaaataagggacccccagcacctggggtgggggtggtgagtgggaaggggccgagatatggctataggggcagcaatctccccaccacttcttggggtgcaggagaagtcccctcctttccggtgcccaccatgtcacgcgtcctcagtgttggaactaggggctcccgcccctgcggaagaaaaagtgtctttgtgcccacagtgcggaaaagaggggagacgagatgtgtcaggtcctgggggtgggaagtcacttcctgcgcccgctggccctgcgatctccgccttccctcttagggttgccctcatctgtggatgaagtagtgggtagtgtctggccccagcgggcgatctctgcgtgttccgccaccgaggaagctacagcctccagccagccgttcatctcctcctgggggaagaaacagggcacagaggccgtatttggaagagagaagctggaataataggtgaatttcagatcagactaccctctctgaaattcagttttctcatctattaaaaagggatgatgatgatgatgcagttacatagcaatatgtgccaggctctgttccaaacactttagtggattaattcccttaaacctatgcaataggattgtatatacttcctactacagagataaatgacacaaacaatgataataatatgggcaggcactactagagcactgatatttactaggccctgtgctaagtatcagtttatcatgtatcaattaaacatggagcaatttaattctcacagtaaccctatgataagagacttttttttttttttttttgagacagagtcttgctctgtcccccaggctggagtgcaatggctcgatgtcagctcactgcaacctccatctcccaggttcaagagattcttgtgcctcagtctcctgagtgtctgggactacaggcacgtgccaccatgcctggctactttttgtatttttag

SEQ ID NO: 1561057 - DNA, 4001 bp, Homo sapiens
ggctccaggccccctcagctctgggaccctgagcccagcccctgtatccctctgccctcccaatggactccaggcccctgctgggcacactcacactgcacagagaggtccagggctcgctgctgggagccaagcctgttctccgctcggcaggtgtagcgccctgaatccccagccttcaccccgggcagctccagccccaggggtctagggccccagggatgggacgaggagaggactctgttctgcaggacccagctcagtgtggcagggggctggctgtcagcagcacagaggagccgcaggaactggcctttttgggcttccaggtatgggacatttccctggggctggggctccagggctggagtgggaggaaaaaaaaaaaagagagaaagggagggagaaagagagaaggggtacagggaggagcacatcccctcatcccctgaagccttttcatctaaagacaactggcccagccccagcccgacggccctcagtacctggcgtgttgtcacgtgaaatgctgataacaaggtctctgggggcatctgcaacaagattgtgagctggcttcagggagggacaatttattcctcacacctggaaaaaactccctcagggaaaagaaagtgggactatcccgggaagacaagtgacaaccagcgccagggctcacgtgtgtggaccagacgccattcccatccccctcccagggctgcggcggcatcctgggaccccacagcttcctctccctggatgctcctgagctgggagccgctcactgtcccactgggctcctccacctccccacccaccggggctgtctgcacaccccaccctcccaggccacactcacaggccacacggagtcggacggtcctctgtgcgctcacaccctttctggagaagtccacatggcaggtgaggtcggtgttgtggtcctggggtctgggcgtgaagctgagcactgagaagtgggaggtcgttggtttggttccttgggaggagagggcagcccccgtccaggagaaagaagggggtggacattcctcaaaggcccagttaaacacacagatgaccgtcaccggctgcccgggctccagggtctcggggatgtagacatcaggcttctgagtcagggctgggacagagaccgtggtgggagattcttgtgctgcaggggtccctgagagccctctctgctcagcccataggctgtccccagggtccctccccagtgtgagaggcaggggttcccaccccattccatacctgttacttttagaaagaacccatcgttcatgaaattatatctcacatagcttcctctctccacccgaaagaagtactgtgactcatcctgcatctgcgcgtctctgatcaccaaggagcagttccccttggcgggatccccagtgagctggaatcggccccgggtgctcatttccacctctcgactctggtggtttgtggccacaggagcacccttggttgtctcagtcactgctttgaaccagtagccataagctggggtagaccctgtccagtcctgtcgggggtaggagaaagagcagggcacagagatgcacaggccctccggcaccatcactgactcctgcactcgtatccagaatctcccatccatagcctgggaccctgtggggagacagaggctcaacctgcaaccccagccctagctccgccccaggtcctttccggcccttggcccactcaccgcccagcagcgaggacagcagcagtggcagtagcatctccgcataggaggcgcagggcctgcctgagacaggcctgttctctggtcgtgctgtgagtggctcagggctcttggcagaaggggaagccgaaggcggaagctgagccctggggcctgatgcatgaaatgagcttcagacgctgagctcacagaactcctttgccttcccccacactctccggcccaccttgcccagttgtcctctgggtctcctgggggcccagcctggccttgggcttgttgagctggtccttccagagctccctgtgtaggaggagagggcaggcttgtgtctatcctgggggcctggctgggggtggggtagtggggtgggggctctccctctgggccctgggtcatcggaaaagcagaagtgagaagtccacagtgagctacccttatctgggccactggtggtggaggtggtgggtacaggggaagggaccgttactggagggggctggtcttgtcaggtaaaatgcaggatgcctggttaaagctttcacagacaatataaagtattttattttatgttttttggtataagtatgtccgaaatgctgcatgggatatacttataccagaaagcaaaataaatttatctgaaattcaaattaattaattaattaattatattttgagacagagtctcactctgtcacccaggctgcagtgcagtggtgcaatctctgcttactgcaacctccacctcccaggctgaagtgattctcctgcctcagcctcctgagtctgggcttacaggcacgcgccaccacgccaagctaatttttgtatttttagtagaggtggggtttcaccatgttggcagggctggttttgaactcctgacctcaaatgatccacctgccttgacctcccaaagtgctgagattacaggtgtgaaccaccgcacctggcctaaaattcaaatttaactgagcatgttgaatttctttttttctaaatctggccaccgtagggtggtgtcagctccacctcttcatgcttcctggtgagctcactgacccttggtccccagaagcagtctcctgccccaaccaggccctagtccacttcccagtctcccttcctcctctgtcattcaattgggacacccattgggattagaacacatatgtccaaagctaatgctgatgggaagagtttgaggaaggcgggagtgaggggcagagtggggggaacagactagggaaggggtaatttgcaatgaatggagtaaactctacaagatgttttcccctcactgagctcttcctgaaatgactctgtttgggtcacaccgaaacacagaactcatccttcaacctccacataccttgggtatcaagcactgagctttagggggacttggaggtgaatcctccatggtgagtcagctccagggccccaggttagcaaatgaagattcttagaaacaaagtacagaaggtcccctaaatgaactggatgctggacagacattcaggatgggacctggggaaggagtggtcagctcttcctggtggagggaagtcaggagaggcctcctggaggagatgacccagcctctgccctgtcctggttctttcatccatggcatttttgttttttgtttttgagacaaggtcttgctctgttgcccaggctggagtgcagtggtgtgatcatggctcagtgcagcctccatcttctgggctcaagcgatcctcccacctcagcctcccaactagccgggactataggcacacaccaccacgcccagataatttttgatttttttttttgataatttttgtagagacagaggtgtttgtttgtttgtttgtttttgttttttgagatggagtttccctcttgttgcccaggctggagtgcagtagcatgatcttggctcactgcaacctccacctccggggttcaagcgattctcctgcctcagcctcccaagtagctgggactacagacatgcgccaccatgcctggctgattttgtatttttagaaaagatggggtttcttcatgttgttcaggctggtctcgaactcctgacctcaggtgatccacccgcctcagcctcccaaagagctgggattacaggcgtgagccactgcaccttgctgagacagagtttcaccatgttggccaggctggtcttgaactcctgggctccagtgatcctcccgcctcggcctcccaaagtgctgggattacaggtgtgctc

SEQ ID NO: 1561058 - DNA, 4001 bp, Homo sapiens
ggatagaagggcagggcagaatcacccactgagtcccagacacaaactgcatgagggtctacacaggtaagaaggtcagtccccgaggcctggggttcaagaccccctcagctctgggaccctgagcccagcccctgtatccctctgccctcccaatggactccaggcccctgctaggcacactcacactgcacagagaggtccagggcttgctgctgggagccaagcctgttctccgctcggcaggtgtagcgccctgaatccccggcccttaccccacgcagctccagccccagggttctggggccccaggggtgggacgaggagaggactctgtcctgcaggacccagctcagcgtggcagggggctggctgtcagcagcacagaggagccgcaggaactggcctttctgaacttccagatatatgacgtttccctggagttccagggctgaagacagggaaagagagagggtgggggtggagagagagaatgggtgggagggggggctgcaaagaggaccacatcccctcacccccctgaagccttttcatccctaaagaggactggcccagccccagcccgaaggccctcagtacctgacgtgttgtcatgtgaaatgctgataataaggtctttgggggcatctgcaacaagattgtgagctggcttcagggagggacaatttgttcctcacacctggaaaaaactccctcagggaaaagaaagtgggaacatcccaggatggacaagtgacaaccagctccagggctcacacatgtggacagaggatcagacgccattcccatccccctcccagggctgagccggcatcctgggaccccacagcttcctctccctggatgctcctgagctgggagccactcactgtcccgctgggctcctccacctccccacccaccggggctgtctgcacgccccaccctcccaggccacactcacaggccacacggagtcggacggtcctctgtgcgctcacaccctttctggagaagtccacatggcaggtgaggtcggtgtcgtggtcctgggggctgggcgtgaagctgagcactgagaagtgggaggtgcttggtctggttcttctaggggagagggcagcccccgtccaggagaaagaaggggctggacatttcttgaaagcccagttaaacacacagatgaccgtcaccggctgcccgggctccagggtctcggggatgtagacatcaggcttcttagtcagggctgggacagagaccgggtgggagattcttgtgctgcaggggtccctgagagccctctctgctcagcccatagcctgtccccagggtccctccccagtgtgacaggcaggggttcccaccccattccatacctgttacttttagaaagaacgcattgctcaggaaactatgtctcacacggcttcctctctccacccgaaagaagtaccatgcctcatcctccctctgcgcgtctctgatcaccaaggagcagctccctttgccgggatccccagtgagctggaatcggtcccgggtgctcatttccacctctcgactctggttgttagtggccacaggagcacccgtctttgggctggtccgtcctttgaaccagtagccataagcagcagtagactcgtcccagccatcccgggggtaggagaggttgcaagacacgatgacacacaggccctccggcaccggcacctgcctctgcacttgaagactgtaactgggatccttgttcagggaccctggggagatgcagaggctcagcggcagccccagcccctgcctgggacccccagccaccgacccactcacccgcccccagcacgggcagcagcaggggcagcagcagcatctctgggctctggggctgggcctgtcccgggaccatctggcttctgggccggcctggctgggaaggaaactcctccagcaggaagcctggtggaggggcagtgaccatccacagaggaggagcctcgggaaccgctatgtcctgaaagctcgcttcccaacttctcctttcacaggggaagcagcagggcagagggcatgaggaccagccccaaaccaggaaggagccaccctggccagcctcggaggtgggcagtgctaggaggggactgtcaggggacacaggtgagtcacggctgcaggtgaggtgatggatgcagagtctcattcattcattcattctccagggggccatgagacactggaagagtctacaagaacacagtgatttatggtgggggctttgcaccacgtattattgctgtatctccacagagggtaaaaactaggtcagccacacaggcagtcagctgcatctacgtgaccaacccccagtaaaaactctgaatgccgaggctcaggtgagcttccctgggtggcaatacttgctgtatgttgtcactcatctttgcttcaagcattaagcgctttctgtatgacttcactgggaaaggacaactggaatcccacatatggtctcttctggatcctgtcctatgaacctttctcctttgttgatttttatttatttatttttattttattattattatttttttgagatggagtctcgctctgttccccaggctacagtgcagtggtgggatctcagctcactgcaagctccacctcccgggttcacaccattctcctgcctcagcctcctgagtagctgggactacaggcgtccaccccaacgcccggctaatttttttcttgtatttttagtagagacagggttttagcgtgttagccaggatggtctcgatctcctgaccttgtgatccgcccaccttggcctcccaaagtgctgggattacaggcataagccactgcgcctggccattttatttttatttttgagacagtctcactctgtcacccaggctggagggcagtggtgcaatcttggctcactgcaacctccgcctcccaaggtcaagtgattctgctgcctcagcctcccgagtagctgggactacaggcacccacccaccaccatgcccggataattttttgtatttttagtagagatggggtttcatcatgttgagcagcctagtctcgaactcctgacctcaggtgatctgcctgcctcagcctcccaaaatgctggcattgtaggcgtgagccactgtgtctggcttgttgatttttttttttttagatgaagttttgctcttgttgcccaggctggagcacaatggcatgatctcggctcactaaaacctccacctctcaggttcaagcgattctcctgcctcagccccctgagtagctgggattactggtgcccaccaccatgcccagctaattttttgtatatttagtagagatggggtttcaccatgttgactaggctgatcttgaacttctgacctcaggtgatccacctgcctcggagtcccaacatcctgggattacaggcgtgagccactgcgcccagccctgccttgttgatttttaaaaagtatttttattaatatgtgatatttgtacatatttatggggtatatgtgatattttgtgccatgcatagaatatggtataatcaagtcagggtatttgaatatctgtcacctcaaacatttattatttctattgttgggaacatttcaaatcatcttttctagttattttgaaaaatacaatacgttattattattttttaagacagggtcactcaggctgggcactgtggctcacgcctgtaatcccagcactttgggaggccaaggcgggtggatcacaaggtcaggagatcaagaccatcctggctaacacggtgaaaccccatctctattaaaaatacaaaaaattagctgggcatggtggcacgtgcctacagtcccagctactcaggaggctgaggtgggagaatggcgtgaacccgggaggtggagcttgcagtgagctgagattgcaccactgcactccagcctgggcaacagagagagactccatctcaa

SEQ ID NO: 1561059 - DNA, 4001 bp, Homo sapiens
ttgtagggacatatgcacgttcactgctcactgttggggatgtaaacttgtccatctttaattagaacaatttcactctatctttcaaaatcagaaagacatatgacactgctatattttgcttttaggactttattccatacacttagatattccttgtgggagtagatacaacaatattcattgcagtgtttgtgctgtaggataaaattagtgccatgatcttccattagaagatgccacaaaatcagagactattcagacagtggaatgacacacagccctagaggagggtgcaaacagtctcactactgacatcaaaccacctctgagatcttccaggtgcacaaaccaaggctcaggacagcctggacagaccctggtcgattctggggacagactctgctgtgcattataaatttttgcccatgtgactatagtatgtatccaaaagaatatacctcagaactattggtgaaaataaaaggatgaggcaatattcaggagctggaagataagagtcctcaaatccttgagctgctgtgtgaatgtccctctacccttgctgtggggccaaaataggtgtgtgtgtggaggagttcaaggggagtgaaggggtgatgagaaggtgctcaggtggccaaaaggctgaggctgagggaggggggggccggggctcacccacaaaagggtctcaggtcaccagggtgagtcctggctctcccctgagttgaaggctctgctcctccagccccagggagaggactccatcttacctgtgccatctccttggaagacagtcatggtcaagttctgaggaggatctggaacagaaagacacggagttcccatcactttgaggactggggacactgaccctgtctccccaggagccccataaatggggaaggtggagccagcatcctcctgacccccaactcccagccaagattccaggacccagatccttgagtctgggtcccacatccaactggcctcaaggaatcccgatcaaagacccagacgtcctggcccagaactcacaggatatgttgagtcggacagccctggtcatggtcacgccggccccaggcaaggtcacctgacaggtgaggctggtgccatggtcctggggctgtgggatgaggctgagcatcgaggagcgagtgatagtggggtccagggaggacacggaggcccccatccaggtgatcgtggggggcgtcccctgttcacaggcccagggcacagagcaggtcaggttcctggggtggccagactccagggtccccgggatggagaaggtgggcatgtgagtcagggctggtgatgaaagggagacaggcaaaatgagggtgttggggtctgaagtgtggtgctgaggaggctcaggctctggtcttactcctcccctgagccagatatgcttcacctccaactccctcccaggatgggggtcccacctcagccctaccctgcggccctcgggccttcccctctggctggtcctagagccagagatttacctgtcacatgcacagagagcttgtcatatatgtagttccatttcctgcttcctctctccacctggaagtagtacttccctgaatcccccttcctggcatctctgatgctcagggagcagttgttggtctgtgggtccccaaggaggaggaatcgaccgtgggtatcctcttgcacttttccacttggggtgtttgtggccactggaatatcccatggtatatcggccccttccttgaaccaggatccataaacagggctagaggcagtccagttgtaatgggggtaaaggacactgcagggcacagagacacacagaccctcctgcacagtcaccgactctggcacctccagcctgtatcttgacagtaggtcctgggacgctgtggagaaacgagggtcagcccagcccccactgtccctctcttcatttgcccatagcaggggcagcagcatctctgaggcagaggcttcctgggctccctgtgtgagcagagaagggggagggagaggaggggcagggctgtgggacccacagggggctggagaggagctggagacctcagccctgcatggaagagaaactgcaaacccacatgctataggaactcattccctctgcacagagtgaaggaaaccctaaagctcagagaccctagagacccacccagggaggagaagagaccgtgtcccgcctcctacctccgggcttccctgaagcaccagggcctgcaccagacacgtaggtcctgccctcccggcctctggaccatcgtggaggtccctcctgtcttttgagcatctaaatgtggatctccgaggacctcggggcatgagagatggaggggccgtgtgctgagtctccctgtccaggctcaggtgcctctgctgcccttggtttgcgccaggaagtgcttcctccctggcctggcctgagagagtcacggggttgtgtagacctaaggctctcaactggggaggacttaaccccccaggacgtttgacaatgtgtggagataattgtctcgctgcatgggtggggtgggtgcttctggcatctggtggggagaggcctgggatggtgctaaaccccggccatgcctaggacaggccccaaaacaaggagtcataaggccccacatgccacagtgccagcgtcagaggcaggatgaggatgtcaggcctgtgggtcagggctggtgaggggaggggcttgcaggatcaggaggggcatccaaggtgcggtcctggggaagctcaggctctggtccagctcctcccctgagtccatcacccccggccccctcccaggacatgtgtcccgtctcagccgtgccctaaagccctcatcacatttgcctttggcctctcttggagcccgtgccttacctgtcacattcacagagagctggtcatatttataattccatttcatatttcctctctctacacaaaagacgtatgtccctgcatcactctctctggtgtctctgatgctcagggtacaatccttgttctgtgggtccccaaggaggtggaatcggtcccgagtctcctcctgcactgctcgagctgggttgtttgtggccactggaatgttccggcttacatggtcccctgcccggaaccagtagccatgaactggatcggaggcagtccagccattttgggggtaggagaaggagcaaagcacagagacacacaggccctcctgcaccgtcacggacttctgcattgtcagcaggtaatccttctgttccttagcccccactctcccacagagcaggggtggcagcagtagcagcagcagtagcatgtgtcgggttggaggtgccagggttgctgaggtaagtctgttcctcagggttcttctctcaggaactgagaactcaagatttcgaggaagccgcacaggaagttgggggtgggttctgaacggtgacctcacaggaggaacttcacacacagacactgtcagggccgggtcacccctggaagatccaccgtccactaccccgtccactcctggggaccctgaggccagagaggatgaaagactcacccagattccaaccccatgcagggcccaccccgcccactgcctccctctcagtgcccttccccttgggtgatattttccataaggtgaaaatgagtcccatgtggccagacctatgaagtacaggctgtggatgtctctctgtaggtcagaggtgacactaggatataagagatgggggtgcaggtgggatgagcaggcaacctctccttcctccctcagcggccgtgaggtggagttcaacacagcagagctagacactgtccccaaagagtcactgtgtagtggggagacactgaggctcctgatatctgagctctccatggcaggagcttcagtgggggtaccaggcagggtgtggtcgctctctcctatgttggggaatcagtctcgggaggactgagcagagagacacggg

SEQ ID NO: 1561060 - DNA, 4001 bp, Homo sapiens
tggtcttactcctcccctgagccagatatgcttcacctccaactccctcccaggatgggggtcccacctcagccctaccctgcggccctcgggccttcccctctggctggtcctagagccagagatttacctgtcacatgcacagagagcttgtcatatatgtagttccatttcctgcttcctctctccacctggaagtagtacttccctgaatcccccttcctggcatctctgatgctcagggagcagttgttggtctgtgggtccccaaggaggaggaatcgaccgtgggtatcctcttgcacttttccacttggggtgtttgtggccactggaatatcccatggtatatcggccccttccttgaaccaggatccataaacagggctagaggcagtccagttgtaatgggggtaaaggacactgcagggcacagagacacacagaccctcctgcacagtcaccgactctggcacctccagcctgtatcttgacagtaggtcctgggacgctgtggagaaacgagggtcagcccagcccccactgtccctctcttcatttgcccatagcaggggcagcagcatctctgaggcagaggcttcctgggctccctgtgtgagcagagaagggggagggagaggaggggcagggctgtgggacccacagggggctggagaggagctggagacctcagccctgcatggaagagaaactgcaaacccacatgctataggaactcattccctctgcacagagtgaaggaaaccctaaagctcagagaccctagagacccacccagggaggagaagagaccgtgtcccgcctcctacctccgggcttccctgaagcaccagggcctgcaccagacacgtaggtcctgccctcccggcctctggaccatcgtggaggtccctcctgtcttttgagcatctaaatgtggatctccgaggacctcggggcatgagagatggaggggccgtgtgctgagtctccctgtccaggctcaggtgcctctgctgcccttggtttgcgccaggaagtgcttcctccctggcctggcctgagagagtcacggggttgtgtagacctaaggctctcaactggggaggacttaaccccccaggacgtttgacaatgtgtggagataattgtctcgctgcatgggtggggtgggtgcttctggcatctggtggggagaggcctgggatggtgctaaaccccggccatgcctaggacaggccccaaaacaaggagtcataaggccccacatgccacagtgccagcgtcagaggcaggatgaggatgtcaggcctgtgggtcagggctggtgaggggaggggcttgcaggatcaggaggggcatccaaggtgcggtcctggggaagctcaggctctggtccagctcctcccctgagtccatcacccccggccccctcccaggacatgtgtcccgtctcagccgtgccctaaagccctcatcacatttgcctttggcctctcttggagcccgtgccttacctgtcacattcacagagagctggtcatatttataattccatttcatatttcctctctctacacaaaagacgtatgtccctgcatcactctctctggtgtctctgatgctcagggtacaatccttgttctgtgggtccccaaggaggtggaatcggtcccgagtctcctcctgcactgctcgagctgggttgtttgtggccactggaatgttccggcttacatggtcccctgcccggaaccagtagccatgaactggatcggaggcagtccagccattttgggggtaggagaaggagcaaagcacagagacacacaggccctcctgcaccgtcacggacttctgcattgtcagcaggtaatccttctgttccttagcccccactctcccacagagcaggggtggcagcagtagcagcagcagtagcatgtgtcgggttggaggtgccagggttgctgaggtaagtctgttcctcagggttcttctctcaggaactgagaactcaagatttcgaggaagccgcacaggaagttgggggtgggttctgaacggtgacctcacaggaggaacttcacacacagacactgtcagggccgggtcacccctggaagatccaccgtccactaccccgtccactcctggggaccctgaggccagagaggatgaaagactcacccagattccaaccccatgcagggcccaccccgcccactgcctccctctcagtgcccttccccttgggtgatattttccataaggtgaaaatgagtcccatgtggccagacctatgaagtacaggctgtggatgtctctctgtaggtcagaggtgacactaggatataagagatgggggtgcaggtgggatgagcaggcaacctctccttcctccctcagcggccgtgaggtggagttcaacacagcagagctagacactgtccccaaagagtcactgtgtagtggggagacactgaggctcctgatatctgagctctccatggcaggagcttcagtgggggtaccaggcagggtgtggtcgctctctcctatgttggggaatcagtctcgggaggactgagcagagagacacggggtcgtggaggtgaggattccgtgtgttgatacacaccaaagacacagagaagagcccagttcacaggaggcctgagaagctaaggctgtgactgttgtacagtgaggtctggaagggaggaatgttggatgggaagggacagatttctaaaggggcaggcgtttctctctcggccatggctctctgggttcaggatgggatccttcaccactgctctctcacaagtcctccttactccagagcatgaggggtctgctggccctttgttcctgcaggctctgctcccagggtttcaggtgaacaggagacgtggagcgaggacaccagccctggcgtgtccacgctcaatgatggacaggatttcatgggagaagaaatgcacctgaattcagcagaagagtttttgaaactgtatgctatgtactgggaggaaggtggggaaaatcctgcaagattcgccctccttagacccatgtcagcttttcttgaaacaatgatttttggggaaatgtaatacaagtaaataaaagtgccacctaaaaaaatgactcagtgattttcaccaaattatcactgttcaagaaatagaacatcacaagataattgccaaatttctcccatgagatgaagaaagaaattgcattcatttattcagccctgtgtttccccttcctataggccacatgcagttcctcctgaagatgccccagcctcactttaatgataatggtctccttgcttttctatgtagttttatcatctgagtgcactgccttcaatactatggctttgcataggtttttctaaagactatttttacataaaaaccacaatctgttttattttactcagctccatggatcttcccatccccatgttgtccccaattgcccataacctggagtagagtcagttggctgtgataattgaaaaggaaatgtgcaggattggggcatgcatagctgctcctctccctgacaccactaattcctgcatttgcagcttgtatctcatcctgcagaccaatctgctcctgggcccccatccttgccgtgtcactttcttcccgtaaggacagttgcagcatctcaatgggaagaagggctcgaccacggcccatctctttcccacagtccccagttggcaaagaaaagcagaaaaatgggaaggagagacatgaggaagccacagagaatctgcaaaggaagaacgtttgaaccacatatgactcagaggagctgatgggccctctagacccacttccataatttggagaggaagatattaaggaccagagtgacaagtgctacagctacatgtctctcctcaaaattcatttgttgacctttgaacccccatgtgatagtattagaaggcatggtgtttagataggtgg

SEQ ID NO: 1561061 - DNA, 4001 bp, Homo sapiens
gaggggaagaactgggttctgggacagagctgtgggaggtgggaaagtcgaaggctcccaaaaaggacgatcagttagagatgaagcagggcatgcatcagaggacatcggagcaggcagaaattcaagaaaagggaacagcgtgtcctgagtactcaaactcacagagacagaaaagtagaatggtgactgctcggtggcaggagggggaagtggaaagtcgctgttcagtgggtacaaagtttcagttttgccagataaaaggagctctgcagtttggttttgcaacaatgtgaacacatttaacactgctgaactgtactctttaaaatggctaagatgacaaattttgtgctatgtgtattttctcacaatgaaaaaataaatctgaaaaagagagcagagaaaagggagaagccaaaagaaatactaggtctgttcgtgcaagatcttagtgactgggattggggggttgggagcaggaaggacccagacccaggggctgaggggtgagggagggtctcctctcccaatgctgaaccctgagctaatagaaggctcccatcacagccccagagggaagagggtctttcctacctgtgcctgtgccatttctgaagaagatgctgatggcgaggttctgtggagcatctgggatagaaagatacagcaccagcttcagaggtgacaagagggatgggcgtggtcccgggagggacccaaggaggggccacagaaacccaccaggtggggaccgctgtccttcctgcccacacacgagttttccctggttatcattctctttctctctctctcttctacacacacacacacacacacacacacacccccctcactcccactgcccttggggactcagctgtgtccccagcaccactcacaggagacattgagctggacagttctctccgtggtcacctgagctccttggcgtttcacctgacaggtgaggttggtgccatggtcctcgggcctgggggtgagggtgagctccgaggagcgggtggtctcggggtccagggggctgagggcattccccgtccaggagaatgtgagaggtggtcccgcttcacaggatcctggaaggctgcagctcagccttgtggggcggccggactccagaggctccagaaagtggatgtcgggtttctctatcagggctgaggaggagacagggagatacctgggccccaggggcttgaggacgtaaggtgtgaccccgagagtggccaggcctcaggccccgacctgccccaagtcctacacctcctccagccgcccctgcccaactcctgtccctgttctcatacgggggtctccacgtcccagggtcctctcctagggttcctgccatacctgtcacctccaagttcagcttattctgttggtagctatattttacatcccttcctctctccacgcggaagaaatagcttcccgtgtcctccattctggcatctccgatgctcagggagcagttcttcttctggacatccccaaggaggcggaatcggccctgggtctctggcttcactcttctgtctgggttgtttgtggccacaacctcagcgtagtatgggatctccccgtcccggaaccagtagacgtagagtgggggagaggaataccaggatctccaggggtaagagaaggagcagggcacaaggacgcacaggccctcctgcaccgtcaccgacttctgcacttgcagctcgtacactggcttctcctgcagggaccctggggggacacagaagctcagctgcagctccagccccccttctcacccctgtgcctgtccctcctccctcagctcactcacccccccacagcaggggcagcagcagcaggggcagcatgtctccatccgccagggccccagcccagtcccaggtccggctgtcagggaaggaaatgctccaaatgtccaaacgtggggtggggctgagaaagccccgacaggaagccggagggtgagtgagagctgtggacgcgcacagaaggggaacttgggcatcacgtgctgttggggtgaggctggggctgggaagccattctgctcccacccccactggacgccgatggtgaagatactgaggcccccagaggggcttgtccagacttgtaagtctagactcctgaggtcaccaggtcccatagctgcagcactttccttatgcacctttgtctacataggaaggagaacaccacttggccagctccctgggagtcagggcctcgggaccctcagcgagatgggagaataaatcctttatgacatgataggagctgtggtgagggaagcacacgctgggggtttcaggtggggaagactttcctctttccagagggaaggcaagttgtcagggacaaacacatcaggtggacatgaccgggtccttagcagtcaagagagatgtggtccccaccaccagttggatttgggaacctcatctcatccttgtccttgtcccaggcagcgtcagaccccatccctgatgttgacagccagatgaggcttgagagccgggcatttgaaatgtgaacgttgaggatatggaataccaagtgtgaacccagacccctcacctaccggctgttgaactttacaaaagttacctaccctctctgtgcctcagtttgctcagctgaaaaatgcagacaataatagaattgctgtgtggggattcagtgaggtctcatgtgtaaagtgcttaggacagtgtctggccccgagaattcactcattcaactgatgcttcatgggcgcctatggtgcaccaggccccctgttttaggagctggagatacagcaaaggataaactcttaggatgagaaggtaagtcaaaaatcctagtgggggctcctctgggcacactgcttatgcatacccctgctccacgaagaacagtaaaaaaagaaggccgggcgcagtggctcacgcctgtaatcccagcactttgggagaccgaggcgggtggatcacgaggtcaggagatcaagaccgtcctggctaacatggtgaaaccccgtctctactaaaaatacaaaaaattagccgggcgtggtggcgggcgcctgtagtcccagctactgggggggctgaggcaggaggacggcgtaacccgggaggtggagcttgcagtgagccgagatcgcaccactgcactccagcctgggcgacagagcgagattccatctcaaaaaaaaaaaaaagaaaagaaaagaaaaagagaaaataaaataaaaatcctagagggaagacaaacatttaatatgaaattaaaatacacagtctgctaaagaataatatattctaagaaaaaataaaaacaggaacacagaagaggaatcagtgaggactgataatttttttttttttttttttttttttgagacggagtttcgctcttgttgcccaggctggagtgcaatggtgtgatctcagctcactgcaacctctgcctcccaggttcaagcgattctcctgcctcagcctctcaagtagctgggattacaggcatgtgccaccacacctggctaattttgtatttttagtagagatggggtttctccatgttggtcaggctgggctcgaactcccgacctcaggtgatccgcccgtctcagcctcccacagtgttggtatgacaggcatgatgataaaattttttacagcatggcttggggggccacttggaggagatgacatttgagtaaagatgcgaagggcgtgtgggaatgagtccactggtatccattccaagggaaccgcacatttaaaagtcccaaggtaggaacacacgtggtgtgcttggaaaatagccatatgccagcattgaggggtgatcagtggggaagatggtaggagggtaggtctgggaggtgtcctgggtctgatcatgaagagatttgggagctctcataagaagttcacttttttcttgtccagctggaactatggaaggtgtcaaagaga

SEQ ID NO: 1561062 - DNA, 4001 bp, Homo sapiens
tccttagtgactgtggaaagaaccagaccacaggagggatgggagatgggtggggtctaaagtctgttcactgctttgagcagagtgcatgagtgtgcacctgtgtgcgtgtgtgtgtgcgtgtgcgggtgtacgtacatgtgtgcgtgtgtgggtgtatctgcatatgtgtgtgtggtgtatgtgcatgtgtgcgtgtgtatgtgcatgtgcctgtgtggtgtatgtgtgtgtgtgcatatgtgtgtggtgtgtgtgcatgtgtgcctgtgtgcatgtgtgtgtgtatgtgcgtgtgtgtgtggtgtattgcatgtgtatgtgtgtggtgtatatgcatgtgtgtgtgtgcgtgtgtgtgtgcgtgtgtgcatgtgtgcgtgtgtatgtgcgtgtgtgcatatgtgcctgcacatggggctcacagaaggtggaagccagaaggcagtaattctcattcttgctcttcccaaatctgattgcattcaagctctgattctctacctctgctcagagacagacccagaggcaggtcccagcttcagagaggaggtctttcctacctatgccgttcctgaagatggtgatggtctgtggagcatctgggataaaaagatataaacttggcttcagcagtgaggagtgagatgggcatgggcccaggaggtacccaaagaggagccacagaaacccaccaagcggggaaggctgtcctgtctcactccccgcagatcccaaggcttagatccacacacaaggtttctcaagttattgttttgtttctctctgtcttccttacacacacacacacacacacacacacacacacacccctcactcccactgcccttgaggactcagctgtgtccccagcaccactcacaggagacattgagctggacagttctctccgtggtcacctgagctccttggcgtttcatctgacaggtgaggttggtgccatggtcctcgggcctgggggtgagggtgagctccgaggagcgggtggtctcggggtccagggggctgagggcattccccgtccaggagaatgtgagaggtggtcccgcttcacaggatcctggaaggctgcagctcagccttgtggggcggccggactccagaggctccagaaagtggatgtcgggtttctctatcagggctgaggaggagacagggagatacctgggccccaggggcttgaggacgtaaggtgtgaccccgagagtggccaggcctcaggccccgacctgccccaagtcctacacctcctccagccgcccctgcccaactcctgtccctgttctcatacgggggtctccacgtcccagggtcctctcctggggtccctgccatacctgtcacctccaagttcagcttattctgttggtagctatattttacatcccttcctctctccacgcggaagaaatagcttcccgtgtcctccattctggcatctccgatgctcagggagcagttcttcttctggacatccccaaggaggcggaatcggccctgggtctctggcttcactcttctgtctgggttgtttgtggccacaacctcagcgtagtatgggatctccccgtcccggaaccagtagacgtagagtgggggagaggaataccaggatctccaggggtaagagaaggagcagggcacaaggacgcacaggccctcctgcaccgtcaccgacttctgcacttgcagctcgtacactggcttctcctgcagggaccctggggggacacagaagctcagctgcagctccagccccccttctcacccctgtgcctgtccctcctccctcagctcactcacccccccacagcaggggcagcagcagcaggggcagcatgtctccatccgccagggccccagcccagtcccaggtccggctgtcagggaaggaaatgctccaaatgtccaaacgtggggtggggctgagaaagccccgacaggaagccggagggtgagtgagagctgtggacgcgcacagaaggggaacttgggcatcacgtgctgttggggtgaggcgggggctgggaagccattctgctcccaccccgactggacgccgcaggtgaagatactgaggcccccagacgatgtgaggcttgtccagctgaggatctggaggtgatcacccctcaaatgatgtttcagtcatgagtgagatcctcagggggctgaatgcagaaagaaaagagaaacaagggcttgtcctggtgatgaggtgagatgtcagaaccaccctccacctaaaaaccatgaaacattctggaaatacataattttaaatttgattttaaatgttcaaagtgaccaggcatggtagctcatgcctgtaatcccagcacttcgggaggctgaggtgggagggttgtttgagcccaggagtctgagaccagcctgggcaacatagcaagtcaccatctctacaaaaaataaaaactattagctggtgtggtggcacacctatagtctcagctcctccggggcactgaaataggagaattccttgagcccaggagtttgaggttgctgtgagccgtgatcgcactacggcattccagcctgggcaacagagtgaaaccctgccttaaaaaaaaaaaaaaaaaagttcaaaagggctgaaaaaaaatttttttgacccaaatttcgtggagggtcagagcatgagagagctgaagcactcttatgttaagaagattcttgggacacagcacagtccactttgggtcttgatggacctgagggtcttgtgggacggcagtgaaacacaagccctgctaaagcctcatcctattaaggagctacagaagcaaatttgccactgtgaggctgatgaagctcaatcttcaatgccctcccttgcaggatccacttttcagatgcccaggaggggcccacgcaatgtgtggaaataacctgccttgttactgctcttttatgaaagaaatttcataatagtttcccaaaatttaacaatatattaaaaatttttcacattccgattaatgtgttgtgagaataaagacagtttcttaaactatcaatgatcaaaacaaacgtcaaccacccatgccagaagaaataccgacttctctttctattctatctataaaaattgtattataaaattattctccaatattggccgggtacagtggctcacatctgtaatcccaagcactttgggaggaggaggcgggtggaccacctgagatcaggagttcgagaccagcctggccaacatggagaaacctcctctctactaaaagtacaaaaatttagccaggcatagtggcgcacacctatagtcccagctactccagaggctgaggcaggagaatcacttgaacccaggaggcagaggttgcagtgagccaagatcacggtactgcactccagcctgggtgaccaagtgagactctgtctcaaaaagaaaaaaattatcaccattatgaaggcaatcaaagaaaatcagtcaaaaatatagggaaaaagtatgcaggtgtagcagacaggtagactatactattaacaaacatagtatgccatttttctgagttgtctcatattttgacattttagattttgtgatttgatgtgttttctcagtccaaaaatcatcctatgtgtgccaaattttgtatttttgtatttttttttctaaagagtcacaaagactctcttcttaaccaaacttatgaaagctcctctgaacccttttttcaactaggctttgtccttgggactgccttgtccagctgtagcaagaatcctgctaagttggttttgcaagactcttgatatctgatcgccttcactatctgatcaaattccctagccctcacccttggtatctgatcatgctggcctgctttcagcaagaatcctgttaagtcagtttagaaagaatcccggtatcttcagtgtctcctcttagtagttttccgtccactaacacacacggccagcctccctcacctgct

SEQ ID NO: 1561063 - DNA, 4001 bp, Homo sapiens
cagggcggggaagccctggaaccagctcaggtgtgcaggggggttgccgtcagcatcacagagcagccgcagagcctggccctccaggacagggagggacgaggtgttttgcaggattttgaaggctttggggagagaggtgtagagagttagagatggggtataggggcaaagcactggtgtccctctcctcctgtggggtccacactagctctgaggaggagactagtaaagtgggggcctcaggtcttcagaaaagcccagaccatttccctggagctgcccaggctgtcctgcagagagtggagcaagggctgcggacagcgtcgtggcagacaagtgccattcctggaccatggagacgcctgaggcagtaggaaaacaagcaagagagaagagggagtgcgaggggtgtggcagctcctgccgaagaggcgacaaaggctgggggtgagcaaagattcagtccaggtctttgaagtctatggaggccttagtcctggcttctcatattgatccccgttagtccccactctgcttccatctggccctggagagaacaggactggctggttcctacctgcgctgtttccttggaagatgctgatggccactttctgtggagcatctggggtggaaagaggtggccgcctcaacatccctgaggagggatggtaggcatggggccttcccctcaggagccatgaaaacagggaaaggggctctcctctttggcaaccaggtccccaactttaagctctggctcagccctgccctgtccccccacaccctcagggacccgggcgtcctggcccagcactcacaggagacattgagctggatggttctctccatggtcacaccggctccagggaacgtcacctgacaggtgaggttggtgctgtggtcctggggccgtggggtgattgtgagcaccgaggactgggtggtcctggggcccagggaggtgggggcagctgacatccaggagaagatggggggcgtcccctgctcacagacccagggcacagagcaggtcagattgctgggatggccagactccagggtccctgggatggagatgttgggcctgtgggtcagggctggtgaggagatggggacgcaggatcaggatggaggtctgaggtttcacccagggggaagcccagtctctggtccagctccttctctgagcccaacatgcttaattgtacccgcctcccaagacggggctcccgtcccagccctgccctacggcccccatgaccttcccctgtggctagtcctggagctggttccttacccatcacacgcacagagagcttggaagatgtataaccgtatttcatccatttggacttcaaccgaaagaagtatgcagcattgtccctcctccgggcatctctgatgctcagggagcagttcttccttctgggatcccagaggaggtggaatcggccccgggtctcctcctgcacttcttcgtctgggtcgtttgtggccactggaacatcagccccttccaggaaccagtagccataaccatagtacgaggctggaagggtagtgggcaatctgcagggtacgaggacgcacagaccctcctgcaccgtcagtgactctggcccctccagctggaatctccgctcctgagccagggcccctatggagacatgagggtcagctcggcccagccccacggcacctctcccctggcccactcacctgcccacagcaggggcagcagcagcggtagcatctctgaggcggaggcttcctgggctccctgcatgagcagagaaggggaagggagtggaggggaaggactgcggggaggaacgggtggctggggaggagcgcgtgatctcggctgttcacagaagaggaactgcgaagccacaagccctcggagctccactccctctgcacagagcagacggaaactttgagacccagagacctgcccaaagaagagcagaggagaagagactgtgtcccgcctcccacctcggggcttcctgtgagcaacagagcccggaccagggcctcccggggcatctgaggaatgcgaaacctgtgtccaaggccctgcccacctgaggtgcttttctgtgcaccactgtttacacctgggagctggtcactcctggccccagagagtcacagcctcatcccacgccatgagaaagtcagtcctgcaggatataggattctgtagggtctgtgggagtgtctgggacagtgaaaggaagaagggtcccaggtgcagtgtgggtgatagccactcattcattcactcattcattcattcattcattcattcaccaaagacatagtgagcatctgtatgtaggtcgggctggagaagagatgccagggacctggtccctacccttgagatgatccccatccatagcttcccatcctcagcacacaccctcactatctagctttagagctgtggacactggtgagtttgccaagtgacacagtagaatgccagatattttttaaaacatgagtatggaggtttttccttgacagctagtacgctgatttacaaaatttcaatgacatctccaaaataagaaccatgcaacatcttcatgtaaatcaaaaaggacacatattttatgaactgcagtgcagaagaaacttcttttgaattaatgttgccactcagtgcagtgtggactggagagatttttttttaggtcctcatcatagagattagcaatttctttcctgtgaaaaatctgcttctcacagttaaatgtggcacaaaagacatatttctggacaacgtgagcagaatatcctgacaaaattaaaatttttaggtctagctcacatggttttctattttcctctgtgcagtatgcatctggcaaatctctaatacctatgaggtattagaatttgccaccatatatttgtaaatttttttatttctacaaacttaaggagtagatgtaaaatttttttgcatgtatataatgcgtaatgattatgtcaggatatttagagtgtccgtcacgtgagtgcaatacattcttgttaactaaaatcacactattctgctctctaacgctgaatttattccttttaactgtatgtttgtagcacttcactcacttctcttcatcttctgtcctcccccatctgaccctttccagtctctgttgtctatctttctactgtccacctccatgtgataatatttttttagctcccacatgtaagtgagaacatgcaacatttgtctttttgtgtctgacttatttcaatttagataatgaattctagtcccatccatgttgctgcaaatgacacgatttcattcttttttatggccaaatagcatgtatactatattttctttatccattcatctgttaattgacacttaggttggttccatatctctgatattgtgaatagtgcagcaaaaatcatgtgaatgcaggtatctctttgatgtatttctttctttcccttcgggtagatacccagtagtgggattgcttgagtgatcgaatagtaattctatttttagttcctgagaaatgtccatagtgttttcaaaagtggctgtactagtttaaattcccaccaacagtacagaagagttatctttctcctcatccttgccaaaatctgttattttttgtttttttagtaatagtcattctgactgggtaagacggtatctcattttggtttagatgtgcacttctctgatgattagtgacgctgaccattttgtcgtattggctgttcttatgtattctttgagaactgtctattcctgtcctttgcccactttttacttggattatttgctttttcctgttgagttgtttgagttccttgtatagtctggatattagtctcctgtcagaagaatagtttgcgaatattttctccaattcaacaggttgtttcttcactctaattatttcttttcctggcagaagctttttgtttattaagtcccattt

SEQ ID NO: 1561064 - DNA, 4001 bp, Homo sapiens
caccctcagccctctcccagggcaggggccccatcccaggctttcgctgccacccccatgacctttccctgtggtgtctcctggagcctgtgccttatctgtcacattcacagagagctgcttcgttttgtaattccatcttatctgtcctctctccacctggaagtagtagttcctcaaatcccccttcctggcatctctgatgctcagggagcagttgttggtcttcaggtccccaaggaggtggaatcggccccgtgtctcctgcacttttccatttgggatgtttgtggccactggattattccattgtatattgatccctttcttaaaccagcatccatggacagggctagagtcagttcagttgtaatagggttaaaggacactgcagggcacagagacgcactagccctcctgcaccatcaccaactccagcacctccagcctgtatcttgacagtggggcctgggacgctgtggggaaatgaggctcagcccagccccgactgtccctctcttcatttgcccacaagagaggcagcagcatctctgagacagagggttcctgggctccttgtgtgagcagagaagtgggagggagaggaggggcagggctgtgggacccacagggggctggagaggggctggagaggagctggagacctcaacccagcacgaaagagaaactacaaacccacatgctataggaactggttccctctgcacagagtgaaggaaaccctgaagctcagagaccctagagacccacccagggaggagaagagaccgtgtcccacctcctacctccgggcttccctggagcaccagggcctgcaccagacacgtaggtcctgccctcccggcctctggaccatcgtggaggtccctcctgtcttttgagcatctaaatgtggatctccgaggacctcagggcatgagagatggaggggccgtgtgctgagtctccctgtccaggctcaggtgcctctgctgcccttggtttgcgccaggaagtgcttcctccctggcctggcctgagagagtcacggggttgtgtagacctaaggctctcaactggggaggacttaaccccccaggacgtttaacaatgtgtggagataattgttattgtctcactgcatgggtggagtgggtgcttctggcatctggtggggagaggcctgggatggtgctaaaccccggccatgcctaggacaggccccaaaacaaggagtcataaggccccacatgccacaatgccagcgtcagaggcaggatgaggatgtcaggcctgtgggtcagggctggtgaggggaggggcctgcaggatcaggaggggcatccaaggtgcggtcctggggaagctcaggctctggtccagctcctctcctgagtccatcacccccggccccctcccaggacatgtgtcccgtctcagccgtgccctaaagccctcatcacatttgcctttggcctctcttggagcccgtgccttacctgtcacgttcacagagagctggtcatatttataattccattttatatttcctttctccatacgaaagaagtatctccccgcatcactcattctggcatctctgatgctcagggtgcaatttttggtctgtgggtccccaaggaggtggaatcggtcccgagtttcctcctgcactgcccaagctgggttgtttgtggccactggagccttccagcttatatcattccctgcccggaaccagtagccatgaactgggtcagagtcagtctggctgtccactgggtaggagaaggagcagcgcacatggacacacatgccctcttgcacggtcacggaactctgcatcgtcagcgagtaatccttccggttactcttctgtccttccaccctctccctcccccagagcaggggcagcagcagcagcagcagcatatctggggttggaggtgccagggccgcgagggaacgtctgttcctcagggttcttctctcaggaactgcgggctcaagacttagaagaggccctacaggaagtcggtggtgaggtcaaaacagtgacctccttagaagaagaacttcacacacagacactgtcagggctgggtcagccctgggagatccaccgtccaccacccgacattcactcctgggtccctgaggccagagcgggagacagactcacccagattcccaccccatgcagggcccaccccacctcctgcctccctctcaatgcctttccctttaggtgatattttctgcagggtgaaaataactcccatctgcccagacccctgagtcacaggctgtggatgtctgcgtagctcagaagtgggactcggggccatgagagacaggggtgcaggtggggtgaacaggcagcctctcatccctccctcagcagccacgaggtgggcaccccctttctgcacaatgaggtcaacacagcagagccggacactgtccccaaggagtcactgtgtggtggggagacactgagtctcctgacgtttgagctccccatgacaggagcttcagtggggggcacaggcagggtggggtcactctcccctaggtcgggggttcagtctcaggaggaccgagcagacggacatggggctgtgaaggtgaggattgcgcctgttgatacacgccaaggacacggaggggagcccagcctgcaggaggccggggaagctgaggctgtgattgttgtattgtggggcttggtagacaggaaagtcataagggaaaggatcaatatgaaaagagcagacactattcccatcctcacagctctctgagcacaaggacatttcccttcaccactgctatctcatgaggcctggttagtgcagagtgtgaggggtctgctggccctggggctttgctcctgcaggaactgctcctaggggttcaggtgaacaggagacgtggagcaaagacaccagccccggggcgtccaccctcagtgatgggcgcgattttctgagagaagaaacacgcacctgacttcaacagaagattattttaaactgtgtgactgggctgggaggaagtgggaaaaatcctgcaagctgcagcccccttagatccaggccagcttttcttgaaacagttttttttgagcggggagaaacacaagacatgtacataaaagtgtcccctaaaaaccaactcagtgattcacacaaaataagcacccttgaagaactagaacacaaaagaactgtcaagtctgtcccttgaaatgaagaaagagattttattaattcattcacccttacattcccctttcctattggccatgcccccgctccctcctgaaggagcccctagcctcactttaatgataatagtcttcctgctgttctatgtagttttatcatcggcacatgctgccttgaaaattctaacttcacgtaggttttcctgaagatgttgtatacatagaaaatcccagtctgttttcttccatacaactgcattgatctgctcagcccacactgtcccctaattgtccataacctagagatcatttggctgtaacgattgagagaggaagatgctgggtttgggcgtccgaagccactccccgccctcacctccaatccctgcatttgcagctagtatctcatcctgcagaccaatctgcctcctgggcgcctcctccttgcccagccactctctccccataaggatatttgcagtatctcagtgggcagaagtgttaccggatggtgccatgcagttccaggctcttggtgtcttaaacaaagaattggatgagacacacacagacagcaaagcaagaagcagcagtttattaagcacagtatcacactcttggagagggagagcgaactgatctctatgaggtgagatcagcattactttgggtctttttatgtttgtttgtttgtttttttgtttttcttcgcttcccaaggctgccaaatctctatccagtgtctgccttttttcggggggaaggggtggtg

SEQ ID NO: 1561065 - DNA, 4001 bp, Homo sapiens
gaatttatcccatacacttagatattcctgtggaagtagatacaagactatccactgcacagtttctgcggaaggatatttgtgccatgattttccttaagggatgccacaaagtcagagtccatctgtgcagtgaaatcacacacggtcctagaggacggggtggacagtctcactacgatgtcaaaccacctctgagatcctccaggtgcacaaaccaagactcagggcagcctggacggacgctggtcagttccgtggagggggatgggcactggaggacagactttgctgtgcattttgaatttctgcccatgtgactgtatcatctgggcagaagtacttagatcgaaactactgggaaaacagaaagatcagacagaggaagtattcaggagatgcctgacaagaaacttgaaagtctggtcccaaaataaaaacgaacaaaaaccaaaaaaattgggagtctgatccagctgtgtgaatgtcaccctgtccttgctgtggggccaaggaaggggtgtgtggaggagtctaaggggagcagggacaggatggggacaggggctcagatggtcacgcgggctggagatgtgggctcttgtgccctgggctcacgcacagtggcagctctgtttcccaaagtgattccaggatgaggagagacccagccccatcctgagctgaaggccctgctcccccaaccccagggagggggctctgtcctacctgtggcatctccttggaagacagtcatggtcaagttccaaggagggtctgggacagaaagacatgaagacccacattactataaggactggggacattggccctgtcttcccaggagctgcaaatacagggaaaatggagtcggcattctcctgaccccactcccagcccagattctgggacccagaacccagtgtccaggcttgaaccccatcccctgccctcaggaacacctcccaacccatgagggacctgggcatcttggtccagcactcacaggacacatcgaggcggacggtactggtcgtggtcacacctgtcccaggcaaggtcacctgacaggtgaggctggtgccgtggtcctggggctttggggtaagggtgagcactgaggagcgggcagtagtggggcccggggaggacacggaggccccaatccaggagatcatggggggtgtcccctgcttacaggcccagggcacagagcaggtcaggttcctggagtggccagactctagggtccctaggatgaggatgtcaggcctatgggtcagggctggtgaagatggggacacaggatcaggaggaggtatttcaggtgcagccctggaggaagctcaagctctggtccagctcctccccggagaccgacttatttcaatcccaaccccctcccaggccccatcccagccctgcctttcagcccctcatgaccttcccctgtggcctgtgctggagcccgtgccttacctgtcacaaacacagacagctgcttagttttgtaattcaactgtgatttgtaactccatttcatgcttcctctctctagccgaaagaaatatgaccccttatccctcttcctggcgtctctgatgctcagggagcagtcgttgctccaaatgtccccaaggagttggaatcggccctgggtctctgcctgcacttctctgtctgggttgtttgtggccactggagcgtcttggtatggtctgtctcctgcccggaaccagtagccatgaactgggtcagagtcagtccagccatcctgggggtaggagaaggagcagggcacatggacacacaggccctcctgcaccgtcaccagctcctgcacttgcagcaagtaaccatccccatattgtctgtctccctccatcccctttgtcccccagagcaggggcagcagcagcagcagcagcagcatgtctgggtttgaaggcgccagggccgccagggaacgtctgttcctcagggttcttctctcagaaactgaggtctcaagacttaggggaggtcccgcaggaggttgggggtgaagtcagaaaagtgacctcctcagaggaggaacttcacacacagacactgtcagggccgggtcagtcctgggagatccactgtccaccaccccatttccactcctgggaaccctgaggccagagagggtgagaaactcatccagattcccaccctatgcagggcccaacctctttcttgcttcccggacttgcccttccatttgggtaacattttctgcaaggtgaaattgggtcccatctggccagacccctgaatcacccccggggctgtcactgtttgtggaggtcataccagccaaaggtggaactcagggccatgagagactggggtgcaggtgaggtgagcaggcagcctctcctccctctctcagcagcaacgaagtgggcacctcctctttacacaacgaggtcaacagagcagagccagacactgtcctcaaggagtcactgtgcagaggggagacacggaggctcctgacgtctgagctccccaggacgggagcttcagtggggggcacaggcaaggtggggtcgttctcccctaggtcaggggttcagtctcaggaggcctgagcagagggacacggggctgtggaggtgaggattctgcatgttgatacacacgaaggacggggggcggggggaagcctggctcgcaggaggcctgggaaactgaggctgtaactgttgtactgtggggtttggaagggagaaatgtcagaagggaaagggtcaatttgaaaagggcacacacttctccctttgttgcagctatctgggtatcagaatgggtttcttcaccacccgtatcttactcagccacacttcccctggttactgcacagcaggcggggtctgtcagccctggggctttgctcctgcaggctctgcttccaggggtccaggtgaacaggtgtcatggaacgaggacaccagccctggggtgtgcaccttcagcgatgggcaggatttcttgagagaagaaatgtgcacctgaattcaacagatgatgatgatgatgatgatgatgatgatgattattattattattattattattattatttgagacggagtctctctctgtcgccaggctggagtgcagtggcgcgatcccggctcactgcaacctctgactccctggttcaagcgattctcctgcctcagcctcccaagtagctaggattacaggcatacgccaccacatccagctaatttttgtatttttagtagagccggggtttcaccatgtcgaccaggatggtctggatctcctgacctcatgatccacccacctcagcctcccaaagtgctgggattacaggtgtgagccaccgtgcctggcctcaacagattattttaaactgtgtggctgggggctgggaagaagttaagggggatcctgggaggcggagcctccttagactcaggtcaattttcttgaaacattttttggggggtaaatataagaaatatagataaaaacaacccccaaagaagacctcagtgatttacatacaacgagccccctcctagaaatggcacattgacaaagtccccagcgctgctcatttgtttctccttcttattggccacaccccactccctcccaaacgatcccctagcctcactttggtgcaaattgcctcaatgcttttctatatagttttattatctgagcaggctgcatttactaagcttttgcacgtttttctgaagactttgtatacacagaaaatcaaactctactttcttccactcagcttcatggatctgcccgtctcctatcttcccctcattacttataacctggagtagatcattcggctgtgataattgagaagggaaggtgcagggcttgggtgtgcatagccgactcccacccccatcaccaatgcttgcatttgtagctggtatctcattctgcagccatttccccctcctgggcctcctatc

SEQ ID NO: 1561066 - DNA, 4001 bp, Homo sapiens
aacttctccccgcttcatcgagaacagtttgggcttatctttcaaaataagaaagaacatataatgtagctacattttgcttttaggaacttaacccacaggcttagatattcctgtggaagtagatacaagattgttctatcctgccgtaggatgaaattagtgccgtgatcttccattaggagatgccacaaaatcagagtccatccatgcagtggactcacacacagccctagaggagggtgcggacagtctcactacggacgtcaaaccacctctgagatcctccaggtgtacaaaccgagactcagggcagcctggatggacagtggttggttctggggaggggggcaggcatcggaggagagcctttgctctgcaatttgaatttttgcccatggacatttatcacctgtccagaagtacttagatcagaactatcagaaataaacagataagggtggagatgtattcaggagatacatgagaaggagcctcaaagcctggtcctgctgtgtgaatgccaccctcttcttgtttgaggctgaggggggggtgtgtgggggagtccaagggaggtgatgggaggatgggaacaagtggccttggggcctaaggatacagaggggccctgagttcacccacaaggacatccctgtttgccaaagtgagtccaggttgaggaataagccagccccatcctgacctgaaggccctgctcctccagccccagggagggagctccatcctacctgtgccgtctccttggaagacagtcatggtcaagttctgaggcgggtctgggacagaaagacatggagacccgcatcactgtgagggctggggacactggccctgtctgtccccaggagccgcataaacagggaaggcagagccagtgtcctcctgaccccaccaccagcccagattccgggacccagcacccagtgtccaggcttgacgctcaccccatcagggacccaggcgtcccggcccagcactcacaggacacgttgagatggacggtcttgttcgtggtcacgctggccccagggaaggtcacctgacaggtgaggctggtgccatggtcctggggctgtgggatgagggtgagcaccgaggagcgggtggtggaggggtccaggggggacacggaggtccctatccaggagatcatagggggtgtcccctgctcacaggcccagggcacagagcaggtcagattctgggggcagccggactccagggtgcctgggatgaggatgttgggcctgtgggtcaaggctggtgaagagagggggactcaggatcaggtcagaggatccatggtgcagccctggggggagctcaggctctggtccagctcctgccctgagccaactcgcttcaccctaagccctctcctggggcaggggctccatcccagcctttccctgccgcccccatgacctttccctgtggcctttcctggagcctgtgccttacctgtcacattcacagagagccggtgatgtttataattccattttatacttcctttctccatacgaaagaagtatctccccgcatcacttcttctggcatctctgatgctcagggtgcaattcttggtatgtgggtccccaaggaggtggaatcggtcccgagtctcctcccacactgcccgagctgggttgtttgtggccactggagcatcctggtctgtattggccccttcccggaaccagtagccatgaactactgggccagggtaaatccagccatgcgaggggtaggagaaggagcagggcacatggacacacaggccttcctgcaccgtcacggaactctgcatcgtcagcagtttacttgtctgtccttccgccctctccctcccccagagcaggggcagcagcagcagcagcatgtctggggttagaggtgccagggccgcgagggaacgtctgttcctcagggttcttctctcaggaactgcgggctcaagacttagaggaggccctacaggaagacaggggcgaggtcggaacagtgacctcctcagaggaggaactttacacccagacactgtcaggcccgggtcagccctgggagatccaccgtccaccaccccatgttcactcctgggtccctgaggccagagcgggagacagactcacccagattcccaccccatgcagggcccaccccacctcctgcctccctctcaatgcccttccccttaggtgacattttctgcagggtgaaaatgagtcccatctggccagacccctgagtcagaggctgtggatatctgcgtagctcagaggtgggacttggggccatgagagatgggggtgcaggtggggtgagcaggcagcctctcatcccccccaagcaagcacgaggtgggcaccccctttctgcacaacgaggtcaacacagcagagctggacactgtccccaaggggtcactgtgcggaggggagacatggaggctcctgacgtctgagctgtccacggcaggagcttcagttggggggcacaggcaggatggggtcactctcccgtaggtcaggggttcaatctcaggaggactgagcagagggacatggggctgtggaggtgaggattctatgtgttgatacacgccaaggacacagaggggagcctggctcgcaggaggtctgggaaactgaggctgtgactgttgtactgtggggcttggaagggaggaaattcggaagaaaaggggcagatttcaaaagggaagatatttctcctttcctcactgcaccacgaagggtttcttcaccaccgatgtctcgctcagccacacttccctggttactccagaacatgagggatcagctggccctggggctttgcttctgcaagctctgctcccaggggtcccggtgaacaggagatgtggagtgaggacaccagccccggggcatgcaccctccgcgatgggcaggatttcatgggagaagaaacatgcacctgaattcagcagaagattttttgtaactgtgtggctgggctgggaggaactgggagtatcctgtgtggtggagcctccttagaccgatgtcagttttctagaaatatttttgggagaaatataagccatatagataaaaatgtcttccccccaagaaaaaatctcagcggtttacacatatgaacatgcttagagaaacagaacactggggatgccgcaacacctcctctttgttaccccacttcctgtcagccacaccccacttcctcctgaagcagccccagcctcactttaacgctaatggtctccatgcttttctaggtagttttatcatctgtgcacgttgccgtgaatacctcaggcccccatgtttgcccagtcgctccctgggaagttgcagcatctcaactgcaatggtcagaagggctgagccatggctgacagtgttgtcctgcatctgttctgcagggctgggtgtccacatctgagttctgtcttgagcaggaggggctcagtcaggcctctcagcactgctcccctggggccctccacacctgcagagccaacacgggcctcagattagcatcggccacttcaattctaactcaggcgggacaggacagctcagccccacctggaactcggggaacaatccttcggcttccctagaaaagagcaggcctgctcacctggagtagtagctccaggtgaggccatgggggttggggggaagccagtgcccaggatggccccctgatcaggtgagaaccaggggccagaagccctcctgcttttcactcacacatctgtagccagaggggcttcctgggaaagggtagaagcgtgtgagattctgttcccaggcctccacccctctgacagcccaaacacccgactaggctgcctgcctcagcagctgtcctgcaactcactctgcacagaggctcagggaaatgtgctgaaatcgcagtgggtggtgagcccaacaggtcaatgctcctccgtcccagcccctatc

SEQ ID NO: 1561067 - DNA, 4001 bp, Homo sapiens
cttccttactacagtgtttttccaacatgacaaacacatcatgaggatttcaggtgtcaggattattatatccttcaatgatggggcagactcaaagcccaataggcagctagttgtctctccattggaaattttctggccccaaatcccagcattcaccactgggtggtgctcactggccttagctccagtctgcctaaataaagcaaacgttaagcttctaacatgttttgtccaccagatatcctgtactgtttcaaattaacaattagtgtgggcttgggcaatcttattggttcctatttagcatattcaatcaatattggttgaagggaagatttacatgccttctgtttcataatagtacgtaggggaactcttccatagttggacacaatatctttcctcataatacatttaggtaaatacattcacataacatatttacatagtctgtccaaacattccaattttcatccaaagtttcgcctgaatctcatccactttgtaatcctatgtcttcgcaatctaaccatagatgctattagaatttcaccaaccttttggaatgcaggtataagactcccacatgagtcccagaaatatctcttatccatcccctgactattttactactaatatgcatatgactttgggtcttcagttaggggtcaggccaagcaacccaggcccttttgtcatttatcttgattagatcacatgttcgtcccctcaggagatctgaggtcagatttcccattgtcatgtttgccttctggcttctaaaattcctccaaactagggtaaatatagcagacttgatgggggaccttcaacactggagggcaagtctaggttctcactgctccacctaatttctaagagtgctccactgagacctttgtttagactccctcaatgtccacttaactcatctcatttcttaataactgtttataaagatttccaccctcttggaaatgttcgtcttttctcactctctggtgaaccactctaattttctttgccatctgtcatttcagcctaacttttccctttagccacagccctgaggctagcagctgtagctcaggctggccagagcccaagattgggccagcatcaggatccgcctcagccactttcattttaacgattacagataaaaatagccaagggactgcctatttagtttgtttccttatgcatccagtgggtcagctccttgggggttggatccattgtattgaaaaagcaatggtaacttttacctcctgtaactgtttgcagaacagctgcatttctatacgcacaggtgaccgcaggacagcccaggaatcaaaggcttatcatcttgacttcacatccttcctcttttcaaaccatatgtttcagtgagtcagggctgttctagtgaatcccatttctgatacaactgaaaagttagggaatggtccacaagatcccctcatttctgacaccaactgaagatatcaaggatccctgattaccctcatttctcaaatcatttgcaaggttttggaaccccaaaactacccttaggtttggtaattcactagaagtactcacagaattcactgaaagctgttatactcgtgattactgtttactacaactaaaggatagagattaaaatcagccaagggaagacatacagggcagaggccagaagttccccacacaaagcttctagttatcctctccctgtggagtcatggacagcataacttagctttcctggtgataatgtgtgacaatatgcatagtactgtcaactaaagaagctcacccaagccttgtgtccagtgtttttattgggcctccatcgtgtaacatggtgacttccctcatggtggatcttagcatccagctcctcctgaagttgagctgataccatttgatccaaagcccctattctaaatcacattgttagactatctggtattgcttccactctaaatcacattgttaacattatctggtgtggccagccctcatcctaaatcacatttctagaatattcagtgtgatgcaaggtccctgggcaaacaaagacacccctatgaggtgtgacattctaagagctagggagtgtcttccagaagccaagggcaaaggccagacttctcttcaggcaaggttaagttccttagtacacagaataaaatgtcaaattcagaatagcagcgatctctatgtttgagagtgggagatgtgtttggggaagggagtataccaggggtagtgttttctttcttttcttttcttttttttttttttgagacagtttcttgctctgtcacccagactggatggagtgcaacggagcattcacagttcactgcaggcttgacctcccaggctcaagcaatcttcccacctcagcctcccaagtagctgggactacaagcatgtgccaccatgcctgactaattttttaatttatgtagagatgggatcttgttatgttgcccaggctggtcttgaactcctaggctcaagccgtcctcccacctgggcttcctaaagtgctaggattacaggtgtgagctaccgtgcccagccagtgttttcaatattaagctggtggtgggtatatgctcattataccatatttatatctttctatatgtctgaaatatttcacaatctttaaatgaaaactggatcatttgtcatttatataaaagctttatatatataatatgtaaatatgtatctacatattcatatataatacactcaaaactatacatacatgaatgagtaaaacaaagatctagaatgatgtataatttgataccagtgcttacctatggttagagcagtgatcagagatgagattatagaattttcagttttttaattccaggtttattgaggtataactgacaaataaaaattgtatatacttaaggtgtacgacatgacgttttgatgtatgtatgcactgtggaatgattaccacaatccagtgaattaacataatcagcacttcacagttaccatttttttggtggtgagaacacttaatatttactgtcacaaaatttcaagtatacagtacagtgttatttaccatagtcaccatggtgcacatgaaacctccagaacttattcattctgcctagctgaaactttgtgccccttgatcaatatctcatttcccttagccctcagccctggcaaccaccattctatactttgcttccatgcgtttgactttcttagattctacatataagtgagatcatgcagtacttgtctttctgtgtctgacttgtttcacatagcataatgtctttcaggtttatttacgttgctgcaaatggcaagatgtccttttttaaggctgaataacttccactgtgtgtgtatgtgtgtgtgcacaataaatcctcacttaacatcatcattcagttcttggaaactgctgctttaagtgaaatgatgtaaaatgaaaccaattttaccatatataagaacatgcaaactccacacagatactggtactggctgggaattgatttttttctcttatgattagacaatgttgaacaaaatgacattatttgaatggggtgtgtgtgtgtgtgtgcgtgcatgtgtgtatacatatataatattttctttactcatctattaatggacacttacgttgattccacgtgtgggctatggtgaataatgctgcaatgaacacaggagtgcagatatctcttcaagatactgagttcatttctgtcaaatacatgcctagaagtgggattcctgaatcatatggtagttctatttttaatttttaaaggatactctatactattttccatagtggttataccaatttacatttccaccaacagtgtacaaggtttacttttccccacatcctcatcaacacttgctatcttttgccttcttgatatacccatctaataggtataaggtgatatctgtggtttgaatttgcatttctctga

SEQ ID NO: 1561068 - DNA, 4001 bp, Homo sapiens
caacaaaggaacctaaaatgtgacccaccaggcgcagtggctcatgcctgtaatcccagcactttaggaggccgaggcaggcagatcacctgaggtcaagagttcgagaccagactggtcaacatggtgaaaccctgtctgtactaaaaatacaaaaacgaacttggagtggtggtgcgtgcctgcagtcccagctactcaggaggcagaggcacaagaatcacttgcacccgggaggcggaggctgcagtgagcccagatcacaccactgcactccagcctgggcgacagcacgagaatccatctcaaaaaaaaaaaaaaaagtgcccccatgtgatagcatctgtacaccatgacctatctcctgactggctaggcctgagctccctgttccctcctggtgagaaccagagaatactgacatcgctcagctcccctaaaacactccaagaatgggtactcggttctgaaaatgtcaggagagccaaccgcaaggcctggactccaagaaatggcaggaggccaaagtcctctaagcaatgtgaaaacttccctcattttgtatcagatagagatgactatgacacaggtttccatctgagcaaacaattgcaatgcataaataccaatggtactgccaagaatgggaaaggtgtaagaaaaataggaggggagagatggggtctcccttctggctgcattgcagcccagcccttagcactgggctcccggaaggaaaccaggccagccccaccatgtttcctaagagggggcagcagtatggtaagcatgtgacttccaagaatctgagtcagagggtctgagttctagtgacacctctgccacttaggtgggtcccttacccactccaaacctcagtgagtctcctataaaaacaagggcatgatcccagggtttcccatctatctgtaatcttccttgattctgggcctgcaaaatcatctcatgtgttttaaacgttttctgtgtgccagctcccttactaagcattttatgcgtcttacttccaagcaggcctgggaccacagtgagcccagagaagcatcttgaggacaagattaaaggggaagagggtgccaaaaatttcaatcatcaagacaataacattttacagcgcttgaaaataaaaatcaaaatgggtcccaccaaatctttcatgaacaaaactaatataaaaatcaacatattaaatcaaggcaggatttgactctatgagtgtgcacggcctcgccctccctgcctccccccagatccctgtcctgcttccaggaatccccacaaagctccacaaggtgggtactacccatttccatttttgttacgagaaggagctagggctctgagagattggacaacctgcgcaaggtcacccggctaagggggcaggctggagaggggaggtctcaccccgctaggcccgattccggcccaggggggtcccctgaggtggagaggggccccgctggtacctctggcttttgaactccttcatgatctccaggaagccgttgtaggtggcagggtcgctgccaaagcggatcttcacctggtccagataggtgagggcgtcttctacctgcagagagggggagggtcccggtgggccctggccgcggaacgaggggacgaggggccggggtccctgaggggaaggggatgggctgggctttcggagggccgaggtgagaggtgaggggtgaggggtccggggcagtgcagaggggaggccgaggtggggctggggccgggcggggcctgggtgaggggcgcccgcccgcggggtccagaagatgggttccccgagggagggcggggacgccactcacgtgcaccggcagcttctcgtggcctgcggagcccgagcgaccccagcgggcgccgctcagcccccggcccgcggggccgccggcaccgctgccaccgctgccaccgccagcgtgcgccatgtccgaagtcggagctgcgccccgccccgcccccgcccgaggtcctgccgcgcatgcgcagcctccgcctttggaggcggggtttgatgacgttgaggggcggtgctctttgagggactcttctgaagaccttctccttaagattggtatcataattaatgatttatatagcaggggtaggcgagccaagacccgccgcctactttgtccggccccgcaagctcagaattatttttacatgtttacatagccgggggaaaaatccaaagaagaatagtctatgacctgtgaaaagtttgtgaaattcacatttgagggtccctgaataaagttttattagcacacagacacgcccacgcgtttacctggcttctctgcctgctttcgccttacaacagagtaggtagttgctaaagatcctacagatctgcagaccctgaagtatttacgatctggccttttatggaaaaagtttgttggcccctgctttatagagttgacgggacgatgaggtatgagcccccagcgccctaatatagggccttgcgtggtgaatttttgctaaatggcctttaagttagtcctactcctcccatcttcacttccctatccttggccccgtcacttcccatctggaccagtttaggagcctcctaactctggtactttctttttttttttttttttttttttttttttttgagacagagtctcgctctgtcgcccaggctggagtgcagtggcgcgatttccgctcactgcaagctccgcctcccgagttcacaccattctcctgcctcagcctcctgagtagctgggactacaggcgcccgccactgcgccctgctaattttttgtacttttagtgccaccccacctggctctaactctggtactttctcagccctgatactatcaagaactctaggctggggatggtggctcacgcctgtaatcccagcactttgggaggccgaggcggacggatcacgaggtcaggagatagagaccatcctggctaacacggtgcaaccccgtctctactaaaaatacaaaaaattagccgggccttgaaaaaaagaaaaagaaaatgaaaaaattggctgggcgccgtggctcacgcctgtaatcccagcactttgggacgccgaggcgggcagatcacctgaggtctggagttggagattagcctgaccaacatggagaaaccccgtctctactaaaaatacaaaattagccgggctttgtggcgcatgcctgtaatcccagctactcgggaggctgaggcaagagaattgcttgaacccgggaggcggaggttgcagtgagccaagatcacgccattgcactccagcctgggcaacaagagcaaaaactctgtctcaaaaaattaattaattaattaattaaataataaaataaaatgaaaaaattagctgggcgtggtggtgcacacgtttagtcccagctactcgggaggctgaggcaggattgctcatgcccaagagttcaaggctgcagtgagccatgatcttgccactgcacaccccagcctgggaagcatagcagtgcttttttttttttttttttttaaagagcatctcatctcttaaaaaaaaaaaaacagaaaaacaaaaaactccactttttccaccactccttccaaacctccaaggtcttcctatttctaatgagatgaaatctaagcacctacattgcaggctgtcagaattggtccttaggaaccttttcctgcaggattttccaagcaaactgcctgcctctgtgcagaacttcacacaattgcctgaccaacctggctgcttcctggtcccaagcattggcactcaccatttcctttgccagaagtactgtcatgcctctttgttattcagaaaacacctatacatccttctaaacgcagcccaaatatccctttccctcaggaagtgttcccagtccccttctatgtctcccctcagtcccttgtatttcatatttgttttgtgtccgtctctaatacaaatccctgac

SEQ ID NO: 1561069 - DNA, 4001 bp, Homo sapiens
tcacccagacttgagtgctgtggcacaatcaaagctcactgcagcctcaacctcctgggctcaaacaatcctcccaccttagcctcccacgtagctaggaatataggtgtgcaccaccatgcctggctaattaaaaaaatttatggccgggcacggtggctcacgcctgtaatcctggcactttgggaggctgagatgggcggatcacaaggtcacgagttcgagaccagcccgaccaacatagtgaaaccccgtctctactaaaaataaaaaaattagccaggaatggtggtgtgcctgtaatcccagctattcaggaggctaaggcaggagaatcgcttgaacccaggaggtggaggttgcagtgagccaagatcatgccactggactccagcctgggcgacagagtgaaactctgtctcaaaaaaaaaaaaaaattttttttttgtatagatgggctcttgctttgttgcccaggttggtcttgaactcctggcctcaagcagtcctcccacctcagcctcccaaagtgcagggattacaggcgtgagccatcgtgcccagccaataaaacttttaattacaaaaattaatgtagcctgggcaatacagaccctgtctctaaaaaaaggaaaaaaaaattagccaggtgtggtggctcattcctttaatctcagcactttggaaggccaaggtgggaggatcgcttgaggccaggagtgtgagaccagcctcgggaacacagtgagacttcatgtctacaaaaaaagtaaaaaaaacaacttgggcatggtagtatggacttgtggttccagttactcaggaggctgaggtgggaggatcatttgagcctgggaggtcaaggctgcagcgatccatgattacgccactgcacttccagcctgggaaacagagcaagcaaaataaataaataaataaaataaaaataaatttaatttttacattaaagaaactttttaggagacagggtctcattctgttgtccagggtggagtgcagtggtgtgatctcggctcactgcagcctcggcctctctggctcaagcaattctactgcttctgcctctcgagtagctgggattacaggcgcccgccaccacgcccggctaatttttgtatttttggtagagatggggtttcgccatgttgcccaggctggtctcaaactcctgagcttaaatgatccacctgtcttggcctcccaaagtgttgggattacaggtgtctgccactacgcccagcccaaacaaaatttttaaacagaaagaaaagtgccatctggtagccagcccaaaggccagcaagacccggcaggaagcttccaggagctgttggaatgtgctgcaattcctgctcctccaaacgagactggggcagtggaggaggatcaggatgcatgtcccatggagaaggggaacaggcacatgccgggggacccggccacagcagcacacacacctcgaagcgctcgtcctcacagcggtgaagctgctcctcgtacggtgtcttcttggagctgacgaacgtggagtcctcagaccaggaagggaaggagacccaggtgtcgttcagtacctgcaccaagaggaaatgccgtgaatgacgctgcatgccccaggagccaagatttactgttagccagtgtagaaagtaccaagatacataataccatcctgatacataataccaactgccttatacaaatgggaaggtgcataaagtttttaaggaaaaacatgactttggtcaagtggacactcccttggtatcctgggagattggttccagaaccacccctgaagacccaaatccacagatactcaagtccctgatgtccaatggaatcctatttgcatatatcctatgcaaaatcatctctagaatacttatacctaatgcaatgtaaatgctgtgtagatcattgttacactgcattcttaaaatgtggattacgctttattgctgtattgtcattttttggtttctctttccccacgtattttcaatccatggttagttgaaaccacagatgaggaacttgcagatccggagggccgatttcatttcagacattggtaaattctctctgcaaagggtcagacagcaaccatctcagattttgcaggccatcccagatgaatactcaactctgcctttgtggtgagaaaagcagccacaggcaatatgtaaaggaatggttgtgtctgtgtgacagtaaaactttatttacaaacacgggcagcgggccagggcccgtgggccagagtttgctgacccctgcactatatcctggaatccagcaggtattcttgaacttggacatgcagtaatcgtctgtccacgaaccctggagaagtgtccaatggtcaagctaaacagaaacacactgaggtcagtgagcccgggacagagcagaatcatggcagcaataaacctaagtcaaataacagatgaataagccgaactccacgttatccctggcactctgtgttttgccaaaactaccagcagggtacaacactgttgtctctgctcaggtggttttgccgggccacatcccagcaccacccataacccaacattcaggagggctgagcacacagcatttcattcataacgggggtatcgggtgtttgctggggaggggtgggggatgcaccatgtcaacgaacatttgagccccagggagcgctacctccttgcagatggctgtcctcccactgcacttgggctgctggtaggttttggggagtgcccggtagctggatcctatgcgcttgcaggatgcataatcaatttcccggcttatcccgtccccggatctgtcgctcatgggtggcgcgaaggacagctcttttacccccaggaaggacttgaactgtgcaaagagttctggaaatttccttcaaagataaagacacatggtaactggtcatccccagggccttctgagagggatctggagattttagaatggcttcatgtggacattacaagttaaacagagtcagaattcaacatcatggatgcgaatgagaggcggaagaatccaatacacaggaagtcactgcaagtcccggggtgtgtgaatgaatgggcctcccacccatctgtcacacaccaggtcccttcctgtgcctattaatcccatactcacagtaaggctttgaaatacaccagaaaagatgacttaaactggcagaagctggaacccctgatgttccctgactggaagaggccaggcttcaggccagggagtggcaagccacagccagtctgcacactgcctgtgttttgtttggtttggtattttctttttagagatagtgtcttactctgttgcccaggctcaagggcagtggcatgatctcagcttactgcaacctcaaactcgtgggctcaagagatcctcccaccgcagcctcctcagtagctgggaccacaggcatgtgccaccacacccggctaaatttttttttttttttttttttgagacagagtttcactcttgtcgcccaggctggggtgcaatggcacaatctcggctcacttcaacctccacctcccgggttcaagcaattctcctgtctcagctttctgagtagctgggactacaggcatgcaccaccatgcccggctaatttttgtatgtttagtagagacggggtttccccatgttggccaggctggtctcaaactcctgacctccggtgattcacccgcctcggcctcccaaagtgctgggattacaagtgtgagccaccatgcagggccaatttaaaaatttttttgtagagatggggtcttgctatgttgcccaagctggtcttgaactcctggcctcaagtgatcctttcacctcaacctcccaaagtactggggtgacaggcgtgagccaccatgcctagccatcccattgtaaataaagtttcactggcctgcagtcacatccacttgtgtacgcactgcctgtggctgcct

SEQ ID NO: 1561070 - DNA, 4001 bp, Homo sapiens
tgaggggaactttcagtgcccatcagatgggagaccaatatgggccaatgaaatggtgtttctatgaaatggcagcttcgtccttcttgctagttgactggatatgggaaggctggggaagaagagcaactcccaggtttctggcttaggcaaccaggtcaatgctggcacatttgccaagatggtgactactggttccaggaggagaaggagttcaggttggacatgctgagtttatggtgcccaagaaacagccacttctttgagccacagcatcaaagaagcacaggctccacatctggagctggagtgcaggggactcagtggctttgggacacaaaggcaaaagctggcagcaccaggacaataattaaagcactggagtgaacatactggctctgtggggaggggtgtgtgagcaggggactgctgatggcaggtcagacccatttcttcttaggcctttctactatagtgtgttccataatttaatctttggtaagtaaaatttgggagggagggggaagataaaaaaacactaactttgtgctcactctgccatgtaggtacaaacagaagcaaaaagggcctattaaaaaaaaaaacagcaagatacatttaatcatttaataagcacttactgtgtgccgggccttgtgcaaagcactaaacatgaattatctcctggaaccatccaaacaatcctggcacaaaagtcctatgactaccattccacagatgggacactgaggatgggagcaaatgtgtgggggagctcagggctgtcatgtcacagcccacagtcaggcagtctctgggccagatggagaatattgaagaacaattataatacataagagctgctacttagtgagagatggcgctggactagaaatacaatctcagcaaatccttacaaccctttgagagtgatcttgttattatcccattttgtaaatgaggaacctgaggtagtaggaagggaagtcaactggaccagttctgaatctggccctcgggggtgaccaatactacggccagagccccaccctcagagggtctctgggccactaggaaaacgctgaataaatggtaccatttactgagcgttatatgccagctgctgtgctaagcactttacacatggtattctcactgcatcctgaaaacaactcgacgaagtggttgctatttaaatccccattttatagatagggaaaccaaggcacagagaggtgaagccagttgcccaaagtcacacagctggtaaatgttcaaatttgaacctggggtctctctgccttccaaaccaacgctcttaacaaaataatctcggttaacagcagctagcctgcattgggtgctaactaaggactcacctctttacatgcacacgctcaactaatcctcaccctatgcaatcgataacatcttcacctcatttttcggagagctaacaataacccaaatacgtagtaagtgcctcctatgtgccaaatgttttattatattatctcaacagagtctccgccaagatgctctcctactccgttttactgcaggggaaattgaggttcggcgcggttttcccagatcgcggctcccgagtggcacagccgggacgcgaatccaccgctccccgcctccaagctcttcaccacagcgccggggtgcacgcctggaaagttgagccatgcgggcacgagtccggctgggtccggagggcgcgagtcccggcgccgccgccccccacggccagtacccacacccggccgtccgcccgcgctgaccctcggggtccgggcagccaccgattccccgccacccttgcgcgaggccgatcctgcacccggagccacgtacctggacgccccggctgcccgcctcgcgggccccacgatcgcggcgtccagctccgcgccgctcgctggagacgccgccagctccggtggcccgagtgacttccaggctgcccacttccaagccgcttcgcgcgagtcctcctgggaactgtagtttcgccctagccggccgcgaactcaaaaagagaatggcgcgcgggggctgccgggagccgtaggcgcaccgccgcgctgcctcctaggaacggtagtccgctggtcgccttcgtgcagctccagtctgtagagcacttccgcagccccgaggggcgtgagggagggaggtgtgtctcctgcagactacagctcgagagccgcgctcttcgccccgccggggcggtttctcctttctcctggccccgtctacctcctcccttcattcggcggaacctctccctcactctctgccaggctcgagtcacttacccctaggacgctagcccgggggaaacgggggaagcggagcagtgcgctagacccccagcggagggggcggtggaggagggcgtagatgcacgcccgcgcacgcgcggtcgtcggcagaccccggcctaaattgccgcgggaccccgcggagaggattttttttttttttctttcgagagcgcgcgcgcgttctcgcgccgggcgcgcgcccatgcgcacgcgcgttcagacccctggcctcgggaagtccgccggctgcggggttgggggccaaccgttctgtgggcggagtcctctcgcaacatccgccaggtagcttcttagttgctgcccctagctctaggagctcctgagtgcacacgccgtacccgtcccttgtcgggaatcctgtcgcaggtaacaggcgcagccaatgctttgagatagagacgccctgccttccctgccacgtgcaggaggcccgagggtgaggggccccaggtgtagtcgcctgtccccggcgtaggcggctccagagctctgccttcgacgggagccacaagacccaggggctgcctaggggccttgttatcttgcattcttttgttgatcgcacattcctgagggtaactagtgtttgtagagtacctacaccttgggaaattttgtccaaatttaatccacctggtgacataaccaagcagcggaataccccgcaacacacactccttttttaaggtatattgccactcctccataagagttaccgagggaattgactggaattgcaaggtcctctggtggagaagccggagtcaataccctttccgcctcagcctgccttctaggaagatgttcactaacacttgaagctgggaagcatatgtttcttcctgggagagcacatttttccactcattcaacaaaaatggattaaccacctattccatgtcaggttgggtgattatggagacacaagagaaatccagacagactggactcctaccttcagggagttttcagtccagtagggatatcaggccaccaccagactacaacaatgtagagcaatactagctaagagaaatataccctgcactttgagccaccgaggcaggaggatcacttaaggccaggagttggagactggccgggtaacatagcaagaccctatctctactaaaactaaaaaactagctaggcgtggtggcatgtggccatagtcccagctatttaagaggctgagtatcgcttaagcccaggagtttgagactgcagtgaaccatgattgcaccactgccctccagcttgggcgacaaagcagaaccctgtctctttaaaaaaaaaaaaaattatatatgtgtgtgtttttatgtgtaatgcaagccacatatgcaattttaattttgacataaacaggtaaaattcattttatttatcattattatttacttttttttttcttgctatgttgcccaggctggtattgaactcctggcctcaagacatgttcctacctcagcctcgcaaagtgctgggattataggcgtgagccatctcacccagctatgaaattaattttaatattttatttaacccaaatatatccaaaatattattccaagttaggttaatggaaaaatgttttcattgcttcagttctactttttttttttttttttttggagacggagt

SEQ ID NO: 1561071 - DNA, 4001 bp, Homo sapiens
gggtcttgctctttcaccccggctggagtgcagtgatgcaatcatagctcactgcagcctcaaactcctgggctcaagcgatcctcgcgcctcagtctcctgagttattggaattacaggcataagccactgcatctggccccctgagttactttcgtcatcacgctgtgagatcattttttcccatcacttgtccacgagatctgtgcgttccaagaccaaatgggatacctgtctcttccagtcccaggacaaatgtggttcagaagggatggcaggcagtggcaaggaagaaggaaagtttgggaggacaggcctggacttgaggctggaaactcttctctgacaatccccagaatctgcctttccccagaaagctgcactgggtggtgtgagggattggggcaatgagccgagggccctggggtgactgtttcccctttgccacctccccccagtgtgggatgtggaacaagtccgtctctctcctcccctccaccctttcccccatctcacctgagcctcctgcaccttccctgcctgggtctccagagggtgagaggctgggggaggggagcagaggtggttacagtggggagaacgattaaggggggaataaaggggttcaaatggtcagtgagggggcaagaacacccaccaacctagttacactgggatgggatggtggtaaaaatggagcagagggagggaggggacggagaaaagatcttatctacatgcaaagtgatgccgggagaggtgattagtgaggggcagagaggctggagaggaagatttagggggacagggagaaagtaggggcttttgcccaggctggtcttgaactcctgggctcaagcgatccaaccaccttggcctcccaaagtactgggattacaagcatgagccattgtttctggccctgacttactttctttcttttttactttttagagaaagggtctcgctcatgtcacccaggttggagtgcaatagtgcgatcatagctcactgcagcctcaaattcctgggctcaagcgatcctcctcctcctacctaggggattcagggcatgaaggaacactcaggaggagttaggaaggacacgacagtgtgtgagtgtgtgtgcggggagggttagatttacaaggcagagggaagtttagaaaggaaaagagaagggaagagacgctttggctgggaggcaggtttaggagggaggtgcagtggtgcagtggaggcggtaggtttaggagaggcgcggaacaaggggaagccataggaggggtcagcaggggtccctcagcatcctctggttgcctctaacaatcaggtacccatagcaagcgggaccggggcaacttatgttctttgcagcgagggaccttagcaaccaaggtgcgagaaacacgcgatcattggcaacttggcaagtggatgtggtaaacgaaccctgaacacactgcgacccagaaacccaccagcctagcgatacagatcgctaagcaacagccctcagaatcccactccccgaagcgctccctacttcccgccccaccgcggccacccttgggccccggggcctgcagcattcagccaggccccggcgcggcccgaccctcctacccggatccccgactcacggtctggctctgccatgggcgcggtgctgaagcccttgaggctgtcaccgaccgctctgtcccgtcaccaaccactgtgtcccgtcaccgactgctctgtcctgtcaccgactgctctgtcccgtgacggcaccagaaatgggagtggccgtgatagggcacagaactacaactctcagcagacattgcggccgcagacgcgctttcgtacaacacccagagcgccccagttaggtaagaaagcgcgcgaggaccggactacgagtcccagaaggcgtggcgtcagcagccatgttggtaaagggcgcccggaaaatgtgggaacggctagagagttgtagtcctcccgaatactctgattggtcaggatgcagtacgagggcggggtgtgagcgattcagcatattatcattgggtgaatcagggggcgtggtggggaatttcccgcagggcggaagctccagaactcccggcaaagcccagctacaggcgggcgactgcggggggcccctgaggcggcgggggccatggctggggtcgcgtgcttgggaaaagctgccgacgcagatgaatggtgcgacagcggcctgggctccctgggtccggacgcagcggcccccggaggacctgggttgggcgcggagttgggcccggggctgtcgtgggctcccctcgtcttcggctacgtcactgaggatggggacacgtgagtgaaccttaggctgccaaacggagccctaggacccggcgtcacattcctcattaatctctgatccctgaggcttcctaacctcatactcctaaatctgacttccgatgctgaacttcctgacctctaacccccgagtcctaacttttaacaaaaccaatcttctatctagctatgatcctaacccaatcatttcttaccttcttttcttgaactatgattctcagctcctggaatccacattgtatccactgatacccaaacctgactccagtcctgagacttctgttagaactgtggcttctcctgacttctaacctccaaatatgatctttgattcttagttcccgatttgagccctagagtttgatttccgaaattaatacttggtccctgactctaagatcctgtcttctgagcagtgttcttcaaatcttaaattcaaagagagagaatgtaagctcttctatgttgaattcctaattaaagtaaaaaaataggaaaattaaaaaaaagaatgttagctccatgagaccaaggattcatctgttaaacaaatattctttacacattaccacgttccaggctccgtttaggtgctagtgataaaggcagtgaagaaaacaaacaaaaacttaagcccttgtggagcatacattttagtggagctaaataaacagattgataagaccacaaggaaggaaagaaatggaaagacaggaagaaacaaagaaagacacgcagaaagaaagaaacatagaaagtaagaaaaggaaataaagtcagaggtagttaagtactttggagaaaaataaagcaggaaaatgaggcaatagataaacaagataagagcatttcaaggagaaggaactgcagttgcaaaggcccagatgagggattgtactgggttttttgtctgttgtgtttactgctgtatgcccagtgatgcaagcagggcctgatccaggaggcactgaatattgatctcaaccagctttatagtctcgttaattttcattaaatttcattaattaattttggtttcattaatttttttttactttctattcaattggtctctgttctgacttttttttttgaaacgaagtctcactctgtcgcccaggctggagtgcagtggcatgatcatggcttactatagccacaacctcctggctcaagtgatccttgcacctcagcctcctgagtagctgggaccacaggcacatgccaccatgcctggcaaatttttaaatttttttgtccccctatgttctcaaactctttttttttttttgagacagagtcttgttctgtcacccaggctggagtatagtggcactatctctgctcgctgaaacctctgactcctgggtttaagcagttctactgcctcagcctcccaaatttgggattacaggcacgtgcccccacacctggctaatttttgtatttttagtagcaacagcagtttcaccatgttggccaggctggtctcaaactcctgacctcaggtgatccacccgctgtggcctctcagagtgctgggattacaggtgtgagccactgtgtgcagctgtggtctcaaactcttgagctcaagcattcttcccaccttggcctcccaaagtgctgggttacagggatga

SEQ ID NO: 1561072 - DNA, 4001 bp, Homo sapiens
ccctgagttactttctttcttttttactttttagagaaagggtcttgctctttcaccccggctggagtgcagtgatgcaatcatagctcactgcagcctcaaactcctgggctcaagcgatcctcgcgcctcagtctcctgagttattggaattacaggcataagccactgcatctggccccctgagttactttcgtcatcacgctgtgagatcattttttcccatcacttgtccacgagatctgtgcgttccaagaccaaatgggatacctgtctcttccagtcccaggacaaatgtggttcagaagggatggcaggcagtggcaaggaagaaggaaagtttgggaggacaggcctggacttgaggctggaaactcttctctgacaatccccagaatctgcctttccccagaaagctgcactgggtggtgtgagggattggggcaatgagccgagggccctggggtgactgtttcccctttgccacctccccccagtgtgggatgtggaacaagtccgtctctctcctcccctccaccctttcccccatctcacctgagcctcctgcaccttccctgcctgggtctccagagggtgagaggctgggggaggggagcagaggtggttacagtggggagaacgattaaggggggaataaaggggttcaaatggtcagtgagggggcaagaacacccaccaacctagttacactgggatgggatggtggtaaaaatggagcagagggagggaggggacggagaaaagatcttatctacatgcaaagtgatgccgggagaggtgattagtgaggggcagagaggctggagaggaagatttagggggacagggagaaagtaggggcttttgcccaggctggtcttgaactcctgggctcaagcgatccaaccaccttggcctcccaaagtactgggattacaagcatgagccattgtttctggccctgacttactttctttcttttttactttttagagaaagggtctcgctcatgtcacccaggttggagtgcaatagtgcgatcatagctcactgcagcctcaaattcctgggctcaagcgatcctcctcctcctacctaggggattcagggcatgaaggaacactcaggaggagttaggaaggacacgacagtgtgtgagtgtgtgtgcggggagggttagatttacaaggcagagggaagtttagaaaggaaaagagaagggaagagacgctttggctgggaggcaggtttaggagggaggtgcagtggtgcagtggaggcggtaggtttaggagaggcgcggaacaaggggaagccataggaggggtcagcaggggtccctcagcatcctctggttgcctctaacaatcaggtacccatagcaagcgggaccggggcaacttatgttctttgcagcgagggaccttagcaaccaaggtgcgagaaacacgcgatcattggcaacttggcaagtggatgtggtaaacgaaccctgaacacactgcgacccagaaacccaccagcctagcgatacagatcgctaagcaacagccctcagaatcccactccccgaagcgctccctacttcccgccccaccgcggccacccttgggccccggggcctgcagcattcagccaggccccggcgcggcccgaccctcctacccggatccccgactcacggtctggctctgccatgggcgcggtgctgaagcccttgaggctgtcaccgaccgctctgtcccgtcaccaaccactgtgtcccgtcaccgactgctctgtcctgtcaccgactgctctgtcccgtgacggcaccagaaatgggagtggccgtgatagggcacagaactacaactctcagcagacattgcggccgcagacgcgctttcgtacaacacccagagcgccccagttaggtaagaaagcgcgcgaggaccggactacgagtcccagaaggcgtggcgtcagcagccatgttggtaaagggcgcccggaaaatgtgggaacggctagagagttgtagtcctcccgaatactctgattggtcaggatgcagtacgagggcggggtgtgagcgattcagcatattatcattgggtgaatcagggggcgtggtggggaatttcccgcagggcggaagctccagaactcccggcaaagcccagctacaggcgggcgactgcggggggcccctgaggcggcgggggccatggctggggtcgcgtgcttgggaaaagctgccgacgcagatgaatggtgcgacagcggcctgggctccctgggtccggacgcagcggcccccggaggacctgggttgggcgcggagttgggcccggggctgtcgtgggctcccctcgtcttcggctacgtcactgaggatggggacacgtgagtgaaccttaggctgccaaacggagccctaggacccggcgtcacattcctcattaatctctgatccctgaggcttcctaacctcatactcctaaatctgacttccgatgctgaacttcctgacctctaacccccgagtcctaacttttaacaaaaccaatcttctatctagctatgatcctaacccaatcatttcttaccttcttttcttgaactatgattctcagctcctggaatccacattgtatccactgatacccaaacctgactccagtcctgagacttctgttagaactgtggcttctcctgacttctaacctccaaatatgatctttgattcttagttcccgatttgagccctagagtttgatttccgaaattaatacttggtccctgactctaagatcctgtcttctgagcagtgttcttcaaatcttaaattcaaagagagagaatgtaagctcttctatgttgaattcctaattaaagtaaaaaaataggaaaattaaaaaaaagaatgttagctccatgagaccaaggattcatctgttaaacaaatattctttacacattaccacgttccaggctccgtttaggtgctagtgataaaggcagtgaagaaaacaaacaaaaacttaagcccttgtggagcatacattttagtggagctaaataaacagattgataagaccacaaggaaggaaagaaatggaaagacaggaagaaacaaagaaagacacgcagaaagaaagaaacatagaaagtaagaaaaggaaataaagtcagaggtagttaagtactttggagaaaaataaagcaggaaaatgaggcaatagataaacaagataagagcatttcaaggagaaggaactgcagttgcaaaggcccagatgagggattgtactgggttttttgtctgttgtgtttactgctgtatgcccagtgatgcaagcagggcctgatccaggaggcactgaatattgatctcaaccagctttatagtctcgttaattttcattaaatttcattaattaattttggtttcattaatttttttttactttctattcaattggtctctgttctgacttttttttttgaaacgaagtctcactctgtcgcccaggctggagtgcagtggcatgatcatggcttactatagccacaacctcctggctcaagtgatccttgcacctcagcctcctgagtagctgggaccacaggcacatgccaccatgcctggcaaatttttaaatttttttgtccccctatgttctcaaactctttttttttttttgagacagagtcttgttctgtcacccaggctggagtatagtggcactatctctgctcgctgaaacctctgactcctgggtttaagcagttctactgcctcagcctcccaaatttgggattacaggcacgtgcccccacacctggctaatttttgtatttttagtagcaacagcagtttcaccatgttggccaggctggtctcaaactcctgacctcaggtgatccacccgctgtggcctctcagagtgctgggattacaggtgtgagccactgtgtgcagctgtggtctcaaactcttgagctcaagcattctt

SEQ ID NO: 1561073 - DNA, 4001 bp, Homo sapiens
ggaattcttgaccttgtgatccaccatgcccagccaagggacacatcttaaagggagtacccaggacacatccaggaggaaagcagatggatgtgttctcattcccagatgtgtgtggctcgcagggaagcctctggcagcctggtaggccttgcctcgacttcccctgcacaatcacagacctgaagtcggggatgccagaggcagtgctgatgccggcacccgtgtggaacaccacactggaagactgccagaccagcctcgccagttcccacaccttccgctccagctcctccggggggtcgaagatctgtggggggagagagcagacggaggggtcaaaacagttcccccaagtggcaaggccacgcacgagccacagactgagctgtccctgtcttgcctgagggaggaaaatggattggaaaaggcagcttgtcctcatgcccctcctcttcctacaaccttccatgcctcccacctgccttgtcaaagccctagcccttcccacggcccaccaggccctgcactacctcccttgccccctccctgccctcttctcctccctctccctgcctcactctgctccagccacacaggtctcctccttgttcctctatcacaccaggcacagtcccgcctcagggccacaccctttaatgctcttcccccagatacccacatggctccctccctcacctcctgtaacttgtggcttagatgtcacttcagtgacagtgatgcctcccttggccaactggtttccatgcaacccctagtcagtctcccttactagaaggaggggtttttaatctgtgttgctcctggctgtggccttagtacctagaaagtgcctgagctacagtaagtgctctataaatgttggtggaataaagtgactaacaggccgggtatggtggctcacgcctataatcccagcactttgggaagccaaggtgggtggatcacttgagatcaagagttcaagagcagactggccaacatggtgaaaccccgcctctactaaaaatacaaaaattagccaggcgtggtggcaggtgcctgtagtctcatctactctactcaggaggctgaggcaggagaatcgcttgaacctaggaggcggaggttgcagtgagccgagatcgcgccactgcactccagcctgggcgacagagaaactccatctcaaaaatataataataataataataaagtgactaacagcagcagtgaagagtggggcttctggacgggcgcacaccatcagcgctcattaaatgcatgagtcagaatgcatgggccagccttatggaatggggccatcttcacctcgtttgcagaaagtttggagatggagacccaaaagggaagtgacttccccaaagtcccacagtgcgtggagggggcagccgatccctccacttcccctctgagtggctggagggatctttctggcacattctgtccagtcccctcgccagggcaaaacccttccccatcaccctcaggataaagtgccaactccccagcctggcatttgagccccgtcctggcccggctctggaaacctcccaggcctaatcgttctccaggtgtgtttattcccacctccctttgcgcctgtcgtcccctcttcctggaactacatcccctctctccccgatcagccccgacagggtgaccacagagttgggcgtgttggcgtcccccggcgcgcaggggcgtcacttcccgccccttcctcactgggaagtccctcccattgtctagcctcagtgccccctgatattcccacaatgcccccctgccatccggccgctcccagcccgcggccctggggcgcgatgctcgggaccctcagacgcgctcacctccgggaggccgcacttgcccttgtccgcgtacggcgacagccccgccgcgtaattcaccgacatcctcgactgccccacgggaacaataaagtttcccttgttgaggccgcttccgccggaagcggggcggggcggggaagaaggaggaaccgcgttccagtcctgcgcacccggcctcccacggcaaggcgcatgcgcctcttgctgacgccgcaggcgacatgttatctgctgtcagaaggaagcctgcctctttgcatgcaggtgtttgcggggcttgggaaggggctccccgatgacccgggcgggaaattggggcggccgcctacgtgagagttctccagtcacctctaaaatgcgggacacaggctatccatgtccccacaaccccttttacggattagtaaattccgtaaggacagagccggacagcagggaccccagcctaagggttttgaatgccacgcagagttacctgaatatctcatttgtgtgtgtgtgtgtgtgtgtgtgtgtgtgtgtgacggagcctcgctctgttgcccaggctggagtgcagtggcgcaatctcggttcactgcaacctccgcctcttgggttcaagcgattctcctgcctcagcctccctagtagctgggattacaggcgcccgccaccacacccagcaaatttttgtattttttagtagagacggggtttctccatgttggtcaggctggtcccgaactcctgacctcaggtgatctgaccgcctcggcctcccaaagtgctgggattacaggcgtgagccactgcgtccggccaagttatctgagtatcatccaactggaggttctgcattctgcaggacaggtcctgctcaaggtcaatggggctggtggcctggaggactcatttaagaatcatgtgttgagtacctactttgtactgggcacactggagagcaaaggtggtaccatctatgccctggtggctgcgggtggacacaaacatgtgaccaggtaatggtgacatggtgtggttggggtgcaatgggtgatgcagagggcacagggcagtgagggggctcacaggaggcacctgacccaggctgggggcatccgggagggcttcctggaggaggggatgttgcagcaaagatctaaaaagtgagtgagccgggcgcagtggctcacacctgtaatcccagcactttgggaggccaaggcaggtggatcacctgagattgggagttcgagaccaccctgaccaacatggagaaaccccgtctctactaaaaatacaaaattagctgggtgtggtggcctgtaatcgcagctgctcgggaggctgaggcaggagaattgcttgaacccaggaggcggagattgcggtgagccggagatcgcgccattgcactccagcctgggcaacaagcatgaaactccgtctcaaaaataaataaataaataaataaagagtgcatgagtcaggtagagccggttggggtgacatgaagtacagaaagaatgttcctggtggggggaacagcaagtgcaaaggctgagaaagaggaagagcatggctccttccagaaactgaaatcagtccagtgatgatagggaagatcgtgggtgtcttcccgccagagccagttggccaacaggcagtccgctgccagcctgtctcctccctcggctcatccccggccccctggggcggccgcctgctcagagccgatcaggtgtcagagtggagcggctggagctgctcgtggcccagctgggagtgggtaaccggagccggcagtgggcactgtggccgggagctcggggcactggagctgcaggaggtaggggaggaaggaggtgggagaggcccaggacggaggatccccttatggccccaggcccctgagcccttgtatgtgggagaaagaagccgtgctgagtcctagccaggctgcggagctacccaggtaccctgacacacacatgcactcgttcacccacgcacttcccacttgccggcctgtgccctgcctagcttcctccaaggcaggtgctcaacatcccacccggccatcaggcccttcttatttaccatcacctcttccagcaagcagcttcctaaatttagcaggcg

SEQ ID NO: 1561074 - DNA, 4001 bp, Homo sapiens
ctggcccaagtttcggtggatcattccaggggttatgacgcctctctgagaccactccaaactccagggccttttgcaagccctgcgtggacaccactgcagagaagcgctggggagggaagaggcccttgctctcccccacctcggcctcgggtccccagaggctgagctcccaggttgccctaaaagttccttggttgggcggaaagcgggcgagtggcctggagagagggagcagcagccgccagcccagttcccggtgccctccccgcggggcgtcagagaagggagaggccggcgctcagggtgggaggagaagggtttgggttacagggaaaccggagctgggaaaggttcacgtttcacaacaaaggcagaagacggaccacgccgtccgggcccggagggagtgtgggggcgggtgggtaagagtaacggtcagtgaagaaagggggctgggaggcagcccctacgcggagtggagtggccacaggccctgtcctttttcctcagtccctctagtgccccccgcagtgtgattccccaacaccgatgggatttgggaaggagctcggaatggagccgctggaagaggagacgcgtgcggggagagggcccgggcgggtgcctgtcccgtccacacttagtccccgcgccccgcgggcgcctgagattgtgagctggtcccgggagatgtccgaggacctcggcgcgccggccccagcagtgggcacgggggaagagggctggtggacgggatgtccccgggagagctggacttgcgccgcccgaggcccctcacctcttgcagggcgcgccgcctccggccccggtccggtcgcgctgtcgccggttcttgaaccagttgctgacctgcgtgagcgacaggccggtgagtgtggccaggcggcgcttctcgtccggcgtggggtagcggttgccgcggtagcaggccttgagcgctgcgcgggagcgctccttgaagcagtagactgtctcctcgccgtcccagatggtcttgggcagcgggaacttcttgcgcagtcgatacttgtccactgcgccaagcgcgcggccgcgggcccgctcggcctcatggtagcgcgcgcgcaggtagaggtcctgcaggaaggcgtggtgggcggcggggaaggggcggctctcgagtagccggtagagctcggcgtactcgccccgctggaaggccaccagggcccgcgcgcgcaacaccgggtcgctgccacgtaggcgctcggccgggggcagtgcgcccaggaagcggctcaagcggccggcgtggcccgcctggagcagcgcctcgcagacgcacgccacctgctcgggcgagaagcggaggcccgtgggcggttcggaagcggcctcggggggcgacccggggacgcccggggatcccgggccctcagctcccgcagccgctgcgcccgccccggccccggccgccgccgccgcctcaccctcggccgcctgcaaagtctgcaagagctggcgcgcttcctcctcctcctcttcggtcgccgccgccgccgccaccgcctcccccccagccgccggccccgcgctcggctccgcaggcaaggtagccatgttttgcaactttgggaagttcctccctccctctcttcctccctcgggctttccccagcctcctcccccacctgtccccccttttcgcccccactccccgctcttctcgatcttctttctggccgaccctgcgccccacgccgggaaggcgagatccagctctccactcgggtctctgtccccttgtgtgtgtccgtccccctcccgtctgtctgtgattctccctttgttttccctccgcctctggccgcgctttctgcctccccccagcgtgtgcttctggctcagggcctcagtttccccatcgggacaacgcagaaggtaacgggccgtccaggaggactaagggcgcgaagcctccgccccgagactgagcttctgcacgcctccgtctccagggtcctctgcaggcccccacattccccatctcggcctgcgctccgcccctcggaattcccggctccgcagggggggcgggtctggccgggaggaggggcggggaacgggctagaaagtttgcagcaacttttctcgagcttgcgtcccaggagcggatgcgcgtggcgtgcgcaggcgcagtggaaggaggatggccgcgcgcgctgccagcccagccccctcttctcgacgctcggtggcacagctgggccacagctgggcgggggcggtgcctccgggtggcccgctcgccctcctattggccggacgccaaagccccgccccgtggcttttcctcccccaaccctgattcggccgcttcgcatcccgctagctcctcccagaccttcggccgcctccacacgcctccggattggcccgctgcggagcctccggcccacaacgcaaaccgcggacactgtggagtccagagctttgggcagatggagggccttttattcgcgagggtcgggggtgggggtcctaggtggggacagacaataaataccgaggaatgtcggggtctcagtgcatccaaaacgtggattggggttgttgggggtcctgtagcctgtcagcgagtcggaggacgaggtcaataaatatccaaaccgccgaagcgggcggagccggctggggctccgagagcagcgcaagtgaggaggggggcgcgggatccccgaaaaagcgggtttggcaaaagcaaatttcccgagtaagcaggcagagatcgcgccagacgctccccagagcagggcgtcatgcacaagaaagctttgcactttgcgaaccaacgataggtgggggtgcgtggaggatggaacacggacggcccggcttgctgccttcccaggcctgcagtttgcccatccacgtcagggcctcagcctggccgaaagaaagaaatggtctgtgatccccccagcagcagcagcagcagcagcagcagcagcagcagcagcagcagcagcagcagcagcagcattcccggctacaaggacccttcgagccccgttcgccggccgcggacccggcccctccctccccggccgctagggggcgggcccggatcacaggactggagctgggcggagacccacgctcggagcggttgtgaactggcaggcggtgggcgcggcttctgtgccgtgccccgggcactcagtcttccaacggggccccggagtcgaagacagttctagggttcagggagcgcgggcggctcctgggcggcgccagactgcggtgagttggccggcgtgggccaccaacccaatgcagcccagggcggcggcacgagacagaacaacggcgaacaggagcagggaaagcgcctccgataggccaggcctagggacctgcggggagagggcgaggtcaacacccggcatgggcctctgattggctcctgggactcgccccgcctacgcccataggtgggcccgcactcttccctgcgccccgcccccgccccaacagcctacagctgttgttagtccactcgcacgcctcgaatcccgtccgaactcgtcattggctgcttcctagcggcctgtgttgattggctgcccgaagatccgccctcctgccgtgggcccagccccgcaaatgcgcagctaagcgggtggcaaggggcgggtggagcgcggggcgcgacggcggaggggggcgtgggcagccggacgtaccctggcagggagcagcaggtggcggcggtgcatggggcctggccccaccagcgggcactggcccacagccacggccggggggccatctagctggagagagaagggacaggtgacccgatcggagcccagcccagccctcagcggtggggcgagagacagcgaggggaatcgaggttggggaggttatctagggagatcccggagggaatctggtgaggcctgaacggagggagatctggggctgaataaagggcttctgccctctaaagt

SEQ ID NO: 1561075 - DNA, 4001 bp, Homo sapiens
aaatcatggggctcatactcatccactgatctccccaaccccagaatggagcctcagtttccccatctttgtctagaggattaaatgagatcaacctgttgtctctaatatggggtattcccctctccctccaaccatcagagcaaaccccaggcattggaagcaaatgcttttctctgcacaaactccctgctgatggtcctggccagagcccgggggtctctggggacccaagaggtaactcagagagtgagagccagagagattgactgtgagaaaccctagcacagatgagaaacagaggcagagactgagggaggggcctgaggaatacatccctcccgctgccaccccccagccccctccaccagcacgtctctttctctctctctcattctcctgacttcacactgatgtattttgagaaactcgtgaaaggaggcgagaaaaagggtggggaggggctggaaaattggaaaaagaaggggtgaggttatctcagcttcccctccaccaccaacctccgtcactgcaccatcctcctgcccacctccccccacttctgtccagccttattcttgtctctcatgttactagagggtggggtaactttggagctaagaggtgatctgcagcaagcaagactgatgttagacttagcaaaggacccccatggcctagcgaggtggactgaagctcagcgaaacacagggtcagggctgtgggccaaggggacagggcctgagggcacggcggcaggggcatggtgctgatgaggccatctccttcgtgcactgtggccagatatatttttaggcttttccgcagctgagtaatttatctgacttagagccaaagctggggttgggggtgagagcctgtggggaggtgtccagattatcctgagggacactcggttcactggggtcatcaacctggttgggagggagtccctgtcagccccagcctgtatcctttgggaaggctgtcctaccccaggagccgaaatttttggcctctaactcctttctctcccagggacccagggtgctgtgacttcttccacccagcctcaccccctcaaggacaacgggctatgagccccaatccgctttagctgcagattaaactccatgccagacagaaacggaaaaagacacagagagacggagagacccatggtgggagaattaaaacacagagacggggacagggacccagagaagtggggaccagagatccagggaagaggagagacccagaaagagggggacagagactctgagtcaggagttgatagagatccagtgagagcaatggccagagaaccagagagaggggcacagagacgcaaagaagcggaggcagagatctagggagaaggaggggcccagagagaagggagccgagatctggaaaaagagggagacggagacccagagagaaaaggggcagagacatccagaaagagacggggacagagacccagaagtggtgggggaggagccagagacccgggagagaggcatttacagcaccagagagagtggagccgggtggggtggggtgcagaaaaaggaacaggataatggacaaggctcgaccagggagaacagcgccgtcggagcccacggcagaaaactggacagatgggtggacccccatgccggggtatcgcccgttcatctgtcagtctgcgcccaggtgggaattagcatcctcctcagatcctcccactcttctcccgggacccccgccaggctcaccggtgcagcttcccgagagcacgacccgctagcttccgaaactcctcctggcggaactccatggtggcggctcctgccgccggtcaccccgcgggtcccccccgccgatccccccgcccgcgggcccgggcggccgcgtccgggttcccggggtccagccccggcccggccggccccgcagctccgctcggggggaaggaggctgcaagtgcaggcggcccgggggctgtcacaggactcagcgccgggggcggggcgcgggaggccccgccccggccccaccaggcccctcccctcgtctgtcagacccgccccctctcgcagccctttcatcctcgtcctgtcccctcctgagccttccaagaccacgcctgtgggttctgaactcacgcctccgagttcacgccccccaattctgttccttccccaggctactccccctatccctgttccatcacccctggctcctacccagattttctctcctctcctgagttctcatccccatcatttctctccccgacttctgttccccctaattgcgtcccttacaatcctgtcttctctgactttccctctgcgttcatcctccagttccttcactcctccccgcccccaccccgcaattccatccccatcccacctcgtccccagttccaatagtctcatccagggagttctttgttttctcattcaagggaaattctttcccctcaagtccaacgcctacttcgatccacctgtcgtccccctctagtccctttcgccacccgggttcttcacccttgagctccatctcctccttagtttccatctttcccctttgaatcccatactcctccagctctattctccctccggcgtctctctcctccctgttgcttctctccctgagtttcattccctaaccccgattttcttccctctggcttccgccccccacagttatatttcacacaccccgccagtgccagctgcgaccccatagtctccccattgtgttatttctctgctcctctgggatctgtccgcgctctgagttcttccctagctccgggggatccattcctctatttgagttctgtctccaccccctgagatctgtcccgccccctaaattgtgatccgcaccccctggcatcctcacccgccctctgaatttgtctcctcccctaggatctgtcgctgacctgagttctgcccccgccctctgagttctctccccaccgttggagttgtgtccccttctcctaggatctgtccctggctctgttcccgccctctcagttctgtccttgccccctggaatctgttcctgccatctgagttctaccccttccccacaggatctatctctgccccctggaatctgtccccacccaccgagttctggcctccgtccctgggatctgtccccgccctctgtgttctacccctgccccatgggatctgtccccgcccacccagttctccccgccccctggatctctccctaccctcccagtcttgccccggccccatgggatctgtccccgccctccgacttctgaccctcgccactgggatctgtcctcgacctcccagtcctgcctccgcccccggaatctgaccccgcccaccgagctctggcctccgcccctgagatctgtccccgccctcccagtcttgcccctgccccatgggatctgtcccccgcccaccgcctccgcctctgggatctgtccctgccctcccagtcctgctcccacccccggaatctgtccccgcccaccgaactctgtctccacgccggaattccagcgccgccccgttgggtagagcccggcccttccctgtcctgggcccgcagacagggtcccgccccgctcctgtcctcagaccagcccatctcccggcgctgagtccacctccagatccaggccccaggagggtgatcctttccccactacctccccgcgtcgggccgcaaatgcatttggtattaaattttcatgatgcggcccgcggtggggtgggaggagcagacggcgcgtcgggcgggcgccaaggacggggtggccgggaagccactgaccgccgcagcctctcgcttccagccttgactggctgtgtctctgggtctcacagctttgagaaacccctgggaccccagaacggaggacgctgcgggtctgaggcaggagggaggtaggaactgggactcgtggggctgaagtagcagcgcgggagccgctc

SEQ ID NO: 1561076 - DNA, 4001 bp, Homo sapiens
gaggatcactcaagcccgaggaggttgaggctgcagtgaaccaagatcaagccactgcattccagcctgggaccgagtgagactctctcaaaaaatatatatagcagctaagccatctacagcacctaccgtgtggcaggcaggcattttggcctgtgcttgacacaaattaacccatttcatcctcacgacagccttggggataatcactattaccccattttacagaaaaggaagctgaggcccagaagggtaaagaaaattgcccagctgggaaatagcagagctgggatttgaacccagccagctggctccatagccccaagcactccacatgctccctctcaccaatgactggtgtacagccaacgccatgtgcccatatacaatctgtcaaatgttaatagtttgggtgcaggttaaggttcagtagtatgggacagtgtccatggatggccacccatgcatcacggtacagtaaaataacgtcatggtagaggaatgagtttggccgggtgcggtggctcacgccagtaattccagccttttgggaggctgaggtgggcagataacttgaggtcaggggttcgagaccagcctggccaacatggcaaaaccccgtctctactaaaaacacaaaaattatccaggcgtggtggcacacggaaggctgaggcacgagaatcacttaaatccaggaggtagaggttgcaatgagccaagatcgcaccactgcactccagcctgagcaacagagactgtctcaaaaaaaaaaaaaaaaagcatgagtttattggtgtgtgaccacataggtgtgtatgtgagtgtgtattgtgtgctcttgagcctgtgtttagatgttggcgtggctggtggcatcactgaatggctgtgctacaggggtcttagtacacagtgagcgtgtgtatgaccgctggtatctggccatgtgtttgtcgagatgctacagcctcagctgagtgtctgcgtgaatgtgtccagctgtatgtcatttggttataagcctgtgtggcaggccaagtgtgagctacagctgttttggcacgcaggggaggcctgtgctcataaacagcctcggagtgggtgtgcctgcctgaaggtccgcctgtaccacccaggcccaggctgggccaggacccagctaatctcccccagccagaaggtgctcccaggcttcaactcgggacaccaagcctgccccagtctcgcatctcagcctgcactgacgccccagaggctggagaaccctgttccgtgactcatcatttccttcccccaacttccaggaagtccccaacgtggagacactgaatgagcaagccctaaaggcaagcgcaagggggcctctgccccccgccctcctcaaagtgggggaggccattcttgggggcgcggggcagaggccaggagaaggaaaagaatctgctcccctttctaactggtcctcttctgggctgcctgctagggggtggcccagacagaggaggaaacgggagggaaaggcaggggtggcagggctgatctaaaagataaaggggaagcggccagaccccagctgaaatgggcgggaagcggaggccaaaaacagagcctggttatgtccgagtgacacgtggtgtgggggtgccccagggctgggaagagggcctggtgggagttactcagatctcagatcctccaggggctccttacccaaactctccaaccctggccccaaattatatctagaagccccatcttggggcccttgaccacgcaaagattccccccgcaaaagttcctcctggggtcccctcccctcagtgtctttctcccctaggcagaccctcctatgtctccccaaatcactttcttctccctctataagaccccacttatgtacccaggcccccagatttagaaaccccttccccaggagactagactcacactcccgagggctggagcctcccctcaatatcctgtcgagttttcctaagactctagagggaagtctctgctccaggggccccaaagccccgtcctgtccacgtgaccactcccgccatccgtaacactcttccccacctcccgggggagcgggagctgacctcgcaagatccaggaacgaatcgagcacctccttgctgggggcattttcggcactgcccgcggctcccacggaggcgttgatggcggcggaggcggcgcccggctgcagagccagcgccaagcccactccgagcgccgacgccagcagcgtggtgaccaggaaaaagagcagcgcccaggcgcccagacggccgagcgcgccggggtccaggctggcggcgccgccgatcaagctgcacaccaccagcggcaagatgatcatccgcagcagacgcagcagcagctcgcccgggaagacgaaggcgctcaagcgctccgggcccaacgccagcgcacccccggcccccgacacccccagtcccagcgccacgccggccaccacggccaccactgtcagcagcacaagcaggttggctcgaaggcagcggcgcacctggtcccgggaaccgcagtagccgcctgctgccgcgccttggtcctcgatggaggccagcgccaggcccccgttggcggtgggctccgccgctgcgagccccttggagtctcgaggaggatcggccaccatgatgggaagcaccggggtttcttagcgcctggaagctggctgggagcgcttgggctccttcccaggacccgacgttcctaggactgagttgagtaacagcacctggagactggaactttggagggctccttagagttgtgagttcacagcactgaagttccttggctcttggaagctggagtgtttaaattccccaggctgggcgctgaggcttctctgctctgccccgtgtgccagatgtccgaaagctgggagttcggagcgcccgggttccttggccctaggagctgggaatacgagagtttctctgggtgggacgtggggcccttggctccaggaggttgagtgcccccagatggcggaggtctgcaggaggctaggttctggtggcgcagatcccggacgcctggatccgggaggcggggacccgggctgcctgggtcttggacactgagggctgggatgccagaatctgggggccgggaagcggacctccggaaacaggggacccaggctcttaggtccgggagggtgggatgcgggcccctgtgtacggaaggcggtggtctggtgtccgggagtagcggttaccagccagagaaagcctcccgggcgtgccgcgtggctctgagcccgtttagcggaagctgccagggataagggtagggggcggggcttgagaaggcggggaccgaccctcgggcgccgattggctgcagagcgttcggagactggacgagtaggggcggggctgatacccgagatgggccaggtcccccatagaaggcagattaataatacccatctccaggagccgggcccagagacgacggggcggggccaggaaggggcggggccttgggagggtgctgtttcccgccaaaggaactgggttgtgggttggagcccttaaaccacaggggttcgttccctggtgcgagggtcgctagaaagctccggtggtcctcggtgattcatttgcaactcaactcagctttggaactcctcagccctgagtttggtctttagtcgcctctgagaactttaattcctcgaatataaagtgcaggtgttaaaagcttttgtctcatatgattgctgtaagatttaaataaaattgatgtatttatttagggagccgtggctcaagcctgtaatcccaccactttgggaggtgaagcgggcggatcacttgaggtcaggaggtcgagaccagcctggccaacatggtgaaacccgtctctactaaaaatacaaaaattacctggtgtggtggcacgtgcctgtaatcccagctactggaagcctgaggcaggagaatcgc

SEQ ID NO: 1561077 - DNA, 4001 bp, Homo sapiens
taaagaagggtggtagaaagatctacagagaggaagcagaatgtgcaacagcctagaaatgagtgcaacttgggcattcaaagaagagccataatctactgtggctagagtagaataatctgggcagggtcactagttaaggatgggcagccaggcgggctggcaggggtttgacctcacagggagcccttggtcatagactgtagcaaggagactggactttctcctgaaggcactgaggcacatggcagggctctgggtactgcagagatagggtcacatttgtgttttgaaaagatcctcgggcggagcacggtggctcacgcctgtaatcacagcactttgggaggctaaggtgggcagatcacctgaggtggggagttccagaccacactgaccaacatggagaaaccccatctctactaaaaatacaaaattagccgggcatggtggcacatgcctgtaatcccagctactcaggaggctgaggcaagagaataatcacttgaacccgggaggcggaggttgcagtgaaccgagatcacgccattgcattccagcctggacaacaagtacaaaattctgtctcaaaaaaaaaaaaaaaaaagaaagaaagaaaagaaaagatactcagggccaggagcagtgcctcacgcctgtaatcccagcactttgcgaggcggccaaggtgggcagatcacttgagcccgagagtgcaagaccagcctgggcaacatggcaaaactcagtctctataaaagatacagaaattagccaggtgtgttatagtcacagctactgggaaggctgaggtgagaaggatcacttgagcccaggaggtggagactgcagtgagctgtgatcgtgccaccgtactccagcctgaatgatggagagagatcctgtgtcagaaaaacaacaacaaaaacctctggctggctgccagtttgagcaggttgagggtggatggaagggggcagggagagggcagcatggaatggggttggggggtgagggagaaaggaagagcctgggcacctggggtgggaaaagaggggacaaagtagagacctatccagaaggcagaaaagacagaaattggggaaggactgcagagtgtcaatcaaattccacagcaaagactaaggcagaaataaaaccaaaaaattatagcaataggcaaagaggtagagcccccgctgcctcccactgctctcaccttcaccctggttccggtgatattcctctcttcataggtggtagagtactgtaggtggggttgggaagagtcagtgtccatcgttaccagggcctcccaaccccatgccaagctaacaatgctcaaagcctgcccttccacatcctttcaatgtgatctcatttcatctgctggcaaccccatggggcaggatgatcaatacccccattttccagaggtggaaaaccgaggctcagagaggtaaacacatttacccagagtcacacagctagaattaaaactcacaggaggctctgagcccgtattctcattgacatgcatttttccaggaactaaccaaaatcaggtagcaagggctccccctggctggcatccctccctgtccacccccatcccctcaggacacccctgaggactcactgagcgaaaggctgctgacaccaggttggaagggaagatatttctgcagagacagacacacagagggttattagataccatagtgggagggcagcattgtctgagaggctgggttggcgttttaaggcagcgagtggaagctttgggggcccgcctgcacgcaaatacagcccctactcatgcctcagcccggcagggttggaactaggcttgcacccctttgcaggacttggggagtcagcctccttcagccccaagaggctggcgtgctagccctgaggcattgtgggttcggggtgaggaatgctggcctcccacggcaggccagggcaggtcgccccgggcctcagctccaccccatgcagcaaacttaataccctggacagcttgcatcagccacttcctcctggagggcctgccagcggctctgagagtatgggggaggatctgggtgtgttgggaggcggtggcggggagggagaaaagggacggcttcatatctcatgaatatgcatctgtgtttacaaggctacccttactcttgtgtgacagtgtctgccttaagatgaaaatagtagctaaggccaaggcgccatggctcttgcctggaatcccagcactttgggaggccaaggcagacagatcgcttgagccaggagttgaagaccaacctgggcaacatgacgaaaccgtgtctctacaaaaaatacaaaaattagccaggcatggtggcatgtgcctgtagttccagctactctggaggctgaggtgggaggatcactcaagcccgaggaggttgaggctgcagtgaaccaagatcaagccactgcattccagcctgggaccgagtgagactctctcaaaaaatatatatagcagctaagccatctacagcacctaccgtgtggcaggcaggcattttggcctgtgcttgacacaaattaacccatttcatcctcacgacagccttggggataatcactattaccccattttacagaaaaggaagctgaggcccagaagggtaaagaaaattgcccagctgggaaatagcagagctgggatttgaacccagccagctggctccatagccccaagcactccacatgctccctctcaccaatgactggtgtacagccaacgccatgtgcccatatacaatctgtcaaatgttaatagtttgggtgcaggttaaggttcagtagtatgggacagtgtccatggatggccacccatgcatcacggtacagtaaaataacgtcatggtagaggaatgagtttggccgggtgcggtggctcacgccagtaattccagccttttgggaggctgaggtgggcagataacttgaggtcaggggttcgagaccagcctggccaacatggcaaaaccccgtctctactaaaaacacaaaaattatccaggcgtggtggcacacggaaggctgaggcacgagaatcacttaaatccaggaggtagaggttgcaatgagccaagatcgcaccactgcactccagcctgagcaacagagactgtctcaaaaaaaaaaaaaaaaagcatgagtttattggtgtgtgaccacataggtgtgtatgtgagtgtgtattgtgtgctcttgagcctgtgtttagatgttggcgtggctggtggcatcactgaatggctgtgctacaggggtcttagtacacagtgagcgtgtgtatgaccgctggtatctggccatgtgtttgtcgagatgctacagcctcagctgagtgtctgcgtgaatgtgtccagctgtatgtcatttggttataagcctgtgtggcaggccaagtgtgagctacagctgttttggcacgcaggggaggcctgtgctcataaacagcctcggagtgggtgtgcctgcctgaaggtccgcctgtaccacccaggcccaggctgggccaggacccagctaatctcccccagccagaaggtgctcccaggcttcaactcgggacaccaagcctgccccagtctcgcatctcagcctgcactgacgccccagaggctggagaaccctgttccgtgactcatcatttccttcccccaacttccaggaagtccccaacgtggagacactgaatgagcaagccctaaaggcaagcgcaagggggcctctgccccccgccctcctcaaagtgggggaggccattcttgggggcgcggggcagaggccaggagaaggaaaagaatctgctcccctttctaactggtcctcttctgggctgcctgctagggggtggcccagacagaggaggaaacgggagggaaaggcaggggtggcagggctgatctaaaagataaaggggaagcggccagaccccagctgaaatgggcggg

SEQ ID NO: 1561078 - DNA, 4001 bp, Homo sapiens
caacttccaggaagtccccaacgtggagacactgaatgagcaagccctaaaggcaagcgcaagggggcctctgccccccgccctcctcaaagtgggggaggccattcttgggggcgcggggcagaggccaggagaaggaaaagaatctgctcccctttctaactggtcctcttctgggctgcctgctagggggtggcccagacagaggaggaaacgggagggaaaggcaggggtggcagggctgatctaaaagataaaggggaagcggccagaccccagctgaaatgggcgggaagcggaggccaaaaacagagcctggttatgtccgagtgacacgtggtgtgggggtgccccagggctgggaagagggcctggtgggagttactcagatctcagatcctccaggggctccttacccaaactctccaaccctggccccaaattatatctagaagccccatcttggggcccttgaccacgcaaagattccccccgcaaaagttcctcctggggtcccctcccctcagtgtctttctcccctaggcagaccctcctatgtctccccaaatcactttcttctccctctataagaccccacttatgtacccaggcccccagatttagaaaccccttccccaggagactagactcacactcccgagggctggagcctcccctcaatatcctgtcgagttttcctaagactctagagggaagtctctgctccaggggccccaaagccccgtcctgtccacgtgaccactcccgccatccgtaacactcttccccacctcccgggggagcgggagctgacctcgcaagatccaggaacgaatcgagcacctccttgctgggggcattttcggcactgcccgcggctcccacggaggcgttgatggcggcggaggcggcgcccggctgcagagccagcgccaagcccactccgagcgccgacgccagcagcgtggtgaccaggaaaaagagcagcgcccaggcgcccagacggccgagcgcgccggggtccaggctggcggcgccgccgatcaagctgcacaccaccagcggcaagatgatcatccgcagcagacgcagcagcagctcgcccgggaagacgaaggcgctcaagcgctccgggcccaacgccagcgcacccccggcccccgacacccccagtcccagcgccacgccggccaccacggccaccactgtcagcagcacaagcaggttggctcgaaggcagcggcgcacctggtcccgggaaccgcagtagccgcctgctgccgcgccttggtcctcgatggaggccagcgccaggcccccgttggcggtgggctccgccgctgcgagccccttggagtctcgaggaggatcggccaccatgatgggaagcaccggggtttcttagcgcctggaagctggctgggagcgcttgggctccttcccaggacccgacgttcctaggactgagttgagtaacagcacctggagactggaactttggagggctccttagagttgtgagttcacagcactgaagttccttggctcttggaagctggagtgtttaaattccccaggctgggcgctgaggcttctctgctctgccccgtgtgccagatgtccgaaagctgggagttcggagcgcccgggttccttggccctaggagctgggaatacgagagtttctctgggtgggacgtggggcccttggctccaggaggttgagtgcccccagatggcggaggtctgcaggaggctaggttctggtggcgcagatcccggacgcctggatccgggaggcggggacccgggctgcctgggtcttggacactgagggctgggatgccagaatctgggggccgggaagcggacctccggaaacaggggacccaggctcttaggtccgggagggtgggatgcgggcccctgtgtacggaaggcggtggtctggtgtccgggagtagcggttaccagccagagaaagcctcccgggcgtgccgcgtggctctgagcccgtttagcggaagctgccagggataagggtagggggcggggcttgagaaggcggggaccgaccctcgggcgccgattggctgcagagcgttcggagactggacgagtaggggcggggctgatacccgagatgggccaggtcccccatagaaggcagattaataatacccatctccaggagccgggcccagagacgacggggcggggccaggaaggggcggggccttgggagggtgctgtttcccgccaaaggaactgggttgtgggttggagcccttaaaccacaggggttcgttccctggtgcgagggtcgctagaaagctccggtggtcctcggtgattcatttgcaactcaactcagctttggaactcctcagccctgagtttggtctttagtcgcctctgagaactttaattcctcgaatataaagtgcaggtgttaaaagcttttgtctcatatgattgctgtaagatttaaataaaattgatgtatttatttagggagccgtggctcaagcctgtaatcccaccactttgggaggtgaagcgggcggatcacttgaggtcaggaggtcgagaccagcctggccaacatggtgaaacccgtctctactaaaaatacaaaaattacctggtgtggtggcacgtgcctgtaatcccagctactggaagcctgaggcaggagaatcgcttgaaccccagaggcagaggaagtcattcaccttgaggccacacctagagaggatgacacgtgcatgcccacctcccaagcccctaaccgcacccactctgctgcctccccaaattctctgttagtggccgtttgggaggttaacaatgaattatgattccttactccacctgacagtgttgaaatcctcattcctttcccatctctagcctgttctgtgacatttcaggctttcatgcttgctcaaagattgtagtggtaatgtcagaagcttcctcctacagcagctgtgaggcctcaggtaatttacaacctctatgaggctcagtcttcatatgtgtaaatgggaataataataagtcataccgccttgagtgttgcaagggttcaaatgagataatacggccgggcgcagtggctcacgcctgttatcccaccactttgggagttgatgcgggcagatcacttgaggtcaggagttccagacgagcctggccaacatggcaaaaccctgtctctgctgaaaatgcaaaaattagctgggtgtggtggcacatgcctgtaatcccagctactcaggaggctgaggcagaagaattgcttgaatccaggaggcagaggttgcgaagagccgagatctcaccactgcactccagcctgggtgacagagtgagactccacctcaaaaaaaaaaaagttatttatttgtgctttaaaattttttgttctttctctcttcttttgtttctaacaaaaatgcccttcagaagaaagtcaaatactactgctgcgattgctgttattgttattattactgaagaacaagctggattcagtggcatgcacctgtagtcccaggtatttgggaggctaaagcaggaggatcccttgaggccaggagttcaaggctgcagtgagctatgatcgtgcccacatttagccactagactccatccggggcaacatagtgagaccttatctttaaaaacatgaaaataggccaggcatggtggctcatgtctgtaatctcagcactttgggaggccagagtgggcagatcatgaggtcaggagatcgagaccatcctggccaatatggtgaaactctgtctctactaaaaatacaaaaattagttgggcatggtggcatgcacttgtagtcccagctactcaggaggctgaggcaggagaatcgcttgaacccgggaggtggaggttgcagtgagccaagatcacacctctgcactccagcctagtgacagagtgagactccgtctcaaaataaataaataaatatt

SEQ ID NO: 1561079 - DNA, 4001 bp, Homo sapiens
gtaccactgcactccaacttgggtgacagcgtaaaaccctgtctaaaagaaaagaaaacagcatcttagcacctgatgaccataaaatagttgccaactgtggttgataaaaagcagaaacctaactcacacaaaattaagaatagagtaaaatgctacagtgtgagaatgtcttactatcaatttttctcagtcctgtctgcatcacttataagtatataccatcatgattgtcaattaataataatactagttttaaaaaatgtttgacttgaaatgtgatcttagactccacttgggcctctctgggtctctctcttctcccccaccctgggctctctcttttctaggctttcctgggtctaggctttcttttggacctacctcttgggtttcctgctcagaaaatgtcccttctagtgttcccagtttctacagggtgaggggtgagggtgggtctttcccacttggttctcccgacctctagacacttagatctgatgagatgtgtgggctgcttctcggagcctcttacatccctaaaactaaagcaagctacagtgagcaaactgaaaatgctttctgtacattttatgtcaatgctatgctagccagaggagtgagtgagggaagagagagacggcatggaaaccaagtacatcacacacactcagacacacacacgcacacataacctcgaaaacctcttgtatgcaattgacatatccacaaccccagacagacacagtcacatgcaaactcttcagacatgcaaccacacacacacccacacaaaccttcagaaatgcagctccatgcatgcagtcatacaatccctacacacacacacttcccacattcatgtacaccctcaggcacacaaccacacaccttcagaaatgcaattccaggcacacagttgtacaattctgcacacagacacactcacacatacacttgccacattcatgtacaccctcaggcacgcaaccacccacaccttcagaaatgcaattccaggcatgcagtcatacaattctgcacacacacatacacattcatgtacaccctcaggcacacaaccacacacaccttcgtggctctgcacaactacccttcatgaattaaatcttacagaggcagtgacagccatacaattcctacctacacacagaaacacacacacacacactctttagggcacaaaacacaaacttcagactttcaaaatcatcctcacatttaaacattcagctccacacacctgttcaggacggcgatcccactcacaaattcagtctctctctctctctgtcacacacacacacacacacacacacacacacacacacacacacacactaatgcccagaccctctgcagcctcagccacatcagatacatctgaaattggtgaaataagccctctgacagagaaggcaaccgagccctataaatgcacaaggcatcgggctcggtgctggaaacgtgcctgtgtgcggaggccacgggttggggaggtggggagacgggcagggagacccggggataactaaggggataggaaactcaccagaacgaccaggagaaaagcggtggcaacggctctaaggggcaagcaggagctcagagacaaagggcggcggagaagtggggacgtgggcgcagggagcgccccacacgcctgaccccagcgcctcggatcccccacctgcccgcaacctccgcgccgcagccacaccgagtccccgcgccgagccgcggagtccccactcaccggcgtccggagcggcgggggcggcctgcccgcgcctcggcctgcgcgctgcgcccggatgcaggagccggagcccggcgaagcgcccggccggggccgcggggacccgccagggactgtgcagcaccggcgcggggaccggaccgtggaggcaccggcgcggagccgggacgcgctatgctgcgggagggatccgggccggccctgcgctcacgtgggtgtgggggcaccgagcggccgggggagggggcgggatcccctccgcgatgccctccgcctcccccgcgcccagcccaggctccgcagccgtgtgggagaagggggacagcgtgcttgcgaagggagggggactgggggtgggcgggggtgagtggcctctccggcatccagcccccgccccctgctcggagccgcgcctccgcgcccccgccccctaaaccgcctccggagccctcggaggccccagcatccctggcggagcgcggggaacaggccctggcaccgcgggacccgctccagcagcctcggcggaggcctggggaaggcgcggctctagtgtcccagtaacaacagccagggagagggctccgctgcccccttctccttgcgggtgcaccttccggccttggccacttggctgctgtgtgcccttgggccaactcctctccctctctgagcctggcttcctccgctaaacaaggaagatggcttggccgaccccacagaaaattaaagctgagaaaattaaagcgcgtgaggctggaaatgctccgtgccagcgcgaagcactgggcaaatgggagatggataatgtcgttcctattgtaattaatattattctttgctgtctttagagcacaccaggcaaggtgcactcgacttttcttctcgaaaggcaatgacttggttgcttcccacatcttctgcctctcctgagagctaatgccatttaaagatctgagcatcaggtctgtcgtatgaataaaaactcagtgcaggctgggcacggtggctcacgcctgtaatcccagcactttgggaggccgaggcgggaggatcacttgaacacaggaggcggaggttgcagtgagccgagatcgcaccactgctctccagcctgggtgacagagcgagactccgtcaaaaaaaaaaaaaaaaagtcagtgcacgttcaatgttttttattattgttgttgttgttgatgaagtgttgatggcgacctcctgaactaggcaggctcttttattaatacttatatttaatctacacactcctataaagtatatatcacttcctctattttcagggcggggacaggtgctcagaaaggttcaataacttgtccaaggtcacacagccaggaaacagatgccccaattctaattctttgcatgcatcgccctggctctgcttctttgcaacaactcctagataggtgattctcaaacttagctgtattttaaaactacctggagaggttttaaaaattctgaagccagcctgacatagtggcccatgcatgtaatcccagcacattgggacgccaaggagagaggatcacttgagcccaggagttcaagatcagcctgggcaacatagcaagactctgtctctatttaaaaaaaaaaaatcaaaaaattagctgggcacacacctgtagtcccagttactcaggaggctgaggcaggagggtcacttgagcttaggaatttgaggttacagtgagctatgattgtgccactgcacttcagcctggacaacagagcaagaccttgtctaaaaaaaaaaaaaggaaagaaaagaaaagatatctgatgcccaagccacaccctataccaagcacatcagcatacctggaagtgggacccaggcatcagtatatttgaatgctccccaatgtatggctaaggctgaatctctgtcctagatgtcagattcccctggaccacattggcaacccctctctgcagccttctcactccgctgcttcagtcactcactgtgcttagacgattctgcatccttcttgaacctagagctgcccctgaactcctgcctcttacggtcattcactccacaaatacttactgtgcacttggatgtgctagaggctggagactcagcagcgaagacaacagagccctcggtctgtcacgcaaaataataagtaaataaaatagcagttgttccctggcaattggccttgcaagccctttacacccg

SEQ ID NO: 1561080 - DNA, 4001 bp, Homo sapiens
caggaaatcgatatcatcctgaccaatatggtgaaaccccaactctactaaaatacaaaaaattagctgggcgtgttggtgcgtgcctgtagtcccagctactcgggaggctgaagtggaggaattgcttgaacctgggaggtggagattgcagtgagccaagatggtgccactgcaccccagcctggtaacagagcaagattttgttaaaaacaaaagaaaacaaaacagttatatgtggattttttactgtgtgggggttggtgcccctaacacccaaattgttcaagggtcaaccctagttgcaaaagagaccatatggcccttgaagctgaaaatgtttactatccagccctctaaagcaaaagtttgtggacccctgcataagccaaccatactcccatcccaccctctacccactaagctgtcacctccatctcactcaccttccacaccttaatcgacaccccactccctgcacatccataccatagcccagccaccctccctggttgcccttccaagactttctctcacttctttgtgatactaagccccttgcaggctggcattttacctccaaggaaaaggacaggaagcctactgagatgagtggtgtggggtcatatggggtctggaacctgggaccgattgggacctgggctttgtttggccaaggacgctggaccagacacaggctccatgtttgaggtgccgcgtcaaggaagtggtcccatgcttgggatggccttggctctgggttcaagctgaggctctagacgggtcttggaggccaacactggcctgggctctctcacctgtgaccaggctggagacaatgagaggtaacaccagcatctgcagcatcctcatcagaagctctccaggaaaagagaagtacttgatctggcggtaggtgagctgatatgggcgcagggcaaaggccaggctgacccctagggccaaaagaaggggtccatggactgaagtctgggtcgctcagccccaggcagggtccatccatcccaagaagggtagggcaagggtgggagtgagggagagaaatatcctatgagtgtgtgtatttgtgtgtgcactgatgtgtgcagacattgtagaaatgtatgcatgtatgggttaccatattgatattgtgtaaatgtgtgtccgtgtctgtgcaaatgtaaatgtgtaaatgtgtgtgtatatatccaggatatgtgacggtagacattcacttgtgaacaggtataggtgtctgtatacaggggcatatacacatgaatctgcacaggtgttttcctggacatctataggtgtgatttgtgtgtatcttactattttcaaacatgggagtgtacgtgttcttaagctcataagtgtgtgcacgtgtactcaagagaatgcatgtagagatgtgaatgtgtttataagttccaacatacatgcacaagtgtgcatgtttgtgtttgcacctataagttcaatgcacgcatatgtgtgtgtgcatagtaaagtgtttgtacattgtatatgtatatatgtgagtgtgtgtgtacacatggatatgcatgtaacattgtgtgcacacacagttgtgtttgcacacatgtgtattcatctgtgtggtgtgtctttatgtggggggttgagggtgactggtgggactgggacgtgtgtgcaggtgagaatgaaggggtgcagcaaagagatgtgtagaggccaggaatttccctgaagtccccgcctttccctgaagtccccgccctccaagaggcagagctcaccaatgaccacggcgctgaccgtcagcagaatgaaggcgtttcggcgcaggaagcgcagcacgtgctcgagggtcatggtctgcaggcgcaggcgcgtgcgcagtgctctctgctgcaggctttcctgcagccgctgcagccagcccacccggcccagccgctggccgctctcccgcaggaacaggctgttgccatggctgctcatggtctatctgcgggaaacagagaagcctggggctggtgagggccaggacagaaggccggcgtgggcagatggcgaaggctgcgaagggtaatgagcgcttcctgaggactctcagaaggcgggggtggctgggtgttttggctcacgcctgtaatcccagcactttgggaggcagaggcaggagaatcacttgcgcccaggagttcaagactggcctgggcagctaggggtggtagtcctaaatatttgggaggctgaggcaggaggatcacttgagcccaagagttcaaggttacagtgatctatgatcttcccagcctgagcaagatagtgagacctccacccctccaaaaaagcacaaaggccaggcgcagtggcccacacctgtaatcccaacactttctaaggccaaggcaagaggatcgcttgagcccagaagtttgaggctgcagtgagctgtgactgcaccactgcactccagcctgagtgacagagcacagccctgtctctaagaacaacaagtaaataaaaatataactaaaaacaaaatggcaggggagggggaaggtaagtctgttgcgatgtgcccggttctaaggacaggtcttggcaggaaaacgtcaagtctccagaatcattcctgagaatggctgggaagaggaggaaaccacaaaaataatggacctttttgacacaccctgactccagcccactcttatttcactgagatcatcacaagcctctgggggctgccccagtggctcaagggaaattaacaagcctttgtgaagtgccagctgcatacggagccctagacaaagcacccggaggctagtcccccaaattaggacggttttgtgtccagcctggaggcttttcacaaggacaaaatcagcaggtgcctggcaaacagcaggtgcccagtaaatgcagctattctgcctgaatgcccaggtgagcaacagggagagcggggagtcaggagagcggggagtcccttgggaatgaaatgataatgattcttggccacagtgtgatgttcatgagcccctctggggtggcaggcactgtactgatgtttcccaaactgcaggcttttgcgtctcctctttatatttggccatatccatgtgtccttattcacttacctaaaaaacagtaccgaaccaggcgtggtggctcacgcctataatcccagcactttgggaggccgaagcgggcagatcacttgagctcaggagttcgagaccagcctggccaacacagtgaaacaccgcctctactaaaaatacaaaaattacccaggcgtggtggcaggtgcctgtagtcccaactactcgggaggctgaggcaagagaatcacttgaatccaggaggtggaggttgcagtgaaccgagatcgcaccacagcactccagcctggacgacagagtgagactctgtctcaaaataaaaataaataaatacttttaaaattaaaattaaaaatgtatctaaaatggaaactttagacccctacttgaaatgtgaattatatttttcatcaacattaaataaaatgcatataaaaattaaaacttgcccatctgtctaccaactaaacacctcacgtgtacagggcggctcagaaattgtgattttcatgggcctgaggaacttttctctttgtgcaccccttccttcattaaaaaaaagcctacattaaaattctatttcacaactgcattcatataaagaaaaatatgttatttcagaacgagatagaggtgacaattattgcacaacataatgaaaatactagatgctattgaattatatgttttcaaatggttgcttttgtgttatgtgaattcccctcaattttaaaaattgagccagctgctgtggctcatgcctgtaatcccagctacttgggtggctgagtggggaggatcacctgagcccaggagttcaagacctgagacagaatgtcgctctgtcaaccaggcaggagtgcagctcactgcagc

SEQ ID NO: 1561081 - DNA, 4001 bp, Homo sapiens
gtggaactgggaaatactgggggggcttctctgttctgtaaatgaatgaaggaatccaggggtaattgtaggggtctctatgccatgggggattgagaggcaatatccacaacccagatgctgctatgaggggatctctgtcccacaggggacccaggaacagcatagggtatctttgccccatagaaaaatctaagggtaattatcggggttctgccccagtagggaaaggaggtgggatgggctggctgggcctcgaaccacctagctagggggtgaggagtgctcctgaaatagcctatgagtcatcggggagaagcggccctccccctctcctcctagcgctgccagttctaaccccactgatgtctctagggcccccacagccctatcccttggggcctgcaggcaggtcgcccgaccttaccatcctggttccggtcaagactgtgaaacatgagcagcagacgctgttcccgctcctgcagatagcgggaaaattcctccaggtcgagcccgccatctgggtcagcatcaccctcagaggagataccctgacagagggaaaggggatagaggtggctccaggaacctgctcctgatctggaggggacgcatgtcaccttatgccttaggaacccagagcccccagcgccttgaggaaggggatagaagacgtcaccccacttctccctcagtcagctaacttctcagccagatccctacagccaccacaggtctgtgcggtgggtgtgagtggtctagttttcctggtgagcaaactgaggctctgcaaggtcaagtcaccagttcaaggtcacagaaccaggaaatggtaacctcagttctcatctgtaaagcctgtccttccagctgtctcttgtttttagtttttgttatttttttaggtatctcattcctgttgaacccagctgcctcttaaaaaaccctgtccacatgggggacccaggggttccctttggaggaagccctgggcgatgtggggcaggagagaaccaagcggagtggctgaggccttggtttttcccatttgggaagtgggaggttggactgctctcagggttgctgtggttctcttagagcgatctggggctacaggtgtgggaaggacctgcaaagtggaggtgggggcagcgggaggaaagtcttgttataggtgcattcccagctgcgggtgaccgcagacaggattgggtccctggctggggcagcccgggacagtgagccaggcccgtgaacggcccatgaaagggcaggccagggaatgtaaacacagggatcggggcagctgcaggccagggcagtaggtgcccagaggatggagggtgtgtctcctggaggtgagagcagggcacgtcatgggctgtgcagtctggaggagggtgtgtcccgggcagtgggcaggaaagcgcccccatctcttcccaggcagacgccccctgccccgcagcagggggatcgggtgttggccgcggaactgcaggcttggggcctcggcgtccctgtcttgagcgatcccgttaggccaaacacgagtgggtagggggaacgagacagagacacaggttctggagtccagccacaggtagtccctggtggctccggccgcccagttcaggggcttgggtaaccgggagcgggcggggccgggaggggaggaggtccctgggggtgggggtacctgttgggcgccggggtctgggttgcccccgcccagcctggccagcccctggcgcaactcgtgcacgtccacgcggccatccttgttactgtccagctcctcgaacaggcgaccccagcgctgccgccgctccgcgtcgcccgggctcccccgcatggcgcccgcccgggggggaggggaggcccggcagcggcggcctcagtgggggcttcgcggctccccctccccccccgggaccccgcagggtcagctcccgcggccgccggctccgcagcctccgcgcagtccgctcggctctggcacttgcgggaggtggtgacggctagccgtcgccgcccgcgccagaacttgcgtctcctcccccgacctgcattggggggaggggaccgagggcggagctgggggcgtggggagggaatgtctgggatggtctggtattgcacagccgaggaacaccagagttccttctgggaagacgggctagggagctcagtggtctcaggtctggtttcagagttccgcctctgcgtgcctcagtttaccctttccccctttgcccaagggggcaaggtagagcgctgtcggggattgggtttcataatccccttccacttgacctccccgccacacccactaatcttcaggaactcaagttctcgcttttcccagacgcacgcaagaaccgtgcaccatctcgctcgctctctgcccgcccgcgccttacaccttccccgctcggccgcagaaacagaagatccaggagcgatgctctcccactgtcccttcttcccgcccgcgcgcttcctttctcggttcccactctgactgggaaacagaaaatcaacgcgcggcgcggctgcaaagtcggtttcctattggtcagcgcctcctgggctgagcccgcccgccccgcctcttctcccacctaggcggggcctccccgcagacccccgactgcctccagcccgcagtcccaccgcctgccaggagatcttaaaggggccgcggccgcaatcagacgctgagcggcgtggggagggggtggctcagtgacccgggcgcggggttgaggatcccagtggtcgagcgctggaggcagggccccagcctgtcgcactcgctgcacctgcggaatgtccctactgctagtttcgggcgcagtttctcgatccaccattagggggaagggagcccagaccacttgacagcgaatactcgataacaaatctcactttgattcagtgctttgcacatgccagggcttttactcacctctcgagtcgtctttgccaaaaccctataaggtaggtggtactggcgttcgcactttgcagataaggaagcggaggttaagtcattctccccagtcctgatgaccactaaggggcaaaacagggtttaaagagatctgggatccttaaccatcactctataccctagaaagaattaattatcttttttttttttttttttttgaaacggagtttcgctgttgttgctcaggctggagtgcaatggcgcgatctcggctcactgcaacctccgcctcccggattcaaacgattcttttgcctcagcctcccgagtagctgggattacaggcgcccgccaccaaacccagctaatttttgtatttttagtggagacggggtttcaccatgttggccaggctggtctcgaactcctgacctcgtgatccgcccgcctcagcctcccaaagtgctgggattataggcgtgagccatcgcacgcagcagtgagttttttttttttttttttttttttttttttttttttttttttttttttgagatggagtttcgctcttattgcccaggctggagtgcaatggcacgatctcagctcaccacaacctccgcctcccgggttcaagcaatgctcccgcctcagcctcccaagtagctgagattacaggcgcacaccaccacgcccggctaatttttgtatttttagtagagacggggtttcaccatgttggttaggctggtctcaaactcctgacctcgtgatccgcccgcctcggcctcccaaagtgctgggattacaggcatgagccaccatgcccgaccgcagccgtgagttttgtatttttattagagacggggggggggggtttcacctgtggaccaggctggtctcgaacacctgacctcagattatcctcccgcttcagcctcccaaagtgctgggattacaggcgtgagtcaccgcgcccggcctggcctaattattctttaatcatcacttgtcacccaagggtcctcaggagggggtcttg

SEQ ID NO: 1561082 - DNA, 4001 bp, Homo sapiens
ccaattccctgacctccaacccccaccttggcccagcgttggtccctgtccctggcaagttctctcaactcctcaaactcgactccaagccatgtccacaccagctctatcaccatccacaacctcaatctcagctagtccaggagagcccaactccagccagcactcctatcctgaactccatccacgtcaactccatctgtcctcaccccacgttctccccagtggctccagcgctgggtcccgtcctccccccaacccacacaaacctgcatgtacaccttggctctgtccagaggtgccgtgcccgtgcgagacaccgccccggccatagctcctgagagtagaaacttccacaaggcctccttgttatccacttccaggacttccacggggaccatcagctgctctcctgtgtccagtacctgcagggcagacccggccctccctcatcctcagccaggttggggcaccttccccagacacacatctagggcacccacctggtgaaagacccaccctgttcccccaagtctgcatttttttttttcgagacggagtcttgctctgctgcccaggttagagtgcagtggcacaatctcagctcgttgcaacctccacctcccaggttcaagcagttcctgccgcagcctcctgagtagctgggattataggcatgcaccacaacacctaatttttttttttttttttttttttttttttagtagagatgggtttcactatgttggccaggctggtctctaactcctgacctcaagtgattcaaccctcccccctggtttttttttgttttgtttttgtttttttttagacagagtctcactctatcgcccaagctggagtacagtggtgcgatcttggctcactgcaaccgctgtccccctggttcaagcgattctcgtgtctcagcttcccaagtagggacaatggtgtgatctcggctcactgcaacctccgcctcctgggttcaagtgattctcttgcctcagcctccccagtagctgggattacagtgccaacgtgccgagcaaatttttgtattattttaatagaggcagggtttcaccatgttggccaggctggtcttgaactcctgacctcaggtgatccacctgcctcagcctcccaaagtgctgggattacaggtgtgagccaccacacccagccaatgtaatatagactctctaagttactcatggaggatccaaggaggaatacaaatgtaattaggactatatctagactcttaatttattcttattttttgagacagaatctcgctgtgttgctctggcttgagtgcagtgatgagatctgggctcactgcaacctctacctcctgagttcaagcgattctcctgcctcagcctcctgagtagctggtactacaggcgccaaccaccatgcctggctaagttttgtaattttagtagagatagggtttcggcatgttggccaggttggtcttgaactcctgtcctcaagtgacccatccacctcaacctcccaaagtgctgggattacatgtgtggagccatcgcgccctgcctccctgccccaccctgcttcaaggtggaattctaggtccgctagcaggggagtgggcctgtagagggcgtgggtagcctggcctctccctgtagtcctgaccagaggtgccgggacactggtgtttcctaaactcacctgctgtgacgggagatgttcaaggttgttgtcatgcatgtggccaaacgcgtacccatacacgtgtgtacagccagggttccaggatgggggtggaggcggaggttgggggggaggcggggctttgatgagtaaggtcttgaccctcctaaacagtgtctggatcctagagcaagtgttctgaggttccccaggctgagcgcccatggaggaagttaggacacctggcttcaaatccctaagcagttgtttgctgctccagctaccatgcgggagtgtctagtgggaggattgtgtgggggaccaagaggaggatgaagtcacaaacgcccctgtgaccttcctaggtgtggtgggcagcgtgatggcccccttcccccaagtatccacctcctgatcccccaaaccaataaatatgttatcgttataaattgaattgtgtcctgtcaaaattattattattatcgttttttttgagacggagtctcgctcagtctcccaggctggagtgcagtggcgctatcttggctcactgcaagctccgcctctggggttcacaccattctcctgcctcagcctcccgagtagctgggactacaggcatccgccaccacgcccagctaatttttttattttttagtagagacggggtttcaccgtgttagccaggatggtctcgatctcctgacctcatgatctgcccacctcagcctcccaaagtgctgggattacaggcgtgagccactgcttccggccgcaaaattcttatgttgaagccctatttcccagtgggttggaatttggagacagggcctttgggaggtcctcagggttagatgaactcatgaggatggcccctgcaagatggaattagttccctataaggaaaagacaaaccagagctctttctctctctctgtctgccatgggaggacgcagcaagaaggcatggcaggaagaaatccctcagcaggaactgagctagccagccaccttaaccttggatttcccagcctccagaaataaatgtctgcagtttaagaccccgctctttagtgtttccttatagcagcctgggctgacttacatttgttacatggcaaaggggaattaagtttgcagatacaaataaggttgctaggcctgatgtggtggctgacgcctgtaatcccagcactttgggaggccgaggttggcagatcatctgaggtcaggagttcgagaccagcctgactaacatagtgaaacccagtctctcctaaaaatacaaaaattagccaggtttggtggtgtgcccctgtaatctcagctactctggaggctgagacaggagaattgcttgaacccaggagacagaggttgcagtgggccgagattgagccattgcactgcagcctgggcaacagagcgagactccatctcaaacaaacaacaacaacaacaaaactttgctaggctgggcgccgtggctcattcctataatagcagcactttgggaggtcaaggcaggtggatcacttgagcccaggagttcaagaccaccctgggcaacatggccagacccctgtctctataaaaaatacaaaaattagctgggcatggtggtccatgcctgtggtcccagctacacaggaggctgaggtgggagggttgcttgagcttgggaggtggaggctgcagtgagctgagatcttgccactgaactccagcctgggtgacagagcgagaccctgtctcaaaaaaaaaaaaaagaaaaaaaaaaaaagaattaaggttgctaaacagctgatgggaaatggtctcactctgtcacccaggctggagtatagtggcacacttaaggtcaatccccttgacctctctgttcaggtggttctcccacttcagccacccgagtggctaggaacacaggtgcggacaccacgcccggctaagttttaaaaattatttttggctgggcgtggtggctcacacctgtaattctagcactttgggaggccaaggcaggtggatcacctgaggtcaggagtttgagaccagcctggccaacatgataaaaccccgtgtctactaaaaataacgaaaattagctgggtgtggtggtgcatacctgtaatcccagctactcaggaggctgaggcgggaggatcacttgagtccaggagttcaagaccagcctgggcagcaaagcaagaaatttttctacaaaaattttttaaaattagccaggtgtggtcatgtgcacctgtagtcccagctacttgggaggctgaagggggaggctcccttgagca

SEQ ID NO: 1561083 - DNA, 4001 bp, Homo sapiens
atcccagctactcaggaggctgaggtaggagaactgcatgaacccaggaggcagaggttgccgtgagccgagatcacaccactgcactccagcctgggcaacagagcaagactccgtctcaaaaaaaacccaaaaactatatactcaatgatcttgccaaagtttatacacatgtacatatataacacacacgaaatatgtatatataaaatatgtatataaacatatgaatattataggtacatgtacatatgtgtacaacacacacacatatacatacatatatacatacatgcccatatatgttttaaatgactcctattgaagttggacagaaaacccaaatggcttcagtttccacaggagaagctgaaggtgacatgaccctctgaaacattctggtaccgtctttgcagggagcggtgggagggggtaagaaacgctccaggagccttacaggaaatggcacgttattgcttttcaacaacaaagccactgtcctccttctatgctgcatgcttgcaaatcagactcaagggaactaaaaaattccagaagaatcattcctagcaccacccaggctcgttttgcaggttagctttaaacagctgaaacattagtttgcctcactctaaagagtgtttccttactctttatcggcttcaagggcccagggagtgtcggagaggggtcccgggtctgcaagagctgggagccccggccccggcaaccccctctccggcatcctgcaggaggcacccaagatgatgagcccccctcctccggcagcgtctccaccgccagcctgccccaggactccgagacacacgcttggcagaggggccgtcccttccagctaagcctttccggacccagtcaaagtcacgactcctgccaatccctctgagataaacataacagatgggcccaaacgcggtgggtccacagcagagggtcagcgatgcccagggtagaataggctctgcctctagcattcaagtggtttaggtctgtggctggtaaaatggagatgattccggtttggtctgacagatgggattattctaaggtccggaaatcactttatagactgtcaagcactgttagaaatgaacactggggtaagcttttgtttggggaggggagggtgcagcgatcctgagataccaaggcttgggggactattggaggacctgggggattcggggggattattacagagggtgtgcgaacacaggtgcacgtggaagaaagcccaaggtgggagagagaaaagggggagacagaggtgtggggctgccagggcagagggcaggtgccagggggaaggtccctgagaagagagacacaggttgctgggggagtgggcacgagagtagcgagcagatacctggatatgaggaaaggcagtgggggacgggactaggtccaggtgtgagttgcgaggccatgagttaggagtcacaggctcaggtgtgggtgtgggggtgtcatcgacaaggacagactcaggtgatgtggggggtgttcgtgagtgggggcgggtgttcgtgagtgggggcgcggtgtcaggtgtgtgagggggatgtcagacccagctgtgcggggcgccggggacaaggccccaggggtgtgggagatgtcagcaaggacagtctaaagtgtatgggggatgtcaacgaaaagggacgtggtgtcaggcgtgcgtggactgcgggtgacgggctcaaacctggatgcagtagcccccagggggcagtagacgtggagtgtggggttggggggggtctttaacctcttcctgccctcgcgacgctactgtcatgccccgcctcatccgcccctcgccccgggatccatgacaggacccgtgcctcacctcagttcagcccgacaggcgcgggccgctgacgcttgggcccccccggcgccccccgcgccccctcaccggcccggacgcgtcgccgccgccgctacctccagccgccacggccccgcctcgcgcacccccagagcgcgccacgggaggggtccacgccacgccccgattggctgctccctggccagtcagcgctggaagcgacagtgattggcgagtatgaagcagatgggcagcccctaaagccaatcgctgattggcagaggtggggctattgggagaggcctggggtgcctgagtggtccctcagggtgctaggcgctgggaggcgagggcctggaggcaggcgaggattggaatcttggcagaaaacaggcagaactgtcggccaatcgctgggggccaggggcggggctacgaagaaactggcgctaccggtggggcagaggcgagaggaacggagggcgtagcttggggggagaccgggattggccgcaaagccgaagactggcaggccccgcggccagtcgcagcggccgtgggcggtacgcccccaggggagggctggagcgttcaaggtgcagtccgacccggagcgcggcaacccgacgtggcctcggacgcctggcgcagggtcccctgaggctctcgtgtagagcccgccctctggccacctagcacagaagcggatgtgaacttggaccatcaaggctgaaggactcctggataattctctatccccttactccccactaatcccctgcagacgacacggagagggcagattcgctggaggtcactctgaactgccctctccatctcgaggtggtgtgaagacatggaaataaggggcggaatcctactgaaacgcgctgcgtggttttctgagtgtctgacctctctgcgtcccagctttccccgccacggtatccagtgacatccctgttgggccttctccctgccaagtctttttttgaattaactgaatcttaaccacaatcccatgaggtcagagagaccactggctccttttacagaaaccagagcacagagaggtcaagctccttgcccaaggttacacagcattctctggttgctaaaccagagaatgaatctagagcagcctgctttttggaaagagtgtgtcagagaagagccactgggggcctcagagacctgggtttgaatccttgtccaatcactggcccaccacacaaccttgggcaaaagcccttgtgagcctcagctgtttcatttggaaaagaggggggaaaatgattcctatgccttgatctttcctctctggggttgcttccctgggaaaatttacaactcagctctcattttaattatctggtgaaagcatttgaccctgagcaggtcatgtgcggcctgtgagcctcagctcctctgtgaagtgcagaaaaatgccggcagtttagggagacacctgccatcccaggcatggctgtgtcatcggcacctcccccgaagccactctgttctatgactcacccttcatcttcaggatggagagggctacaaatgtttccagataccagctcttatttcctctaggtgctggccagggttggtggagatcaagttcagaaccagggaatcctgggagggagcaaggctgaaaccaaccttagaaagggctcacatttcagggctgcacaagcccctgctaagtgtgtgatccacaagtttcaaatggggaggatgtgacgggaaatcactagcccaaggccatcatcaaactcctgatattctcacgatatgcctacctggacctcctctcccatacctcccacctgtggtttgcttcctggcaacttccaggatctggcctccattctgccctccagagaagagggggaagctgaggtcagttgaacatcaattgggtgccaggtccccactgggctttctccaataccatctccccacctcacttccaggtggacgtgacagtgcccacttagcagataagaaaactgagcctatggtggagaatattccttggtggaaggacccagggctgagtttgaatccctgctctttttaacgtaagtaatggccagtaacagccacaggaccttcagcaaataacacaagc

SEQ ID NO: 1561084 - DNA, 4001 bp, Homo sapiens
aagggaagtaagcggaggctgggacatggtcagggacctcgtgcgcaatgctcaggagtatggcctcaattctaattctatttttttttttttttttgagacggagtctcactctgtcgcccaagctggactgcagtggcatgatctccgctcactgcaagctccgcctccggggttcacaccattctcctgcctcagcctcccgagtagctgggactacaggcgtccaccaccacgcctggctaatttttttgtatttttattagaaacggggtttcaccgtgttagccaggatggttttgatctcctgacctcgtgatctgcctgcctcggcctcccaaagtgctgggattacaggcgtgagccaccgctcccggccagtatggcgtcaattctaagggcaacaaggagctatgggagggtgctgagcaggaaaattcagcaaaggttcccagagggagagcctgccctggctaaaaggggtccagtatgttctgggcagcttgagcttgacactgcaagtctttctgaagaccaggtgaacatatggatggggggagtggcaggtgggcagggaacagatggtaggaccttgagtgcccagctaggggctgagtcttccttctgccaaggatgggctggccatggaaggtgtctgagcagagggcacagtcagatttccacatcagaacaaccaaggagccgggggcagggggccatggcatgcagaaggggtgagttttagaaagttcagaaccagtcaacttacggtgggatctttcccatctccacaccctctgtgccctccttacaatgggttcagtccctcttgctactccatcttacaaggagctgtgaaggtgttgagccctgccccgctagccggcgctcacctgctcccacgtggtgctgttcctgaggtctgctctgatagaagcccccagcaatgcctgtttcatcccagaaggacccccaacggctcgtttgagcaagtccctcagagacaccgcaaaaaccctccaaggatccttgcacaggacaccagaatctgcccccctagcatgaatccagtgtcccagtctccagaagagaccccccaaacaagtcctggaatacacagcagcctcccgacacactccgaacaactcccaaacccaaagtcccacacagaccccaaaatctcaaacagtgccccagctgtaaacgatcccgaggaaactcacaccttcagaaacccgggaagtcctttatagagcagctcgctcatccctcagagaaagccctagatagacccaaagtgtcttggcaaccccccagagactatctattgggtcgtccctgtgagccccggtgacctactggagagccccctgaagtctctcacagttatcacggctccaaaaagacccccacaccgccacggatttccagtcagccccagctccctggaatttccaccagttgcccaaagacccccaaattgccccccaaatcccctgagatcatctcctaagcagcctgcaacgcccgaagcaccttagaggctactcatcttcctcgagaaatccttaaagtgtcccctgtagccccctcagagacccccaactggtcaccctctcaggccccgcccccgcccagccctcggcccagccccgcccccaacctacaaagcaccctcagctctccggaccctccaagccgtccccgcaacccagccctgcaccgtgcgcccccagagccctcagccccgcccccagccctggacggatcccggcaacactcacaagaggtctcgcctcgcggtcttgcagacgatgcgcaggaagcgccagccgccgctgcccacgtacacgccgagcgccgctgccgcgctccaggtccacggcagccccagcagccacaacagcgccagcgagaccaccgaggccgcgcccgcacccggagcccgcatcctggggaagcagagagagctgaggccgcgggccgctccagccccgccccacgacccgctccgccccacgaccgcccccgcctctacagcgagccgcgcccccaggcctcggctctgcgccccccgcgagtccgggaacgcgctccgagtcagactccgcccccaggcctgggattggtcaactcctcaggccaggcatcgcccctttccaggcttttacacccgcccgctaactaggaaccagaccagggccccaggcctgggattggccaggtcctggccaggctccgcccccggaccctgggtccgctctattccatatttttgagcccatccttccctgccaatcttacaacagtccccgcccccagagccagcatgtccaccttgtcggtcactgtcaggcctcgccacatgccttcatctagcctctatcctcgatccccgaattacccttcacgtcctgtcccctttcctcctggtcctgcctctaccccgtggccttttcaccactcactgggccccgcccttaggttatgcttctagcccagcccacaggtacaagccctctccccgagtcccgcccctctcagccaggccccaccccctaggttagacatatgcctccccacccccccgcaataagcacacgccccaccctcccgaaactagagccctccccaatccgttcaagccccaccccagttccgggcctagcccaagttcccaggctcaggttctatcctggccacgggccccgccctcaggctttggctcggtcgccacctcctgggtttcactccggcccccctaggacctaggccccgcccctcttccctcctgtctacttcgaagcccctcagcccgcagagccgaggccggccgtcttccagaagccacgaccatagagaggcaaccggaccggagaggcgacggccaaagagacatgggtgctagaacggcccgccagggtcgtccgctgtctccatgacaaccaagccttgccccaccccctctccttttaggaaacacacgtgtcctgcagccttggggcgtggctcgcaagatatcaggacccgagccctagttggcgtgcaggatctctaccccgggggaccaaaaatatcccagtccacacccacggcccgcgcgggctgtattcttgctccagcttgtcctaaatccaagccccaaagcctctttcggtcttaaaaacacgttccagggcccgggggagtgctcaactcacaccattggggcctcagaagtctctaactgtaaacaccgccgcggtcttaacacgtgtgattcaaggacacagctaattcttaatccatgtcccgaagccttgtcggttaagtctcaccgtcacaccccaggatcccagggaggacaaaatccacacgccaggtccccatccttcctagaagcacctacaggccctttacttgcaccccggggtcctagatgctcccccaggcgctgccagcgctggcctgggggcacgcacaaccccattctctggctgacctgaagctgcaagccgtgccttcagtctcccagaagctcaggcaggaggcaggcagggactaggaggctgaggccggggacctttctgtttctgcagactcctggacccttcttgggtgcgctgtgcctactgtgcgggcttctgctttggggtccttcccttccagctccccctcctctgccccactgccgactccaccactgcttgttttctgctctccttggccgacctttccagcgttctccttaggaggcggcccgggcctgattccaatgcatttggaggacagggctgggcaggcactcaccccctacgctgccattggtccctgcgggcagcagggtggctggaatgagggatcacgaggaagatccggaggacaggcccagagccagccactggcctgctgctttctgggcctggaagagtcagcaatgaccagtaactgcagttgcactcttacctagccaggtagcaccgctgtgatcaccccatttgacaggtaaagaaactgagggc

SEQ ID NO: 1561085 - DNA, 4001 bp, Homo sapiens
ccagagggatagatctccaacagccaggcctacattggggtttgaggctctcagagaacagtcaagtatagggatttgtggttgggttcacaggctgaatttggactgaaagtaatatgtcaagatcaaaggtttcagtggctgtttactggacacaggaagaattctggcattgacctctcaaattacattgggggtcagagttcaggccaaatatcaaaatcaagtctgggagcagtggctcacgcctgtaatcccagcattttgagaggctgagttgggcaggtcccctgaggtcaggggttagagaccagcctggctaacttggggaaaccctgtctctaccaaaaatacaaaaattagctgggcatagtggtgtgtgcctgtaatcccagctactcaggaggctgaggcaagagaattgcttgaacccaggaggtggaggttgcagtgagccgagattgcaccactgcagtccagcctaggcgacagagcgagactctgcctcgaaaaaaaaaacagccaaacaaaaaacaaatgtcaaaatcagagggtaaagtggtttcagaggtcaacactgagtcacaagtcaagtgtggggtcaggtcagcctgagagttcagaggctggtgctagggctaatgggcaccctcaccagtggtccccgaggtatagatgaagagggcagggcttctccatgtgatcccagcacgcaggtcagcaggcactgggtgggagggcgctgcatccagggcagcccccagagcccccacccctggtgtaggggaggtatggctgaggtagaagcagcggatgttctcagcctgcagcttgggaaggatctcctccaggctctcccggaggtctgcagagatgggtcagaggagaaacagaggcaaggctcacctttgaggttgcgaggcgggatctgagacccacagatgcaggcagaggagcagctagtagagaaaagcatccatgttgtttggtaaagaatcccatcattagtatttttggtcaaattgtgggaaaattaaactctgatgacctgagaactactttctgctcataagtcttgattataattgcctgtgaaagtaggcaggtggggaccaagggcctctgccagtcccagcagaacccctgtcctatagtccctgcccttgcccccttccattctccactggctccaaggccctcacctgggtccaccaccagcacccgggccccagagctcagcacagagtgcgccaggggcatcccccggccatgcgggttgatccaggctgttgggcagcccagcttggccagccccagccacatacacagggctggaacggcctgggaagccagcacaaggagggcagtaggctccccggcacacaggctcgcagggtcacccagctcagccttcagggcccatgccgcctggcaggcccgggcatccagctcaccaaaggtgactgagccggccccaggccccgtccacaccaagagtgccctgccaggctgcgctcgtgctcgccgctcgaaggcatctacaaaggtgtcaggcggctgccggctcaagcatcccctgatcttcaggcccaggtggaggatcttggccaagaagatcacatcagccggcagccagcgtagtcctgggggcagccgtgctggcaggagggttagtgccagggccgcagctgccaggctcagcccatggggcacccaggggccgagccagggccgtgctaacatggccagcccaagtagcacgcaacatgtgggatcccccaggagccagcgcagggtcaaggccacagcgactggccacactggctgccccaggccccagagcaggagcagcagcagcagcagcaaggccaactgttgcctgacacccatggtaccagctcctccctaggagcagcagctgtggagtgttcaggctcacctctggcccctcaagagtagcccaatggctcctccccaggggtggtggccctggcactgctgacagtggctggtcctctccccaggactttgcccccagcccttctcctctacgtttgtttgctctgcctggtcttgtgtgtgggtccagcccctctctgcctggcgctaaccctttccatcactggcctctgggttcccaggtctctgccccttgggcaccactagcctccttcctgctgtcctgcttgccccatccaccctccagggctggcatctaactcccttgcctcccctcccatccctgctgggtaccagacactcagagcacagaaatccctgcccttgggaacactccaatcaggccaaacagaaaagcaacaggacagcaaggtggacctcattgggaggtcctcctgtgacacccactgaaaccctgaggagaggggctcagccaggctaagccccttgtcccatgatccgaggaatcgtaccctcctgccaggcatacagcaagtgctcagtaaatacaggaacactggcatcgcctggattcaaacccagctctgccccccacccatgtgcttgctctgactctctgctccacctctggctttgacgacgatggagtcctggggttcaggagactgaagtcagcccatgatgcacacagttggatcatgaaagccctggcctctcaccttgaggaagcagtctcagaaggtgaacccagaggagctgccattggcctaggagcctggcaggtcaggctggggtatggcctggggccataccccactccaccagctccaaatccttatggcagggcacctaggctaggagccactattgtgctgaagaggagaggggcaaagagtggctgctctctccgctggatgcaggggcctgggacactggctggccagtaggggtggtgtccccaaccgcccagcagtcagccccaggatcccacccctcactgtttcctgcccccaacacggccatcggagccctccctgaactttgcccccagcaccaagggcagatatatgggggcttatataccctcagtgcaacctggccccaaagatccccctgggctccccacaagtaaggtgctcagccatgtccatcaaggtcggggaggggaagtcttaagtccaaaagacccttagagcctgactggaagatctatgggaggggccttaaaggtcgtggacagcagcaaccaggagtatgatggggctttcacgtggcctccctctcggagacccacctcagatgtggcctgcctatcctactccccacaggactgagggatccaagagaaccaagtgctggttatatatgcagcccaccttagcccctacagaatagaggtcctagatggcaaagtggaccatcctgttcctgcccaggacagcctgtgggccgcatggatgccacccaagaacagggacgctgaaccctgacactcacatcttgtctatgagggcaaggcacgcactgatccaggtgctcacagcttcgtggtttaggccccatggcctacagtcctttattagagcgagagtcccgaggcccagcccccatatatgatgggtccacttgagtctccttaggcgccccatgagggagtaacagcttgggtagagagctagggaccttgcccagcctgaccctggggcaggcaagcggccccccagcccccaccaccaccccaggagagggcggggtgagaaccggagtcaaatcttgggccgggtccaagcgcctgagcgcccggtttacgcaggaaatagtccagttctcagaagtggtctaaccagccccagccccagcccggcaccacctggagggttcaagtacatggaggagaggagtaaggcggacttaggccctggtatggagaaagggtgaagggagagagaggacctgcgctcaggagggagcgtggtctagtggcgggaaccacgggtcccgcagcgggcgtggccgactgtgcgggaggccccggatccaccgtgggcgaggccaggccccagcgccatcagggcgcaggg

SEQ ID NO: 1561086 - DNA, 4001 bp, Homo sapiens
ccgatccagggcactacctctctgagttacataaaatacaacatgccagaaaccaaccacttggaaaagaggcacggtgtccagcatcagcatgaaatggattccggctgagacaacaagcgcccaacttccacttaagaatacgggataaagctgtctccggctaaagccatggctattcttgccccaagccaggaaataccctggcttggcatcttgaacagaatttggactgtgcccaaagcatcctccttatgcagccctgagtcctgtgtgccactttcgcttccgttcccagaccatcacaacttctggctgttttaatttctaagactttgctggattttgccaagatcgaactccttggatcgcgtctggcttctgatcccagaggtcccctgacagaaatctcttgtcaagaagtgaaaacctagccaagtgcagtggctgacgcctgtaataccagcactttgggaggctgaggcggacggatcacttgaggtcaggagtttgagaccagcctggcaacatggtgaaaccctgtctctattaaaaatacaaaaaaattagccaggtgtggtagtgcacgtctgtagtcccaactacttgagaggctgaggcaggagaactgcttgaacctgggaggcggaggttgcagtgagctgagattgtgtcactggacttcaggctgggcaagagtaaaactccgtctcaaaaaaaaaaaaaaaaaagtgaacacctaaccgacagcgttctgatccatccatccctagtcccactggaaaggccacacatggggtgtatggccaagatgtgaccaacccatcacctaccagcaaacccaggtagggaatcaaaacggggaggaaaattggatctgaaagggacaacagtgttcctaagaccacacagcagagatcacagagggacacatactccacacaccactgctcacagggtgattctagaacttgagtagtaaaaggccactggagacctctacactgacttccctatttgacgggaagccaggcagcctgcagaccaggatcctgaccacgtcaccagttggcaacagggaggaaccccctggagctcccatctgcccagagtccctgcccggggttaccttggtgctctgcttctccttcataatgatccgggacaggaggaccacccagatgggcatggtggccttgactgcaaagagagggatgggcactcagggggctgcctgaatttcagggcccaacctgttccacctccacggcgggatgggagggcctggcagcccctcacacctcttcgccccttctctttcggtagggcttcctcctgccacggctgttgtggtctgtcctgcttacctctcagctctcttctcagctcctcttctccctgagaaccccgtgcgtgtccctcccctaccaaacccttggcagcccctctgctgacttctcagtccggcgggacgcgccccgggcggcgcactcctatccatgcgcccaaacccgaagcggcgggcccggccgccgcccccgaggccgggcgcggaacctaccggtgtgtgcataggacacgggcaccttccagatgctgacgtgcgctgacacggacgcgaagtacttgccgaaggcgagcggtagcacgtagcgcgggtagaagcgcggcggcagcagcgggccggacgacggatgcggactgggtccggggcccgagacgggcggcgcggggggcacgcgccaggcgcgcagcagcggcgggagcccagcgcacagagccaggatgtggcacagcgacacggtcaccgggaacgggaaggcgctcaggatcaccttgttgaccacgttgccgcccgcgctcagcgcgtaccacagcaggcacagcgccgccacccgcgcgccctcgcgcgccccaccactgctgctcgctgcgcccgggccccccgcgccgtggcccgcgcccaccgcggccgccgccatcctgcccgagcggccgccccttccagcccgtccgacggcccgacgccgggcgggggcggggctgggcgggggggcaggcgccccggtctacgccgtttcccattggtcgctgcctcctcgcgtcatccctccgcgccggccgacgcgccagccaccacgtctcgagtgcaggcccagtccactgtagatgcgcttccggcggagccgaggccggaagcggaagaaggggacacagacctgcgtccaagctgtgccacctgagacgtgggcggtcccagtgaccgggagccggagctcgaacgggacgggcgaacagaagcgcggagggcttcgcagcgtcggcgtctgtgcgtgggccaaacatcagggcctcgaccagggatacaagggcaaccgctaactagattcctgattcctgatggctggcggcggctgacaccaaaggtaaaaggccttttagggaaagaaaccatttgtgaaaagctcttgggctaaactcgctctgcaaactgggggcgcacgctcgtggccaaactctggcagtgggactatcccggagcacccgatccctggaatcatgttctggaaaccaccgcgacgtgcgcagttctcgggcgtggccctggtatcatcccactgaatcctaggaacgcggtgcggtaggtatcactgtccgcatttcacagaccgaagtccagaatggggaagcgacttgtcttaggcttcctggccacactggggaccgtggtcatggtagcgtccttggacacctgtctccaaggctctgcagaagggggaggtgccgggccctgacggctgatgtccaaggaccagccgggatggaccagccccaggaggccccagtggaggaaaacaggacgaggttttcagtaagatgatcttatactaattcaagggctataatttgttctccacatcgtgtgcctccaactttttcggggaaagggtgttaaaattccgttacagtgtttttacttgtcaaattagaagcagcaaccggctgggtgcagtgagtcaagcttggaatcccagcactttgggaggccaaggtgggcggattgcttgagctcaggagttggagatcgtggcatcgataacatggcagaacctcatctttgcaaaaaatacaaaaattagccaggcgtggtggcgcacgcctgtggtacccactactagggagactgaggtgggtggatcggcttgagcccaggtcaaggttccagtgagctatgatggcgccactgcactgcagcctgggtgacagagcgagacccagtctcaaagaaaagtagaaagcagcaacccaacttggctccccaaatgttggaaggtatcttagcttatccttgcattctcaaaggccctaggcccttctggatacatggacacaggcatggtagtccctgcaggcaggggtagtggggagctgcaacctatcccaaaactctagagatgctgataggaggccaagctctgcaccctaatatcctccagctgtaccctctgtggatcagagtaaagtcacatccttgggacaccatgtctcagcagagctgttaaacataggcacagtgaaattaggaaagtataactataggcaccctacagcacagctgagtgtcagatacttccactgacacactgacatgctttgtgttttagttctcacaactctggggtattctcaccccccaaatggggacatgtgcacaggagtgaagagatgagctcagagccacacagctggtgggtggtaggcctgggttcaacctcatcctgccttcaaagccactttgcccatggccttttgttggggaggggagtgtgttctgcaccaagcttttgccaggaatccctgctagctctcaaactggctctggactgactgtagtcttacaggctggaaggaacctttggtttgccctgtgagactgcatgtcttaaggtgtagctgtttcttcatttgtgaaattaagcagatatgggtaagatgaccta

SEQ ID NO: 1561087 - DNA, 4001 bp, Homo sapiens
taatcccagctactctggaggctgaggcaagagaatcgcttgaacccaggaggcagaggttgcagtgagccaagatggcaccaccgcactccaggctgggcaacaagagcaaaactccatctcaaaaaaaaaaaaaaaaaaaaactaaataaaatacaaaattccgctcctcagtctccctggccatatttcaagcgctcagtagtcacacaagcctacttgacttctgtggttaccgtatttgacagcaaagggaacactctcatcactgcagaacatgctattggatggtggtggtccatggcttccccatgccccgaaataaagtctaaactctgtaccctgaggctgaagctctgcatgacaagctcctgcctcgcctcggccctcactggtcctttctgtgccaagcttgctcgtgcctcaggacctctgcatgggttctcctctctccacctggaacactgctctctttcccctgaccttccagcgaggcctccttcttctttcttgcttctctgcatccaggacccctcaaaagggcctccctcggttgggagtggtggctcacacctgtaatctcagcactttgggaggctgaggtgggcagatcacctgaggtcgagagttcgagaccagcacctgaggtcgagagttcaagaccagcctggccaacacagtgaaacactgtctctactaaaaatacaaaaattagctgggtgtggtagtgggcacctgtaatcccagctacttgggaggctgaggcaggagaatcacttgaacccaggaggtggaggttgcagtgagccaagatcaagccattgcactccagcctgggtgacagagtaagactctgtctcaaaaaaaaaaaaaattagctgggcatggtggtacgtgcctgtaatcccagttactcgggaggctgaggcaggagaattgcttcaacccaggaggtggagcttgcagtgagccgagatcgcgccattgtactccagcctgggctgcagagcaagactccgtctcaaaaaaaaaaaaaaaaaaaaaaaaagggcctccctctctgcccctggctgactcctgccctaaaccatatccctgtacccgccggaaggcctgctgcagaacagatactcaaaaaccgctggctgaacacatggacgaggggaagcgtgtggccactgataagggccgcattttacctgatgcaatgggccaaagtgaagtcggtttcaccctggaccccaaaatgtcaccgttcttaggaggaatctcagctcctcccctgtccttgagttttccccaactgggttttctcccccaccatcagccccaagcgcctcatggccccgctacctcactgcattcaggtcttcgggtcactgctcagatgtctccactcagagctctccccgcccccttccctggtgttattttcttttattttgtgctacagagggagctaggaattacattattttaagtcatttaaagtcgtccctcccccccggcggtgagctgggcgggaccaggctgtctgtcttgctcagggccagctgcacccagcgcagagccacccaggcacacagtaggcgcccaataaagacctgtccggcatctggatacctcagtctgtacagtgaaggtgagggtggcctgcacgctctcaaaccggaggctgctcgggccgggatgaggagggcacgggctcattcattcaatcagcacttattgagcgccttctgtgtgcctcgcgctaccgggcaccggagacgggcctcggctaacgtgcgggtagagtccaacagacccccggccgctcagcgccgccccgccccgccgccccaggtcctctctctgcccgcacctacctcccgggggcccctcgtccgccgactggcgccgctgcacgcccaacggccgcgcagtctcgaccccacagacgcggcccggagaggccccgctcggcgcggctggtccacgccccgcccacgcccctgcccattggcctccccgagacccgctggcagaactttccatactattggctgcgaaacctgccactcatatgcgactccacctctcctaccggcacaggaaaggggtttcctcccgctgagcggcgggcgcagccaccaagcggccccggcgggaaacccggattggcgaggaacggttccggcagggttgggtttccagagctgtccaggggcgcctggtgctgaatcccgcttggaaagaggcttggaggtggatgggaagggatttccaacggaggcggctcctctctcagcgtcctcgctgctgatccccttaccgacggctgaagaagcagattcatcccttcaacaaatctctgttgataggcaggaggagtaagtccaagagatcgactgtacatcatggtggctacagctcgtaacaatgcattgcatactgcaaaattgctaagaaagtagatgttacatgttcaaaccatgaaaaaataagtataggaggtaacgcgtaagttaaaaaccaaatcttggcagggcgcagtggctcacacttgtaatctcagcactttaagagaccgaggcgggaggatcgcttgagtccaggagttcaaggccagcctgggcagcatagtgagaccccatctctaaaaaaaaaaaaaaggttttttttgagacagagtctcgctcttgtcactcaggctggagtgcaatggcgcgatcttggctcactgcaacttccgactcccgtgttcaagcgattctcctgcctcagcctcccgagtagctgggattataggcgtgtgccactatgccggctaatttttgtgtttttagtagagacggggtttcaccatgttggccaggctggtcttgaactcctgacctcaggtgatcctcttaccttggcctcccaaagtgctgggattacaggcatgagccactgcgcttggcctgatgacttgattctaacaaatagaaaatggcaaatgaatgggatgtcattctgcgattaggctatgagagattgtgacttctgttttgccagcagagcctgtctctcgccttctcagcctacgtgtcttgacaaagcaagctaagatgctggagagatccagagggaaaggaactgagggtgtcctccagccaacagtcagcaaggcaatgagaccctcagcacaagcgtccataaggaaccaaatgctaccaacagccatgaacgtgatcatggaagagggtcctgccccagttgagcctttggatgactgcttcacttcaattgcagcctttgaaacaccctaaaacagggctgcatgtggtagctcatgcctataatcccagcactttggaaggccgaggtaggcaggtcacttaaagtcaggagtttgagactagcctggccaacacggcaaaaccccatctctactaaaaataccaaaattagccaggcatggtggcgggcacctgtagtcccagctactaaggaggctgaggcatcagaatcacttggacccaggaggcagaggtgacagcgagctgaaatcattaccattacactccagcctgggcaacagagtgagaccctgtctcaaaagaaaaaaaaagaagaagaagaagaagaaagaaagaaaaacaaagaccctgaaaacagaagacccatatgaactgcatctgaattcctcacccacagaaactgagataacacatgctgttctagccacttagttttgtgtttgtttgcttgtattttgagacagggtcctgccccatcacccaggctggagtgcagtggtgcaatcacagctcactgcagccatgacctcctgggctcaagcagtcctcccacctcagcctcccgagtagctgggagcatgtgccaccatgcccagctaattttttacctaatgtcacacaggccagtcttgaactcctggattcaggaaaccctcccacctcagcctcccaaagtgctgagattacaggcatgagccacaatgcctgctggcacta

SEQ ID NO: 1561088 - DNA, 4001 bp, Homo sapiens
gttctgatgtgaaggaactacttccaagctaagcaaaacccctacttcaagcaatcaaaccagatgccccctttggccccaaggcaaaatgtaattaagtaactacgtggtttgtttgctgttctttctgtgtgaaacacacttcccctaaatcttcccacggctggctcaacctccagcccttagtaacctaaaataatcgctgctgtttctgccacacaagatcacacgacgtcttgttctttgcttcacaacttacaacaacctaaaattacacattccttcccttgactactccctgcggtcaaggatttcactggtctattcactgctgggtttccagtgtctagacccctgcctaaatcgtgctcaataaatatttgttgattgaaggtactcccttaagcccagcaaaggctctgtctggcagggtcccctgtctcatgtgtgggcctgggaggtctgcctagctccgaccacagctcaattccatcctttggccaaattcaaggctgggtgaatcatatcattgtccattctgcccctcgtccctgtcccagccaaacttcatagagacccaagaccccctcagatgctgcccacaagcgggcaagacctggctagaacctcaggctgagactctcaggtcagagacagcctgccacacccaagggacacacagcacccacagccactggggctggaatttgagcccaaatgaagaccaagggggtccctccaggggactgggctggaagcttcaattggggagggggtgctgggaggtggccaggtcctgctgcctccccttggctgggctctgcagggaaggtcccagcctccctgatctgtctctcctggcagcctcctgaggccatacagtccctgggggcagggaggcacagctctacccaacttgtttttcttgaatattttcgagccgtttccggccccctccccagggcccttcagtgtcacagtttccaggaagttcttgtcacacaaagaggggcgcgacagtgcttctttgcccccagggtagtatcacgtggggctggggctccgttgggtcttggggacccaaaatggagaagagaaaggagaaactgaggatggcaactcctcccaccgtgggaattcaggggagggcggcaccacagggcgctggtgatggagaagcccacatcctgggcccatccccggggccaaatgcctgaggtcgccccaagaggttcgccggaggaagttccagtcgccagcacctctcgaaatgggaggtgggagccgccagccccttgcacagggaggggaaagtttctcaattttttcctgcttccttcctgccccctcaccaaaggcgcccttctttccgccgtttccaggcggctggccagactcggtgggctctcagctgggtattcggtctgcccagtcttgcctcagtttccccatctggccaaaagccccggacggctacttctggcggaaaagggaaggaggaagaaatggacaaaggggattggaagaggagggggatttgaggaggtcagggccctgtctcttttccgagcccagatcgccgcgcctcccctcccccgcccgccatccgagccgcccagataacgggacctccccgggcggagcatgcgccgtgagccccggcccatcagccggagggggagctggggctcccggggaggggacgcggggcgacccggttagagcagggggcgtgggatccgcgcagtgtcggatgcgggggcccgagcgcggagggccatccagccgcagcgccggtgcctagggtctcagatgtccccctggctcaaggtcctcccacccgcaggtcagcagaggcggcccctgaccggaggcggctcctaccgtaggctccgtttttccgctcgtcctccatggccgcggcggggcggggagcggagtccgagccagcgcgaccccagcccgggcgggcgggaggctccgcgggctgcagcgccccgccccgggccccggccccgcccctcccgccgggccagcccccgcgcgcctcctccaatgggagcctcgagagggcgagggcggggaccgggggcggggcctggcccgggaggggtggggccccaacctttgtttccagtcttagctctcaagtaaccctcttgagggtgtgcatggtgagcaaacagaggtcattcattcattcattcatctatgcatttcatcgtcaaggagatattgaggctgggcgtggtggcgcgggcctgtaatcccagccactccggaggctgaggcgggaggatagcttgggccaaatagttccagaccagcctgggcaacataggaagaccctcatctgtacaaaaaatttaaaaaattagctgggcttggtgaggcacacttgtaattcagctactcgggagcctgaggtaggaggatcacttgagtccaagagtttgaggctgcagtgagctatgattgtgccactgcctgggcaaccctgtctcaaaataataataagaattaataataataataggccgggcgcagtggctcacgcctgtaatcccagcactttgggaggccgaggcgggaagatggtcaggagatcgagaccatcctggctaacacggtgaaaccccgtctctactaaaaatacaaaacattagccgggagtggtggcgggcacctgtaatctcagctactcgggaggctgaggcaggagaatggcgtgaacccgggaggcggagcttgcagtgagccgagaccgtgtcactgcactccagcctgggcgacagagcgacactccgtctccgtctcaaaaaataaaataaaataaaataaaataaaaataataatagaagatggatagataaataattgataggtaaatattgatcaccgtgtaccactgaacataccaaaagatgccattttcattcatcagattggtaagaattttagagtttaataacataaaatcaggtgagtgaatactttgaagcagaatgtttcctggcagaaagagtatatccaagtcatgttcacctggtgcgattcctgtctggcactgaccctggacaaaccactgcaggtgtgtgtgcatgggatgtagtaaccaaggggtgttccctgcagccttgacagttattgtggaaaaaatgggtgaaaacaggccgggtgcggaggctcacgcctgtaatcccagcactttgggaggccgaggcgggcggatcacttgaagtcgggagttcgagaccagcctgaccaacatggagaatccctgtctttactaaaaatacaaaaaattagcctggtgtggtggcacatgcctgtaatcccagctactctggaggctgaggaggagaatcgcttgaacccaggaggtggaggttgcggtgagctgagatgacgctattgcactccaaactgggcaacagaactgggcaaaaagcgaaactctgtctcaaaaagaaaaaaaaaaagaaagaaaaatgggtgaaaacatcactgcactccagcctgggtgacagagtgagaccctgtctcaaaaaaaaaaaaaaaaagaaagaaagaaagaaaaaagaataaagcacgaagtcatcagggaaatgtaaatcaaaacctcgatgagatatcattgcacacccacctgaatagctaaaattaaaaagactggtcgaaccaagtgttgaggaagatgggaagcatatgggggctctcctacactgttggtgagaatgtaaaatgccacaaccagttggaaaacgatctggcagtttcttgcaaagttaataccctagaaattgcacttctaggtatatacccaagaaaaagtataagtgaagaaaagaaaaacccacagacacattcatataaatgttcatgatagccttatagtatccttattcgtagtgggcaaaaaaactaggagcagcccaaatgcccattaacagatcattggtgaagcaaaccatggtgggtttcacccataccatgggatt

SEQ ID NO: 1561089 - DNA, 4001 bp, Homo sapiens
gatcatagctcactacagcctcgaactcctgggctcaagtgatcctcctgcctcagcttcccaagtagttgagactacaggtgcacaccaccacacattttttttttaatttatatacattctgtagagacaaggtctcgctatgttgcccaagctagactttttttttttttttgagagggaatctcactctgtcgcccaggctggagtgcagtggaacgatctcagcttactgcaacctctacctcccaggttcaagcgattctcctgcctcagtctcccaagtagctgggattataggtgcccgccaccatgcccagctaattcttgtatttttagtagagacagggtttcaccatgttagccaggctggtctcgaactcctaacctcaagtgatccacctgccttggcctcccaaagtgctgggattataggtgtgagccaccgtgcctggctgtattttatttttttgttatttttttttgagacagagtctcgctcttgtcctccaggctggagtgcagtggcgcaatctcagcttactgcaacctccacctcccagattcaagcaattctcctgcctcagccttctgagtagcctctgagtagtcacagctactggagaggctgagacagaagacgtgcttgaaccaggaggggaaggttgcagtgagctgagattgcaccactccagcctgggtgacagagtgagactccatctcaaaaataaataaataaataaataaatataaacatggtaaaaattaagtccaggccaggtgtggtaactcacacctgtaatcccagcactttgggaggccaaggcaggtggatcgctttgagctcacgaggtcgagaccagcatgggcaacacagcgaaacatctctgctaaaagtacaaaaaaaaaaaaaaattagccaggtgtggtggtgcaagcctgtaatcccagctacttgggagactgaggtgggagaattgctcgaacccgggaggcgaaggttgcagtgagccgagattgagatcgcgccacggcactccagcctggtgacagagcaagactccatctcaaaaaaaaaaaaaagtttcaaatatttgtcaccagtttgttggagaacagatgggagggggtgtgaagagacagggattggggtagtattagcggggagaaccccccaaaacccagagctcttacctattgtaaatgggtcctttgaaagtgggatcatacttctgtggcgttcctgaaagtcaagaagattaagatggatgggattggagacctgaaccaagacagggctgggagagccccctcccaaaagcccctaggggtgtctttgccttggcaagaataaaattcagagacctgtggaattttctgcctcacccacctccaggtgaccacacccaagcccccagttctggcaggccaggacaggggaggaaggagggatcactaactgtgaacaaacttattaactggcggccacccactgggaagagggctgaaatggtgaccaccacggaaccaggtggagatggggaagatctgaggtgggatagggggaaggaggcgccggcagcagtgccaggcagaggggtacaggggcaggtccttcgggtaggggagagtaaggagggtcgtctgcgaggctgcgggggataagtggggtgaaggggcctggctgatggtggggaggctccaggcgcagatttgcaattgcgctccccctccagcccccttccctgcgccccatgttctctcaaggccccctccgagggaccgaggggtcggcccggggctacgggcgggggtcgctgcctaccgtgtttcccgtagtagtggggccgctcgtcccccatccctgcaggcgaccagccccggcggccgcccgcgctctctcccgcgccccctcgaccctcccgagtctggagggaggcactgaccgcgcgactggcggcggctcctcccagcacagcgccaggcggggcggcccaaaccggtcagaccggcccgagctgggcagctgcccagactaagggacccgggagggcgcgggcggggctgcagctgctcccgccactcaccggccggccgcatttagccttccccgcccccacccgggaaccctgcggcttcaccctgggaacaccctgccaccgggcgatgccgcctagaacccctggccaccctgaaagggcgtttccgtggcttcgttttgcaggtgtggaaactgaggcactgggagggaaaacggcctactgcccaaacccagacaaccaactgtggaatgttggtgctgaaaacttctccaagctgtgcaggaaattagttttctttctgtctgctgctttttttttttgagacaggatctccctctgttgcccaggctggagtgcagtggtgcaatcacagctcatcgcagtctcgacctccctgcctcaagccatcctcctgactaagcctcctgagtagctgggactacaggtgctctactgcactcggctaatttttaattttttttgtagagatgggatgttgctatgttgcccaggctcatctttaactcctggactcgtgggctcctcccaccgtggccccccaaagtgctgggattacctgcgtgcactactgggcctggtcttagaacaagtatttattcagcccttagtgggtgcaggccttgggcggggcaccgcatacagtgaggaaccagagagacccaatctccacccttgtggagcccacatcctcctgggtcgccctgaattcaaatgctccttctgcaccctctgaactagaggatacttaacaaagggcttatcttccttaagcctcagtttcctcaactgcaaaatgaggctaaagtatgaaaccaaaactgacctcaaagagcaggcataggccaggtgcagtggctcatgcctgtaatcccagcactctgggaggctgaggcaggtcgatcaggatttctaagccagcctggccaacatggtgaaaccccttctctactaaaaatacaaacattagccagtgtggtggcacatgcctgtaatcccagctacttgggaagctgaggcaggagaatcgcttaaacccaggaggtggaggttgcagtgagccaagattgcctcactgcactccaacctgggggacagagtgagactctgtctccaaaaagaaaaagaaaaaagaaaataggctgggtgtggtggctaacacctataatcccagcactttgggaggccgaggtgggcggatcatgaggtcaagagatcgagaccatcctggccaacttggtgaaaccccgtctgtactaaaaatacaaaaattagctggatgttgtggtgtgcacctgtagtcccagctacttgggaggctgaggcaggagaatcacttcaacccgagaggcggaggttgcaatgagccgagatcgtgccactgcactccagcctgggtgacagagcgagtgtctcaaaaaatcaatcaatcaataaatcaaaaattagccgggtgtggtggttcatgcctgtaatcccagcactgtgggaggccgaggcgggcagatcactgaggtcaggagttcaagaccagcctggccaacaaggcaaaaccctgtctgtactaaaaatacaaaaattagccaggtgtggtggtgggcacctgtaatcccagctactggggaggctgaagtaggagaatcgtttgaacctgggaggtagaggttgcagtgagccgagattatgccactgtactccagcctgggcgacagagcgagactccgcctcaaaaaaaaaaaaaaatacaatacaataaaaatagagacaggatctcactgtgttacccaggctgggctcaaactcctggccttaagcaatcctcccacctcaacctcccaaagtgctgggattgcaggcacgagtcaccacgccacaacctgcctctacttgaatatttatagatatttatagtgcagccaattatttggttaacatggcatt

SEQ ID NO: 1561090 - DNA, 4001 bp, Homo sapiens
gtgccatcccgtgcctgtgcgtaccccgtggacctggaggactggtccatgcgtgtgcacgcgccctcccacttgcgcctgacgggcgcgggctcctggagcagccaccgctcagcagacaccgacgtggcccgcaagcgcacagtgtagacagtgccccgggccaatggtgttggccgcctaggatatacctgtcacgatttttttgggggggaggggggacggagtctcgctctgtcgcccaggctagggtgcactggcacgatctcggctcactgcaacctccgcctcccaggttcaagcaattcttctgcctcagcctcctgagtagctgggattacaggcgcgcgcgaccatgcccggctaatttttgtatttttagtaaagacggggtttcaccatgttagccaggctggtcttgaactcctgacctcgtgatccacccacctcggcctcccaaagtgctgggattacaggcgtgagccactgcgccctgccacaatatttttttttcctttgagacaagagtctcgctctgtcgcccaggctggagtgcagtgacgcgatatcggctcactgcaacctcccgggttcaagcaattctcctgtcttagcctcccaagtagctgggattacaggtgcccaccaccacatccggctaatttttgtatttttagtagagacggggtttcgccatgttggccaggctggtcttgaactcctgacctcaggtgatctgcatgctttggcctcccaaagtgctgggattacaggcgtgagccaccgcaccgggccccggtcacgattttaatcgctttaccctctcccctggagggaggtcctgtaattcgcccattggacagctgggaaacccaaacagagaggcacgccccttgcccaagatacaagaaagcagtgaagccaggtttcgaaccccggagccgtcagcagtcccctctagcgcgcacacgtgggtctgcacgcccgggcaggtggggggcaggtgtgtgtccacccgtgaggacacacctggtcgagccgggccccgccccgcgcgcgcttccaccgaaggagcaggacgccaggctctctcttcctccttcctgcccctcgccgggcgcctggggcctcttcctagaaccctccccacgtgtctgcctaggggccccttccgttaaagcaccgaggtgccatccgcgtcctcctgtacagcggcccaaagccccagcgcctcccccacacggggtcccagcactgccagtggggcaggtcctacccccgggcctctgtccggtacctcgtaggtgctggtgaggcccaggcggtagaagacgggcatgaagagcagggcggtgaggaccgagttcagaagctggcccaggcacatccagaggaacttgaggccatagcgataggcctccgacggcacgcccagcacctgcacggccgacatgaagctggcagacagcgacaggcccacgggcagggccgccaggcgccggcccccggtgaagaagtcctcagcgctgcgctgcccgccccgagccagcccgacccacagcccgatgccagtggacaccaggagcatgagggcaaagaccccgtagtcccaggctccgaaggtgggccgttccccggtctccacggcctccatgagggcgggtgcggaggcccagcgcgtcctcggacgccctgcgtgctcaagcgggggaagctggcaggggccgaggaggcaggacggggagggcgggtgggaggatgctcggcagcctgtccccgctccgtctggggtgggaagcggcgagaggggccggggctccctgggttaggaatctatgggctgtcgatgtccgtgtcggcctccctgtccccgctgtctgtctctgcgtccgcccctgctgtctgtctgtcctgccacctcccctctcactctgggttccgctgtcccatgcagccggctgtctgtccctctccctgggcgctgtgctcagcgctgacagctggaggtcgccttggggcttacgggagcagctcgtgattgtgggttgcagatttattgggctcccgggtcaccgcgactccgcctccagacctaggggcgggcaggacccgcaccctttcagccctggactgggacagacaggccaggacaggctatctgggtggctgcagggggtggtatcggggagggctcccaaatgcccctccatccccatgcacccacccatccccatgcactgtgatcccctgatcacagctgtcactgtctgctgttgacaggtggggaaattgaggctcagagagggcatgtcactatccaagcctgcacagcctgcttcagcactcaaagccgtattgtgcttgaataccttgagctatggggagctcactttcatgcaggactggggttcactttcagggtttcaggggacccataaagaaaacttacctggctttaccacccccaaactggcatgtgggcctaccccctttctctagagccttagggggtgggcatcactgaaccccgctcttgggctaagctgggtgggagacattcagagctcaagttctgagtgggtacatacttggggaagactttgctcctccctgggccttagtttccccatctgtaacaaggataaaatagaccctgcctcagaggaataaatgggacgtggtaacgaaagcctggtacatgataagtgcctcattcatttattcctttattcatttgtcacttcattcattcattcattggttcctttgcagatatgcactgagagttggccctgtgccaggcataaatggctcactgaggtggtgcgaggggcctttaaggttatgaacccgaataagcggagaccatgaccaccagggaggtagagtctggcttgtccctatcatatagatgaggaaaccaaggttgggtgtgggagaaagtctactgggggggtcacgcttccatgaggaccaacgagctgtcatctcagggcccttctctgggggacccaggaggactttgacctctggaggttctggtctctgggttcaagtctcagctcagcctccaactttctgggcaatcacgcatctcaaacttggttcccttctccataagctggtggaatctgaaatcctgggggttgaaagaaacagcgtcagaggccgggcatgatggcttatgcctgtaatcccagcactttgggaggctgaagtgggaggatcatttgagtcccagaattcgagactaccctgagcaacatagtgagatcttgtctgtatgaaaaatacaaatattagcgaggcgtggtggcacatgcctgtaatcccagctactcaggaggctgaagtgggaggatcgcttgagcgtggaagttcgaggctgcaatgagctgtggtcgagaactgcacagcactccagcctgggcagcacagcaagaccccgtctccaaaaaaaaaaaaaaaaaaaaaaaaagggcttttgagcgcttctcgccagcctctgctgctccctggtggcctcctctggcctaccctctgccctggccgctccagctgggtccagcgtttctcaacgcgtccccacgtaacccccggacagtcctcttgctccctctctgctgtgcagggtggacctgtccctcccccggggctgtgacactgcggcggctacgcgggcacctgttgccggctggagcgtacctcctgccctcgccaggagagtgggttaggcacctagttctttctccttccaccctggtcaggcatcctcctggaaaccccgttggaaaaggggagatccggccgggtgcggtgtctcactcctgtaatcccagcactttggggggccgaggcggacgggtctcttgagatccgttcaagaccagtctggccaacatggtgaaaccccgtctctactaaaaatacaagaattagccgggcgtggtggcggccgcctgtaatcccagctacttgggaggctgaggcgggagaatcgc

SEQ ID NO: 1561091 - DNA, 4001 bp, Homo sapiens
aataaatcaaagacctaaatgtaacacttaaaattataaaattcttagaataaaacatacgacaaaagcttcatgatagtggatctgcaatgaattcttggatatgataccaaaggcaaaagcaacaaaagaagaaacaaacaggatttcattaaaatgttttaaatttgtgcatcaagagacactatcaaaggggtgaaaagataacccacagaatgggaggaaatatctgaaaatcatatgtataataagagattaatattcagaatatatagagaactcgtaaaactcaacaacaaagaaacaaacaacacaattcaaaaatgggcaaaagacttaaatagacatttctccaaggaagatataccaatctccaagaagtacatgaaaagatgttcaacgtcactaatcattaaggaaatgcaaatgaaaactacaatgagataatacctcgcatccattaggatggctaatataaaaaggcagaaaataagaagtgttggtgaggatgtggagaaattggaatccttgtgccttgctggtcagaatgtaaaatggtgcaaccaccatggaaaacactatggtggttcctcaaaaacttaaaaatagaattaccatatgatccagcaattccacttctgggtatacacccaaaataagtgaaaaccaagcctccagtggctcagcctgtaatcccagctctttgaaaggctgaggtggaaggattgcttgagcccagaagttcgaggctgtagtgagaggtgatcatgccactggactccagcctgggagacagagagagaccctgtctcttaaaaataataataataggctgggcacgggggttcacacctgtaatctcagcactttaggaagctgaggcgggtggatcggctgaggtcaggagctcgagaccagccaggccaacacagtgaaaccccgtttctactaaaaatacaaaaaattagctgggggtggtggcgcacgcctatagtcccagctacttgggaggctgaggcaggagaatcgcttgaacctgggaagcagaggttgcagtgagctgagatcgtgccactgcactccagcctgggtgacagagtgggactccatctcaaataaataaataaataaaaaataatagattcatgtttcttaaacacattctagaacagttgtccttaaaagcaagctttacggaagggagagaactgagttttggccagctggccacttccaacatccataaagccccttgagccccaggcggactcctcttcccatatgggtgcaaccctccatggtgcccctacaccgtcatcccaagcaactcctaggctcatgccctgtggggagtgctcaggatcccccagaaatgcccattcccctcacattacctccttccctggaactataacctccagaaaaggaaaataaggagctggtgtcccatttctgcaaaaagcagaaaataactgccctaacagaccagtgatggggctagacccgggtttctgccactcgggcacttgacactgatggctttccccaaaggcagggactgatggccgaatcctgtcaaggaattggctcaaactcggactggatgagtgaggagagccgaagacagtttcctctgtcctacgtggggggtaaaggagggacccctttgatccctcagctccacagagcccagggcaaccaggaggctcccagccagtcacctgtcacccgtcagtggagcccagtgggcccgggcctcgaaaatggcgcccagccccacacaccccagatgtgggaacattttagggctccctgggccgtgaccctcaccctagccccaaggcttctgccaggttcttcagtccagccagtcggacaaaaatgagggtgaagaagccccagctgagaagcctagcaatctcctcaggccccttcaggcgtcgacagatcggtttgggcgacacccctcgatctgcctggcgcgcggcctttcccgccgattctctgcgcatgcgccgccgcgccccctcactctttccctacagctgtagcaaacactgtaaccacttcgccctccccaactccctgctctctccccacacgcacgcacgtgtgcacatcctctgactgctcacgcgccactcccttccccaccgcaccccaccccgacacccacgatgccacgcttcaggcggggctctaagacaaggcctttctctggcacatgcactttgcttccacttcatgtaaggaagaagagggtaggaagtgggagaatcgtctcattcattccttctagccttcaaacctttcgcatttacttaaagatcgcctactagaaaccaaaccttaaatatgcgtccaacaaggcagacagggacgttgccttaagagagctcagaagcctactagggctgcagacaagaattaaaaactcaaagatttacttaggtcatccgttctcatactttccggtctcttaagaattattaaggactccaataatttatgagttacatttatatgggttgtatgtttatgtgagttgtatctatcaatattaaaataaatttctaaaatagtcattgtttaaaaattcattatgtgtcaaaataacatttttatttaaaataactataatttctactccaaaagaaattttggcgctgggcgcggtggctgacgcctgtaatcccagcactttgggaggccaaggcgggtggatcacgaggtcaggagttcgagactagcttggccaacatgatgaaaccccgtctctactaaaagtcaaaaaaaaaaaaaattagccgggcgtggtggcacacacctgtaatcccagctactcgggagcctgaggcaggagaatcgttggaacccaggaggcagaggttgcaatgagccgagattttgccactgcactccagcctagacaacagagcaagactccgtctcaaaaaaaaaaaggaaaaaaaagaaaaaatttggggagaagaatggcatcattttacatttttgcaaatctctctaatgtctggcttcatagaagacagctggattctcatatctgcttctgcactgagtgtgtcaaaatagctcatgtcttgtagcttctggcaaacatcactatattcaaagaggaaatgaaagtgaaaggcaaataatatcttagtagtattatgaaaataatgttcacctcatggacccccaaaagtgtttcaagagcccccaggagtccctgagccacactttgagaatgaaaggcttaaattgttatgattgaacaaagagatgaagaggaaattttgggggtgctgtaagaattcatcacaatctttgggaatcattcaatctttcaacacgtatttatcgagagtctactaaatgctaggaactgggaatagtgtagagaacaaaacagaccccattcctgccctcgttttgcttcacacaacaagaaaacagatatatgatgaatctcaaataattacatgattataaattgtattaagtgctatgacaggccgggcatggtggctcacgcctgtaatcccagcactttgggaggccaaggtgggcggatcacatgaggccaggagttcaagaccagcctggccaacatggtgaaaccccatctctactaaaaatacaaaaacgagccaggtgtggtggtgcacgcctgtaatcccagctactcgggtggctgaggcacaagaatcacttaaaaccatgaggcagaagttgcagtaagccaagatcacactactacactccagcctgggtgatggggtaagaccctgtctcaaggaaaaaaaaaaaagtgctgcgacagaaaagggccacagacctatttatttctatcgaattttttttttttttgagacaatctcactttgtcacccaggctgaagtgcagtggcataatctcggctcactgcaacctctgcctcccgggttcaagcaattctccctgcctcagccttccgagtagctggggttgcagg

SEQ ID NO: 1561092 - DNA, 4001 bp, Homo sapiens
gggctgcatgggaaacttacagagtctgtcctggaaaaggagggtgatagtggagttggccttctccactcccaccaccaccacctctaccatcaccaccaccaccaccaccaccaccaccaccaccaccaccaccaccagggcccctttctggggagaaaggagccaggcagcctccctgtggcctggggaggatgggatgtggggaggggatagagtaggaagacaggtcaaggatgctgggcttagctgaggagcccaggcagagctgtgtctttctgcacctgcctggcactgtagctggttctaggcatggtctcaatcctatgacccactcatggtgtgagcttccccttccctggaggacagttcctggagagggtgtgggccaagaaaaagctctaaccagcaccctggccaaatccctggaaccagcccttccttccagcagaccgtccatcaggcaggggcatcctaggccaagaagctcccagggccaggtcaggaccaggctctgggagacagcattctaaggggagggggtgagatggcggagtgacctggccaggggctgtgttcaggggcaactctggatgtgaagagctgctaatgtgggggtgggagaggacgaggtgaagaccctgggtctgccctactgagcccccaaactttctccatctccaggggtctgagggtgggaaggcagtgaagacacaagtggctctcactggcaggggaccgggaagactggctggcggtaaggtgagaacagtcgaggccccagtcactcaccccccaaaccacttctcctgtccctccctggaggggctcagaggcactctgtgtagacaaagaaacaagtcagtatccatgacttgggacagagagtggaaaaataccactgccattcccatgacctctgagctctctgcctgcccagaaacccctatgtgggggcaggacatggacccattctcaggtggggactttggagtccagggcctccagaccaggcgagtgtccagtgcccaccaggatcccagctcagggagcagctggccttctgcaggctgggtctgcccactgctgcccccaattgctggctaacccgccccctctcctgggtcctgctgccaaaccctgcagtcattgcctgctctgaacctccgtcccttctgcgcaggctgcgcttgctcactctgctcataggccctcctgctttccaagaataaagtcactgcactgcgtggcacctggaccctgcacacagtaggtactcagactgacccacagtacagaacttggggagctcagcctgccgcagcctgaccagcccctacactggtcaagttcctgcgctaatcgcaggactgcagtcatggccatttcacagatgaggaaactgagggtaactgccttgcaaaagccccgcagcaaaatcgagtcaggaggaagagtccagcggtggaggggacccaaaactcccccaggtgcaggcggccgggaggtgggaacacggagctttggcaccctgggccagcagcccctgacctccccgcggtcatagcgctctctgaggccagactgcaggttccccaggcagacccgtccgagcgcccggagaggggacgcccctcgttcggagcggctgcgcccctcattcggcctccgcccggcgcccgcccgcctgggtcccgctcaccgatgatgatggtgcaggcgctcagcagcccgatctccttcttgagcgccacccgctccgaggcgccggggacggtccctgggactggggagggcgagggcgcaggcctggggttcccgcgcccgctcggctgctgcgtgtggccggccatgtcgctgtcccgccgcgtccccgctccctgcgctgccccgtctgtccggccggccgcccgtcggtccgtcggtccgtgagctcacggccctcgcagccgggacagcgcccacaggcgggcgcatgcgctggctccgggcccgggactgggggccccgggcggcgggggcccgggaggggcggaaggagggccggcccacagccccctcccccacctcccttaaagggaacgccccctcccccagtcccggcctgggaaggaaggagaggacttggggcagatctaggaaggacttcccagttgggcgaaggaagggaccctccagttgcctgagttacatccattcttggggccgggttggggagcagagctccgagacaagacaatccctgctctcagggaggccgagggggacggcaagaataacagctggccgcgtgtggggatgcagtgtgtgctccctttagtactctatgcctgcacgatgtgtgtgtgtgtgtgtgtgtgtgtgtgtgtgtgtgtgtgtgtgtaggagacagctcccagggtgagtccattctacaggtggaagttgaagcccagagatcagtagcgatcgccgagcaagtgcagggctgagaccaaaccctttctcgtgcctcctgaggctcccaggcggacaacctcaggaggggtgggggttgaggtctggaactcctctgaggggtctgggtgtcctatgcaccctggatcaaaggcctgagggtcgaggtgaagatcccgggggctctcatcctcatcacggggacccaagacctgtgacgagtcctggacacggctcgcccaccctaccaggctctgggccacctctggcctgagatcttcactacaggctcctcgtcccaggtcagagtgagggctcagcggactagaactcgggtctctggtgcaggtcccgcgcgatccagcccggctcaagaaggccaggcgacctggaatgcccgggagacacggagaaggaggctgtggtcgcgggagagggtcgggagtgcggggatccgagggaggctgcctcctcccggaagccgtccggactgtgcagccgaggccggcggaaaagatccaggggggccgcgtcggggccaccggggcggcgggcggggcgagcctggcactgtgcggccggcggcggaacagcctttgtttcttcctggcggccgccgcgacgcgccgtcccctgcatgtggatgaggcctcgccgggcgccccgtccttccccccagtggcggcctccgggtttgctggggccctgccaggggtccgacggctgcagggtggaccggggtgggacggggcgggggcgggtccctggcaggggcgggtccctggcagcggcagggcctggaggtgggagcggggcggggccggcgtttgcaggcacacaggagcttcgaagttgggggcggggacttggggtaggagtaggagcgggaggatccagggtggacgtgctggtgggacgccgagggggaggccacccggcgaagctgcatccctctcgcttctgtcgtcggagaccggcattcttggcgccctccacctccagccccagagaccattcagaggccgactctcttaaaggagcctcgcgcagggtaggggcagccctggctccggagacccctgattgtcgcgggtgttaggggccagaggcctcgaccttctggtttgactctccccagccccccagttgccctcgcaattctagggtctgctgggagagggtctagccagggctggtgcaatcaggggcagcttgccaaggggcaggggctggcgcaagcctcgcagctctgaagcctgtggttttcgagggtgtctctctgggacctggaatgtggagtatgcgtttgtgggggaaaggtcggcctagggctttgcacaggatggagtttgtatgttgtcagccaggccccatagctcaggaggtccttttcgtggaattgaactagaacctgcaaatttcaatgggaacaaaaggttagtaggattggtttaccatccaaaaaccaatcagcatgattctccacattaatagagagaaaaaaggaaaacctcaacagatgcaaaaaacagtcatccgtgatgtaaacaaacaactcttagcaa

SEQ ID NO: 1561093 - DNA, 4001 bp, Homo sapiens
ctactgaaaatacaaaaattagccaggcgtagtggcacatgcctgtagtcccagctactcaggagctgcttgaacccaggaagcggaggttgcagtgagctgagatcataccactgcactccagcctgggtgacagagcaagactctgtctcaaaaaaaaaaaaaaaaaaaaaaaagaatatgcagccgagtgcagtggcacacgcctgtaatcccagcactttgggaggatcacctgaggccaagagtctgagaccagcctggccaacatggtgaaaccctgtctctactaaaaatacaaaaattagccgggtatggtggcgggtgcttgtaatcccagctactcgggaggctgagtcagaagaatcccttgaaccggggaggtgaaggttgcattgagccgagatggcagcactgcactctagcctgggtgacagagcaacactccatctcaaaaaaaaaaaaaaaaaaaagaagatgcagaattccctggcgagagggaaagagaagtaagtccagagattatccctttaaagatgtacttcacaaatcaaagagtacatcttctgccgtgtcactagggatcggcccggatttcactgcctgcgcccctcgttcagacgcccttgcctaacctgcaaagggcctgccccaccagagaccgccttacctccttttggagactggtggtcttaggctcttggctctggatcgacttctcatcctctctccgctttctcaggccagtatcccccatgtttcctcctgctggttccaggagactgcaaggagggcgcacagctaaatcttggttcagcagcagcagacaagacgcaagtgcaagctcggcctggactaggggagctggctgcaaaagcacagtgttggttattgctgcaggtgggggccgctgccagtccctcagggctcatgcgctgggccccagagtcaaagtcagtcattaacattgtccaggcaggggaacacagctccccgctgctctccaaagctcagctgcttgcttagctctctcccagacaggccccgggagcctcctggcccacgtgcctgtgccttgaaagtcattctacctctatggtcaacttcattttttttcaaaagtaaaaagaaatatttaacaacatcccgggctgggcacagtggctcaggtctgtaatcccagcactttcggaggccgaggtgggtggatcacttgagcccaggagtttgagaccagcctggctaacatggcgaaccccgtctctactaaaaatgcaaaaaaaaaaaaaaaaaaattagctgggtgtggtggtgggtgcctgttaatcccagctactcgggaggctgaggcaagagaagcacttgaaccctggaggcagaggctgcagtgagccaagatcatgccactgcactccagcctgggccacagagcgagattctgtttcaaaaaatatatatataaaaaattaaaaaatgaaaatattgtggaatgtatttatcagaatcaagtccaggtaaggagtgtctgtcttataattccttcccaagattaaaggcactcccatacatcacagatccacaatacaggtactttttctttgtactttttaaatttttacaatattttttataaagacgggagtgttgctatttgccccggctggcctcaagcagtccttccacctcggcctcccaaagggctgggatttcaggggtgagccaccacgcctggccaggtactttttcattgagtgatgaaaggaaagaaaacattgccgaggaaacccagttccagactgaactaggagaaaaccatgcactcctgtaccctctctctaaataaattatctgtccaggccccggccaggagagccatgagcctttctatcacctactgaccttacttaccttcctccgtgaccctgcagagccggaggagctgcggcccagctgaccgcccgtgcctgcacggtccaaccctagaaatggccatgtcttgtgcccaggagcaaaggaagtccagaaggtacagaggtcaataagggtaattattaaacacctttttttttttttttgcaatgaagcttagatacgccacacaaaaaaggggagggtcaggaacaccaatttctctccaaaaccgtttttgttttgttcatttgtgtctaggtcagattatttttttaaaaccagatggtcccaaatcgtctacactttttacctaaagataaaataaattatgccttcttttatctttgggaatcagaggagataaactttggaaccaattcgctaattgccttaataggctatatttaaaacccaagtcaggcagctcaaacaggaaccgctgtgtgtgcgtaactcagctgttggtcagtttcctccccgcccaggaatttcccccaagccaagggcctgcctctggctgagcaggtgagagcggctgagcccgtcccactcctctttaccagtgatggggcttcaccacttggaatcacaagcaggcctgaggcaatgcagggcctcgtgtcctccctgcagctgcggccaaatgcccatcaggtttggctgtggtgctgttcacgtagccatgtcctggctcatcacaagggacacaaaaccttccccttcggggaaacggagggggacaggcaacacaaggccaggaagctccggtccgcatccagggctgccagggtctggatctctctgggagggagcagaggttctcccgcactgcgattggacctaggctcaggcggcagcctcaggggtcagcacgaagccctttcagatagggaaggaagcaccttatgagaccttatgagacagcctggcacagcataagcactgcatctgaagcatcgtagctgttaccttcagccaaaactctggtagctttgccttgggccaaacttaactgcatcccagatatcagatggaagcaaaggtcagggatggaaggagctgggccagtctctgggggtcagtttgggagcagtttggggcaagcagacctgagagaggcacaggtttctctgaaagccgtctgcagagcacagggacccttgttgtcccagaggcacggtcctgatttagaagttcgtcacctcccatcttgggagggcccacctgtttacctgcctgccatgcccagagccctgagcagagaggctagtggcaggtcctgccaccctagacagaacctgcccaccggcttgctggggtcactcctcctaatgttgcagcactcatcatagtacctggcacatccatgtttgcaaaacaccacagaataccccctgggtcaaaagtgctcctggcaggctgacaggagaccacgtgaggacatcagggtggggcagtggtcccccgctggggccagacagccctgcaacctcacccactacccacatgggctcaggcagcactgccaggatcagggtctgaacctgcgacgcagggcgagcaacaggcgcctcctcacggaacacactgaacttgcatgttccatgaatgtccgggaccagccctctggtcttcctgggcctcttccaagtgccgagtctggaacatcgggatgtgagggtcctttgttaagtcagaaacctccacttcagttcattttgggtccacggtgagcatttcttaagcctgtttcttaaagttgtgtttttcaccgcagtcccaccctctccctcccttgaatacacagaaagtattcaagtaattctcataagctcttcctcatggaaaataatacggatttcatttaaaaagcaaaattttcctcagttcttgaagaccattggttcattgtgtatccagtgcttctgccatgtgactgaagtttcacctccctgctgtcaatttttttttttttagatggagcctcactctgtcgcccaggctggagtgcagtggcacgatctcagctcactgcaacctctgcctcctgggttcaagtgattctcctgtctcagcctcctgagtagctg

SEQ ID NO: 1561094 - DNA, 4001 bp, Homo sapiens
gtgcctgtgttggggggctggcccttgcaggaccgagctggggactcagacttctaaacatgcacatttactgccccagcatgagcgcaggcgctcccatcacctcaaaatggtccagtgtggggatcacaccacagagcttgggtgctcgaggctgtgatacactgataatacgtaaactgaggcccagaggaggaacagggctcttaacctagtgctctttaaagccatctgaagccccctccgtgggcactgtcacacagggctgggacctcacctgcagccagggagacatcatacacacacacacacacacacacacacacacacacacacaccagggctacaggcacagcctcgtaccttttcgccatcactcactctcttgcccaccttctccagggcccccttctctcaaggaaggcagacagtgtgttggccagggccctctcagcaccccccactgagacagtgtgaggctggcacaccaggaaagggatggaagtgagactgcaggaaggactggcccggtctaactcagtacctagtgcttgcccagagcaggaaaggcgctcagtaattatcaacaagaatgaatgaatcaagagctggacaaacagcaagaggtatggaagtgagacggcaggaaggactggtccagttacacgaggaagactggggaggttagattgaagggaggtctggtctcatctctactacagaggctaccggttaaactgcaagaaggaccggcctcagaacgccagaaacaaggcagggggaggtgggctcggtcctcaggggagagctggggtgggtgccggctgggaggagtggagagagcaggggagctctgctgaagtggggagaggagtttagaggactccaggcctgggggagcccactctgcgggtgggggggtctaattcctccaggtcccccctgccaggggcggagacaaaggtgtgtgggaggagggtgcactggctcccagggagagccagagaagaggaaagagagagagaaacagagactgagatatccagagacagagatggagacgagggggagatggggagggagggagagagagagagagagagagagacatgcggacatgggaagagacagagacacagagaaagcagagacagagagagacacaggaaagctgagacaagggagagaggcagagacacagagacacagagaaacagagatggcgcaagaggaaaggagagagaaacccaggacttagagacagagccccagagagactccgaacagaccccggcacagagacacagagagagggagacaggagtgagagactgagagacagggactcccagaggcggccagactctgctagacagagacccctgagacatgtggagagacagaaagatgagacccagacacaggaaggcgggggcagaggtagagagcgcgagggggggtgccccagacggggtgggggcggggtgtcctcgccccccagtacccaggcggtccccctccccagccgcccgagaaccaggagggactgaaggtgttggggcggctggtggcactcccaccccacagaaggtacgcgtgctgggccaggcagccccccacctccataaaccagcccagggaagccagctccaggcttcccgaaccgcccccactccgcacctggggtaaccccgtccttttcccacgcccccacctccccaccaatggggtctcttacctgcggctacagcctggagcaggtccccccagcgctgggctggcagtggtgggcgactccgcccgaaagagagagagagattgagagagagaaaagcctgagactgagagggagagccggggaggaggggagggagaggggatagagggaggagaagaggagaggggagggacacgggggagggggaggcggcgagggagcgagggagggggaggagccggagagagggggaggaggcggaggcgggcagagggaaggcggtgcgggaggcggggggaggcccggggaggggcctgggggagcagggagcccgagcctcctccccagcctccgggttcagcaccagaggcaggggacagcaccggagggcgctcctgtgtgtttcagaagcagcccccgccccccaacacacacacacacacacgcacacacacacacgcacgcagtctcccagccatacaagggccaacagctacaaatagttacagacttacagaactagggggagggcaagaatgtttagctggagtcagatccaaattcacatactgtgcctgcacagcctcacaaaggaggccagaaacaaccacaaagacacccattaataagaataacaacagctgccatacatacaggcagccctgaccacgtgcctggcatcggcagcacattattattatttgagacagggtctcactctgtcacccaggctggagtgcagtggcacgatcttggcttactgcagcctcaacctcctgggctcaagcaatcctcctgcctcagcctcctgagtagctgggactacaggtgcccgccaccaccacgccaggctttttccctccattttttttttttaggagatgggatctcaccatgttacccaggctggtctccaactcctgggctcaagcgatccttctgccttggcctcccgagtagctgggactacaggtgcccaccaccaccacgccaggctttttttctcttcattttttttaagagacggggtctcactattttacctaggctagtctccaactcccgggcttaagcaatccttctgcctcggcctcccaaagcgctgagattacaggtgagagccaccgcacaggtgagagccaccgcacctggcatgttctaatgttttttataaatttaggtaaatgctattatgagcttcacttacagacagggaaaccaaggcatgaggtggtaaatatggctccagattctacacccttaactgctgcaccgcacaattccccaggctgaggacgggtcaggtcaagaagagacttgcaggctgggtgcggtggctcacgcctgtaatcccagcactttaggaggctgaggcgagcagatcacttgacgtcaggagttggagaccagcctggccaacatggcgaaaccctgtctcttctaaaaatacaaaaattagccaggccaggtggcacacgcctgtaatcccagctacttgggaggctgaggcaggagaaatcgcttgaacctgggaggtggaggctgcagtgagctgagatcatgccaccgcactctagcctgggtgacagagtgagactccatctccaaaaaaaaaaaaaaaaaagaaagaaatgaactgcaaagggccaggcaggtggcctgggctcctgaagacacaaactcatgcaccctgcgatgggcccacacacatacccccacgcaagcacacacctctgcaaggcacaccagcactacacccacccccaatcctgctcccccccacaacagggggtgatggcgtgttagtcggtgtggagtgctccttctctagaggcggacagtgggagggagggggccttgctcgtgccaccggtcctgcccactgccagtcctggctggacaccgtcaggcctgctggccaggggagggagaggatccggcttcctccaacttcccacgcctgggcctggcttctgggaaagagggtgaagacaggggtggccaggagttgctgagctcctaactcccataaacgctcggtagagaactggtggctgggtcttccctgtcagtgctggtggtcagacttctgagtggacctccatagcgggaggtagacagatggccaaaatgactacggtgtctgcctctcccctgaacccccaggaagcagatgtcctgcccaacccctgcccccagcctggatacggcccagggaatgatcatcccccaaccctgctgacccagattctattcctggcctgcagtggacggaggacaagac

SEQ ID NO: 1561095 - DNA, 4001 bp, Homo sapiens
ggaaaggaccaagttgatgtatgaatgtagctgaggggaacaatggctagtccgaggtggccagggaaagtcaaaatacaatcctggcgcagtggctcacacatgtagtcctagcactttgggaggccgaggtgggtggatcaccttaagtcaggagtttgagaccagcctggccaacatggtaaaaccccatatctactaaaaatacaaaaattagccaggcgtggtggcgggcgcctgtagtcccagctactcaggaggctgaggcaggagaatcgcttgaacccaggaggcggaggttacagtgagcggagattgggactctgaactccagcctgggcgacaggcaagactctgcctcaaaaacaaaatacaatcctacacaccctccctgattttgaggccccctcttccaagcagcccccgtgatctctggctaccaccgatcccctgcctgtccgctgtgtccctctcacagtgcaggttcagagcaataaacgataggccaagagagtttgttcccacatttaccacccgctcccctccaagactgcagaggctccaggatccaacccccgaccatccaacacttagtagggcctcaagaagttatctgctgaacaatgagggagattggaccagacaattacaatagtgcttcccgcttgcgaggaaccattttacaggctttcaccaattccatttgggagattaccccctttcacaaaggagctttcacaaaggaggaaaactaagaggttcagagaggttaagccacttccctaaagtgacagtgtgctaagtgactgacagcaccaggaatcaagcttgaatgcagcctatcaatccaaactgaaaacttgcttcaaattcctgcgaagcggcttttccgcttattcccttgctactttccccaaggagtcactgaccaaaaaaaaaaaaaaaaaaaatcaagactggtatcttcaagatcgggacaaaacactcgcccaaaaggtccacgttgaaaataaaagccttaatctgaaaaaccaattgggaaggagaaaaaaggatgcaaaagaaaagcaatgcttttacacagcaaaggatttcctccgtgctcccctacttgccgccgaccccatccccaaccccaattcgggcaaacattttgaagtcactaactgcaaggcatcgggggagtcctttacctttccttgaaaatctggaatgacacgtttttaagacaatttgaggtcggctagcccaaggggaccgctaatgcccgtgtccggccgacgccggacatatctggaggtttggctgagccccgatcgcagcttcgccaaaaacgcaacattcgggtcggacccgttaccacgcagccagaaaagccccaacgcctgcctattgttgcagccgctgtaattgggagggcgactgtaggggtgccgggcgaggggggcgagctttgtccggcgaccccggcgagagcgcgcgcggagaggatcgcgcggcctccacgcggcccgggccccccacccaccccgccgctccgcgggggccgccgctgccacggcctcgcgacactgtggccttccccacgcgcgcggctgccggctgggcttcttgaccctcgggcgccgccgtaccccggccccgcacagggcgcgccggcagccccctcccccctcggcgccccggctccattcaaaccgccctccccggccccgcgccgcgctgcccccgcggcccgcgttccttaccaggagccgccggcgccgtcgacttcccggcgcctcccccgcccctccgcgcggggccgggggcagaatgggcgtctcgcttctcttcacgaaacaaagaagccgccgccgccgccaaacgaggggaagcctcgcgcgcgcgcccgcccgcctcggccaccgcccccccttcacacacacgcgcgccacccgcgcccccgctgcgcgcgcgctcgccggctcccctccccctcagcaccgcggcggcctctccagcttccgccgcctgcccggcctcgtgcgcgcgccagcccgcccttccgctcccggcgcgcgtgcgcgcccgtccctgggcggacgggggtgggcgtggcccggaggaagcacgcgcgtccgatgcaccgccccactcgggccgcgatggccccgcgcctgcgcacgcttcgccttctgcacgcctcgcgtcttgacgccccggagcatgcgcagagcggacgccactgcggcggcggtggcggcggccgcggtgacgatggggcaactggagaatgggatcccggtggccgtggggtccgtggggaaaggaggtccctgaggctcggaaataggaaccctggaccgtaggacgggccgcctggaccaagaccgggcagtggtttcccgcgggccaagggcgcgcctgggaaccgctttgatccctgacctggggcggcgaggcctatttggggaggcaaggcggggcccgaccgtggccgccttctctgcaaaacttcccaagtgccattaattagcttagcaaatatttattgatctgctactgtgtcccagccgccgtggagccctcggtctagtggggaaggaggacaagaagcaagattaataagcaaaatagtgcagtatgagaggccggacttggtggctcacgcctgtaatccagcactttgggaggccgaggcggccggatcacctgaggtcgggagttagaaacgagcctgaccaccatggtgaaacccgtctctattaaaaatacaaaaattagccgggcgcggtagctcatgcctgtaatcccagcacttagggaggcctaggctggtggatcatgaggtcaggagatgagactatcctggctaacacggtgaaaccccgtctttactaaaaatacaaaaaattagccgggcgtggtggcacacgcctgtagtcacagctactcgggaggctgaggcaggagaatcgcttgagcccaggaggtggagattgtagtgagccgagatcgtactattgcactccagcctgggcaacaagagtgaaattccgtctcaaaaaaaataaatagtacagtgtgaggtgaacactgggaggatcatggacattttaaatagggcagccacggaagtcgtcgttgcaaagaacacgtttgaatgcatacaggctggtggtgaaagagagaaaccttcctccgagagtgaaggccctgagcctcttggcctcttctgtgtgttttcttttttgtgtgtttgtttgtttgtttgtttgtttgtttgtttgttttgagacggagtcttactccattgcccaggctggagtgaggtggcacgatctcagctcactgcaacttctgcctcccagattcaagcgattctcctgcctcagcctcccgagtaactgggactacaggcgtccgccaccacgcccggctaatttttgtatttttagttgagacagagtttcaccatgttggccaggctggtttttaactcctgacctcaagtgatccgcccacctcagcctcccaaagtgttgggattacaggcgtgagccacctcacctgggtgggtttttgtttaattgtttgttttattagagacagggtcttgctctgtaacccaggctggagtgcaatggtgtaaccacagctcagtgcagcctcaaactcctggactcaagggatccacctcagcctcccaaatagctgtgactacaggtacatgccaccaccaccagctttttttttttttttttttttttgtctgttatgttctgtagagctgaggtctgctgtgttacccaagctggtctcaaactactgggctcaagcagtcctcctggctcagcctcccagtgcactgggattacaggcatgagccaccaagccaggccccagaaggacctgggtttaaaacacgactccatttctactacctgggtgatgcatgggtaataccaggcaggtttaccagagcatctacacctcactttcttcacctgtgaaacaaa

SEQ ID NO: 1561096 - DNA, 4001 bp, Homo sapiens
catatgtctgtgatttttacagcctcttccccctacaccagctcctactctgagacagggcacagccaaatggcatccttctcttgagtcaaccaggggcacctggagggcacatgctgaaggcacctcagcccagcagccgacctggtggatttggtttggcccacgtctcagtaaggtgcttctggttaatgctgagaacctgtgcatgaaatcacggctctctcccggcttccgcctgcctgtccacaggcggggtccacatcctcgggctcgccaggcccacccccaacacttccattcccagtgcagcccctgagcttcccacccctgatgacagcaaggccttggaaagtcacccaccatatcacttctcaattgtcctcgtacagaaaaggcacctgctgggctcattaaagcagagtcccaggccccaggaatctgtatttccagtaagttcctgggtggcacggggctgctgccctgcacagccctcctctatcacccatgctgaacatggtctgccccccaaccagcatttccccttccagggctgctccgagacgaggtggccagaacagagcaccagccacgccatgccagacagctctctgtggcgggccacccacccggctacatcatcctaggtactccctgaatccatcctgtgggaacccaggggaggaaaatgatctgaggactctggagtatgacaaacacaaggcaggaaggaacgcagttctgtaccttgggagtgctggtccatggggctgggcgggggccccatcccagcatggccccctgaccgcatccccattcctttcatctggttgtagcgcgggtcgtccgacatgcccttctcatgcatggactccatgggctgcgagagggaccatggcaaggcagggtcagcatgtggaacgtgaggtggcagcgcagctatgcgctgcccgagagaagctcgagggcaccgagaacagccacccgaagatgacgcgcatctccccagtccccagcatgactccaaggcaaggttctgacacctacttaggcctcgagacaggtacacaaaataaatgtcgcccagtggagcacgagcatatgggagactgtggtcaagcaatcctcatcttctaccacccgggacctcctgtggcccgtgacacttagaaatgtcaccttttctcatggatgctaatatgacctttcctttcagatgctgtatgtataagggaatatgtcctctaaccacatccagggacatgcaaaagagacttgtgaccataaagagccttctccaccttgctgactgaaggccctgctcagcgcaggtgaggtaaagacagtggctgaggggcacgccttggaggaaagggaacccgctgctcggctctgcgagctgcacaggtgagcctgacagccagaacgggggaaaccacgtggctaaaagcctttttaggaatttggatgtttttcttcattaccaaaagaaaactttgtagtgatattcccaaatttcacatgcagaaagcaagggagcgggaaacggtggggcaggtgcccgcggggcccagatcatgcgccagcacaggctggggtctgacgagctgaaccttctgttcatggccgtgggccctggggtagggggctgagccaaggcaggacacctccaacaagaaggcttccccccatcctccaagtaaggccctcggtccagaggctgcctgcagccctagtgggcagaggccgcaggtgcgaggcgggcacagggatccctaccttgtgcatctggtgcatgttgtcctgagggtaccctccaggcccctgggtggggatggggtgtcctgctgagggcggccctgggctgggccccatcatgctgtgggcggagcccggcgagggacccgggctagggcccagcatggctccaggggaagggccagggcccggggaaggacctggccgaggagttccgcccaggggtgggtctggagtggacatcttcacgggagctgcagacagtggcctcctgctggaagacagtcctggtcagtctggggttcatgaccaagggcgaggcaggacagggatagcaagggacaatcatacggtcacatcagaatctacatcccacaggaagccagtaccttccccaccagccacccaaaccgtttctccatgatcactctcagaggaagtcctacatctcaggcacacaagatcagtcagtctacccaggaaggggtgggccacgctcacagacaagcactgccccacaggggccttcaggggctcctgccatattcctgatcacggcagagggtgtctcagggggtgctggtctacccttcacactgctctccacttgcttatcttcctaacagaaagaacaggactatagctcaaatagcctctgactggccgggtgcagtggctcacacctgtaatcccagaactttgggaggccaatgcgggcagatcatttgaggtcaggagttcgagaccagtctggccaacaaggcgaaccccatctctactaaaaatacgaaaatcagctggacatggtggcacacgcctgtggtcccagctactccggaggctgaggcaggagaatcgcttgaacttgggagacggagatcgcggtgagcccggatcgcaccactgcactcctgcctgggcaatagagcgacactctgtctcagaaaaaaaaaaaaaaaaacaagcctctaaccgaaattccatcaattcagccaaaacagatatttatggcaaatactgctggttttccattgaaagtagtaagaccaagtttcccttaaaataaatgaacttaagtttaaaaaggataaagtattacacaaataatggcactttttggtccctgacacttggaaacgtcaccttttcctttagatgctaatatgcataaggggatgtcctccaaccacccagagacaaatgggaaaggaaagatacttgtgtctgtaaagaggcttctccgcctcgctggctgaaggccctcgctggctgaagacgcacccacactcagtgaaatttctcaatacattctaggctttcatataatcttacccatggcaattcttatcatttaatagtctttaaaacacaaattctaaaagctacactgcatttcctggctctgacaccctgggttttttgatagcccctctctggttaagcatgtcgcaaatctgtcttgtttctgctgccttttggaatgaatctctttgcccctgaactctccggcatatttctggttctaaggataaattctgtaagaagtgtagaaacatttttaattctcttgatttaaaaagttccattttttggccaggcgcggtggctcacgcctgtaatcccagcactttgggaggccaaggcgggcagatcacgaggtcaggagatcgagaccatcctgggtaacatggtgaaaccctgtctctactaaaaatacaaaaaaaaagcttagccgggcatggtggcaggcacctgtagtcccagctactggggaggctgagccaggagaatggtgtgaacccaggaggcggcgcttgcagtgagccgagatcgtgccaccgcactccagcctgggcgacagagcaagactccgtctcaaaaaaaaaaaaaaagttctatttttgttttatttatgtttttgagacgaagtttcactcttgttgcccaggctggagtgcaatggcgtgatcttggcttacggcaacctccgcctcccaggttcaagcaattctcctgcctcagcctcctgagtagttgggattacaagcacacaccaccatgcccagctaatttttgtatttttaatagagacaggctttcaccatgttattcaggctggtcttgaactcctgacctcgtgatcccaaccgcctcgacctcccaaagtgctgggattacaggtgtgaaccaccacgccaggccaatttttttatttttagtagagacggggtttcaccacattg

SEQ ID NO: 1561097 - DNA, 4001 bp, Homo sapiens
cccaagtgctgggatttcaggtatgagccactgcacctggccctgcaccaagccttttacacagatggtcacgcgatcttccacaggaccccctcattcaatccacataagttcgctaaagacctactatgtgtcaggcccagggtactgtggggccagccaggcagacacaaccccagctctcacggtgctgggggtgacagctacaccggaaaggaccaagttgatgtatgaatgtagctgaggggaacaatggctagtccgaggtggccagggaaagtcaaaatacaatcctggcgcagtggctcacacatgtagtcctagcactttgggaggccgaggtgggtggatcaccttaagtcaggagtttgagaccagcctggccaacatggtaaaaccccatatctactaaaaatacaaaaattagccaggcgtggtggcgggcgcctgtagtcccagctactcaggaggctgaggcaggagaatcgcttgaacccaggaggcggaggttacagtgagcggagattgggactctgaactccagcctgggcgacaggcaagactctgcctcaaaaacaaaatacaatcctacacaccctccctgattttgaggccccctcttccaagcagcccccgtgatctctggctaccaccgatcccctgcctgtccgctgtgtccctctcacagtgcaggttcagagcaataaacgataggccaagagagtttgttcccacatttaccacccgctcccctccaagactgcagaggctccaggatccaacccccgaccatccaacacttagtagggcctcaagaagttatctgctgaacaatgagggagattggaccagacaattacaatagtgcttcccgcttgcgaggaaccattttacaggctttcaccaattccatttgggagattaccccctttcacaaaggagctttcacaaaggaggaaaactaagaggttcagagaggttaagccacttccctaaagtgacagtgtgctaagtgactgacagcaccaggaatcaagcttgaatgcagcctatcaatccaaactgaaaacttgcttcaaattcctgcgaagcggcttttccgcttattcccttgctactttccccaaggagtcactgaccaaaaaaaaaaaaaaaaaaaatcaagactggtatcttcaagatcgggacaaaacactcgcccaaaaggtccacgttgaaaataaaagccttaatctgaaaaaccaattgggaaggagaaaaaaggatgcaaaagaaaagcaatgcttttacacagcaaaggatttcctccgtgctcccctacttgccgccgaccccatccccaaccccaattcgggcaaacattttgaagtcactaactgcaaggcatcgggggagtcctttacctttccttgaaaatctggaatgacacgtttttaagacaatttgaggtcggctagcccaaggggaccgctaatgcccgtgtccggccgacgccggacatatctggaggtttggctgagccccgatcgcagcttcgccaaaaacgcaacattcgggtcggacccgttaccacgcagccagaaaagccccaacgcctgcctattgttgcagccgctgtaattgggagggcgactgtaggggtgccgggcgaggggggcgagctttgtccggcgaccccggcgagagcgcgcgcggagaggatcgcgcggcctccacgcggcccgggccccccacccaccccgccgctccgcgggggccgccgctgccacggcctcgcgacactgtggccttccccacgcgcgcggctgccggctgggcttcttgaccctcgggcgccgccgtaccccggccccgcacagggcgcgccggcagccccctcccccctcggcgccccggctccattcaaaccgccctccccggccccgcgccgcgctgcccccgcggcccgcgttccttaccaggagccgccggcgccgtcgacttcccggcgcctcccccgcccctccgcgcggggccgggggcagaatgggcgtctcgcttctcttcacgaaacaaagaagccgccgccgccgccaaacgaggggaagcctcgcgcgcgcgcccgcccgcctcggccaccgcccccccttcacacacacgcgcgccacccgcgcccccgctgcgcgcgcgctcgccggctcccctccccctcagcaccgcggcggcctctccagcttccgccgcctgcccggcctcgtgcgcgcgccagcccgcccttccgctcccggcgcgcgtgcgcgcccgtccctgggcggacgggggtgggcgtggcccggaggaagcacgcgcgtccgatgcaccgccccactcgggccgcgatggccccgcgcctgcgcacgcttcgccttctgcacgcctcgcgtcttgacgccccggagcatgcgcagagcggacgccactgcggcggcggtggcggcggccgcggtgacgatggggcaactggagaatgggatcccggtggccgtggggtccgtggggaaaggaggtccctgaggctcggaaataggaaccctggaccgtaggacgggccgcctggaccaagaccgggcagtggtttcccgcgggccaagggcgcgcctgggaaccgctttgatccctgacctggggcggcgaggcctatttggggaggcaaggcggggcccgaccgtggccgccttctctgcaaaacttcccaagtgccattaattagcttagcaaatatttattgatctgctactgtgtcccagccgccgtggagccctcggtctagtggggaaggaggacaagaagcaagattaataagcaaaatagtgcagtatgagaggccggacttggtggctcacgcctgtaatccagcactttgggaggccgaggcggccggatcacctgaggtcgggagttagaaacgagcctgaccaccatggtgaaacccgtctctattaaaaatacaaaaattagccgggcgcggtagctcatgcctgtaatcccagcacttagggaggcctaggctggtggatcatgaggtcaggagatgagactatcctggctaacacggtgaaaccccgtctttactaaaaatacaaaaaattagccgggcgtggtggcacacgcctgtagtcacagctactcgggaggctgaggcaggagaatcgcttgagcccaggaggtggagattgtagtgagccgagatcgtactattgcactccagcctgggcaacaagagtgaaattccgtctcaaaaaaaataaatagtacagtgtgaggtgaacactgggaggatcatggacattttaaatagggcagccacggaagtcgtcgttgcaaagaacacgtttgaatgcatacaggctggtggtgaaagagagaaaccttcctccgagagtgaaggccctgagcctcttggcctcttctgtgtgttttcttttttgtgtgtttgtttgtttgtttgtttgtttgtttgtttgttttgagacggagtcttactccattgcccaggctggagtgaggtggcacgatctcagctcactgcaacttctgcctcccagattcaagcgattctcctgcctcagcctcccgagtaactgggactacaggcgtccgccaccacgcccggctaatttttgtatttttagttgagacagagtttcaccatgttggccaggctggtttttaactcctgacctcaagtgatccgcccacctcagcctcccaaagtgttgggattacaggcgtgagccacctcacctgggtgggtttttgtttaattgtttgttttattagagacagggtcttgctctgtaacccaggctggagtgcaatggtgtaaccacagctcagtgcagcctcaaactcctggactcaagggatccacctcagcctcccaaatagctgtgactacaggtacatgccaccaccaccagctttttttttttttttttttttttgtctgttatgttctgtagagctgaggtctgctgtgttac

SEQ ID NO: 1561098 - DNA, 4001 bp, Homo sapiens
atcctcccctgccccacctcataatgacataaacaggtccctccgagactctccagaatggaagggtctgtttacaagatgcagtcataattttgctagccagacaagtggcttgtctagctcctctcctactgtgctacatgacctctcccagagccacaagccaggctgaagactgctttcctagacagaggaggacaagggcctgtttacagctgcttagggaaaatgactcattccataccgaaatgactgcttagtctgggatggagattctccccagaatctgagactcctccctcacttgcaattaagtgtctttacacattattctgaaatctacccagtgcttaagtacttgtcttcatgcctcaattgggatactgcccagccctgaggtttctgtttactggcctatgaggatgccctttcctgtgcaaagtaagcgcccctgtgtgaatgcttttcttttttttttttttttttttttgagacggtcttgctctgttgcccaggctggagtgcagtggcacgatctcagctggctgcggcctctgcctcccgggttcaggcaattctcctgcctcagcctcccaagtaggtgggattacaggtgcataccaccaggccgggctaagttttgcattttcagtagagacggggtttcgccatgttggccaggctggtatcgaactcctggcctcaagtgattcgccagcctcggtctcccaaagtgatcggattccccgggtaagccaccgcacctggcctccctgtgccctttattctgggagcttccacagtatctgaatgtggggagttccttggaacttaaaagcccacctaaaccaggtgtggaggatacagtgagccgagatcgtgccactgcactccagcctgggcgacagagcgagactcttgtctcaaagaaaaaaaaaaaaaaccccacccacatgcaagctggggacttccaatgctgtttccgggctcctttggggattacccccaaacttaggaaagctggtctatttaagtgtctgctgatggacttctagggtgacttcccgaaaattaacaaatcgaatttacatatttttggggagtgtctcctcagtatttaggcatcgcttcacacactcccttcggggatctcccagaacctcactatttgcaaatatttggggagactctcccgattcctgagtatgtaagcccacttcgtggggcactccccagcccagaactgtagtcgatttgcacattttcctaaggactccctaggatttaaacttctctctacggggttctagaagggagcctcccccggatttaggcattgctttacaaagcttccctcggggaacccaactcaagtttctcgttacacgttattggggcggcctccccagtacttgacgggcagtttgcaggctgtacttggatctcgcagagcataagtttctcatttacacgttatttccgtcccccgcccccattcctgccaacccagtatcgaattgacggtcgccggccccctactcagtgccgcacccccgccggacgtcccagcgacctttcaatggccaaggcgggggcggggcctgccggagcgccccgcccgccgccggtgcgctagcctcgcgcgggctcgcggcccccttacctaacgcggctgctgattggttctcggggcgcggtgtgcgctctcccgtgacgggagtcgggtgggggcggggaggctgacccaagccacccgcctgcaaatggcgtctgggggccaggaacgtgggaaggagagaaaatgggcactccccactccgaaaccggcctcggcgtccgggttgcagcccctaaggaaagctgggccgaaggaagaagaggaggaggatgtaacgcgggcccgagctgagatcagttccctcaggcgactcgtcctgcgcatgcgctgagggctggagctcgagaactgaatgcgctcgccgggctgagcgtgcgtggatggaggcggtcggcttcagcacgcatgcgggttccggagcgggaggcgggaggacgccgcggctctgactcaatgcgcgtgcgcgcggttggggggttgagggtggggagatgagtagggaaatggatacgccgaggagccggcaggagggagagcggcccggatctggggttcgagttgtgcctcttcggtgatgttggcgggatgcagtggggtgggacgacagggaggaatttcactgttctgggctgagtgccaagaacacatgaatgaatcagacttggcgtgcgccctggaagacaccccggcctgtggagagactgccagggcctcaaatcacttaggaaagggcgcgggtccggttggaccttgaaggacaggcaggcgagggtactccagggaacagctaagcaaaggcggcgaagaccccgggggaagaggtctagactggcttggattcagggtccacctgggtgggaggtgaggcagcagaatgggcaggtcagaccctgaagggtctccagtgtcagttttatccttaaggcctgggagatgcagaatagtctgagacagaactatgtttaaaaccctcgaaggccgcgttggagaagggaatccgctccagggtcgaaaatttaaacacacgtgggcggagtcttgcgcgcgccaaagaggaacattgggcgacgggcgcggcctggagagcgcatgcgcattcggaagggtcggcagttccccagtgggcagagtgggtggatgggaaggttctagctttttatttgaaattttatttatttttattttatttatttatttagagacggagtctcgccctgtcacccaggctggcgtgcagtggcgagatctcggatcactgccgtctccacctcctgaaattcaagcgattctcctgcctcagcctcccaaatagctgggattacaggcgtccaccacgcctggctaattttttgtatttttagtagagactgggttttgccatgttggccaggctggtctcgaactcctgacctcaagtgatccgcccgcctcggcctcctaaagtgctaggatgacaggcgtgagccaccgtggctggtctaaaaaaaagttttttaaaattatatttgaacaggtattacatgtacatacacaattcaaacctctctggctgtatacaataaaagtaagtttccacctctggttcccattttcctttcctaaagcactggttcccggtttccttctggagctgctgttataataaagcattggagttaagagcatgtgttgagttcatataaatagcggctgagcttgaccaagtgacttaatactctctacttctacgtccctgtttgtgaattgggtgtggtataaccttacttacaacattgccgccagcattaaatgggtgagagtgcatagaacagtgcctgttgcctaatggtactgtgtgttgtctctgtgtattattttgtggtctaccatgctgatagttgtagattctgagcagccctctcccctccaggcctcatccctactgtcattgtcccagtaccagtaccaggtggagccacctctccaggctgccacaggtagaaacaccagtcacccagaatgacttgagtccactgttgatggattctggggaaagattctgggtgtttgataaagatacacatgacaggccatctctgtattatgtctatcagtgtccaattttacttcttcagctcaggccatatctgaatttctcaaccccagatcactcacgattgccagtttcacgtcagggcaaccctcagaggtagaattttcttaaaagagggaaagaggaggcctggcattgaccttggacccactgtgtaccaggctgtgtgctctctgctttatatacatcactataatcttctcccctaatttgtttaacagatgttggtccgcgcagtgactcacgcttgtaatctcagcactttgggaggccgaggcaggcagatcacct

SEQ ID NO: 1561099 - DNA, 4001 bp, Homo sapiens
cactcacagtcacacacactcacattcatactcacacacatacacactcacatactcatatacacacctacagccacacatgattctccagtctgcacatttgtatataacaaatgggataggaaacgacatgaattaataaataaatcagccaggcgaggtggctcacacctgtaatcctagcactttgggagaccaaggtgggagggttgcttgagcccaggagtttaaaaattagccaggtgtggtgtcacgagcctgtagtctcagatattggaaggatcctttgaacctgggagttcaaggcttcagtgagctaggatcgtgccactgcactccagcctgggtaagagagaaagactctctcaaaaatcaatcaatgagtcaatcaagaggactcttttactgtcacttttctacaaatgaaaattaaatataggtccagagaaatacttctctattgtaaggagcacatgaacaaatggcagtggatatatggcatggggagagacgacggaggcagtggggagtggggcaagagagatcaggtctcctgtctgaagaagctgcaccatgcaactcagctaatgtctgcagagcaaacgcatgggactggtgtcgcccatcctgtgatttctcaaaagaagactggaaatctatattttcagatggcattttctacatttcatgatgtcaataattatttccagtgtttaacaggaagacacctttagtcaaatagcacaagttgtggggctgaattagaccctggggttgcccatttgcaacctcagtgtgggccggggagtctgttgggagtgaggagaggaggctgcctagacatttttcagggcaagaaaattcctatgggaccttcgtgggaaagagtgttagagagtaccattagggagttctgatttgtttattgctttggggttttgcttggctttgtttttaatatgagacataattaatcatggatctaggttgaggggaggggaaggcatgagaaaggagaaaatgcaggcaagcggggtgacagatgggaaagacgacagccatcaggtcaaggtcaggagaagctggatccgcagtgaatggaggaggaagaaggaaaggggatgagacagaggtatggtggggggaggagattcacaccccacagcctcagtgttcatggtgaaatagcaaacaagtcatcccctgagagaatggagacgcagtcacaacaacgacaaccagcaaccacagtaaaagcaataaaaataccggcagtgtttcccggagcccagaactctccttgtgcccagccctgctgagccctgcgaatcccttttctcacataaaggtggccatacttctcgctacagatactattaggtttccatttaacagacagggaagtcccctgatcaaagccacacagctcagaagagtgggggcggggctgctgcacctgtttgctgagagcctgcgctcccaccgttgcagggtggtccacaggggcccaggcggacacacaacgcgaacacgcacaggtgcacactcgggcaggtgcgctgaacaccccagggggagcgaacatcgacaccaagccccagcgagacgagcgcacgtgcccgtgccgccccacgagggtacacaggtctgtgctcccctcctcacgaggaggctggaattcacctgcaacccccaagccaggacacagacctccgctgcggagaaacagacccgaccccgacagaccccggtcctctcccaccggacgggcttggagacgccctctccccggaccctatccctggagcggttctgcccctcaccctcgcccaggcacacacaccctctgcgcatccatactcgcgcgcgcatccccggatcgccgcccgcgcccccagccccttttctccgcctccttcccgcccgcgggggtccctcgaaggactcaccctccccaaccggaccctgtctgggctctgcagagctggcgccgcactgactgcggctgcgcagacgcggaggctgcgggggggtggggggaggtgggagatgggaggtgggggaattggggagcgtgggtgtcctcctcccctcctccacccccgggaagcctgcacctggaggcgcgtggggaagggagtggatgagccgcagaggcggggtacccgcggcgtggttgcaggggggtgtggtaccgagctggtccatctctagctgatgagcacgtaggttatgttcgaggtaccctgcgacagacgccccaaggccagcggctttgcgtacgccccccgtggttctccagtctgcaaaccgggagtccggggtgggcggaagggagaaggagctggggcagggggtggcagcccggggaccctgaggcccgaccgcctggggcagcggctggctttgccatttgttactagtgagtcctcgggtgtgttacttaacatttccgtgcctcggttgcccatgctgttaagtgggaataattatggttaccaagtcccaggatttctgtgaaagtaaaacaataataacaataataagtaatacacgtacagttcttacaacagtgcctaatagctgctattattatcaatgaccattgttgttcaaatttacaatgcagtgactacagccaagttgctctcatggaggctacattaaatttttaaaattttcggcaaagccataggtagggggaaaacggcgtccctgcatcatcttagctacatttccctgattactagtgaggagaattaaacacatgtatttgaacaggcttattctctcttctgtgaattacccgtttatctcctcctctccgcattgttctatttgtttatgtagcttttacttactgattaatagacattctttctatattctgcacattaatcctttgcctgttactctatctgtggcaaatattttctcctggctcctcccttatgtttttattgtgtttacacagtgcctgaagttttgaattttaataaaaatacaagatatcctttttatttatttatttattttttgcttttagggtcttaagatgcccttcctcagccttgtctctccctctcttccccgcccctcctccccctccttgtctctttgagacaaggtcttactctgtcacccaggctggagtgcagtagtgtgatcatagctcacagcagccttgaactcctggcctcaagtgatgctcttgcctcagcctcttgagtagctgggactgcaggcatgtgccaccacacctggctaatttttaaattttttgtagaaacagggtctcactatgttgcccaggctggtctcaaactcctggcctcaactgatcttcccagctcagccttccaaagtgctaggattacaggcatgaatcacttctcctggcctccccttactctcataaacacattttcctgtataatcttatattttacagtcttattttatatatttattttgtttgaaccttctggaatttttttgaatggtatgaggtaaggatttaacctcctttccctaatggatagaaaattgaattaccctggttattcagaaaaacaaaaataactgtcatttatcaaaaaaatactacaaggaaagccatctcgttaatattatctcatttaattccaacagcccaaagtggtagtattattatccccatttaacagagaagagaactgaggcacaaaggagttaaatgagttgtacaaaggacacacagtaagattatggaaggactgagattgggtttgcctacgagttttcagataggttatgtaattgggatgggaaactttcttcatttctatgtttagaagatgagtttcctgccattccaaagatagttcagagtgtgcagagaagagagatgaagtgtcaagaattagacatttcatccaatcctcatcacctcctttgataacaagacatttagtgcaggagaccaggtgagctgccccaggtcacagagtcttgagagggtt

SEQ ID NO: 1561100 - DNA, 4001 bp, Homo sapiens
aagcggtgtgacagcctcagcctctgtcccaacctcccagccggggctcatgaaccccaggacgcaaggaagggctgggctgcctggctcgttgtcttggggagacgggcgggtgcaagcccgggatctgggctctgagagtagaggttggaggagcagcagggaaatgggagaccttcggactttgaggctggtgatgggggtaccagagagggttgggaagctgggggtgggggcagggctgtgggggcagcggggtgggggcgggcacccacctggccttggaacaccagaggcggttggccagcaagaccaaatagacgatgaacaggaagccgactaccgcagccaggcccaccagccacggcttcaggcgatgctccgtggctgcaggaagttggggaggttcgactcagaggaagaaaaggtcagaagacccccttcccccaccaccctagcaaggagagagagaaggtcactgggggtgctccgacagagggggtattggaaagggacggagcttcagagacctggatggcgtaggggggtcgggagggtttagagagggggagggtaccttaccagagtgggagggagcctgggggcccagagaggggaggggcttataaaagaaggggggcttagaggggacggagtttacaaatcaggagggctcagaaggggcggggcttataatgcaggcagaggctcagggggaggggcttataaaggcggacctcagaagggcggggcttatgacaaaggagtggctcaggggtggggtttataaaggagaacaagctcaggggaggggcttatgaaggaggaggtggctcagatggggagggcttataaagaagagtctggggggttggggcttacaacagaggagctgttggggggagcttataaaaggaggcagaggcttagagggaggggcttataaaggaggagctcagaggggaggtgcttataaggggagagggtctcagagtgggaggggcttataaaggcggcagaggctcaggaggaggggcttataaagaaggaggagctcagaggggaggggcttacaacagacgaggggctcagggaggggtctataaaggatgagtgagaaggaggggcttacagaggaggaagaggctcagatggggaggggcttgtgaactagggggctcagagtgggaggggcttgtagaggaggcagaggctcagggggaggggcttataaagaaggaggagctcagaggggaggggcttacagaggaggagggactcggggaggggtttataaaggagggagagtgagaaggaggtgcttacaaaggaggaaggggctcggatggggagaggcttgtgaactagggggctcagagggagaggggcttatagaggaggcagaggctcagggggaggggcttataaagaaggaggagcccagaggggaggggcttacagaggaggaggggctcggggaggggtttataaaggaggaggagtgagaaggagcggttcacaaaagaggcggggactcagatggggaggggcttgtaaaggaggcccgagctcagagtggggccgagctcaaggcggggggttcagccaggtgtgctcagaagggctggagaggggaaaggctcgggtgggcggtggggggtcccttacagaggagggcagagcccagcgagagggaggccgggcggtactgcgggggttgagaagggcctccaagccactcttccttttcttcctgccccctctcctttttctcgccatggaaaattgggagatggtgatcacctgaccaactcccctatcccgcgacgccccctcccgcccccctgcacctaccctgctgggcctccaccggggagaggagcagaaactccagcaccagaagggcccccagggtctccatgacggtcgagtgagccagcagccagccagcggcggtcccgggtcggcgtccacaggtttggtgtgggcgaggccctgcctccccgtgataaggcacaggcggtccccgggcgggggatgcctgagacctgggagcggggcccgcccctggcaccacctgattgggcatcctgcccctcccctgccagctcctgccccatcgctctccctccgggaggccagactctggacctgtgtaacaattaactgagggagtccctcctccctgcaccctgccctggggaccatcagcctcagggccacccctttgtgatccctgctgcaggggctgagctgagatggctgcgacctcccgtcccggcccaggccccgtgccactctggacacagggggaactcacaaatacaactggaatatcttaagaagggtgcgcccacccagtgcctcacacctgtaatcccactacattgagaggccaacgcgggcagatccttgagcctaacctgggcaacttagtcaagccctacctctacaaaaatagaaaaattagccaggcgcggcgggcacctgcaggcccagctactagggtgtgctgaagtgggaggatcacttgagcccaggagtttgaggctgcagccagttatggccgcaccaccgcactccagcctgggtgacagaggaagaccctgtctcaaaggaaataaaaaaaattagaaatacaaagagttaccaaggctgggtacagtgtctcacgcctgtaatcccagcactctgggaggctaaggcgggagaatcgcttgaggccaggagttccagaccaacctcctcccgtctctaaaataaaaaatgtaaaacttagctgagcatggtggcctgcacctgtagtctcagctactcaaagagactgaggtgagaggatcgcttgagcccaggagttcgaggctgcagcgagctacgactgcaccactgcatgcaccaccgcactccagcctgggcaacagaacaagaccttgtctctcaaagcaaatttgagagtcaccttttgtgctctcagagtacacatgaggctccgtgctcggcaatttcacagatcgcatttccttttcttaacaccccgtgaaatggtgccggtctcattgtgcccaggaaagtcaaggtcacgcagcaggtctgacctgggatttgaagccgggtctgcctcgcccccagcttatcctgcctcgcccaggctcttggcccctgaggacccacaagcagccatgggagcacacagggacagggaaggtgtgcagaggccacatgcccgtggtccacctgcaaaccgggacgctctcacgtggggatgcccgggagcgttgatgactcaggctccaggctctcctgtcctcaaccttggtccctcggctgattagatagtgggccctgcccgggcgaagggggaccccgccccagctgacacgggagcagccatggcccagacgagtggtaggaaggcccggcgtcatcgcacaggtgtttatggagcgcctgctgagtcgctgtcacttcctctcttccggaggtctgcggatgaccgctgagcagaccggccactcagcaggatggggctcacacatcccagccccaggatggccacaggtctgcttgaaccagccaggcaggcatctattaaactctgactgtgtatcccgtcttgtgcagggcttggaagagaaggaggccttggtgctgtctgggagctctcgatctgattaggaagtcaggaccaccccccagagacaagcaaacccagcagccgaggcgggggctggagaagatttggaggtaggggagcccagcagagggggtgggggcaggacccgccttggagatcctgccctccaaagtcagtcagttgtctgggctttttctgagaaaagcactctgtgctctgagaccttggcgaagccacttcatcactgcgtgcctcggtttccccatctgttaagtgggggcgatcagtcctacctcggaggattaaatgagatactgcatagaaaaagcctgctctgcacagcagcaggtacacgctaagcactcgg

SEQ ID NO: 1561101 - DNA, 4001 bp, Homo sapiens
gagggcaaccccatcaccatcctgtgactccctgcctctgtcacctaacgtcacctctgtcactatctattccctgcttagaaaccatgtgtcccaccccatggtaagttccactctatctgtcttacccctgctgtaccccagcacctagcacagtagccagcatgcgttaggtactcaaatatctggtgaatgaaagaattaatgaatggatacaatagtcatgtacagatccccttaagactccaaatagttacacaatcaaattcagcaggaagtgtaaattctggggcctccagggcccaggcagatgatagacatatgaaggggttagggctgggatgaggcagagtctacaggccccacctcctcagagtccttctcaactacactcaatagatgcaaacagctctcctgaatcttgagttgcagaatgttccaatttttcaagaaaaatcagacatcttaatttttatataaaatctcctgattaaaaatctaatgttggcatctaattttaaaagtggcaggtctgcagcactctgaaagcaacagctatgtgtgaggttgttcattcattcattcacaggcatcggaggacgggtacggcaagaacaaaggatgggacaagccaagctagggcctcttctctgaagtttacagtcatatgtgaggggcagacattagccagatgacagcaaacataacagaacattataacggtaggaagtgatgtgagtgctcacatcagggaggtctggtaggagaaagaaatagatgacagaggtaggcagaaaggctagcacattctcagtcatctcccactcacacacacgctcaattaaagagaaaacttgtggctcacgcctgtaatcccagctcttcgggaggccaaggcagggatcacttgaacccaggagttcgagaccggcctgggcaacgtggagaaaccccatctctacaaaaaatacaaaatttagcctggcatggtggcacacacctgtaatcccagctactaagggggctgaggtggaaggatcactttagctcaggaggtcgagtctgcagtgagccatgatcgcaccactgcactccaacctggacaacagagcaagaccttgtgtcaaaaaaaaaaaaaaaaaaaaaagagaaagaaagaaaacgaaggtagggcttggcgaaacagaactgtcctctgaagtggaccatgcaattccaggatccaattagaccttacctgtgctgggctccctggactcctccccaaagccctgcgtgtccttctttttcctacaaagaggagcagacagtgtccactttcaatgggacatagagtcctcagccccctgacccccagctcagaaggccacaaacactaagtttcagccctggccctgccgcaaacttgctgtgtgacctctgacgttcaatacccttctctgggcccccactgcccggacaatcacagccaggtcagcagccaccgaccgtttacaaagtggcccgacagtgcgggtgcagggcggaaggtccgcggtggggctatttcttgggggatggggcttaagctctccaggaaggtgaacagagggacaaccaaggaacggagagtatgggtttaaggtctctcggggggtggggggcgaggaagataaaccaggctggaggcgtgcccagagggcggatagggcggggcctgcggcttgggggcggggcctgagaagtgcgccgagatcacgcttatgagggcggggctacgggttccccggatggagccgcagtccggccgcgacctactcacagcttaaagttcagcaccgccccggcattcatcagcaacgtcctgcagagggagaattacagttactaggggcgcccccgcgtcctgcctggctctctcttcccagcctctggtccccctaattacccgaacagcaggatgtctccgatcatcgttacggccgaagcgtccgtcagaaccggaagcggaagccccagggagggaggggagaggagcacaagccgaccaatcctaaagcaacagtggcgagggctgggccaatcgaaggtcaaggctgggagggtcccgccctctgcaggccagacccccttaggggagcgcgagcgccccacctcgctggggaggccccgagagccagaatgggaggagcggggtctcctgggggcgggattgggtcacgcgttcgaagcgtgccgcgcatgcgtgaggtctcgatgccgtagggttagctgggcagcaattcctactcactttctggggtcccaaattgggcttctggacaaaaggaatcctttgactcctgagctgcacagggtgcggggtcctgacgcagtggggtccctagaaacgggtgccccaaccaactgggctctaaaatgagatcctcctgggccccatggggaacgggggttcccactgagctgccccccacaagacgtcctgatttgcagagccccaccggagacggggttcctgatcgaacggaccctatggggcagaaaagtcttgacggggctccacagaggaccgaggtcctaacctatctccacggggaacaggggttctgattcatggggtcccaccatggcgtaggggtcctcactgggctccaccgaagatcggggtcctaattgagcccacggggacaaagtcctggccgatccggccccctgggaacgggcgtcccgcgtgggtgggctccgtgagggacgggcccccagaacaggcagctccccagcctccctcgccttgcacgggtgccccgcaccccgcctcgctgggcggaacggggtagcgatggcaggagggtcaacgcctgggacgcccgaccgtccagctgcgtccgtggtgctgggcgtccccaccacctgtcccggggtgggccgtcgcccctcctctcccgcgggggccgggcctggggtggcgcctggcgggcgggggcgggcccagctgcgggggcgcagtcgccgggccgcgggcggcgggacggacgaggccggggccccgggtggcacccggcaggcgggcaggcgggcgccatggagctgctctcggcgctgagcctgggcgaactggcgctcagcttctcgcgggtgccgctcttccccgtcttcgacctcagttacttcatcgtctccatcctctacctcaagtatgagccaggtgagccggggcggggggctggaggggaccggcagcgggtggcgcgggccggggcagctcgggggtcgcagagaggggaagcccgtgcgtggtggagggagcgagggacaggttcaaggattgcatcgtgggagtaggcaggcgctagaatcgtggggttctctcacgccggggtgagcccgggggagaagcccccaggacgatgaagctgggggaggggaaggagaggcgtgcgcgggtttagaggagggggaacaggtgcttggggtcggggctcctggttgggtcagagctgcaggaacttgggcaaggggcgccggctgtggcgagggtgcaggtgggggtcggtgcatctgttctggccgcgcgcaggtgtgacctccctccttgaccttggcacgcggattgagagcgccagcggagtgtctataagggccactgcgctgggggctgcggtcaggttcagcgaaagtgacaccggttctcctccccactgcaactgcccagcaccctccactcccctcccttcccccacggtgctgaatctccgagcccccacgggaattcttccagccctggctccagatcctttccacttacggagcagaaccggccccaaggctgggtgacttggggtcagtgtcctccatctcagctccagactccacgctggggaggtcacaggagggtacagcctgcttcttaatttttaaaatgaggatgaatggcttccttagaacgtgttctatttttataaaaggttcaccgtgaacaaatgtttaaatgtttcttgttcaccgttattctagaacaccag

SEQ ID NO: 1561102 - DNA, 4001 bp, Homo sapiens
acagaggacaagtacttgtagatcttctcaaagtccacagcaaagtcttcttcagtggagggaccagccgacgactcagaaggtttctcaggggcagggtcaggagtcctgggtgcggagctaggtgcagcaggggcagagctaggtatttcaggggcggggtcttcctgtcctccaggggcgctcaggagcaaaggctttccacgggcctgcgtgggcttggggggcttggagtgcaggagggtgaccggttccgtggccgcgatggtgagcacctggcaggcagaacaatcagggaggaagaggagctgggaagtcttctcaccgtctacacattcccccatcctccctgccaccctaagatgctcctcagacaagagatggcctcagagccagggacactgaggctcgaggtgtccagtgactgacggagtccacagagctggcaaaagggcccaggacccaggttcacatgatttggcccatgtgaccctgtcctctgggacaccctgacctgcctgggggaatggcggtacctgcgagaaagccactgccagggcttcttccagtggccctgttatcttctcagccagatccgtccagacctgagtgaagccagaggtacagggtcagcccagggatcagcctgcaatggccccccaagccctgctcctcctggggatcccctaatcaggttatcccccgcaactcccacctacccaccagggacctgccctggacagcctcaccctgttcatctgcctcacctctatgggggctgggggctgtgcctcccggcgccttggtccctgaaggccacccggatgcactttctgaatggcctcccgggctacgcggcccttgagctgctggaggaagacccggatctagaaaggaaagaggcggcggaatgaggcttctatgagctcagggctgcagcagagaagccaaagcccaatcccttgtatgctctgggccccgctactgcgccttagtctcctgctggcccggtgttaggagtcccagtgactgccaaggcccctaccccacccagagcgtgaccagctacctaaggaagttgtaaggcccaggccagttccggctccttcacgcagccagggcccaaccctatgctgactactaccccgttcaactcccttcttcgtcccctcttctctattccctctcacttcaagctcgtatcctgtccaacagcatgcgttgcttttcgcccggactcggcagcatcttactcccagttcattccgcccgtttagccctcgcctcacccacgcattaccccgaggctcgccccgcctttaaagcttgccctcatcccgcccacgcccctcccacgccttactcccaaaacggccccgcccttaagtcttgctattaacccgcccacgccccgcccccaggctcgtcctgcccctcaaactcacccacccactctccaaacctcagcggcacgcacgccccgcccccggcatcgccccgcccctccgcttcacttatgccccgcccacgtctagctcccaagctcgccccgcccctaggtcttctcttcccgtccacgccccgcccctcaccccgcccaggctcacccactaacgccccgccactcagccccacgccacgcccccgctcgcttacattcctggccccgccccgctggctcctgccgcagccccgcccactctccgccccaccccagccccgcctccagcctggctccggtcccgagaaccgcatctcacctcagcctcgctccggccccgcagctcccgggccagctcggtggcgtccggctccggctggccctgccgcgcctgcaggagtcgcactagctgccgcttctcgcgagcgctccaggtcgcgggaccggtcacctcgcccagatagcgcgccggggccgctcgccgcctgggaggtggcttcatgccgctcagaaagaggcaggcgctgtaaggtcgcttctccgatgggcggagctacgggggccgccgaggtcagaaagaaccgcgcggaggcggacgcgcgtgggggcgtggcttcgcgtttggaggcccggggaaccgccccaatggaagtgaaggggagatcggcaccggaactggggcggggcgaaggagaccctcagcctgcactttatctcattcatgaagtggagacgacaccttggatcccatgccctccctctgttgctggactaactcatgaagctactactgtgtgctttgcttctcgcagaggggtgggttctggccgaaaggtcaagtccgaagatccagtcggtcaagagcctgggctctggggtcagacaggcctggggactttgggcaagtgatttagccttgccgagcctcagtttcctcctctgtagactggggctgatagtcccactcttgtctgtgtaaggtagagtggagctcgggcaggagggatttaaggagctctagactagactgacaatctaagaggagggcgaagtccagaccaggagggaactggagcagaggcagaaggtcgaagcggagctagggcagggtccgggcgggggtaatggagagcggagaaggcctggcttgagaaagatcgcaggaggcagatgggcaggtgtccgggtaaggagaggagggagggggaaggtttattttaaacttacgcttgtggggttgggtgccgctttttttttttttttagacagatttttgctcttgttgcccaggctgcagtgcaatggcgcgatctcggctcactgcaacctctgcctcctgggttcaagcgattctcctgcctcagcctccccagcagctgggattataagcacgcgccactacgccctgctaattctttttttgttactttttttagtagggacggggtttcaccatgtcggccacgctggtctggaactcctgacctcaagtgatccacccacctcggcctcccaatgtgctgggattacaggcgggagccaccgcgcccggccgggtgtcgctttctgtttgagacaaaacgccctacagtctcccatggcctgggagtgcacacgggtatatgggcatatgggccccgtccccaggctccacccctgtaagtcacgatttctcaggaataccccccaagtcctgctcccagctttctccccaagcctccccacctatcccccaccccgcacgttgcgcgctcactgactgcaccagaacttagccggtcagtccagaggtttattttgagcacaggtgggagggacagggggaggagagaagcgcaggggtcgtggcctcatcaggtccgaggtccagggaggcgggtccggtcctgttggtcctggtcccgaattggtagctgggtgtatctccggaccatgttgggggcgcaccatccctgggaggggtggctgaggctcagcgagggaggggacgctacgcgggccacctcccttcccagcagaccactagcctcttccatcggtctgcatgccggggtgagagtgggagccgggtccgaatgctgagttctcctcgcctagtgcctctcctcacctaatgcccctggctcgacccaaagcccgcgcctgccgcgggtgacccactgcctgagttcgaatccaagctccacccagtattgtgacttttgacaagttacttaattcagagaatgcctcatcattctcgtctctaaaatggggattataatagtgtccgcctagaggttaaggggattaagttagttcataggcgtaaaacatttacaacagtgcctggaggctgggcgcagtggctcacgcctgtaatctcagcactttgggagaccgaagcggtaggatcacctgaggtcgggtgtgcgagaccagcctgaccaacatggagaaaccccgtctctactaaaaatacaaaattagccgggtgtggtggcgcatgcctgtaatcccagctactcaggaggctgaggtaggagaatcgcttgaacccgggaggcagaggttgcggtga

SEQ ID NO: 1561103 - DNA, 4001 bp, Homo sapiens
tggcgcgatctcggctcattgcaacctccgcctcctgggttcaagtgattcccgtgcctcagcctcccaagtagctggaattacaggcaccatgtccggctaatttttgttatttttagcagagacgtggtttcaccatgttggccaggctggtcttcaactcctcacctcaagtgatccgcctgcctcggtctcccaaagtactgggattacaggcgtgagccaccgtaccgggccacaaccccacttaaaaaaaaaattttttttttgagagacgaagtcctgctctgtcacccaggccggagtatagtggcacaatcacaaagcactccagcctccgactcctgggctcaagcaatcctcccacctcagcctcctgagtagctgagactacagacgcactcgaccacacccgacacccggctccaaccccatttaaaacagagaaactgaggatcacaaaggttaagcccctcgcttaaatcacgcagctggcaaaatggccagaagctggactcgcaaatccaacccgttgctccccagaacccaaaccattcctggcctgctcagtgaactcacctcaaactctcgaatgtacggcgcaatgccacaataaggttgattgtggtgtttttcatgtggcagtttctccaggggtggcaggtatggaatagggtcacggggggcaaagagggccagaaggttgggcggcaggaactgggtcatcttgccaagtctgagagcagaagcaggacagccttaggttagatcgggtctgcacagagaaagcccctgttactccttgactctcaaaataagaaagacaggagaaaagtctcggaattaaaacaggctctgtaagggcagagaacagtcctgtgttgcggagaaaagggtacgtcttggtgggggtggaggtgaaaggccggtaaagaaaacaaaaataacggctggaaaagggttcctgaagagtgaagtctcagagtcctctgacacgagctgtggggcggagaggttccctgggaatttctggggaaatcaaggacccgaggagggaggcccagagcagctgtggctgctcgtcccgtgccgtggagggcaaattacgagatgcagtttgcagggtcctggggatcggaagtttccaagcaaagaaagagaaacataaggagcgaagccccaaaaccaagtgcttgtgggtaacagacctggaccccgcaaaaagcgaaaggaattatgggtaagggtccaggacaacatagacaaacgaaaaagaaaaaaggccacacaccgcaagggcctgtgggtagggaaccacgagggcgctgtgggaagcgggcgtgggtgcccagagatttcggggtccgggaaagggatgcagaagggacctgtggcggggacgcgggaaaggggcctggccgcggggaagaggaccgggcccaccgctggggcttctgggtagcggccccgcaccccgtcgggccactcagtcacactcactcaccgcgtagcgccctcctcgctctggcgtctgtccggaggctcgcggcggctgcggcagcccctcagcaacaacaactcctgcttcggcttccactccgggggcgtccacgtccgtctgattccgtcgcccgctaagcgagcgcaccaggccgctgctcagccacccgcgcggcctccgatagcgactggagcagggggtgggtcccggccgcaaatccctccgccgtcctcactgcgcacgcgccgtgcggtgccaacaacaacccacacactaggacccggcgctgccgcgggcacagcgcacgcgcgaggtcactaccccgcctttgggcaccttgagtacctcagccgcggggggctggcttctgcactgcgcgcgcgcgcttgccccaagccgcccctccacctcccgctttccgcgccgaaccgcctatgtccgcgagactctccctgatgctccgcccctttccgatcacacttcccggatctttcgcgcatgcgttttgcgtagagaactgtaacgtacctctccgccgcctagcaaagagtccctaggtgaacagcctgattgcgttgatgtctaatctattcaatcaataactattcatcgagcatctcgtgtgtgctaggcactgtctgggctttgggggtacagcacgtgattaaagcaaagtcttctgctgctagggcttacattgtactgggagagacaataaaagcatttaactgaataaagataatttgaggccaggcgcggtggatcacgcctgtaatcccagaacttttgggaggctgaggcgggcagatcacctgaggtcaggagtgtgagaccaacctgaccaacatggtgaaagcccgtctctactaaaaatacaaaaattagccgggcgtggccgtgcgcgcctgtaagcccggttactctggaggctgaggcgggagaatcgcttgaactcgggaggcggaggttgcagtgagccgaggtcgtgccattgcactccagcctgggcgacagagcgactccgtctcaaaagtaaataaataaataaataataaaagataatttgagatagtggccagcataatgaagaacgatggagcagaataaagggatgggaagtgagagcgaggctgttttagaaagggtgataatggaaggcccctctgaagaggtaacatttgaataaaggacagatagaagcgagatctggggtggggccgggggggcggtgtttaacagtaagtgcaaaggtcctgaactgagaccagatggcaggaatctcaggttgttggccatgagatcagagagctggcacttgttatttagagccctgttcttaagtattgtatcttaagttttgtggatggattcaatagcctgtttaataactacagaaattattgcaaattaaaatgactaattttatgtttcaagaaaaaggccgagtgcagtgctcacgcctgtaatcccagcactttgggaggccaaggcgggcagatcacctgaggtcaatagttcgagaccagactgatcaacatggagaaaccccgtctctactaaaaatacaaaattagctgggcatggtggcacatgcctataatcccagctacttgagaggctgaggcaggagaatcacttgaacctgggaggcagaggttgtggtgagccaagatggcaccattgcactccagcctgggagacaagagcaaaactccgtctcaaataaaaaaaagaagtgggaggatcgtttgagccgagaaagttgaggctgcagtgagccaagattgtgccactagactccagcctgggcgacagagcgagactccgtctcaaaaaaaaaaaaaaaaaaagaaagaaaagggctgggtgtggtggctcacacctgtaatcccagcactttgggaggccgaggtgggcggatcacctgaggtcaggagttcgagaccagcctggccaacatggtgaaatcccatctctactaaaaatacaaaaattagctgggagtggtggcacgcacctgtaattccagctacctgggaagctgaggcaggagaattgcttgaacccgggaggcagagattgcacgactgcactccagcctgggcaacagagtgagaatctgtctcaaaaaaacaaataaaataggccgggtgtggtggctcacacctgtaatcccagcactttgggaggccaaggtaggaggatccctgagatcaggagttcaagaccagcctgggcaacatggcgaaaccccttctctactaaaaatacaaaaattagctggacatggtggcatgcacctgtaatcccagctactttgaaggctaaggcaggagaatcgcttgaatctgggaggtggaggttgcagtgagctgagactgtgcaactgcactccagcctggacagagcaagactctatctcaaaaaataataatgatggctgggcacggtggctcacacctgtaatcctggcactttgggaggctgaggcaggcagatc

SEQ ID NO: 1561104 - DNA, 4001 bp, Homo sapiens
tttttagatctggaaaatgaggttcaataaaggtgataatttacttgagaatgtgagagagtctttccgatttcaataattgagttctttttttttttccttttttcagataggttcttgctcagcccaggcagcagtgcagtggtgcaatcatagctcactgcagcctcaacctctctagctcaagcgatcctcccacttcagcctcccaagtagctgggaccacagacgcaccccacccacgcccagccttttttttttttttttttttttttgtagagaaaaggtctggctttgtcgcctaggctgatcttgaactcctgtgtttcagtgatcctcctgcctcagcctcccaaagtgttgggcttacaggcctgaaccaccacgcccggccaaaaattgggttcctaagcagaattctatacgggtggcctcaaccactttacttgctatgtgaccctgggcaagtcacatcacccctgtctcagtttctttttcttttctttcttttttttttgagacggagtttcgctcttgttgcccaggctgtagttcaatggcgcaatctcggctcactgcaacctccgtctcctgggttcaagcaattctcctgcctcagcctcccgagtagctgggattataggcatgcgccaccatgcccggctaattttgtattttcagtagagaaagggtttctccatgtcggtcaggctggtctcgaactcccgacctcaggtgatccgcccgcctcggcctcccaaagtgctgggattgattacaggggtgagccaccgcgcccggccccagtttcttagttgacgaatgggaataacaatagccttcttcctacaagattgttgtgagaattaaatgttatcaagatttatatgaaagcacacagaccagcccatgatacagagcgttagccaccattatggtacatgttcattgtgggctgatcactgaaaaagccggtgaccaagaaagccccagtccttgccctcacggagttcaaaggccactgggaggagagagagccccacgacagctcagaggaatcagggcttgatgggagatggtctcagcgtacggcaagtcagcggcagccacgtgaagggacaaggcaaggcttcctggaggaagggtcctgtgacctcaaaccttgtaagatgagcagcagtgaccacgttaaagggcagagtgtaagatgaactaatggagtgttgaagacaggaagtagtttgtgtaaaggccaaggagttaactcgaagtttggctggacaaacacttagaaagagaggcgggtgcaggggacggaagaggggccagcccgtgcgggacagtctggactccggactatcccgagaactcaccatccttcttgatcttctcattgaggttgttgatataaatagtgtggttagggcgggtctcgggaactgccatggagtgaagtgttgaggtaagtcttaaaggaggaaaaacgtgactttagccctgggtttctccaaatcctttgtcccaacgtcggctgctcaaggatcttcctccgaaaaggaagtcaggtaaggcgggagtaggggcaaggacggaggcaaagcgcgacaacaaagcgtgcgtaggacccgcttctccagcccgcgtgcggagagaactctcgagagatttactacgacttccaggatgctctacgcgacccggtgggcggagcaccctaaatggcgattcccattggcccaagcatccgaagggccgtcccggagaaaaaacccggatgtgggagccagtatagaaaaaagggacaggtcctaggcagcctggcctcgagcagcaagtttcctcagacgggcccaggaaggcccggacgccaagcgtaccgctcgcctgccgccgatggtcgtttgcaccggaggttaccttccgacagggccgtagttctctcaaccggcgcctgctacttccctgagaccaaaccacaaagctttctctcctggccccgcctctgcctttctgccagccaatcgccgcgcggaaacgcagtagcttgaccaatcagagcaagtctcgtttctgggctcagctgttgccaatcaaaacgatatttgggttcccgcctaggtagaaaaaccccgccccactccctgaaagcccacctccttccgtggcgcccgggtctacggaccaatcagtgaaggtcacgagtctgtacgcgtctcgcgctgcggtgtcttccggaggcaatcctttttggagtcccgcctcttacccccgccagagctgcgttttctgtcacgtgatcgcaaaatgggcgggaactgttgcgtgtaataccacgtgatatgggaaaggcagtgtgcgggggccgccattttccgggagtgggaggtgcactttacttcctgactcctttcctttttccagtggttatcgcggcgcccaccggcctctgatctctgagtcttctccaacccacagacgttttttgttgctctggttccaggaccttctccacaactaggccattttccctgccaggtgtcctttttgacctcttgacctctgactcaaaggtcagctcaaaggttccgaactcgggcctgggatgtgagggggtactgaacctaagttctccgaatctttagccctgggtccctaagtcgcatccttaaggcacctcactctagatctgagccttcatatcccaaactcactcatgagtttccacatccagccccaaagaatgagttaactcctactaactctccacctaagactcccgaggtaacccaaccggtaccacagatccggttccggatttaaggaccccaccctgttaaccgtcaggtgccttatgacttgagtcagcctcgcaattcctgctcccgtggtttcaaatattagccctggtcctttcacacccactgctcagtccccagattctggaactcagctcttaaacctttaaaatctccatccctgagaccgttctccgttggaggatccttccctccccgctttctgaacctctcaacacctcctgtagaccccaaaatgacttctccatgctctcctcccctaaaaccaccaatttctcctccaaaaacccctgtaccccaagccagcagcattccatctcctcctctacccccaagtcccctggacttttcagctttaccatcccctccctggagtcagcagacccctgttcccccaccgctcccactgcctcctccacccgctgccacagggcctgctccccgtcatgtcttcggcctggagaagagccagctcctgaaggaggcctttgataaggccggcccggtccccaagggcagagaagatgtgaagaggcttctgaaactacacaaggaccggtagggtctccatgccccacccaccacccaggctctgccctagacacttcacagatctcttggggtggggggggggttcccgtgtcctcaagatcaaacaggctgactacttaggtcccccacctagatctcttccatggtggtgtgcctccagcaatgaagaaagctgtcctcacaagtgcccagtccagtccgggtgctttggctcatgcatgtaatcccagcactttgggaggccgaggcgggtggatcacctgaggtcaggagttggagacctgcctgaccaatatggtgaaaccgcatctctattaaaaatacaaaaattagccaggtgtggtggcatgcaactgtagtcccagctactcgggaggctgaggcgggagaatcgcttgaaccctggaggcagaggttgcagtgagccaaaattgcgccactgcactccagcctggaagacagagcaagactctgtctcaaaaaaaaaaaaaaaaaaaaaaaagagcaaatgcccagtctagtgagagagacagatccctccacctttccagacagtgacaacccagagtggtcagggctgtcatgacaaagcccagaggggtgtctgacccaggctggggagtcagggggagc

SEQ ID NO: 1561105 - DNA, 4001 bp, Homo sapiens
ccgggcgaggtggcgggcgcctgtagtcccagctactcgggaggctgaggcaggagaatggcgtgaaccccagggggcggaggctgcagtgagccgagattgcgccactgcacgccagcctgggcgacagcgagactccgtctcaaaaaaaaaaaaaaaaaaaaaattagctgggcatggtggcgcatgcttgtaatcctagctactttgaaggctgaggcaggaagatcgcttgaacccaggagacagagctcgtgctactacactccaatctgggtgacagagcgagactccatctcaaacaaacaaaacaaaagaaaaccctcccatcctccccccatctcagtgtagaaagtaaaaccccgaccagacacggtggctcacacctgtaatcccagcactttggaaggtcgaggcgggtggatcatttgaggtcaggagtttgagaccagcttggccaacatggtgaaacctggtctctactaaaaatacgaaagttagctgggcatggtggtgggtgcctgtaatcctagctactcgggaggctgaggcaggagaatcgcttcaactcaggcggcggaggttgcagtgagctgagatcgcaccattgcactacagcctgagcaacagagcaaggctccgtctcaaaaaaaaaaaaaaaaagaaaaagagaaaaagatttttcttttcccttggggactagaggtttcattcactgatgtatcctatgtagcttaagcagtgtctgatacataagcattcaatgtaatatctgctgcactaataaatgcgcaaaatcatgtcaatgactcgttcgttatccgtgtaagttgtgaatcaagtcgaaaacgcacccgtctccagctcaaatgatcaagataagtcccttatttcaaataattatttctaaaagtcctaacttccctcccccattattcgttttatttcttttgtttcgttttgagatggagtcttactctgtcgctcaggctggaagtgcagtggcgcaatctcggctcactgcaacctccgcctcccgggttcaagcgatcctccggcctcagcctcccgaatagctgcaattacaggcgcccgccactacggccggctaatttttgtatttttgttagagacggggtttcaccacaatggccaggctggtctcaaactcctgacctcaggtgatccgcccgcctcggcctcccaaagtgctgggatttacaaacctgagccaccgcgctcggcctcccccagtattcgtaaaatcgctgccccttaacattcatttcaataggactaattatctaggaccactcccgttatcgtttaaaacatgtttttcataattaaatttttttttttttttgtagagacgggggtctcgctatgttgcctaggctagtctcgaactcctgtgttccagcgatgctccgccttggcctactaaagtgctgggatcacaggaatgagcccccgcgcccagcccagggcgttatctgataaagctgtcccctctcccgaagtcacgatgcgtcaaaggccccacgcccgttctcaaactcatcaggagaaaagcaggacgctgcatccctaaaacatctgcccctgccccccccgctctgctcaacccttcccacactcaatcggtcaaatatccaccctcaacctcattcccgccgcctaagcctagcccggcctcacatgatggtcactacgctctccgttcactcccgtttcctccgcgttgctgctgcctgaggagagagaggcgggacttcctcttcctgcgacccacttccgttggcgcctgcgcaaagccaaccagtaagtggaggcgtggcctgttgccacagcattccccaccaacggtgcacaatgatggaataaaagcttcgggtaggggttcgcggccagtcagaaccacacgggggcagatgtttatgacaatgaagacaaaaggaaaggcagtctgattcaaaccgtttcttgaagaatggtacaggttgaaggagggaaatgacaagctatttccaaatgcccgccggccgtgacttcgggggcgcggcctccgtgaagccaatccgctcctcgcttcggagacaggcaccgcccctcttccctctgggacgcgttactgacgtatctactgatctttccgaccctgcgccaccaatcccctgcctacatccggaaggggcatggacctgcgcccgggagatcgaatattttccatgatcaaacgctgttcattggctttccctcctccgctaaggcggagcctacttctcttgcgctcccatttgggtcgtgccattctcaggggaaccaaccccaatacctaagggaggctgggaggcgtgtcctcaggaccgtagttcttattggtttcgctgctcgctgtggggtgggctggtgcagccgcagctgttgcttattggcccaccgattccatggggaggaacttggctgggcctaaactcaatccgtggtctggtacaggtttcagggcaaagcggccatgcgttccgggggccgcgggcgaccccgcctgcggctgggggaacgtggcctcatggagccactcttgccgccgaagcgccgcctgctaccgcgggttcggctcttgcctctgttgctggcgctggccgtgggctcggcgttctacaccatttggagcggctggcaccgcaggactgaggagctgccgctgggccgggagctgcgggtgaggctgggcggggacccgggcaccgcggggaccctcattccctccccgctgttacccagggttgacgtggctttagcgtacggccctaaccgcagatgccaccgtcttcgtcatctgagcgcatgacccttaccaaaggaataaggcttcgggctggttctgcaacagtagcttccttttaagaggaaaggtctgaaatagtaagacgggggggttcagggttctacgcctttagtcaactatttggaagagtcccttcctccatctcccctctctctcactgggcctcgatttccccatcaagtttgaggtaggctggaccggatggtcttggaaggacttttcctgagccttggatttatcctagaagtctccgatgctggaggcggcagattaggaagagaacccggggctcctcgcgggtgacggcgcccggggtagggttgaaatgggggggttgctctcattcttcccttccctatcccacctccttcccaaggtcccattgatcggaagcctccccgaagcccggctgcggagggtggtgggacaactggatccacagcgtctctggagcacttatctgcgccccctgctggttgtgcgaaccccgggcagcccgggaaatctccaagtcagaaaggtaaagggacccacctccagtccctgaccccctagccctccagggaatgggaaataagaatcctgttcaagatcccaaagaagctaagaggaggaactggggctctgactggagttaatcggactctagactccatgctggtaacaaaccaccaggctgtactgccccccttaatgcccccaccaaaagcttactgtgtgctaggcataggcaacagacagccctataaggtgggtaccaatatgatcttcattatgcagatggggaaactgaggctcagagaggttatacacattgcacaaatcctacagataataagtagtagaccttagccgggtgcagtggctcatgcctgtaatcccagcactttgggaagccaaggtggaagaatcacctgagaagtttgagactagcctagtcaacctagtgagacccaatgtttagaaaatcatagacctagagttgaacccaaacaggttggctccgagctggtgctgtaatgtatctgttgtcttccagaaagcatgaagagtcatttaaaggccaggcgcagtggttcacacctctaatcccagcactttgggaggccgagacaggcagatccctcgagatcaggagtttgagaccagc

SEQ ID NO: 1561106 - DNA, 4001 bp, Homo sapiens
ctgggcgtggtggctcacacctgtaatcccagcactttgggaggccgaggcaggtggatcacccgaggtcaggagtttcagaccagcctgattaacatggggaaaccctgtctctactaaaaatacaaaaaatcagccgggcctggtggaatgcatctctagtcccagctactcgggaggctgaggcaggagaatcgctagaacctgggaggtggaggttgcagtgagccaagatcgcgccactgcactaaagcctgggtgaccgagcgagactctgtctcaaaaaataaaaaaaaaaaaaaaaaaggaaaagaaaaagaaaacggaaaaaggccaggcgtggtggttcatgtctgtagtcccagcactttgggaggctgaggcaggaggatcgcttgagcccaggacttcaagaccagcctgggcaacatagcaggaccccatctctacaaaaatttaaaaaaataaaaattagacatgatggagcatgcttctagtcccagctactcaggaggctgaggtgggaggattgcttgagcccaggaggtagaggctgcaatgagccaagattgcaccactgcactccagcctgggcagcagagcaaaaccctgtttcaaaaagaaaaagagagaacaatacacagcttttggaccccactgccattcatcgtgcctggaacaggacctgagaatctgcattttcaggaagttcccacttgctgctgctgctgtttctggtccagggaccacactttgagaatgattggagttgagaccaggatgtttgaaatgtttgaaagagtgtttaccttcccagcttggtgtgaggattcagtggcacgtaacgtaagacaggcttggccaggtgccgtggctcatacctgtaatcccagcactttgggaggctgaggtgggaggatcacttgagcccaagaatccgagaccaccctgggcaacatagctggaccttatctctacaaaaagaaaaaaaaaaaaaggaaaagaaaaagaaaagaaaacaaagaatgctccatgaacatcagctgtcatttattatgatatatatatattttttaccatatttcatggactctaaagtgctaccaatggagagaagcatcctgattgagatgtgagaagctctgcgtcttagaaccagtggaacagagtaatacaatcaaacccacgggccgtgctcccctgccgctcagtcaggcctggggatgcttcccctagcaccgggctcctggtggacagccttagaagggatgaagccagggccgcaagaggttgtccagggcctctctggccatttagtgggggaaggacatggggacatggggagtggcggatctgggagaacagtcccaggccctgtcctccctgttggtcacagcaaacgtggaggaagcagcatacccagccccagtgccaggctggtggtggcccccactgtctggctgctcggggctctgttacacaggcggccggtgcagcagttggtggtgaggctgtaggtgacgcccctgtagctgacgggttcctcaaggccgcagctggtggctcgcaggcagcctttgttgatgaccggaccagtgcccggggcgaccccgtggcctgtgaagcagtcctcgtcatcgccacagtgcatgtaggtaccaggacactgcatggagtcggtgagctcacagaagacgcagtccttgacgcccgtcgtgcctgggggcagagccatcaccagaagcagcagccagcacaggaccatggcggcctggcggcgttgaccctgccccagccaggccgtgggcttcccagacctcccggaaccgctgaatgaaggacctctgaggactcctcttgcccacgggactttggccctggtcctggcctcccagggtcagcgcctggagtgtcctctgttcccaacgccctgcgtccctctaagtcctggggatggaggtgagcgggtggctgctgcccaacaagagtctgtgaatggaatgagtgatctcacagatccctcagggttcccactggccgctctggggatgaggtcataggtgagaggagtgggtgtcacaatccaaggggtggcctgccccgccgacctgccggggcgcaagagggctctgccatccctgccaaggtgaagacgccctgaacccagaggacgctggccacaagcttgtccgcattctctgtgctgtacacccgccaagggcttgacttcagcctcacacctcccatagtgaccccatattccagatgggtaaactaaggctggggaaagtgatgtatccagggtccccgagccaggatgagagccaggttcattgaattccaaagaggctgggaaagaagagggtgtattaactgagcacttgctgtgtgccaggattcatgctcagtgcttgcttgcttttatttttttgagacggagtctctcactctgtcacccaggctggagtgcagtggcgtgatctcagctcactgcagcttctgcttcccagcttcaagcgattctcgtaactcagcctcccgagtggctgggactgcaggcgcatgcaaccacatctggctaatttttgtatttttagtagagacagggtttcaccatgtaggccaggctggttgcgaactcttgagctcaagtgatctgcccgcctcgacctcccaaagtgctgggattacagacgtgagccaccacaccacgcctggcacttggtgctttcaataacaactactgtgatgacaggaagtgttagggcaccggcccccacagctcacaggctctcagggccagctacgtgcagggggcttgattcaaattcagtcatttgaatattcctatgttgtatttatttcttaattttattttttattttaaaaaattggccgggcgcagtggctcacgcctgtaatcccagcactttgggaggccgaggcgggtggatcacctgagctcaggagttcaagaccagcatggccaacgtggtaaaaccccatctctactaaaaatacaaaaatttgctgggcatggtggtgtgcacctgtaatcccagctacttgggaggcttgaacctgggaggtggaggttgcagtgagccaatattgtgccactgcacttgagcctaggcaatagagcaagactccatctcaaaaaaaaaaaaaaataggatcttgctctgttgcctagactggagtgcagtggcgcgatcttggctcactgcagcctcaacttcccaggctcaagtgattctcctccctgagcctccagagtagctgggactataggcgtgcaccaccatgcccggctaattttgtaaaattttttatagagatggggtcttgctatgttgcccaggctggtctcaaactcctagcctcaagtgatcctcctgcctcggcctcccaaagtgctgggattacaggcatgagccactgcacacggccttcctaggtttttgctccagattgcagatgagcactgcagggagcagcaacgtggagagcttggtgcacagccaggactgactaaatggcagtcattctaggaagcagctgggtcttaaaacaatccctgttagtgtccggaagtgaattccgtctctttccaaaggggaaaactgaggcattgaggtgttcctaagtggggaccaggcagagcctgggtttaaactccagtctgattccagataagttttttttttttttttttttttttgagtcagagtctcgctctgtcgcccaggttggagtgcagtggtgtgatttcagctcactgcaacctccacctcccgggttcaagcaattctcctgcctcagcctcctgagtagctggaattacaggcatgtgccaccatacccagctaatttctgtatttttagtagagatggggtttcaccatgttggtcaggctgatctcaaactcctgacctcatgatctgcccgcctcagcctcccaaagtgctgggattacaggagtgagccaccgcatctg

SEQ ID NO: 1561107 - DNA, 4001 bp, Homo sapiens
tgtaatcccagcactttgggagtccgagacgtgtggatcatgaggtcaggagatcgagaccatcctggctaacacggtgaaaccccgtctctactaaaaaaatatatataaaaatattagccgggcgtggtggcgggcacctgtagtcccagctactcgggaggctgaggcaggagaatggcgtgaacccaggagacgcagcttgcagtgagccaagattgcgccactgcactccagcctgggtgacagagcaagactccgtctcaaggaaaaaaaaaatacagtcttgaagagatatttgggcacccgtgttcatagcagcgttattcaacacagccaaaaggtggatacaacccaagtgcccatggatggatgaatgaataaacacaatgcggtccatccttctatatcatgaaatatgactcagctttaaaatggacggaaattctggccaggcgtagtggctcacccctgtcatcccagcactttgggaggccgaggtgggcgatcacttgaggctgggagtttaagaccagcctagccaacatggtgaaaccccatctctactaaaaatacaaacattagctgggcatggtggcgcataagtgtgttctcagctacttgggaggctgaggtgggaggatcacttaagtctgggaggcagaggttgcagtgagccaagatcacaccactgcattcaagccagggtaatggagcgaggctctgtctcacagtaagtacacaaaatgaaaggaaattctgatacaggctatgacatggatgaacctggaggacattatgctccatgaaataagccagacacaaaagggtagatattgtatgattccactaggaagggtagatattgtacaattcctcgtaaggttcctagaggagtcaaatttgagacagaaagtagaaccctggtgggtgccagggtctgagaaggggatggggagtgagtgtttcatggggacagagcttcagtttggaaagatgagaaagttctggagatggatgatggtgctgatggttgcacagcagtgtgaatgtgcttaaggccactgaactgtgcagttacagatagtgaagatgggccggacacagtggctcacgtctgcagtcccagtactttgggaggctgaggcaggcagattacctgaggtcaggagtttgagaccagcctggccaacgtggtgaccccccgtctctaccaaaaatacaaaaattagccgagtgcggtggcaagcgcctgtaatcccagctactcaggaggctgaggcaggagaatagcttgaacccgggaggtggaggttgcggtgagcccagggcctggcagcagcagatgctccataaaacatctgaatgccttcaggaagaagggatgggctattgtcacaaccatttgacaaggaaggaagctgaggcacagagaatttaagaaactcacctcaagtctcacagcggacatggggatgggtgctaggattcaaacccggagctttgactcctgagccccagttcaaaccctgagacccccagctcctgctcacggagagctcagaaggggccaacccctccagactcctatatttaccactaaacccctggggggtgggggatggttgctgtcataaagccgatttctcagatggtgaaactaaggctcagagggggccgtcccagggggcatagggcaggagatgggagagtccaggagagaaggggttttgaggtgggcctggtcgccccctcccagcacccgggccccttcccccgtgggcccgcgaccacgctccgaccctcacctcgcagctgcttctcggcaccgtcttgcgtttccagcagccgctccaccacctgctcgtggcgccccagcagccgtcgctgctgcgcctccgcgcggttggcgcccagcaggctgagcagcccctggctcacctcctctatgtcgcggaaggcggccatgactacgccaggctccaacccgcgcaaatttgactgtccgcggggcccgccctcttccagaagaggttgctttccattggattttttgatacgtcagtcataagcaatggccaataggcatggggaacaggatcttagactgggctaagccgcctttggtctggcctggtgcgcctgcgaccactcctccgtcagtcatcggtgatgaccaatcggcgcaggaagggggaggctccgttatccttcccgatgcgcctgcgcgggagagaaagcggctgtttatttctccataggtcgagcgcttgctctgtgcagggtggggttctaacggcaaagcagcgagcagcttctcctggaacttacatcctacagtgtgtgcgtgggatacacaataagcatagagaataagtagattctatgagaggctgcatagcaaaatggcgtctgcagccagatttactgggttcgaatcccagcgttgccacttactagctgtgttaccctggacagacttcacctctctgtgcggtactttcctccttagtaaaatgagggtcatactagtgcctgtgtcagcgttggcgtgagaattcttcttattactttttttttagagacaaggtattgctctgtcacccaggctgaagtgcagtgccacaatcatagctcattgcaacttcgacctcctggcctccagcaatcctcctgcctccgcctcccaaagtgctgggattacaggcgtgagccaccgagcccagcctggcgtgatagtgtctcctattcagtaggtgctatatagttgtttaatgaaacatacatagaatcctagcatgtagctgggtgcagtggctcacgcctgtaagtctgagctctttggaaggctaagacaggaggatcgcttgagccctggagtttgagactagcctgtctcaaaacaaaacaaaacaaagaaaagatcagtgctgactctaaggtgctggttccatgctagacactggtatttctgcaagaaacaagatgttaagatggcatctttttttctttctctctctttttttttaagacagagtctcactctgttgcccaggctggagtgcaaggcattccagcctgcttcctgggttcaaggcattctcctgcatcagcctcccgagtagctgggattacaggtgcccgccaccgcacccagctgattttttgtatttttagtagaaacggggtttcattatgttggccaggttggtcttgaactcctgacctcgtgatctgcctgcctcaggctcccaaagtgctgggattataggcgtgagccaccgcgcctggcgtggcaacatttttatgtgtgctaccacctaaagaacatctcattgctttcctatgatttttttttcttttcttttcttttcttttttttttttcttgagacagagtttcgctgttgttgcccaggctggagtgcaatggcgcgatctcagctcactgcaaccaccacctcccaggttcaagtgattctcctgcctcagcctcccgagtagctgggattacaggcatgcgtcaccatgcccagctaattttgtatttttagtagagacggggtttctccatgttggtcaggctggtcttgaactcccgacctcaggtgatccacctgcctcggcctcccaaagtgctgggattacaggcgtaagccactgtgcccggccttcttttcttccttcttttttttttttttttttgagatggggtcttgttctgtcccccaggctgaagtgcagtggctcaggtgatcctttcatttcaaccttccaagtagccgggactacaggtgtgtgtcaccctttggtgcctgagagcatggcttcttgaaccagctgtgtaatgttggcatagacctcacttctttgtgcctaaaggcagtgaataacaattaggcagagtgaaatcaagaggggaaaagacttcaggttcactttctgatgctgcagcttacctgtgaccttggcaggttcctaacctttctaagccatagtggc

SEQ ID NO: 1561108 - DNA, 4001 bp, Homo sapiens
gcctgaccaacatggagaaacctcatctctatgaaaaatacaaaagtagctgggtgtggtggcgcatgcctgtaatcccagctacttgggaggttgaggcaggagaactgcttgaacccgggaggcggaggttgcagtgagccaagatcgtgccattgcactccagcctgggcaacaagagcgaaactccacctcaaaataaataaataaataaaaataaaaaaattagccagccatggtggaggctacttgggaagctgaggtgggaagatcactttagcccaggaggttgcagctgcagtaggctgtgattgtgccactgctttccagcctgggcaagagtgagaccctgttttttcttttttttttttgagacggagtctcactctgtcacccaggctggagtgcagcgcgatctcggctcactgcaacctctgcctcccgggttcaaatgattctcctgcctcagtctcccgagtagctgggattacaggtgcgcatcaccatgcctggctaatttttgtatttttagtagagatggggtttcaccatgttggccaggctgatctcgaactcctggcctcaggtgatccgcaggccttggcctcccagagtgctgggattacaagcttgagctaccacgcctggcctccaattttttttttttttttttaaagaaaagcttcagattttgtctttccacagtatgaggatcttggcttttagatggtcccttacctggtcctgctgctcctctgcttcaaggtgtccattcatctgctggtcctctgctctgttacatcaacgggaccctggccctgggtcttaagccatagtaggctggtaggagcaaggagtcaggtctcactgtcctggcctgaccttcagctctgtggaggagaggtaagtgaggagcagcattgacagccaactgcaggaggcccttccaggctcaatgtgcctgagaaccaagaggcaggggcctccctggcgggtggggggaagagtagataagtcattttaatcactgccccagccagtccatctggttgcacacaatatgtatgctataataggagtgaaggctaatttttattgagcacttattatgtgcaaaatattgacctcagcagttttattaactttcataatcctgaaaaacacccctgtgtgccaggcctgttgtcatcccctttttgtccataaggagagtaaggcccaaagaagttaagtgattttcccaagatcacagagaggttaaatgacttgcccaatcaccccattagtaactagcagagccaggatttgaatttggttatagccttgcaaggccccatctcaccatctttctttgccactacttctccctgggtctccatctcacccctctttctaggtctccttcctaccctttgggcctccattccccccacccccaagccacggagtctccattttgcctcccctatgaaactctgtctccctctttctaggtcagggaagggccatctaggggccgggggagaaggagaagcggaactcaaaggatgggaatacaggatgctatagattgaggtgcagcaagatcatctcgggttagaccttaagtaggacttcccaagcagcggctgcgcctacgaagtgcagcgcgagatcagggagcggtgaacctgataaggaaacgcccgaagcgtggggtcggaaatttccagatgccccgactagccctgccagccccgcctcctcacctccaacactgggcccgccgggtcctccgggagccactgagaggccgtcggcgtcgggccagagcgtcaccgcgcgacgcatcgtgctagctacacgcatctcgctcccagatccctttcttccggaaagctatcgagaacacggcctgggtagggccagagaggcccccgacgtgctggcccttccctcttggacgttgcgcttgttcctgcgctctatgctctctgccgttatcgcccggctagtcagtcgtccaactcaccacagagaagtccggatcgtggtagagcgccgcgtcgcacccatgtgacgtcacggcggcgccactcgcttgaggctttccccgcccaccccagcccgttctctctttccggacctggccgagcaggaggcgccatcatggtgagctcgctttgcggcgttcggggctggataatccgctgccatccgccgtggttttgggctaggggcacgctggagggcggcagggggtctgcggctgcccggagggagcaattcccgatactggggacctactctgggggccaggaaagcagggatgggtcagtcatagcctaccgcccccacttagtagatgaccaagtggaggtactcggaggctgatatgactgggtttacaaagccaggaagtggcagagccaggattccgacccaggtggctggacccgcagccactcttagttatttggctttgctgcctttatctggacctgtcactttctagtatgaaaagtcgggttcgatgggggccgcggcgggtgagaggatcgagagccgaataactggatttggggaccaggcaggtctctgagtctcaggccccttcccaccttgtgatggtttttgagcctttgccccagtgtctggctgttcgttgggtacacagtaatctcatctgacaagtttgtgaatttgggaagaaataattcacaggagatgctcatcacggggttttgcacacagtaagtgctgcataagtggagctattaaatagttcttgtaattgtcaacacagtctgaaaaacttaagttgctcagaaaggcagcagggcggtaggagcctggcgaggcggctcacgcttgttatcctagcactttgggaggccgaggcgggaggattccttgcccaggagatcaagaccagcctggccaatattgtgagaccctgtctccactttaaaaacgatgttttaaaaagacactatttggtaagggttgttggattgactgatgctgtaggagaggtggttctagtagtattgctaggttctgaataaggattcgttttcatcattactgccattggtttgatatttttggttatccctccgggtatgggaaccagttttgataacattgttgcaaaatacaagttgtaaagaattgacctttttgtattaagttaatatgattgctgtgttacgatgtttcagggttctgtgtgccatgggctgaaggctttgtaaacagcccctttttacagagggatcagtggcagcccacaggtctcctggtggtgggcctgggatttgagctggtgtgttcagacctgggcttgtgtcccagctctcagtttcagaaataagtaataattggctatggttgggggtaattgggtccatggttgcctcttcacccccacagggagtggacatccgccataacaaggaccgaaaggttcggcgcaaggagcccaagagccaggatatctacctgaggctgttggtcaaggtgaggctgggccctgaggtctttgggaagggtcaccccaggtctgacttgcagatcctccattctagtgctggcaccaagctcctcccaggggcctgcagagcagtctcgggtctctggttctgttccagggtctcctgcatttgtattttcagcctctaggctgtgtacagctcgggagtggagccaggattttctaggtccttggccaggaaggacctgggccagctttctccctctaggtcggtgggttgggggaaagggataaagattattttagtccagatcatcatgtgtttgccccttcactggaaggctgcgggggagcaggctgtcccagcttctcactgtcttcccgtccctccagttatacaggtttctggccagaagaaccaactccacattcaaccaggttgtgttgaagaggttgtttatgagtcgcaccaaccggccgcctctgtccctttcccggatggtgagtggctggtccagagagcacg

SEQ ID NO: 1561109 - DNA, 4001 bp, Homo sapiens
cacttatggaagggctcccaggctgggcgcggtggctcatgcctgtaagctcaacactttgagagactgaggtgggagaatcccttgagctcaggagttcaagaccagcctgggcaacagagggagacctagtctctagaaaaaataaaaaaattggccgggtgcagtggctcatgcctgtaatcccagcactttgggaggccgaggccggcgtatcacctgaggtcgggagtttgagaccagcctgaccaacatggagaaacctcatctctatgaaaaatacaaaagtagctgggtgtggtggcgcatgcctgtaatcccagctacttgggaggttgaggcaggagaactgcttgaacccgggaggcggaggttgcagtgagccaagatcgtgccattgcactccagcctgggcaacaagagcgaaactccacctcaaaataaataaataaataaaaataaaaaaattagccagccatggtggaggctacttgggaagctgaggtgggaagatcactttagcccaggaggttgcagctgcagtaggctgtgattgtgccactgctttccagcctgggcaagagtgagaccctgttttttcttttttttttttgagacggagtctcactctgtcacccaggctggagtgcagcgcgatctcggctcactgcaacctctgcctcccgggttcaaatgattctcctgcctcagtctcccgagtagctgggattacaggtgcgcatcaccatgcctggctaatttttgtatttttagtagagatggggtttcaccatgttggccaggctgatctcgaactcctggcctcaggtgatccgcaggccttggcctcccagagtgctgggattacaagcttgagctaccacgcctggcctccaattttttttttttttttttaaagaaaagcttcagattttgtctttccacagtatgaggatcttggcttttagatggtcccttacctggtcctgctgctcctctgcttcaaggtgtccattcatctgctggtcctctgctctgttacatcaacgggaccctggccctgggtcttaagccatagtaggctggtaggagcaaggagtcaggtctcactgtcctggcctgaccttcagctctgtggaggagaggtaagtgaggagcagcattgacagccaactgcaggaggcccttccaggctcaatgtgcctgagaaccaagaggcaggggcctccctggcgggtggggggaagagtagataagtcattttaatcactgccccagccagtccatctggttgcacacaatatgtatgctataataggagtgaaggctaatttttattgagcacttattatgtgcaaaatattgacctcagcagttttattaactttcataatcctgaaaaacacccctgtgtgccaggcctgttgtcatcccctttttgtccataaggagagtaaggcccaaagaagttaagtgattttcccaagatcacagagaggttaaatgacttgcccaatcaccccattagtaactagcagagccaggatttgaatttggttatagccttgcaaggccccatctcaccatctttctttgccactacttctccctgggtctccatctcacccctctttctaggtctccttcctaccctttgggcctccattccccccacccccaagccacggagtctccattttgcctcccctatgaaactctgtctccctctttctaggtcagggaagggccatctaggggccgggggagaaggagaagcggaactcaaaggatgggaatacaggatgctatagattgaggtgcagcaagatcatctcgggttagaccttaagtaggacttcccaagcagcggctgcgcctacgaagtgcagcgcgagatcagggagcggtgaacctgataaggaaacgcccgaagcgtggggtcggaaatttccagatgccccgactagccctgccagccccgcctcctcacctccaacactgggcccgccgggtcctccgggagccactgagaggccgtcggcgtcgggccagagcgtcaccgcgcgacgcatcgtgctagctacacgcatctcgctcccagatccctttcttccggaaagctatcgagaacacggcctgggtagggccagagaggcccccgacgtgctggcccttccctcttggacgttgcgcttgttcctgcgctctatgctctctgccgttatcgcccggctagtcagtcgtccaactcaccacagagaagtccggatcgtggtagagcgccgcgtcgcacccatgtgacgtcacggcggcgccactcgcttgaggctttccccgcccaccccagcccgttctctctttccggacctggccgagcaggaggcgccatcatggtgagctcgctttgcggcgttcggggctggataatccgctgccatccgccgtggttttgggctaggggcacgctggagggcggcagggggtctgcggctgcccggagggagcaattcccgatactggggacctactctgggggccaggaaagcagggatgggtcagtcatagcctaccgcccccacttagtagatgaccaagtggaggtactcggaggctgatatgactgggtttacaaagccaggaagtggcagagccaggattccgacccaggtggctggacccgcagccactcttagttatttggctttgctgcctttatctggacctgtcactttctagtatgaaaagtcgggttcgatgggggccgcggcgggtgagaggatcgagagccgaataactggatttggggaccaggcaggtctctgagtctcaggccccttcccaccttgtgatggtttttgagcctttgccccagtgtctggctgttcgttgggtacacagtaatctcatctgacaagtttgtgaatttgggaagaaataattcacaggagatgctcatcacggggttttgcacacagtaagtgctgcataagtggagctattaaatagttcttgtaattgtcaacacagtctgaaaaacttaagttgctcagaaaggcagcagggcggtaggagcctggcgaggcggctcacgcttgttatcctagcactttgggaggccgaggcgggaggattccttgcccaggagatcaagaccagcctggccaatattgtgagaccctgtctccactttaaaaacgatgttttaaaaagacactatttggtaagggttgttggattgactgatgctgtaggagaggtggttctagtagtattgctaggttctgaataaggattcgttttcatcattactgccattggtttgatatttttggttatccctccgggtatgggaaccagttttgataacattgttgcaaaatacaagttgtaaagaattgacctttttgtattaagttaatatgattgctgtgttacgatgtttcagggttctgtgtgccatgggctgaaggctttgtaaacagcccctttttacagagggatcagtggcagcccacaggtctcctggtggtgggcctgggatttgagctggtgtgttcagacctgggcttgtgtcccagctctcagtttcagaaataagtaataattggctatggttgggggtaattgggtccatggttgcctcttcacccccacagggagtggacatccgccataacaaggaccgaaaggttcggcgcaaggagcccaagagccaggatatctacctgaggctgttggtcaaggtgaggctgggccctgaggtctttgggaagggtcaccccaggtctgacttgcagatcctccattctagtgctggcaccaagctcctcccaggggcctgcagagcagtctcgggtctctggttctgttccagggtctcctgcatttgtattttcagcctctaggctgtgtacagctcgggagtggagccaggattttctaggtccttggccaggaaggacctgggccagctttctccctctaggtcggtgggttggggg

SEQ ID NO: 1561110 - DNA, 4001 bp, Homo sapiens
catgttggccaggctggtctcgaactcccgacctcaggtgatctgcctgccttggcttcccaaagtgctgggattataggcatgagccactgcacgcgacctctgcctgtgctttttttttttttttttttttttttggagacagagttttgctcttgttgcccaagctggagtgcaatggcacgatctcagctcactgcaacctctgcctcctgggttcaagcgattctcctgcctcaccctcctgtagctgggattacaggtgcgcagcaccacacccggctaattttttgtatttttagtagacatggggtttcaccatgttagccaggctggtctcgaactcctgacctcaggtgatccacccgcctcagcctcccaaattgctaggattacagacatgagccaccacatccggtcctcttgtctttttgttccttctgtagcccatccctgtgtatcactcctaacggatccagagagatacatcacccagacacacagaaaaataaagacacagctgcctatggaggaaattctgcagagacaccaaggtggctccaggatagagcagctgcccagcacctcacccccatccccgggcagtggcagtcctcggagcagacaggtgagggcagtggcccagcgctgggcctcggcacggttctcttcgtaggtggcggccccatctgcccggaaggtgcgagtggctctgcgccgggccccgcgccggccccgagggtaggtgtagatgcagaagtaggccgctgagtctgaggggctgcggcttcgcagggtgcagcagcctgagacctcggccaacgggaccaggccaccccggggcctggcttcaggtttggggcgcagccgctgtatgtgcagggcctgcgatgtaagggtgagggcaaagcgtgggcctcgggctgggtaggagccaaactcgccatggaggagcggggtgctggcagccagtggcggtgggggcggggccatggccttagccctgaccagggtgctcctaggcccgtggccccagctcccggtcagctcctggtctggcctctgtgggaagggaggagagaaggggtgagaattcaggaccccatggcaggggcagggaggggcaggggctgtggacaggaggagacaatgaggggcagtggcaggtgagacaggagcatcagagacagacaggctcagacaggtgtgggcagaccttgaggatgcgggacagaggccagcatcccagagggggccggagacccgggcatgcaaacatccaatcatttattccccagtaagtattcagtaccctttatgtgccaatcacggtgctaggcctagcaaacacagcaggagacaaaatagccccaaatccttgccttcataggaatagataaacaagagaaaggattgaaatatacaggtggttgggtgatgataacgggctttgggggaaaagaaggcacaggaaggggaatggatagtgggattggatatgcagaaacagacatgcaaagactgaaagacacacctccccgacacccccaccccccatacggtgcagtgggtaaaacagcaaaacaatcacaaacgcaatagagatagggtctgagagccagagaaacactgagaggagacaaacagggtcaatgaggtgaaactcaggcgatgaaagatacttaagagagtaagactttttcaccccaacgagaaaggcaagacagagtggaagggagagcaaataggaggggtacgaggcaggcatggagacagctggagagaagggatatgacagggactacggggtccgagaggagccacatgcgagcgcctgcaaggggcaggggccaagagctggtccctgagcactgacctgggtgtctggccgcctgctctccagggagcgggtgggagcaggactgaggtcccttccccacaggccctctccctgccctctgcccggattctgcctcctcctttcgctcacctttgttccccactgccccgcccagccacctgccagtcctgcccctcacattccccaggcccagagcgccaggacagccccccaccccccaccgcctgtggactcacccttaggaactacatctgcccccctatccccagcggctctctcgggtccaggacgtctgcttcacccccaaacctgccctggccccattatgggaacctcaaatcaggttcaagcacagagccctagatgtcctccagtcttgggcctgggtctctgtccctgggtccccgagacctggacctgggtctccatccattggtccccaatccataggcctgcgtgtctggccctgggcccccaaaccgccatccgcactcttatttccagaacccagtcccaggcctggctgggttcagtcctggcccaggttttccatttccatctcccaccccggtgccccagtcccgggcctgagtctctgttcctcttggtccctcagtcccctagactccggtccctgccccgacccccgcaccctcctcacacgccgggtcctcctccaggcggtcccgcaagtcagcaccaacagcccccatcagacctaggggtggggggagggtgtgcatccgctcagccaatggccgtgcagccggcctgggccgcaccaatacgagggcgcggggggtggagccagtcagctcgcgagcttggtgcagggaccggccgcgggagaggccgagagctgggcggggcctcgcgcttcgggagactggccgccatcgtgggtgagggccgacgcgcagcggagacgacgtcgcggccccatagacagcgccgttgtcgccatctttgttaagggagagtgggcctgtctcatccattgaattcacaaaagaaaaggggcgtgagggaggaggtctttagctgcaaagacagagactctaacacgcgtaacaaaggcccagagatccgatccagacacagagcaaggcagagacccacagaggttggatgaggcaataagagagctgggaggagagggagagtggggaaagtgaaggatacttttttttcggacagttacagagtcagagagacccagagaaaagcagagatataaacaagagaccaaaacagtgggattgagaatgtgcaaggtaaggatacaagaaaaccctgaaaatgacagacacggagacagatggagacagacacttctggaatggaagccgcgaaggagaggctcattaattcagacttatttatctcaggctcaaaccagaatggaagcggcatgagataaacatctgcccagtgaatgaaccagtcacatggcaagacagagacagagagatggggacagtatctctaggtcaaaggtgagggagggagagaatattggaagcccaggggctgggaggaactgggacagaaagtgaagatgttgacagatgcaccgaggcaaagacatggtgaaattgaaagaaaggcaagtatatattaggagacttagaaacagaattgcatagagagaaagagatatgcattaggagacaaggacagagctcactagaaagtgacaaatgtaggctgtaggccaggcgtggtggcttacgcctgtaatcccagcactctgggaggccgaggcgggtggatcgccaggtcaggagtccgagaccagcctgaccaacatggagaaacccccgtctctctctctttttttttttttttttttgagatggagtctggctctgtcacccaggctggagtgcagcggcacgatctaggctcactgaaccgcctgcctggttcaagcgattctcctgcctcagcctcctgagtagctgggactagaggcacgtgccaccacgtccggctaattttttacatttttagtagagacagggtttcaccgtgttagccaggatagtctggatctcctgacctcgtgatccatccgcctcagcctcccaaagtgctgggattacaggcgtgagccacctcactggtccaaaacccccat

SEQ ID NO: 1561111 - DNA, 4001 bp, Homo sapiens
caaaagcaggcagctgggtgcggtggctcacgcctgtaatcccagcaatttgggaggctgaggtgggaggatcacttgagctcaggagtttgaaaccagcccggataacatggtgaaaccctgcctctactaaaaatacaaaaattagctgggcatggtggcacatgcctgtaatcccagctacttgggaggctgaggcaggagaattgcttgaacccgggaggtggagcttgcagtgagccaagacgctgccactgcactccagcctgggtgacagagcgagactccttctcaaaaagcaaaacaaaaaaaagagcaggcaaaacaaattacaaattggtggcggaaaatatcagagaaaggtattgactgagaagggacaggaaggaatatttcagagattgaaatgttcggtatcttgatctggcttgtggctacacggtgtatagataatgcaaaaacacaagatttgtcactttactgacttgttagttacacttcaattaaaaaacaaacaaacaaaaacaaacaaaaaaaacatggctggggtgtgaatgtggaggggcataaacaggggctttctttcaaccacatcagtaagatttgattactcagactggattgtgggttcaagggtgttgggtatagtattccgtatctgaactgttagagaacacaatttttaaaaatacgaacaaaaagaaggaaaggaacatgaaaatacattgtctgaatatgggatgggcagagagagatacaaagccacaaggaagtggattcaagcctgagagggggagagagacatcaaaaatacggatgcggggtagcaggagataccaagggggagctcagaaacaaagtgacaggaagaggtgggaggggaaactgaggcaggaagcaaatgacttctctgagggaggtcactgtgggccacccctccctggcccccaggggccccaactcaccagacagctgaagtgtggcccgtcgagcctggagggggagagacacaggggcatgctgaggctgcctccagccacctgaatctcaaagtggttgggggctgatggggaggcggcagcagctgtgaccaccgcagccctgtgtgagggaccagccccaccacattcaccggactcccccactaccccctgctgggacaggaagtggggggtgggggggaggcaaatgtccccctcctccccagaatttgcatagacaccctggtggggaggggcagggaaagtgagggagagaaagtcccggaaaggaggtgtggggatggagagggggcctgggtcaagtgcggccttggtggcgagtcagttgagtccagcttggaccagaggagaaggatggagagatgtctgggtagagagggggaagcccggagaagactcagatgaggaggctcaaggagaggtgggacacagagaaaggtgtgcaaagggacattcacgcacagaggcggggaggattcctggagccccagatggaggcactgagagtgagggtgaggcagaaggagaccaaaaggcagggagagcgagaactggagacagagacacagagacaggcagagagacagagagcaacaggcagaatgttgagagctgggagatgccagatacagagcgaacagatacgggaactcggggagacaggaggatggacagagtgagagccacggaggacgcccgcaggagggcacgctagcaagtgttctggggaaatgagatctttggggaccaggaaagataggaactggggggatggagagtccgaagtgaagagggaacagaaccagaaggggcaagagacagggtggacccctcccctccactcccacccaccggccgtgaggagcagagaaaccactgcccatgggtgaggccccacagaggggcagtgcaggtggggaccccgggtgcaggtttgggggccctcacttactgtgcagcctccagggcgagcatggtggtgccgggcgggctgtttgccgcccgctgcagccgccaaccctatttatatcttggcccagcccctgccggggggaggagggtgcccgctggccacaagctcggccctcctcaaaaatcccctcagggagggggtcaggggagggggctggattgcacaacccctttgtcacatggcagggatggcgggccaggggctgtctggatttggggatccccgtggggctgggtttggggggctgaccttgagggctggagatgggacaggagctggatttgggggaaccctgaaaacatcgaggaagggctggggttcactgaagaggagaatcaggaaacggaggatctggacccaggagccgaattccagcaggggcgggctgggggccgaggggcaagcacaagactctccccgggggatgtgtgaggtgacgggagggccgagggcatctgacggcagttagaggctgcggggatagagatgggagtcgctggggggaaacccagacccaaagcccattgccaggaccccgacgtggaaacatcgtgggtgtgtggtccggcgggggatgggggggtccccttggccgggctgaggagtggaagccccggtgcgcctggggctgccccagggcctggaggaaacaggtcagcacctggagggcggggcagccaccagggtccccagggtcatcaccagggagggctgggccggggccagacacctgggggccctaagcagggcagagaagcgctggtataagggttccttcagggccagagaggaaactgaggcaggcttggcccacatgaaccaggcagcacaggtgggagtccgggggcttttgctgaggatgaggggcggtgcgggcctcaggagggtcccagccaaggccagggcttatgaaaccagacagtgtcccccagagaccacaaagcaccatatagcaaaagtccagaactttattaattctccctggtcccgcccccgccccatgggatgcttgcaaggtcaccaggcctcaggtccagggggtccgaagcgccgcaggagctgctcctggtcttccaggtccttccgcaccttcttgcgcatgtagaagatggggcagtcccggctgcgggtgggggcaggggcagggtcaggaccagccaaggcccagtgcccagcctgggagaggggtgggggctgttcccaggactttggtccccgcctgctgcccagcccacccgccccctcccgcagcgggctgtttgctcagcaggcacggggggggtggggggggggagccgataacagcgggtgcctggcgaggtgcagggccatggctggccgtatatcacctgtcacctggcgtgggaacccaccccgcctacccgttccctggggaaagcccggccccgccctggggagggggccaggctggctgggtgtgtcgggaggacagccgtttcccgggcaacactgggtgccgggcgctgcctccctaagcacccaccccctctggggggctgggatgggcccatttttcagacaaggacactgaggctcaggacagctcacagctggaaggggatgggcggggaggatgctcaggagaggccttggagtcagaggttgggtccacaacccacaggcctgggagctgggaaggggcggggcagcccagggtcgggacatggcacacacctggtgcagatgacgtcctcgtgcaggctgccctggcagcgctggcactgcgtccagaggcgcgagaagcgctcctccagggcattcagatgggatacctggggacggcagcggctgagcagggcgcccccgcctccccacctggcccctcctcacctcccggccctctcacctccttctgatacagctcagactcccggggctggcagaactcacacacggctcctgtggggaggcgggtcagcccaagtgctggggcccagccaggaactgggccaccccatccctgcccactgccaatcccagcttctgaaagtccccagaggctggag

SEQ ID NO: 1561112 - DNA, 4001 bp, Homo sapiens
agtgatctgcccgccttggcctcccaaagttctaggattacaggcatgagccacatcacccggccttctttttttttttttgagatgggagtttcactcttgttgcccaagctggaatgcagtggcgcgatcttggctcactgcaacatccgcctcccgggttcaagcaccagcacctgtctataaagccctaggccatctggctgcagccaacctctcccacctcccatcctcctccagtcctcccctccttcacgcctgctccagccaggctggctctgtcttttccctgaacccaaccaagcttgttccagcttcaaggcctttgtactctattgcctgcaactggacactggtcccccaggtctccgtgtggctactgcctcattcttcatgttagagctcagatgtcaccctcctcacggagacgtcccccgaccacctgagctaaagccgcccccaacatcttacgtcaccctgttggtgtacttcacctggttcatttaattctcagtaacttaatctcatggcaagtgctttttaaaccttcactagctctgcctctcccactggaatattagctctgtgaatgcaggaacccagctagtctgagttaactgttataaccagcgccagtgcctgacacgtagcagggcctcagtaagttttgctgaatcaatgaattcttgctttcaagagagctcttttcaaaacacgctggtgcttgtctgaagcagttaaggttataacaacacttgttcaaagagacctttcagaccacacttccttaagagtgtagaagtttaaatcaccttattcaccaccgacttctaagggccaatccaaagaccccaacaccagctgctcaacgccaatactctctcgagccttagcagagcttcctcttccccaaagcttgtttcctttcttgctccctccttctcgggcacctactttactgcaactcaactacaaaaacttcaggggaggctcttgtccaatctccaaagaggcaggggtgagatgggcttcttccgagtctaaaacggccaccaggtcacccaacccaacccccaccatctcacaggcctggcctctccctgagctttggccatggaactttccaccgccaggagaaggctggtcttcaattcggctcctcaccccgttcttgccacaggaaggggcagtgccacgccttcttggtcaataccccttgactcttcctccacccgaaggaaactctcctaaccctcgctcctccgcccgtcttcgctgtcgaaggctcccaaacctcatttcaaggctcaatcctccagggctggttccaccacacccgctgaacgccatcaagtagcccccagtttcctcccccgccagttctccctgctcagacccccgttgacccccgagcctctgccccctgcgccccgcctccagcctacccgcccggccctcaccgtggatgctgcgttctcggtcggccgccaggaccccagagaggagcagcgatcccagcagggcgagaaacgcccggctccgcctcagcccgcacagctgcgccatggccagctcagccgagacgcgcaggcgacgccaccagccgttggggtctcgcgatcaggtgcgggaagcccctcaacgcgcacgcgcaatggagcgcctcgcgttcaggtgccgacgctccgggagggtccgccaggtgccaaagcccccggaagtcgcctttccggaccttcagtgtggggacgcccggccttctcggcgcgcgatgcctgggtctgctcctcactcgcgccctcgccgcctgcgacactcaacggccctcagcgcgttcagagccgcgctacacctcccaacgcgcggaggtcgccagagccaatggcgaacgcctattggaagcggctcccgaaggtggccgggcaggcagggggcggggcgcacctggctaggcagggcgagctgggcgcaggcgcaaagggcaggcacctgcgcggccgctccccggccctgggcgcacctgggcccgcccctggtgccggggaagaggcggggcttgcgcgggcctcgcccccaacagaacctggcggggcggggcggggcgtctgcccgctgagcacctgccacccttcccttgggcttggtgacgacgtcggaggagggccttcgctctaggactggcctcagggtgggaggagggggcggcagacacgcgtttcttggaagcctgtggttttctgcccgcctcgccgcagctttcctgtgaattccttcctgaatttcaaagttcactgggctcatgctccagggcttaatgctggggacccagcggtggccatgccagactggtccctgagtcaccaaacaggaacggcccagagtagtgatagcggaagcttagcacaaagtgatgaaagctgtgatggggaaggccaagcttagggatcagaggctgggtcgctagaaaaccagggcatgatgggagcccagacagctttcccatccagcctgagagagggccaaggagggcttcctggaggaggtgataggcccatgcaaaaacagccccgagccctggctccaaggttctcaggacagatatggagacaaatacttagcacaggcagcatcagaattgagaggaaggaagcccctggggaaacccagagaagacacctgaccaagcctgggagtcaaagagggcttcctggaagaggagttacgtgaacagactctagaaaggggaatggagtggggcaggcacacgagtagaggatagccaacaaggtaatcaacataaatgcattattattgaaaacacttttagattatttctttttttttttttttttgagatggaagttttgctcttgttgcccaggctggagtgcaatggagtgatcttggctcactgcagccttgacctcctgggctcaagggatcctcccacctcagcctcccaagtagctgggactacagatgtgagccaccacatccagctaatttttaaattttttgtggagacaggggacttgctatgttgcccaggctggtctcaaactcctggcttcaagggatcctcctgtctcatccttccaaaagtgttgtattacaggcgtgaaccaccacacctggcctgaaaacactttgacagtgctatacagaaaaggaatcaggggctgggatggaaaataacaagagatcttttgaatggggtggcggaggaagggctttgtgaggggtggctttgataatgaactctgaaggatgataaaggccaagggacaaacattccaagaatcaggaatggcacatgcggaggccttcaggcaggaaagagaatagtgtgttcaggagccagggccactcccactcttcagcctccctcctagcataataatacatgaaaagccgtaactgagttatcaaaatggtatttaccttaaacaatggaagtctaaccttgcaatgagatcatgggactcaaggtggaatctgaatgtgaggccaaaggtctcccccagcacttgaatctcccactgccactcaggcctactaaacctaggcttgagcatgaaaacagagaagtatgtgctgagccgtcaaggcttggaagaaggtataggcctcttctttctttattttattttattttgagacagagtttcacctgttgcccaggctggagtgcaatgctgtgatctcagctcactgcaacctccacctcctggattcaagcaattctcctgcctcagcctcctgagtagctgggattacaggcaccacccgccaccacgcccagctaatttttgtattttttgtagagatggagtttcaccatgttggccaggctggtctcgaacttctgacctcacgatccgcccaccttgacctcccaaagtgctgggattacaggcgtgagccactgcatctgtccagttttgaactttaaacacaaaaactcaaaaggagggctgagcgcagtggctcatgcctgtaat

SEQ ID NO: 1561113 - DNA, 4001 bp, Homo sapiens
cctccttggtggtgacatctttcagggtgtaaacccttccttccagcattattccaccctacactccagccacagcccaccccttgccaaccccaaataacctgccagctctcacacctcccagcccccgcttatgctgcttctggtgcttccaacacccttcccctcctgccgacccggcaaactcctactcatcattcagaacacctgcctcggggccgggcacggtggctcacgcctgtcatcccagcactttgggtggccgaagcaggtggatcacctgaggtctgaagttcgagaccagcctgaccaacatggtgaaacctcgtctctactaaaaaaaaaaaaaaaaaaatttagccaggagtggtggcatgcacctgtaatcccagctattcgggaggctgaggtgggagaattgcttgaaccgggaggcagaggttgcagtgagcctagatcatgccactgcactccagcctgggcgacagagcgagactccgtctcaaaaaaaaaaaatagatctgcttcggaaaagccttcccaggcaaactgagtccctctctccacagagttctgtgatctttcttccacctctggctttccccctccttccaaatgtctggggagctctaggtgcctggctgcagaatggggggagtccaaagggggctgacagagcagctgggggtaggactggggttctcagaaagcttccgagggggcccgacagccttgcagagaccaggggcatctcagggtaagagaaaagactagagagtgaagcgactgcaatgagctgcaggcttccccagcagccaggtcacaactggacggcgcactcatctggatgcgacacggtctgacatactttgaaagggtcacccctgctgtgtcgaggatggactggggatgtggtggacaaaggcagccacagcagagggatagcggtggggctggaggagtggagactgaggagccaggtggcggcgacgccttaagagtgagaactctgagggggtagtgaaggttaagggctgcatttgtggggctgctccaggttccattgcctgagccaccgaactcaggagagagggaagatttggaattaagaaaataaaagatgcagttatgacagtgcgatctcgtagactgtccccactagaacctgacactctttacatcaaatgacacacaatgaacataatgaaggcctgttggccctgggcgctggtcaccctggacagaacctccagaatccacaccatagtcggtcctccttctgcacacgaattccatcgtccaaggtcacggagtaaaagatggagcggggatccgaccccagtgcagggctggactcctggccgctccaggatgctgccagttactgggggacgcgcgggacgcctctgggttcccccaccgcaccccctagggtgaggttagcttagcaccgtgcccgttccgcctaaggggaaactgaggctcggagaggggtgggcagccgcctgctcaaggccacagagccggagagaggcgtccccggcggcaactggagaccccgaaacggagaagcagaaccggaggatggagggggcacaaatttcagacccggtgggaagtgagtggcgctgcagcggcggagggcctccgaggcggggaaaggagaggagccggggacagacccgcaaggtcacggccgagccccggcaccgccggccgacaacgcggggacggcggatccccgaggctggacccccaagacgggccgagcggggtcgttcctgcgcgtagcccggggacagagaggccgaagggccgcagcccgcggtgccgtcgggaccggtgccgcgctcacctgggccgcgaggagcagaaaggccgccaaaagccgcgccagcgcagccgccaccgctgccgccatgtcggccggtgcccgccgcaaccaacggcagatgtttcccagcaacgccccgagaccccgggccacgcatgcgccgcgcatgcgcgtgggggaggtcaaagggcgcggggcggtgcctgcgaagagccacacggcgcgacaagatggcggtgagcgcgcggcggaatctggagccggggggcgtggagctcgggccgcgctccaggtctcatgcgctctgctttccccgcaggataaggagaagaagaaaaaggagagcatcttggacttgtccaagtacatcgacaagacgatccgggtaaagttccagggaggccgcgaaggtgaggaggctcccgctgtcggtaccccctctttaaaaatttcaaataaacccagcaacagagatgatgaggacgcatgcggaagcacctcttttatttattttcattattttttttgagacgcagtctcgctctgtcacccgggctggagtgcagtggtgcgatctcagctcactgcaacctccgcctcccaggttcaagtgattcttgtgcctcagcctcccgagtagctggaattaatgtgtaccaccacgcccggctaatatttgtatttttagtagagaggccatgttggccaggatggtctcaaactcctggcctcaagcgatctgcctgcctcagccccctaaattgctgggatttcaggcatgagccaccatgcccagcctagcatttttgactgggcaagtgagctgccttctcctagcctccgtttcctcatttgtcaaatggggctggtaactccacccacttcacagggggtggtgagaatgaatggttacaggcatgtaatgtaattgaggcagctctcagcaggaagtaagcagtcagacaacacgtcacttattcaatagcctcttggatctttggtttcttttttttgtaagacggggacccaaacctctttgtccctggattgtagacaactgggtggcatgagagttattaaaaatcacagtgccccagccggacggggcggctcacgtgtgtaatcccagcaatttgggagtctgaagcaggagggtggcttcaccctagggtttgaggctgcagtgagctatgaccgcaccactgcactccagcctgggccacagagcaaggcccagtctcaaaagagaaaaaggaggccaggcacagtggctcatgcctttaatcttgacactttgggaggccgaggcaggcagatcaggaggtcaggagatcaagaccatcctggcctacgtggtgaaaccctgtctctactaaaatacaaaaagttagctgggcatggtggcgcacgcttgtagtcccagctactcggggggctgaggcaggagaattgcttgaaccccagaggcgagattgtgccaccgcactccagcctggcgatagggcaagactccgtctcaaaacaaaaagaaaaaggaatatgaataaaatgttttctcagtctacaccatgctgactccggacatggaaggacatgagtgagcggccgctcttgctggtcacactgcttccctttgttttctgcccttcatagcaaatcacccatttagcagctgaaacagcaccattttattatctcacaggatctgtgagtcaggagccagggtaccacagcctcaagggctctcaggaggttgtaactgagggttgttttttggggtccatcatcttggggtcttcttctgagcccactggttattgacagagctcagtgccttacctttgcagggccagggtccccgttctggccagtgttggctagggacacttgcagctcccggacgctgccagctcgggactctgttccaccgtggtggtctgcccctacagtgctgcaggctgagctgacatttgtccatattcagttattcgggccagtgggagaatcatctttcagaaagggtttggggccgggtgcgggggctcacgccttaatcccagcagtctgggaggctaaggcaggtggatcacctgaggtcaggagttcgagaccagcctggccaacatggcgaaaccccatctctactaaaagtacaacaattaactgg

SEQ ID NO: 1561114 - DNA, 4001 bp, Homo sapiens
agagaggcagagagtgagttccttgagcccagcttctcctcccgctcccaggccagcccacagtgcacatcacctgggctgctcacctcgacccagtgcggccagcgcagccagcaggctcttctggaactcatcagcctctgcagggctctgaaacgtcagtccaaacttgcagtcacccaggctccagtggtgaaagatgggattcaccttgttgtaaaccaagcctggcttcagtgtacactccaaggttgtctgaggggcagaaggaaagcagggtcagataccccaacccagacatgcctgtgacgtctcgtccatcaccagcccccatgcataccctagtgtcttctcacaaacctcatttcccaaccctaagtgtaaccctgaactctgatcaacactgatacgactccccagttttacttgttttgttttttgaaacagtcttactctgtcacccaggctggagtgcagtggtgtgatcagggctcactacggaatcaacctcccagtctcaagtgatcctcctgcctcagcctcccaaagtgctgggattacaggcatgaacccccacacccagctacgcccaattttactgaacacacctctgatgctcaaatattttcccaaccccttgatccctacattttcctaatacctccctctgatgcccctgtagaaaccccgaatcttgctgaatggcccaaaacattgttaacccctttctgataacccaacatcccccctctggctcaacaatacttcccagactttactgaacatctcacaatattattgtgaatcctcttctgataataatctctggaaactttacccaaaaaatattctctctctctttttttttttttttttccagatgagctctctctgtgttgctcaggctggtctcaaactctggactcaagcattcctccggcctcagactcatgagtggctgggattataggcactgtacccagccagcacttactccaaaacagtcttatcagacttccacagattccccttcagatgctagccaacaccctattgatgttccctcaaatccttgcctagtatcaccatattccttcactccatttcaaatccctccactgactcctgctccaaaaaaaaaacctttcccccaagcctttcacacaatccatatctttctactacatccctagctgaaactgattcaacactgtccctccacattgtgcccgacagcccagttattcctgatgaacccatgtatagaattgtcaaccatctctgacactttcaaatggaccccagcaaatgcttcactatacttagggcagacaggggccaggtggtgtagggcctcgtggcaaggatctctgagcaagatggagggttttgagcagaggagggacatggtgtgagtcggggcgggggggggggggcagtgccccctgtggaacagcctggggttggagcggggaggaggagcagtacagggagacagcgaggatagtctggctggaagtggcagtggacaggaccctccaaacaccccatgtatcctgcaattcccaactcttatctacaggacagatattcactcccaaacttcacaccccagcttgattcctaggctgggaggcaacctgacctctgctccacatgccagcccctctcccctccctccccaggtccctaccctccccgcatgccccagggtggctcactttctggtcccggaggcgttccccgtggatgacgtagtgcccctggcgggcccccccctcgggcctggcccctcggacccgacacacgctcacctggctgaggcccccgccccccacaggcagccagcccccactggagtcatctcgggccatcaccacagctcggacccgcaccatgtacctgcaggaggtggggggaaggacagggacaacacagtcatgagctcaaaccctgctctcccatggaatgttccctcaaccctcatctcccctccaacttcatctctcacgtccaggtccactgcaccctaagctagcaatacccaccttcaaccccatggccaccgtcttccacacagctcctttcttcctcatgccatctcttctctctcacctctatcttcttctccatgtctgccctttctctctgtacccacctttcccccatctctccgtccccacccccatagccctggtgttgcccttccctccccctcctgcttatccctatcacccccttctcctccctcagcacatacccacagccccacccagtgctccccctcacagctgggtgcctgcgcatatatattttctctgggcccatcaactcagctcctgttctcccaaccctgcctccgcaccctgtcgtccaggccacaggctgggtgagaaacccaggctctttcccccccacccaccccttcccggatttatgaatgagaccggatgcaaagctcactgagtcacccagcaacgggagatgggcagggaacagggagagaaccagaaatggccagaaagagaggctcagagggagacggaggcagaggaagtcagaaacgggcgaccgaagacacatccagagagcatttcattcacaaaaatcaaggctgctcccccaggccccagccgagggaagccaggggggaaagatgggatgggggggcagattgatccttcctccctcttcccttcccgccccccagccccagcatccttcagaaccattttaccccgccccccagctcagaggacgtagccctccgcccagtaatcgggatcagtgtccagcccttcactgccatccagcacagggaccctggcgtcccaaccttagggacccggacgagctctagccccctcccccacctgcaggctgctgggtttcccgggcccttcaggaggggaaggggcggctgcagcgcccccagcccccttttctcaatgggatgggattttgtgaatgagcagtcacgtgacgctgcttcctttgtccgcccgcctcccccgacaacaggtgaagcagggaatgagagcaggggtccccccagggcctagctggaatggggcactggcatttcagggtggcctacgctccccacacatcctgtgtcccccggggggagtggtcctcagcgttcctcaacggtgagggtccaggacggaattttgtgaatggggcatcctcggagaaagtccagaccccacaaatgaagactggtaccctgaatggctgccgcgcagtttggggggtccccactctctagtcctcctagccggggccttgggggcgcctgggtgggcagaaggcgcagcgcggtcacggccgccccctcatcggggcaggcagtctgtcagcccccgccccctcgcccccctcggcacctgcctgcgaggctccggccgggctccgagcggcggcgacgcggcctcctcctcctccttttcgttccggctccctggctggctccggcggcgctggagacgggcaccgggagccggggcgaggggggagggagggggaacctggaagacgggtggggggggaaggggcggcttgggggaggggtaagagcgaggcgggcttacttgcctgctgggtcctagagcccggcactagctccagagagcaaccccccagcccccattttcttaagatccagaggggatcccccacttttccacccatctgcgccattggtctctaatgctatgaggaggggacggggcagggacagggactggtctcaaggttctaaagaggtggtggtctacgctgtggcttgggtgcctggcagagttcgataaggggtggggcgagaggggagccttcacaagtgggtggggttggagggcctgggtataaggaggtttggatgctgcaggcgaggactagtgcgtgcgtcacgaaggggcgggcccacggtggatgggccttctcggcgcccggggggaaggagagggtcttgagaagcgatgttgccgggtcttaaaaag

SEQ ID NO: 1561115 - DNA, 4001 bp, Homo sapiens
gacccagacaattgccaacccactgaattctaggaaggcagggtctaagtcttggtcagtagagtgagtagagtggaaattgtcccttagggggacacattgaaatcttttttttttttctgagacaaggtattgctctatcacccaggctagagtgcagtgacacaatcatagctccctgtagcctccaactcttgtgctcacgcgatcctcccacctcagcctcctgagtagatgggactagaggcaagctccaccatgaccaggtaatttttgtattttttgtagagagggggtctcactatgttgctcaggctggtctcaaacatctgggctcaagctatttgcccacttcaacttcccaaagtgctggggttacacatgtgagccactgtgcccagtcccaaatccatttttgttcttccctccttccatggaaaagtgaaagtgagcacacagctacctaccacctgtgtgaccttggctgaaatacttccactctttgggccttagtttgttcatctgcaaaatagtaatgatggcccggcacggtggctcatgcttataatctcagcactttgggaggtcaaggtaggtggatcacttgaggccaggaattcgagaccggcctggccaacatggcaaaacccggtctttactaaaaaaaatacaaaaattagccaggcgtggtggcacgtgtctgtagtcccagttacttgggaggctgaggcaggagaatcgcttgaacctgggggatggaggttgcagtgagctgagattgactcactgcactccagcctgaatgacagaatgaaactctgtcacacacacacaaaagggtaggccaggcggtggctcacgcctataatcccagcactttgagaggccaaggaggtgggtgggtcacctgaggtcaagagttggagaccagccttaccaacatagtgaaaccccatgtctactaaaaattcaaaattagccaggcatggtagctcatgcccgtaatcccagctacttgggaggctgaggcaggagaactgcttgaagtcgggaggcagaggttgcagtgagccaagatcgcgccattacactccaacttgggtgacaagagtgaaactccgtctcaaaaaaaaaaaaaagtaatgataatcgtacccgtttcttagcggtgtttgaagaggtaagttattaatgcagggatcatggtatctggtacactgcaagcccttgatacatgttccttgctattattcttcatcttttcctcacacatctcagcaaatcgatttgcctcttctggagtcagacagaaatgagttcaagttccgctttattcttgctgtatctttaaccgagtatctttaacttggcctttctgtgcctcagtttccctccctgttaaacggtggttacagctgttttcttcagtggaagacacttagagatggggaggcccttagcactcctgttagccctctggccaggccgaggatcagctctggccataacgcgattgaatgggaaggaagggagcaggtaatagggaagccgggaaggggtgtcctgcgagcctccccccaacacccccccccccccgcaaaggctggtggggcgctgggctgcggtggcatcagaggctttaacccttcccaggccgcgcctctctccctgcggtccagacactgcgcccaaggagggggcctgggaaggacaaggcctgggggtaagacccacgcgtggcgcggaagctagaccgggtgggggggttgtgggctcgtcctgccctcgaccctttgcctccctccagccggggagacccggggctccagccatgccccgtgcgcgcggaggagggatgctcgccaggtggggacatacttgggggaggggctgtcggcccccctagcagctcacctgggcccgcggccgccagcgtcgctgtctccgctgctcgccgcgaccgaccgccctccctgtcggcgtccgctgcccggcccggcccggcccggcccagcccggctcagctcggccccgccggcccgcggctcagccagatccgcatgcgccgccgcgcctccctctctcgcgccgccgccgcgctcagcgcgcccccgggaccccctcccgcccgcggtccccgcgccccgccgcccgaggcccacgcgcagtcacacccggccgcggcgtggggtgcacggctgcactcgcgagggcacggcggcgtcacgcgctgcacactcccacggggtcacgctcgccacgctgccatactcgcgggggcctcggcgcacaaactcacccccgcatccacgcgcttgcgcgccgtcactccctcctgtggggtctcacggggtcacaccctcacgccgtcacacgcggcgtccacactggaacggtgtcacccaccaccacacaaatccaatagggtaaccaccgcccacgcggcgtcacacacaaatgcacctgtcacacacagccgcacactccccggcagtcacaaacagtgtcataggcccacacatcacgcacagcttcacagccacagtgtcacacactctacacactcgaaccttcatagcagtcgccccgcacatgctgcaccgccgcacctcacacatcatagtcacagggggtcacaatgagcagctcaacacagacacccacagccacacactcgaatggggtcccggtgtcacacatccttacacgagacatgtggtgtcacacactgtcacagtctaattagtctcacgcttccatgtagcacacctcacacgtcccacaccctatcgtacaggctgacgcagtgtcacccacggtgtcaccacaaggtcacaaaagaacagaatcaatgcctgccacacgtggtgtcacgcacgtgtagtcacactgtaacacgggatcacactcagaggatgacacaaggtgtcacccacagtcctgcttgccctccgggtcactgagtcacacagggtcatataagtgcataggtacgccgtgacacagtgtcttacatccaagtgcacacacacactctgtcctcctaactttctccccttgctggttctgggaggccctggggcttagagtgcgccccagatccgctccaggctccgggagagggggcgtgagctacgagaggccgtgggtgaggctcgcctggccccgcccctctccgggaggtggagcgcggaggcagggcgctgagtgacaagttatctcggctccgtccactctatttgttgctatgtggaggcgtggccttctgtggccccgccttccagtctaagtggcgcgcagagagggcggtgctggacggtgagcgaatgcaagctgacgcctgccccgcccatccgcgttaggccccgccccttgacctgagccgcgggcggagagtctgaggcgtggcccttcgagccagctccgccccgttgttcctggcttgagtagggcagagagcaccgcccagcagccagtgggttcccgcgcgtgccgagactctgaggccttgcacccccacgatcccgtacgatggccgtcaagaagatcgcgatcttcggcgccactggccagaccgggctcaccaccctggcgcaggcggtgcaagcaggcatgagccggggcgggcggggcatgtcacgggacagacgggcagaactttaggaaggggcaccatggggtcgggccgaggctgattggggccatgagcgccccagccaggtgtatgaggactcaggggccaaagcaagtggccacgggggcagaaatggggaaagatgtgagatccaagtttatgtgagtccaagccagagaggaattggccccgggagccccgggaggactccactggcacagtcgtgtgtaagtccagggctcttatgcaatgcggttgtcattattgtggttgtggtggtggttgttcgcactcccagagaggatttactaagccaagcttgctctgtcgtctcttcacatgagagctttcaaaatggggtgggaac

SEQ ID NO: 1561116 - DNA, 4001 bp, Homo sapiens
ctttgcaagtgaggcctttatattgggggtgggtgcagctcaagctctttcctggatagaggatggatggaagggtccccagaatgcccaatcctttgctcccctgtcccctgtcctgagggaagccctcctcaactccccacaagcccccaaggcagggccagtcagcctcttagacttggggacagatcaccccccccaaaacaagctctccaacccaatttagctaactcccaattcatccccaggaccacccctcccatagcaacacttagacacttcattcaatcttagccaccccccaataaggaccaattcaagagcctcaacccattcccaagggtatcaaatgaagcccccatatctagccccagttcctccagtatggccagataaaccccccaaacaacctcccaattaaagccaactctagctctctctaaactaaccctctaatctggagtagacccatcctccataatcgagatctagcacccctaatgagcccacagggctccccagttctagccctgggactctaagaccatagatccccaaaccatgaccagttctagccctcaaccaaagccaaccccagccaaatgtgaaaaacaaagctgtgttctggctctccaaaccagtctaccccaaaatctagccacagactctccatcgtggatcagatcggacctcccaagcccggccagcacccccacccctacaactaaagccagttctagtcctcctacccaccaacaaaaccagtcatccaaaacgcaagcaccaagagtgggcccctctcacggcactagagaggatcaatcacaggctgctttttgagcctcccccaaccccctccagtaaaaaaccagacttatcctccaagccagaacttccccactcatgaccaaacctggcacctgaaacagtttgctcctcccctttctcctccccactccagtcacaagatcctccctcctccctcctgcaaaaaaaaaaaaaaaaaaaaaaaaaaaaaaaaaaacaaacactggactccagctccgcggtcccgggaggcaaatgcagtcatagccaaggacaaatcccagatccccagccggccaaaccccagcccatgtcccctgagcatgtgctccccaggggtccaggacagcatcacactccttcatacacacactagaaccaagtccagtgctgaaccccccaactcaattcacaggttcccgacgtgcagggaagagtccaacggcaaccacagcccgcagtgaaagcagagcccttaaagagatggtaccccatcctcaaagtaaagccccctcaaaagtgattccttcatgatggagggcaaaaccagactatccaacaacccaggaaaagccccacaaagtcagagccccctagacccagagaaaatccaaggcccctcatcttccaaggcagagccccccaaaagtgattcacctccatcatccaaggctgatacagatcctcccaaaacaagaaagaaaccccccaaaaggttgagaaacccccaaccccagggcaaatcttagatgccccattacccggagaagagccccccctcgaaaggctgagacgccctgaacccttagggcaaatccagattaccctagaagtggtcttagaagtccccccgcttcgctcccctcccttgggggccggcccctcagtcccgcccgcgccagcaccgcggacagctcccggcgtccttgcccctcccccagggtgggggtccgggcgcctgcccggcccgcccccgcgccgccccgcccctccctcccgcggccacgacgggcgggcacgcgcccgagccccctcccctgtctgcgtccgcggggtgcgcgccaaccccctcccctgggcgcccccgagacctgaagcggcagtggcgttggcggggcgtccctgcagcgggcgggcgggtgctcgcccctcaactgcgacggcagcggcagcggcggcgaaggctgaggctccggcggccgcgcgccccctccctcgcccccgcgcggcggccgcgcgcccgcccgcgtgcgccccctgcctgcctccctgcccgcctctttgcggggccccaggtgggggtgcaggaggaaccaccactcgccccaaggcttcgggtggggggcttctgcgccatctcagatgattgctgcctgatccagaacaatctcatgagggatggggggtgctcctggaccaaatctaatgccgggagggagcgcctggggcttggactgcctcactaagggagtggggattatggtgaggggctgggtgggggcctcctgaaccatctctaatgggaagaagctcgggctcctggccaccacatgtggacaggggatatgggagggcgacctggaacatctcacaatctccagtgggggcgagggggaacagggggttcctccagtggctcaagtcccggcctaccccagttatgggggaggggggcacggtatggaggcccttgtttattccgtgtgcggagagaacaatctcccatgggtgttcaacataggggggagggtcgaatcgtctttaattgaggctgaggggtttaggggttagacctggttcctgaaccagctttggttggaagaaacttaggtacggggtgatgatggaggaggggatgatcctgggtcacacagatggaggggctcagggccaggcctagctctgtttagggtttaggaaaatgtttactaggccatctctaatgtggccaaagtctagaatcgtttctatggaatgcaagggaaggaggggaagacagcaggtctcctgaaccgtcactaataaggaagggggcctggaccatctcggattaggggagatcgtccctaatgtgtgcagatcatccctaagggaaggggcttgattactgaacacctttaaaggggcgagggcttggttcagagccatcgctggctgcaggagggcgcagggccgctggcccccccacggccctcggcccttatccccaccgcccgccccgcccctctcctggggtagagcgattctcacaaatctcaggagagaaaggtgagatcagcgcgcgtccccgcgggacccgtaggcgcggacacgcgcggttgccaggggcgcccggggcccctccttcgtttcccggagtcggcgtgggcgggcagggacttgcggagcatgcgcactgagacccggctccgcgcgccccctggcggcttagagcgagcatcgctccgcgacccacttagacggggcgtccccacccccacctcggccgagaagcacttccctcccgactaaaggggatgtctccgtccccagcacacctggagttcctacctcgtggcagtctcggaggaagtgctgcagctcaagttggtcatgtagcttttgcatccattgctgggcccgtaactggttttcttggttcctggggatggggagataagggctggggaaaggccccgggttggggggtgcggcgctggcagtaggactgtgagggcactgggctgggtaggggaagaagggcgtggaaaatatgtaagagagagggaggaattagtggggcaaagccagggacgcagggacggggctgaagaagggcagagagagagacagacagaggaagagaaagggagaggcagagacaggcacttagaaagaaagagatatagacggagagaaaaaaaggcaagtccagagagaaagataacagagaagtaaagacagacatacctagggacaaaaacaaaacaaaacaaacgagaaagtgagaggagacaccagaaagagagcgagagagagaataaaaaaagacgagaaaagagatggagcaaggcagagccagaaagaaactcagggagcagcagacgacgaaagagaggaggcagagagagggaaagtgacaggaggagtccggtcagggacagcccagagagagacaggcagaggagtggcaaatgccaccaggaaaagacagc

SEQ ID NO: 1561117 - DNA, 4001 bp, Homo sapiens
gcttgtcctagtaggggatctcttccagtcgggacttctggggactgtagattgactggggtcgctctccttgctagaggttctagattggctatgatttccttctttgctgggggttctagatcggctatgagctttctccttgctggaggctctaggtcgactgtaaccactctgcttattggggcttctagatcggctgtgatctctctcctcgctggagcttctagattgtctgcgctctctctccttgctggggcttctccatcgtctgcgatctctctctttgctggggcttctggattgtctgtgctctctctcctcgctggggcttctagattggctgcgatctctctccttgttggggcttctagattgtctgcgctgtctctccttgctggggcttctagatcgtctgtgatctctctctttgctggagcttctagattgtctgcactgtctctccttgctggggcttctagatcgtctgtgatctctctctttgctggggcttccaagttggctgtgatctctttccttgctggggcttctagatcggctgcgatctctcgccttgttgggacttctagatcggctatgatctcttgccttgttgggacttctagatcggctgcgatctctcgccttgtagggacttctagatcggctgcaatctctcgccttgttgggacttctagatcggctgcgatctctcgccttgtagggacttctagatcggctgcgatctctcgccttgttgggacttctagatcggctgtgatctctctgcttgttggggcttcctgattgactgcgaccactctccttcctggggctgctagatcccctgtgatctctctctttgctggagcttctggaatggctatgacttctttccttgctggggtttctagaccagttgtgacttcttcctcttctgggggttctagattggttttgacttttccccttgctgtggcttctagactggctgtgtcttcccatctggctcagaattcccttccgggtgcgacttcttgccctgctatggtttctcttccaactgtgacttctcactctgctgtgcgtcctcttctgactgccacttcttgaccttctggggcttctagattggctgtgactttgcggcctgctgcgggtgctggcctggttataactcttgaccctgctggacatttcagtggggctgtaactcttttccctactggggatgatcatctgaccgtagctcttcaccttccttgatgaggatggagatgggttgtcactcttctccttggagggaattccagtcggggtttgacacttggctgtactgggagttacagccagctcggaactcctccctatacctgagcctcctggtgggcggtaactcttcttgctcagatttctaggctggctgtcactcctttccctgttgctggttctaggccggccgtaactctttccccggctccctttttgctgtgaagtgggagttctcaccctgctggccatgcctggtctggcaccatgagttcttatcctgccaggagtgctggccctgctgggtgacctcttggagctgcggcttccccttctgccaggtgtcctaccccggctgtgtgtgcccctccgctggtggcatctcacgtcgctggccttgctggctttgctggtcctggtgtcggtgctcaccctgctgggtgttcttgctttgctgcggactcgggacctgctgctgggccggttagaaggggctctttttgtactggtcgatttggtggacttggaactgcttgggctcatgactgagttacgggatgtcgctggtttggtgggcactaaggatctgttgggtgttgctgatttggtggacttcaaggaggcaggaggcttgggatccgcagtgggcatggaggatccactgggtgccagagacatactgggctttgaagatctcttaggtgaagacatggtgggcgcaaaagggcttgtggtcctggaagtcacagtagacatgaaacacctggtagccgtggacgatgacctgattgcctgtcacaggccaactgtgtgaagtaatagtgggcattgaagactctggagggtgagtggtatgaagtcagaggtgggaggagagaggggaggggtcccagcctgaggctggagatatttcctctggtttgcagccattcagcagatgtcttctgaggctgactcatgcccagcattgctggggacacagagatggggcagacccaggccctgccttcaaggagcccatagtcagtgggtggggaggggggccactgcccagagtggtcagggtgtgatggagagcagtgcaggggccggggagcccatacgagagagacactgaccgcttggggagtcagcgaggacttcacagaggaggtgacatgagcttggctttaaaaaggagcaggagttttgccagtagagaaagaaagggtcaggctgggcgcggtggctcacacctgtaatcccagcactttgggaggctgaggcaggcagatcacctgaggtcaggagttcaagaccagcctaaccaacaaggtgaaaccccatctctaccaaaaatataaaaattagccaggtgtgatagcacacgcttgtaatcccagctacttgggaggctgaggtgggaggatcgcttgaaccttggaggcggaggttgcagtgagccaagatcacgccattgcacgccagcctgggtgacagcgagactctctctcgaaaaaaaaaaaaatgaacgggtcaaccaggtgggcgaggagcagaggccaaggctttggggagggagatcagggtcttggggccactatcatccactcacccacacgtcctctgctgcggaccccaagatcatacctgcccttgaggagttcccagtcagataagggagataccctggggggcagctgactgcagtcagcttctagggcagtaacaggaggaggtgctggggcaggggaagctggagagagacctggctgggagcctggggcttcagggtggtggcttcacagaggacagagtttgtgctgggtcttgaaggatgagtagggggtcaccaggtggatagagtggggaacagcccataccaaggcctcaggaaacgattgttaaatggcaggaactagtaggagagagctgcagggacggatgttcagaaggaaagagttataacctgttctgggctggtgatgctggggacccagcaggagggtggtaaaaaaagtgactggctgcctgggatgaggaggtctgggacggcctcaccaaagaggaaggcctcccactgggtcctaaaggatggtgggaaaaactagggcaggacattcccaccagagggaggaacagtgtgtgtgaagcctcagaaaaggtttgtcaaattccatgcagagatatccatgccataaatatgtcataagtactttctttgcacaaaggaagtgttttagatgctggggccacagcagtgaaccagacaaagtcccagctctcggggacaggcagtaaacaaacacacaagtaaatgttgaatgcagtgagtcagaagatggagaaaaatgagccggctgcggtggctcatacctataatcccagcactttgggaggctgagatgagtggatcacttgaggtcaggagtttgagaccagcctggccaacaaggtgaaaccccgtctctactaaaaatacaaaaattacctgggcatgctggtgcgcccctgtaatcccagttacttgagaggctgaggcagaagaattgcctgaacccaggaggcggagtttccagtgagctgagatcacgccactgcactccagcctggatgacagagcgagactctatctcaaaagaagatggagaaaaatcaagcagagtaaggggcgtagggagtgctggggagtggccagggcgtcactgagaaggtgacacttgagaagagacatggaatggagagtgacatcg

SEQ ID NO: 1561118 - DNA, 4001 bp, Homo sapiens
gccagaggccagtttcaaaaagtctttgggcttaagggtgcttggaaatggagctcatcttcctaactgcacacaggcaagggaggcctgacagtgcagtcatttgcctaccaccttctagccagaagagcctcttctccaaaatgacccagaggctgggcagaggggacaggcatctttgtggaggggtggggcatcccaagtcagcctaggcagaagaggcaggatgggggacactcagccaacgtccagggctcctctccagcacccagacattcaagtcctcactcctggcctggccctcaaggcaggtcctcatgggacccctccctgctgacccagcctcctctctgcttgggtggccagttccacaccacgggccactccaggtggctcaacttcaaggatcctggaagtcccccatcagctatgacaagactcccctcctcctgggcactgtttttttgttttttgttttttttttttgagatggaatctggctctgtcgccaggctggagtgcagtggcgtgatctcggctcactgcaacctctgcgccacgggttcaagggattctcctgcctcagcctcccgagtagttgggactacaggcgcccacgcccagctaatttttgtatttttagtagagacggggtttcaccatgttggccaggattgtctcgatctcttggcctcgtgatccgaccgcctcggcctcccaaagtgctgggattacaggcgtgagccaccgcgcccggcctctgggcacttttaacaacactgcaaactgccccgtgcccttcctgcgggacggtcactgctccaagcacctttcaaatgctttccacccggagagcacactcggctgactccccaccccgagagacctcagccccaccacgacccttcctccatccgcacggtggaacctgcccctaccagcttcagagcgcctggtacccacggcctggagccacgcccagaacaaaaggggccctcagtatgcactcttcagtggtatcaagagagcggctccgtcgtccccacccgcccctggactgtgaaccgtgcggcttccccaggggccccacacagctgctggggccagggcagacaggtggcggcgcgcccctccagccgctctccagctctaccccaggcgactggggtccccgagccgacactcttgttcgtcccggaaaacttcgctgacctcgatccccatgcgtccgcagcctcgcgcacccacgtctcgaggaggcctcgcgacccccgagacccgctcggggatctcgcgcgccccctcaaatctcgcgccctcgggtttcgcgcgcccccgccaatctcgcgacccctggagccgctccggtctcgcccgtccactcccgtctagcgcccctcgggtcgcccgccaaccctcaactccggcgacccctcagggtctcgcgcgccccccgccaatctcgtgcccctcgggggtcgcgcgcccccgccaatctcgcgacccctcgagcgcgctcaggctcgcgctccccgccgcccgcgcccacgtgccccgcgcggtgcccgcccgcgccggagcccacggaagagcgcggacgccgagccccgcccccggccccgcactcacttctcgcgggcctggctgtcggagggcacggccgaacccttgccccccttggcgtacatgctgctccacgccgccgccgccggggcccacacctgtcaggcggcgccgcgggccgcgcttgccgtcgccatagctaccccgcgccccgggcctcaccgccccgagccccaggcgggcacggcaggcatcgtccgcgcgggggagctccagacggccgcggcggcggcggcagcggcggctccagctccggccccggccgcagggtggctttttttcctccctttcctccgcgcgggctgttccgggaaacgcgcgctcccctcctcccgccgcgcgcgcccccgcccgctgcctctacgccgcccgcgggcgcagctcttaaaggggcgatggcgggcgcgcgggtgggtcccgccgccggagcgcgcacgcgcagtgcccgccgcggggggtgggggcgcggctacacactcgcgggtcaggatcccggacggccacccagggacgcacagctgatcgcggctgcacacgcgcgcgtgcacacacacgttcactcacctcaaatggagccggccacccacattgttgtacacccagccacacacattcgcagcgacactcaacatagcgctccacacagcaaaagtgtaccccgctgctggaacgactgcggatagccccataaagcctcaggcagtgacattgggtgtctcaccccgcagagctacccacactcagcaagggtgggaaccaccgcacatacagcccgcccagcgacacacatacactgccacacacccagctcacagtggccgtcctggaacaactaaacacaggccaccgcacacaggcacccagcctcacgcaggcgcgcgcttatgcaaggccgtgccacagcttccaacagccgtggacagagcccacggagttaactcacagtcaccctggggcgcactatcgcggcctcctcagaaccacaccctacccagctccacagtcacagggcctgcggacactcagcgtcccgcccgaagtcacacaacacagacacaacccaggcacacagacacaaagctcctatagtacccaggctgtgggagccacctggcaccaccccgaagtaacacccggtgacaatactaggtgctgggtgactgctgtttgggcttctcagcctcggtgctgtgagctgtaaatggggcgcatcccacctttgtctgcgggagtcagggtgcaggcagtgggtgcccttttccccttttagggcccttcatccccccaccaggggtgttcagagagggtgggggcggatactgagtcagggacccccgcagggcagggatgcccgggtaccagtgggtcgtgtgtggatgggcagggtaggggaaggcggtgcggttgactctgggtctagatgtttctgtgtttgccacggctattcctcttttttcctaggcaagcccgcgtgtgtgcaaacacgcggctcccgtgtgagtgcacgtgtgcatccttgtgcgtggggggcgggcaaacacccaataaattatcgctgtctcggcgactgtccctggctgcgcggtggcagttgtgggtccgagtcgggccgagtcgctcagtgaggttgcgtgcacaagtgtgtgccgaatgtgcacgtgtgtgtctccgcgcgtgggtgggccgccagctccctaggacctgtgtgtggctctgtgctcacgtttcgtgtgtgtgtttgtgtgtgaatgtctggatgtctctcgctgccagctgaccccgcagatgcctccccgatagaggccgccccccagtacgtgagaaccccccgcccccaccccaagccttctggccggcgggaagtcgggagccgccggggctccagacccgcggagaggaagggaagggcaggaccggccccagccccgcctcctccccgaggggcctcggcgcgggaggggggacgccagcccttcccacttcctgtccagccggccgccccttcccccagcttcctctcccgcgggcctccgggccccggctcggcggggtaggaggggcccgcacaattccgcagggcctcgggctggcgacggccccggagcctgggggaccacggggggcgtgggcttcggcgtccaggtcactcccatcctaatgaccgctcccaccactgcccccgccagcgcctactcctaatgaggcacagagagggtgtggctcacccaaagtcacacagagccttggtgacaaccggcactcccgggcccggcagatgcccctcctgccacccccagtttaatctcctaaagctccgtggctccccagggccctgtgtgccctggttggtccctcgccccctgtgagccacggttcct

SEQ ID NO: 1561119 - DNA, 4001 bp, Homo sapiens
gctaaggagagggcgcccgcaggtcctcagtttttctgggccctgggcctcacagcaaccagccttggggtcgggggagcctgcagggagcttaccttggcggggggctcctgtcgtcagcagaggggcccgggtggacttggcctgcttgggccgggggctcttcttccgggaggcgttctgggggttcccagctgggcggggggctgggagtggagacagccaggggtcaggagctgagcccctcatccttcctcccacctgggggcccaggcctccgtctctgagggtctgaagtgatggaggactccctaggctatgaaggagacggggcggggcagggggcgggctgtgtgtcccctgggagttcatactgcagaggtccctctcccctcggtgggggcaggagggcacgctgggtgggggttggcagggcagtccctctcccctcggggggggcaggagggcacgctgggtgggggttggcagggcagtcccctgggctcaccatgtgtcaccaggggctcctccgtgctggggctcagctccagcaacagccctggccagggagccccatccaggggagatgttgagtcgtccctggagttagccacacgctgacctgcggcgggggggcagggacagaagctatgaggagaggaggggaatccaggccatttgggtccctggaagagggagttagccacctggctttggaggggatgggaggttgggtgtctctgaactgctgaacactcagacttgctggggctaaggacttggggttcctgggtcatctccaaaggagctccccctgaaggagcagccagggtgtcctcacctgcgcagacgacgcccgcgtcctcctcgtgggagcagatgtgggccttccagccccggtggtggcagaggcccagctgcccctcgttgccccggcaagccagctcgctgagccacacaggccctgccccctccccgaagaaggcgcctcccggggcggccagtgcccctccgcagcccagctgccggcaggccacggcggcatcgcgcaggtcccagccgtcatcacacacggtgccccagcgcccgccatgccagacctccaggcggccagcgcacccatgggggccatcggccaggcgcaggcgctctgagggttggaggaatggctgtgactggggaggggcatcctgggggccccaaggccagggcaactgtaggggcaggtggctgtcctgcaggtactgtctgtaggccagtggccctgctcactggcccctgggcccagactcctgggtgctcagagagatgcggccagacacctgggggattcccttgcggagctggggccaaggtcacagtggaattcggatgggccggggacccagtgggggtgaggccaggcctggatgggcagaagggggaggcctgggggggggggcgggcagatgggaggagtctgggcacttaccaacagcctggatccccaccagggccgctggaagggagggcggagggtggggcagtgtgaggggcaggccgggggtggccctttctccagcgcaggcccctcatcttgaataccccaacacacacacacacacacacacacacacacacacacacacacatgggcttggctaaaggtcagatgtctgggagatcccccgcagggtcagggctggggggcgggcagggggcaggtcccttgggcttctgggctggcagaaggctgggcagattgagcagggatcctcagaagggatgtcagggtatgcaggagcaccagcgaccagtcccggaagtttgagtccctaaactggacaagctaaggggtcagaggtgggggcctaggccccccgagtccccaaggagaatggatcactcaccaaggaggcaggccaagaccctcatggttgcagccagggcaggggatggggtgaaaggggaaggagagcggggagagaagaggaggaggcagctggggagagagggagggagggaagtgcctgctggaggcgcccaggcccgaggaggagcaggcagggctggacgctttgccaggaggaagaaagaggctgcagggaggcggcaggggacggtgggggggagggggggcgggagggggctggccgtctgctgaggcatgggggggaggggggtggcgggcgggagggagggtgtccaactgcagacacccacacgggagatggagacgacggccaggcaggctccagccagcaaagtgctgtgcccagagatgcttagggggtggccggctgcaggaaggcacaggacaggggttgggggacgtgtgcggggggggcgcagcatgagcgggaggggcgcccacctgctgtctcccctcttgtctggtcagggaaatccagtgagaccactgctagggttgggggctgggcagacctggggttcttggtgcagcagcaagaagatttgcagccagacaccaggagggacttcctgggttaggaaaagagactgaaagacccggccctccagtcctcccactcactggtggatctgagtgtgaagcccccagtccccagctgagagaggagaggttgaacttcactgtcccagagggagctggggtcgggggataagcagcacaagggtcaaggcttgggaaggggaggggctccacacactcttccacacactcacacacacacacacacaccccactgcctgcacaccaggcagctgtgaggcggaaaaaattcggtaatggggagcgtgactcagaagggctggcagggcctcgggctgcccctgagctcacagcctccccttctcccagtccagcaccgtcccccaacaattaatgttaactggggaaaggagaagccagacagaaatgggcgggggtgtccggagacagactgggaaagccatcagagaagagacaggcacacagcggtttcaggctttattaacaaacggtgtaaaaaaccagacggatctggaggaagggacagggctgcccgtctcagctctcaaccttcccagagaggggccaggcctggcagccctgtgcgtcgcgcctcctaagcagtcaaccttgtcccctccaaggacaggcatctgacccaatccaggtcccagggaggcggagtcgcaaaccctaactctggggtgtattctgctcggcctcctctccccctccccagatagctctcccagcctggggcacggacagcacagactttgcagacatcacccggggaggtttctcagtgcagacaggagctgaggtaggggttggagaggctgacctcgagaggcccccgagggccaggaaggaaaaggagtcattccactctgagaagctcaaacacaacagacttcacactgctgacgggtggacagaggccaggctcctcccctcggcaggcctctgtttctgggcccagggtggttgaggactcactgagggagagcaggtaaaagaacccgcagacagtaggcgatcatcaggtgctggcgcccctccctcctcccctgccctggctgtcagtctgtagcttcacaggtctttgctgaattccctcaccagcgtgtagcccaggcagccccagcccccctcggcctggtagccacagccctccagcatccctcccaccccccaggcggccacagccacggggaccacgagccgggcccggggctcccccatgcccccagcccaggcccgagcccgggcctccgcgaaggccagcagcctcctgcccacgccccggcggcggtgccagcgagagacagacaggcgggtgacccgggccccgtcccctgcatttgtgccaggggccagagccaggaccccacacacgtcaccggagccccgcacggccacccaggggccccccaggccacccggcggaggcagcgagccccatcgggcccgcaggcccagcttcacggcggccacagccaggaacaccggcaggaggagggccagggcgaaggaagccaggacaaag

SEQ ID NO: 1561120 - DNA, 4001 bp, Homo sapiens
tcttgaactcctgacctcaggtgatccgcctgcctcggcctcccaaagtgctgggattacaggcgtgagccacaagcccggcctcccccattatctttcttaactgcagtgatctactggctctaaagggtttgttggttggggaggatttggatgtatggaggtagaaggaaagtctactccactacaggtaagggaacctcaggggcagaggcggggacatgggcagggaggagctgggggtgtttgttttgatctgtattagaaaatgaggcagtcatggtggctcacacctctaatcccagcagtttgggaggctgagacaggaggatcacttaaggccaggagtttgagaccagcctgggcaacatagcaagaccccatcttttttttttttttgagacggagtcttgctctgttgcccaggctggagtgcagtggcacgatcttggctcactgcaacctctgcctcccaggttcaagtgattctcctgcctcagcctccagagtagctgggatcacaggcacgcaccaccacgcccggctaatctttgtatttttagtagagacggggtttcaccatattggccaggctggtctcaaactcctgacttcaggtgatccacctgcctcagcctccctaagtgctgggattacaggtgtgacccactgcgcctggccagcaagaccccatcttcaaaaaaaaaaaaaaaaggctgggtgcggtggctcatgcctgtaatcccagcatttagagaggccgagacaggtggatcacctgaggtcaagagttcaagaccagccgggccaacaaaatgaaacactgtctttactaaaaatacaaaaattaggtgtggtggtgcgtacctgtaatcccagctactcgggaggctgaggcacgagaatcgcttaatcgtttgaacctgggaggtggaggttgcagtgagccgagatggtgccactgcactgcagcctgggtgacagagtgagactcagtctcaaaaataaataaataaaataaaagccagaagaggcagtgcatgcctgtggtcccagctactcaggaggctggggcgggaggttcacttgagcccaggagtttgaggctacagtgagccatgatcgtgcccctgcactctagcctgggtgacagagcaactctgtctctaacaaaaagaaagaaagaaaatgaatatgcggcattgggaaggagagatagggcctcacggggaacggaggggctgggactttattctgagggagacataagcacacacacacacacacatgcacgcactgtccatggcaactatctgtcctgtggaatgtggcccccgctagctcttactgtcctcacatgtcacctgtcctggccttcgccccagcagctgaggttcacggagtttttcctgggctgggagcgggaggaagctcgggagtcagaggactccccatttcctggaggaagtccctgatcttgtttgtattcaagagagtgaacgagagacaaaagcaaagattgagacaaagagagagggagactgagacagacatcgggagagacagacggggccagggagagagaaagagaaaaagaaaccaaattcaaagacacacggagacagagatagacgcacagagaggcagatggccagaacccaccccagtcccccagcacgtgtcctgccccatccagcacccaccccgcccccccttggcgagtggggagacagggactcagagaggtgccgcagctccccacggtggcccagcagggccagcccccgcctccccaccttacccggtcacagggccccttcttctctagaaagctctcatagtagtgtgaaggcaggacacccttaggcttggggacacggggtggcctcagggcagaggccatgacggagccagggtcttccgcctggcctctccttccagtgggtgccccagctgggccgggaagctgagaaacaggtttcaggggagtttcctgtgtcagcccgtcaactccctcccctgccagggctgggcagaggctgatcccagcaggtccagtgatcctagggaaatccccgcctctccggtgtggaactgagaacagagagaatgtataagtctacttgaatgggagaataatcttcgctatatctgcaaagacagagacatggtctgtctctttatttatttatttatctatttttcctattttgagacagagtttcactctgttgcccaggctggagtaaagtggtatgatcttggctcactgcgacctctgcctcccgggttcaagagactgcgctgcctcccgggttcagagactgagtccaagctcagtctcctgactagcgtggattgcaggtgaccgccaccacgcctggctaatttttgtatttgtagtagagacgaggtttccccatgttggcccaggctggtctcgaactcctgaccccaagttttctgcccgcctcagcctcccaaagtgctgagattacaggcatgagccaccacacctggccctttctcttactttgatggaccctaatgattacattgggcccacctggataatccacgctactctccctattttaaagtcagctgactagcaactttaatttcatctgcaatttttcttttttagacggtgtctcattctgttgtcgatgctggagtgcagtggcacgatcatagttcactgcagccctgacctcccaatctcaagcggtcctcctgcctcagccacccgaagagctgggactataggtgggcaccaccacacccagctaatttattttccttttttaaggatgagttctcactatgttgcctaggctggagtacagtggggcgatcatgactcactgtagcctcgaccttacaggctcaagtgatcctccagcctcagcctccagagtaggtggtactacagttgcatgccaccacacctggctaatttttttttttcttttttttgagacagactctcgctctgtagcccaggctggagtgcagtggcgtgatctcggctcactgcaagctccgcctcccaggttcatgccattcgcctggctcagcctcccaagtagctgggattacaggtgcctgccaccacgcccagctaatttttacacttactagagacaggttcttgctatgttgcccaggctggtctttttttttttttttttttgagacagagtcttactctgtcacccaggctggagtgcagtggagcgatctcggcttactgcaacctctgcctcccaggttcaagcaattctcctgcctcagcctcccgagtagctgggattataggcacgtgccaccatgcccagctaatttgtttgtatttttattttagtagagatggagtttcactgtgttagccaggatggtcttaatctcctgaccttgtgatccacctgcctcgacctcccaaagtgctgggattacaggcataagccaccgtgcccggccctcaggctagtcttgaactcctgggtgcaagtgatcctccagtctaggcctcccaaagtgctggggttacaggtgtgtgccactgtgcctggcgtctatctttaatcttcaaatccctttgccacgtatcctaacgtattcacagattctgggaattagggcgtggatatctttaagagaccattattctgcctaccacagcctgtttaatatggtggacaattgattaattttgaatactgaatcagtcttgggtccctggagtaaaccccacttgtcatggtgtataattcactttatatattgttaaattctactttgtaatattttgttaaggatttttgcacgtcttcatgagggatatggggtgtagcttgctttctttgtaccgtctttatctggttttggtatcagggtcatagttccataaaatgaacagggaagtgtccccttcaattttctggaagagatgatgtgaaattggtgttaattcttctttgaacctttggcagaattcc

SEQ ID NO: 1561121 - DNA, 4001 bp, Homo sapiens
cttccagccccgggggccagggatgcttccagcgtcacatccctggcaaatgaggaaaggctacgtttccctcctgctgactgataagccggtgcaaacagttatttttggcagcccagggttcccctctgacaggataaacaaatcacatttcgcctggccccggtaacggccacacactgcgcagaaaacgtgttggcggccgcacacaaactctcggggcccaaacaaacacaggctgattccactgggcgcctctgctccttggacagctgggggagccaaggggctagtcttaggggattgggggccgctcccttctcaggagggtttcgctaccagggcattttaactggagtccaagagcccatgcaaacgcacgccccgctgcgacaactggccttgcctgagtgaaagtccgtaacgcaggcccccaaccacgctctccctggcacggaggacacaggcgccagacgggtccagctcagggtgttaagaggaagtaagggagggagggaggagagaaggaaggaagacagaaccatcagcaccgtgactggcccggcccggccccgaccccagcaagccatacttacttcttcacgttggcctccccgttggggatccttcgcaacttcttcttcttgaggatcttgacggccctcctgcacagcgtctccgagtccagcacctccttcaccttgccgtaagagccttcccccagcaggtcccccatcaggtacttgccgatgagcttggcccgcttgcggcgcggctggtagatgacctcggtggagtcgatgcggtggatgaacgtgtccatacccaccgacatcagctcgccctccgtgaacatgcccagctgctgcgggtccaccacctccatgctggacccagggtcctggagtcccgccgccagccctgagtccgcgggtgagcggtccttccttgtgttccgacttcccttctccaaaattttacaaagaaaaaagaaaaaaaaaaggcaacaaaaaccccaaaaggaagggaaaaacccttcttccaacagaaacgattgttctacacgtcagtcccggctgcgagtccaagcccggtgcagggtctgcggaccggcgggcaccgggggtccgggacggcggctcagacgcgagttccagtgggacccgggcctcagaactgggagacggcccggtcagggtcaacttcgtcctcggggaccctggggaggccggccggggcttttcagtgctaggtcatcctccggggacctcaggcccacggacaagtatgaacacggccgagcgcagtcttctccgggccgcccatcccacaggccgggtccgcgacgtcgctaccccccgggacccccacacctggagagcccaacttcgctgggggcgtctccggcgacgccccggtcccaccgcctgtcccaggagcaaacgctccgccgcggacgaccgagcggacctcccggggggcgccgactcccgccggcccgggcgagcgttcggggggctgggggcgtccgggaggcctcccgccgcggccaacagctccgctcagggctggtcgctgcccggcgcccgcgagggcccgcactgggcgccccccgagccggcccgcgacccccaaggtggtcgccggggcccggcaggcgcccccctccccgcaaacgtctgcccgagcgcgcgccccgccccgagtgccctcagcgtccggtccgcggggcggcgcggcggcgggggctccacggggctcccggcggccgaggcggcgcaggccgcaggctccgggccggggggttcccgaaggtgccgggccccgggcggcgcgtccccctcgccgcggccgccgcgcgtgtggaggaggcggagcggcgaggggggcccagcccatccaaggccgcggcagcaagtgccgccacccgcgctcccttcgccgccccgcgcctcactcgcgggcgccccgggccgcctcccccttccgcgcccgacacgccgccgccatcttgtttacctccctccccctccctgcgccgccgcggacaccgcacgcccggccgcagggcacgcctcctcgcgaggacgacgtgcccacccgttggttgaacctgccatccccggccctctgcccgccccgccgccgctgacgattggagcgtttggacccggccgggcgcccgagcggcgattggtcggcgcttggccccgcccgaggggtggatacagcgcgctcattggtcctcggagacgcccgtcacgggcagggggcgggaagcaggcatggggagacgaggccacggctgtgacctcggtggggctcgggaagggggtcgtaggtcacgggtgccaacggcctccctgaacggccgcagggtgggctgagcccggtgggcgggaacctgggcttgcggacctggaaggagcggggccacccctaccagagcccctcccccgcatccccctttggggcgaggtcaagggtcaaaaagtaacacaaagtggccaattccagtcaaaaatccttcttttgagccactcttggaccaggggaaagagaaacgctcagggcggcctctgccctatcggaactcatgggggaagcctcaggacagcgctgggacaagcccagcgggggcttctcgtgaaaaacaagagttgccaaaatatggcttgataaggttgaaaatattgaaccctcctgtgctagccccgtgccttccaccttttcctgcactagcgccaggttgtttagctggaacaaactatcttggtacaatctccgcctcctggtttcaagcgattctcctgcctcagcctccccagtagctgagattacaggcgtgcgccaccacgcccggctaatttttgtatttttagtagaaattacaggtgcatgtctgtaatcccagctactcagaaggctgagggaggagaatcgcttgaacccgggaggaggaggttgcggtgagccgagatcgtgccactgcactccagcttgggcaataagagcgaaactctgtctcaaaaaaaaaaaaaagatctcttccagaaaactgaagttgaaggaacactccccaactcaaacttattttggtatctcttttctgtactgattgctggctcacaccccaacttcttggaatctggagataatgctggataattggcatcggtaggtcccacgccccttcagagaactgcaggacacatggaagtgactcaggaaatacttggtgaccattacagacagaatccttgaagatggattctccgttcaaagaccacctcctccaagaacccctcctagtcattctctcaagtgcctggacggagatgtgctgtgagtgtgaactacacacggaatttctttgtttttttgatacgcataattttattacaaaatgttaaaaaatgcagcatcttaaaaaacgcaagatgtactgttgatactaattcctacaagtgtgctgtgctgccatacacaataaattttttaaaaaccattaaatatttagggacattaggcagggtgcggtggctcacacctgtaatcccagtattttgggaggccgaagcaggcggatcacgaggtcaggagtttgaaagcagcctggccaacatggtgaaaccccatctctactaaaaatacaaaaattagctgagcgtggtggcatgtgcctgtaatcccagctactcaggaggctgaggcaggagaactgcttgaaccaggacccgggaggcggaggttgcggtgagccgagatcacgccattgcactccagcctaggcaacaagagcgaaactctgtctcaaaaaaaagaaaagaaaagaaaagtattttctgtacagagaatcttatgagctatacgaaaatttgtacagttttatactgaagctaatactgagctgtactagaattcacattcttagcaaaacaagcccactgcacaggcatcattaaaggatagccatttattcttcatcttcaccctcttcc

SEQ ID NO: 1561122 - DNA, 4001 bp, Homo sapiens
gcctcaacctccggggtttaagcaatcctcccacctcagcctcctgagtagctgggactacaggcgcatgtcaccacacccggctaatttttgtacttttttgtagagatgaggtcttgctatgttggccaggctggcctcgaactcctgggctcaagggattctcccacctcaacctccccaagtgttgggattacaggcgtgagccaccgcaccccatccctaccgacacaattctcatcagctatttatttgggtaccagcttcctactagatagcaaacggcaaatcggaaggggaaaggtgggctgctacaagcaggtaatgacaatttctgctaataataacccagtccaagaatcttcagacttccagcgggccattcctgatcccttcaaatccggacatctccatggtcctccagtcactgccaatggacctgacgctccacgaggtcacaaaccctagcccaactcctcagactcttccattcaacatccctgtcccaagctaccccaaaaaccacggggtcttttcccaagacttccacaaacatatccccttccccccaaccccagtctacccccgttccgagatgcctcctcatgttgccttcgggctctacaaaattctcccccctaaagcatcaccccagggtaacccctaactcgtcctcattggcaccatcccaggaccctcacctccatactggacatgcccaacaccccacactccagttcagggctctctacctacatcctacaacacacgtgccatctcagtgccatcgcgcccactcctgcacacccccaaagtggaacttccactcttaagctctcccatccaggctcctagggtacattccctgctctgtccacacttccactccaaagaacccttccctgcactgtgcagccacacatgcccgggatccccaaagtttctcctcagaggggaaggcacacaccttcatcctggaccccttgaaaccctcctcccacccctcgggtccttacacagccctccttccgtgcccaccgtccagtcgccccgaaacacaccgatcccaggttcccgacttcctctccctaaatcctcccggttccccatctggacccgctctttcccagcgggtcccaagttccccccttggacgctcccacctccaacctgcacctggctagggccatggtcggggtcggggtcgggagtccctcggcgcccggcaagcttctgcttactcccacaggagaccactcaggtctcccagacccctccagctcctctccacaccctttcccgagttctcttagcctcccctccagggctcgagtcgcctctctcaggagccccgcggccagcgtgctcagtcccagtcccagtcccactcccagctggttgtggtccctccgcccctttctctcggccggtcccggtgatccctcccacccccggtccctccactcccacctcgggccgtcccggtcccgtcccaccccggagtgccctcaggacacccctcggacggcccctcactcgccctccgggaccgtcgcggtcccctcccgcccccccgccggccgtcccggcggccattgctccaagatggcggcggcggcggcagcgggtgaggccgggccgggccgggccgggttgggggtcgggggtcccgggacagcgctcacctgtaactcggcgcgctcggcctcccagcgggctttctcggcttcgaagcgcgcccactcgtgctggataaagtgcaggatccccggcaggctcaggggctccgggcccgccgtgggcccggggctgcctccgccgccgcctcccttacctgccgggcccggcccgggggcaggggcggagaccggggccgccccagtggggccagggcccgcgcctgagccgagcggacggcaggaggaggcggcggcggcgaccgcggcggccgctcgctcctccatcatggaggccccggggccggcctgcgcgcccgctgtgcctcgcgcgcctgcgcggccgcgccaacacccccccccctcccccgccgcaaccaccgcgcgcgcgcccggcgggggacagtaggaaggggggccggcggcgagcgcgagcctcgcccacccgggtctacaccgaagggtagcgtgcccgcgcgggggccggcgggtgggagatcgcgccccgaggagggcgagggagacccaggccccgcgcgacggtccccctcgctggagtgagactgaggaaggggccgctttctgcccccctcctcccacttcgccccagagaaagagccttaccccttccacacccaaacaccactctcctggacaattacttttactctgagagaaagggcgaccagcagtggccccatcctctctgattgccggccaggttggttgtcatggtaacccttccccagcggtgggggcgaggtggtggggagcagccttcccctcgcttccacctttgtggttatggagccccaaacctcttaggactctgcaccaggagaaggttgctaaggtaacctaagtgtccgtggtggtccttctgctcctatcctcattgattactatggcaacctcccccccacctagcattcaggtagaaaggaccccagccccaaggacactgatctctaagagaagcacctcttccccagcccctcccccatagccacctagttggcattaccatggtaaccgtcttccccttcccatcgtgggaggcccatgcaccaaactaaccaggtgtttttatttagaggagatgctctgctgaggggcagttgctatggttacagggcctggaccttcctccggaaggtgagaaacaggcaagttcaaggcctggttactatgataatagagcagcccccttcgagtgaccctaggaaccaagcccaacaaaggaggggatttttttttttttttttttttttgagacagagtgtaactcttgttgcccaggctgggatgcaatggcccaatctcggctcaccacaacctccgcctccccggttcaagccgttctcctgcctcaccctcccaagtagctgggattacaggcatgcgccaccacgcccggctaattttttttttatttttagtaaagacggggtttctccatgttggtcacgctggtcttgaactcccgacctcaggtgatctgcctcaggcccgcctcggcctcccaaagtgctgggattacaggtgtgagccatcacgcccggccaggggatgttttaagaatgtctctcagaggtagagtgtgtctatggaaggggttgtcatggtaacagcttctgttggcttctagccctaccttttctggacacattcatgctagagggatggttataggttgctataataactgacatccctcccattcaccccaccccactcctgagacaccccaggtggtgcccgagattataggacttcaagagaaaggattccctgacctttctcttgccacttttgtggataagatgaaattgtgctctattgtacggaaatggctgatttgggattttctggttctcctcctctcaggagcgcagctcagctgggctggaactgccctcctggaactcccccagcctacaacctaggaggtaagaagtccctcagtgtcacctacactctcatggaaactgcccttcctcattccttaaggctttcccatgtctctcatttttttctttttctttctttcttttttgagacggagtgtcgctctgttgcccgggctgaaatgcagtggcgcggtcatggctcactgcaacctccacctccctggttcaagcgattctcctgcctcagcctcccgagtagctgggattacaggcacctgccaccacgcccggctaattttttgtatttttaatagagatggggtttcaccttgttggcaggctggtctcgaacttctgacctcgtgatccgcccgcctcggcctcccagaatgctagaattacaggcgtgagccac

SEQ ID NO: 1561123 - DNA, 4001 bp, Homo sapiens
tgcctataatcccagctactcgggaggctgaggcaggagaattgtttgaacccaggaggcggagattgcggtgagccgagattgcaccattgcactccagcctgggcaacaagagtgaaactccatctcaaaaaaaaaaaaaaaaaaatacagaagttaccctggcatggtgacgagcacctgtaatcccagctacttgggaggctgaggcaggagaatcgcttgaacccaggaggcagaggttgcagtgagctgagatcaagccactgcactccagcctgggcaacagaacaagactctgtctcaaagaaaaaaaaaagagtaaaaggcaggcatgcgtcctggaaacaggtgcacacaggacaaatggcatggaagcagaaaggagataggtacacaggcccccagccctctcctgcaacaggaaaccagtatagacccagaggacacagtagagaggaacccacggacatatacacatagagaggttcaggtgcacacaccgagaaagtgcaggcaggtagacagcaagaagataactgcccacagagaggacgggcactgtcgcaaaagggacaggtgaacacgcacagagggatctggcttggttacccccaggggctcaggtgggcagggtgggtcaggaaggcttacctctctgttattcctctccaaaaatgctacggctgttgggctgaccatatggtccttcatttcctggaggtaaggacagcattagggaggaaagacactcaggctgggcgcggtggctcacgcctgtaatcctagcactttgagagaccaagccgggtggatcacctgaggtcaggagttcgagaccagcctgatcaacatggtgaaaccccgtctctactaaaaacacaaaacttagccgggtatcgtggcaggcacctgtagtcccagctactcaggagactgagacacaagaatcgcttgagcctgggaggcggaggttgcagtgagccgagattgcaacactgtactccagcctgggcgacagagcgaggctctgtctcaaaaaaaaaaaaaaaaaagaaagaaagaaagaaaaaaaaacacactcaaaccttcccccactccccgcctgcaggacctttcctgacctggactgcctctcgcatccgctccacgaacacctttctctcctgcaggtccccggctgggagcttgaacttgcctgggttggcttccactatacgtgggctgagagtcaagggtcaaggccggagccagatatcatccccgtccctaggggtccagccctacccgaaggtgggctgccaccgcaatgggctctcccatgccaccctctgccacaaagccccaggatatcgatggtctcttccaggtcctcgaggtcccactcgatgctgcgcaggccattccgcagctcattggtcgtccagtccagctcctcgcgtccgaccgccgcgctttcctgcaggagctcgcaccagcgctggtacagcccgcgggccgtgttcaccgccttctgcacctcgctgcgggcaggggcacggcgggcgcggctgggggcaggcggtcctcccgcctgcctctgcccccgactgcaaacccaaacgcatgggggactccggagacccctatatacccctgcgtgcgcctcccactctgcaccccgacggccttgcccagcccgccgggcacgctggggccggcacccgggcactggctggcttgggtacagagcaccctccgccctcccccgtcgttgtcactcaccctcggactacaaaaaaggggtcttcgagagacatgtcagtcccttcccccccaggccgaacccccctcccggcctgggttcgcgggctggttccctcccaaccgaggagaacgcgccgccacccccgcccccgtcacgccaccatcgagagccggaccgccaggggagaaagagaagcctcggaggcccgacgtgcggacacttccgccctctcctcagccatcttggttgtgggcagaggcagcttccggtgcacatgcccccgccccttagccctctcgtgccgcaccgtagggggcggtgtcggagttctgtctgggcctattcgggtccgagttcggaatttcggttcaaggcccagttcctcggattgttcctgcgcaacttcagtttcccttccaggcacgggcaatgtaaataatgatagcctccctcatctctggcggctgggtattatggctggggaaggggctcattcgattcgttgaagcttttcatggactccctgagctggcacctgggagatcgtcccatcccagggtcccgagtgtcaggtttggctagggtctgggggagaggtggtcctcccttctccctgcgggggcgcggtgaggagcgggcctgctcctccggggagttctgccgcattctcccaatctctttcctgagaagtggcggagttgggggcacttcgaggtcgccttggggcgaggtggtcgtgagggggtcccagatatgccagcagcggggggaggtcacctttgagaaagtgcgtggaggtgggtttcttcagaagcgcggagtctttctgggtgcgagcctgggggtagcgggtggtggctttgaggatggtctccaggggggccctctgtgtgtggggtctccgtctgggtaggggccaggaatatcagcggagggactcagggtcgtccctatgtgtgacagtggcgctgtgtgttggggagcttcgggaaagcactttttttgagtgatagggggcctggtctcccctggagggtgggcgggttatctgagggagtcctcggagggtcgcccccttgcgcgtcagagttgctgcgtggggtctcagagatagcgcctgggctggggaaatcattgtggggtctccgtggtaaggttagcggggtggggacggcctgcgtcttcggcaggtcgtcgcagtctggcaccatcgttgaatggggacgagtttgggaagggtattttaggggggaataacttttgagttcccagcgtgcgggggaagggcgggacgggagggtgtcccaaggcctgagaagatcagtgtggggcaggggtcaggaataacctgggagggggccttgtatgggggaaataattgggaagaggagagatgggatgaagggggcctcagcgggtcgtctcctgtgtatgcagggtcgttctgcagcgtctctgggagatggcgtccctgggagccctcaggtcgcccctacccgctgcggggtgctttcctggcgtcacgccttcctggcccctggagggaaggaagtgaaactctcctcttcccccacccggctggaatgcgagtcaggaagcctggggctccagcctgctccggctgcccgggtcggggatggggaggggcgtggccggagcgcaaagccccgcccctccgcgccccccccccggaagccccgccgccggccgctaaggcgatcacgggccctgtcctaatatgggcaaccggaagcggcccgcgcgactgccctacgtcactccgtccaaatttagttgtggaagtcagcgggcgctggtggcgggaaggcgccgcgagccagtgcgggcggaaagggggcggggggcgcaccaccccttaaagggcccgcaccaggaatgaatggagccattcgaacaattctgcatcctatttttggaggaagtggaattagtatttcttggagagacggcgcgtagcggagggtagggcggagattttctatctgctctgtctctgcattgctgggtttccagctcccaacctaaccccgcctccccgaacgcggagacggaactcggcccccttgtttggggggcggcagccacgtgttcacggggactgtcgtgcgcgccgggttcgcagccgtgcgagctctgaacccacccgtggagctcctgtcgcgggaaactgcgggggaatggcttggtacgaatcacgggaacccgtagcccggggcgggtcaccgcctacaag

SEQ ID NO: 1561124 - DNA, 4001 bp, Homo sapiens
ctggtgatgccctcagccaggatatctgacattttgcagcaggaagacaagatgcgcatgcttgggtgatccatgataagcacctgtccagatggatggacagatggatggaggagcaggcggaagaggccacagctggccccagaaggggccaaggcagtgggaggggcagtttcaagggctggctgggtgggaggacccagaacccattcacccaactccacccatgtggacaggcagttcttgggggtcccacattcagggtcttccccataggcctgatgatgagctgcctctgggtacccagccatctgcctcacccctaccttccactccccatccttcttgacactccgaataactccgctcagaatttctgcagggaagggaggggaggggtcagaatgctggttctctggtcccaccactgccccaagccttctcagccttggggctgaacccccatcttaattcccatttactttttttttttttttaagagaggaggatctcactctgtcacctaggctaaagtgcagtggtgtgatcataactcactgcggcctccaactcctgggctccagcgatcctcttgcctcagcctcccgagtagctgggactacaggtgcatgtaccacccacagctaatttatttttatttctgtatagatggggtctcgctatgttgcccaagctggtctcaaacttttggcctcaagcagtcctcctgcctcggcctcccaaagtgctgggattacaggtgtgagacacggcacaggaatcatttatttttagcccccagttctgcaaattggcttctggggtcacccccaatttacagacagggaaacagattcttaggcaacatgtaactcacctacgcatcctgagtgtctaagtggcagagtgctggggcaaaaggtgccactcgataaacatgttttaggtgaatgaaaagaggagaaccgggatcatctacagctctatctgcctctagcgccaggctctcggcttccccacctgctacctcaagtattcctgctgtgagggtttcagccagtccccccaacctggtctaaaatgtaggacccctggttcccagctctgaggcatgcctagctgaggctatcccactgacctccggtctcagtttcctcatctgtaaaatggaatcacttttttctaatctcccccaattaaaggggtttgagctacagaccgccctgcctagaggagagagtggagagaagtaacggggtggccccgcccagccacgtccactgtgtcatgtccactgttatcaagacggccagggcggaaggagcagctgaggccggaactccccggggtggaggaagaggcgccctccacccttcccccaagaaccggggccggtgaggcctggacgcctgcgtcctccagctgcaaggcgctcctggaaatggggcaaggaggaagacatcccctacaccacccctgtggggcctggacacgtcccctgagcgctcacagcacctagggtcgctgaccagagccctaggaggccccaagaatccagcccctgaactttgcccggcttaagagatcctagagtgtgggcatccagctgtgccctcctcccccggcaggcaccctaggaggcccaggagtccgggccccagcctccgccacactctacccgtcccctttgggtccccggagtccggccccccaattttgttctgttctggcaccggagagcaggggcgtccagctgggaacccgtccccgcccgccccctcgagggtcaggtgctcggacgcccagcccggcccccaactcccagccgccatgaaacccaggatcccagagcccgtgcgtccccgacccccgtcccacaccggacgccagagcccggccccggagaggcactcactttcccccaccaccgccttcagccccgagggcgccatcttccccgaggggcgccgccgccgcttccgggtgtgtcccaaggtgggggcgtggccccgcgcgtcacccacgtggaccccgccccgcgggccctgtccccgccccctgcgcacctggcccctccccgccgtcggttctcgcccaggcccaggaagttgagtccctggcggggaggacgggcaggtgcgtccgcgctgccgagcacgaagtcgctggaggtgcacacctcgacgacacgctcacagatgggagttcagacacacacttcctggcttgcgtgcgaagcaggatcgcagggcaataatccctccatcttccccgggaggttctgtgcctgcaagatacacggcacccactcgatgccaccgggccgccactgtctgggcctgggatcttgacccacttgccttctgtacttcagggtttagaggcagcagcagcagcagcagccgtcttggataacttttgatggattcaggaggcctggagacctcttgtgtgcaggcacctggacataattttcattcagtcctgcccaatgttccgacctggactgcggtgccgacgaggaaaccgaggcttagcgggatccctaatccaaggccacgacgagtgagcctgctgggttcaagccaggagcctgtccccagggggcatttgtcacagccttaccctcttccgggaggcgcaacgcttaccctcgtggaccaacaatcgaattaacatgctgatacacacatggggtgagtgacgccctcaaatgcttgcaaacacagacacacactcggaatttcagaagctgcttctgctgtgtgtcctgtcgcttggaaggcacagccccagcagcacccatacaaaatgaggtctccgatttaaggtgcgaggtatgtgtgcaaacagactcttgctggtctgagctggttccttcgctcggccgtgttgatgaaggtaccaagccccctgccacttacatgggacatagggagtgaatcagacccgaaggtctgggggagataggaaaggatccatgctgccctaaaggaaataaactaatgtgacaacaagtgccacagaaggtaggggtgggaggggactttactgaggatgacccccgagggcctctctgaagaagcagccttttgacattatccctaaatggattctagaagcagccacacagcatgtccaggtagagaagggaggagccccgagcttaagaaggctggagggtgggggcagcaggggccagacttctgtaggacaaggtcagactgacccatcccagtgccaggatgcaggactttcagtgctaaaaataggacagtcacaggcaaaccaggacggttggcaaccgtaggtaggagtttgagctatttcttcctttcctttccttttcccttcctttcttccttcttctccctcctccccatttttgtttgtttttgttttgtaaagagacgggtctcgctctgttgctcaggctggagggcagtggcacgatcatagctcactgcagcctcgacttcctgagctcaagggattcttccacttcggccacccaagtagctgggactacaggtgcacgccaccgtgcccggttgattttgttgttgttgttaagagacaggatctccctatgttgcccaggctggtatcaaactcctgggctcaagggatcctcctgccttggcctcccaaagtgttaggattttaggtatgagccaccgcaccctgccccttcctccttttgtaacagctttactgagatataattcacataccatacaactcgctgacctaaggtgcgtaagtcaatggctttcagtatttttggagttgtgtgtccattaccacaatccattttagaacatttccacaacccctaggtgtttgggttttgtcttctcaagagttttgagcaggggaaggcggggaaccctccagatcctggggggatggaagccaggaccgcctccagcttctcagcctgaccccttggggggacagagagctgttagggccagccaccccaccactaacccccaaaa

SEQ ID NO: 1561125 - DNA, 4001 bp, Homo sapiens
caaactcctgggctctagagattctcccacctcagccacccgagtggctaggactacaggcacactctaccaggcctagctattttcttttattttttgtagagacaggttcttgctatgttccccaggctaatcttgaactcctgtcctcaagggagcctcccatttaagcctcccaaaatgctgagattttaggcatggatcaccacacctagccaatatccacagggtcgttttattttcatcctggctactaggtaatcattctggccagagaatccacaggcaacaagaccagggaggctcactggctccaagcaacagacaatgatgtcttcagactagggtgatagtatggagacagggaagacacctcagaggttccccatgggactcagaataaaatccaaattttaaaagtctgagccgggcatggtgactcacacctgtaatcccagcacctgggaggctgaagcaggcagatcacttgaggtcaggagatcgagaccagcctggccaacatggtgataccccgtctctactaaaaatacacaaaaacactggccaggtgcggtggccggcgcctgtaatcccagctactcaggaggctgaggcagaagaatggcttgaacccgggaggtagaggttgcagtcagccgacatcgtgccactgcactccagcctgggcgacagagcgaaactccgcttcaacaaaaagaaaaaaagaattctaaaaggccattttcaaggccccgccagatggttcccctcccttctgcttcatccttgacattcttcaaaaggacaagcccatcctaccagggcctctgcatttactggcccccctctgtgtggaaggctccaccctccagggattcccatagctggcattcattgtcttaactcaaatgtcctctgcttgaaaaggcctttccctgggccaggtgtggtggctcacacctttacgtaaccccagcactttaagaggctgagatgggaggatcgcttgagcctaggaattccagacctgcatgggaaacgtggcaacacaaaaaacacacaaattcgctgtgtggtggcgcgcatctgtggtctcagctactagggaggctgaggtgggaggatcacctgaacccagggagccacagtgagccactgcactacagcctgggcgacaaagtgagaccctgtctcaaaaaaaaaaaaaaaaaaaaaaagaaagaaagaaagaaaaggtctttcctgactacccaatatcagaagcctccactctgatcatatcatacgtaacctcacatcatacgtaagtttttgtaaatattttctcattaatgcactgacaccccagtagaaagcaacctccaggaaggcagggccctgtttcggtcaccgctgcatgcgtagcgcccagcacactgcttggcacacagtgagcacgccctaagtatctgctgatgggtaaatgcattctattctggggaagcagaaaggccaaggcttgcagcaaagtgagggtcaaaagacgcgggaaagtgtgtcaagggagcctcaaagcacttcggaaaagcagcttttccagaaagcgggacacaggccagaggccagctgcgacgaaaagaggggtgcagggacagcccaaggttgtcgccgtattggggaacggaggttggagcagccctgaaggcggttgtttcggaaacgggacgcagggccgagccgggtggcggcctctacggagatccgtgcgtcctcagcaaaccaagcgggggcggccagcaacctgggtctggggtctcgagaaaccaagaggtgcagaagccgacgctgtgggctgccccggggctgaagcgagggatccacgggtcgcagcaggacggacccgaggagtcaggggagacacctagccccagggacccaggcggccgcctgagaggaggcgggggctgttacctgcaacatcccggttgtccatcttgagactcatccaatcccacaatgctccggcgccccttaaggggccctgttatagtgtgcatcgcctgatgggagatgtagtccgcctcggtcagactcgccctattactgcgtgaacgactgggtttttttttttttaacctccagaaacggaagcctcagcctatcagcgatgcctaagtcccagtcacgataaccaaacggcgtcgcccttttacaccttcccggagcggcagtcatcccaaatacaaactacatgttccaggatgctttgggcggcagatctcgcggaagccgcgaggagagcccggccccgtctcgcgcgcctgcttccgcctccctgtggcggcggcttgttgttgtggaggccaaaatggcggctcaggcggcggcagcggcccaggcggcggcggcccaggctgcgcaggccgaggcggccgactcgtggtacctggcgcttctgggcttcgctgagcacttccgcacttccagcccgcccaaaatccgcctgtgcgtgcactgcctgcaggccgtgttccccttcaagccgccgcagcgcatcgaggcccgtacacacctgcagctgggctccgttctctatcaccacaccaagaacagcgagcaggcgcgcagccacctggagaaggcggtgagcgcgggccgggccgcgagggaggagtcgcgggctccttgcaagatctgggctgacgggtcgcgaccgcggcgggtggggggccgctcctcggcgacctgggggcgcgacctccgtcaaagccgcaggacccccacccgcctctgccggaccccaaagccaccagcctctcaagggacacgaaagcctcgccccccacgccttatttcccgtttctggtgacagggctccaggagccccgtcaccgtactctgaaagttgcctgttattgggagcaacaggatccgcaaatcgtctggttttcaggaggatcccacctgttggtggcgatggggacatcacagggtcctgaagctattagctcctcctggttcagcttccggagcatcagccccaaacgcttccacctaaagtgacttggggtaggggttggcgaaggcgagacccctggcattctcccgggaatctgaagtctggtctctcaggaacctggaagggcatgattctccttggacacagaagtttggtaatcgtggtttttggagggtcttgtgcccccatcaataatgcctggtgtcgtacgagggaagctgagacccggagtctggagttggtcatttgaggcctatgaggaggagaaacaggggttctggattccaggccccgctgttcagtttcagtattaggggaactaaaagcagctcctgctttttctccatccactggtgacttctaccatccatcagtccatcctcttccgtcagagtgagtccctcccctgacccaacttgatttgtgtcatcttggtgcctcaaagaatgcgggagagtggctgtcattctgccctttagtaaactttctttttttttttttttttgagacggagtcttgctctgtcacccaggctggagtgcagtggtgccatcttggctcactgcaagttccgcctcccgggttcaggccattctcctgcctcagcctcctgagtagctgagactacaggcgcccgccaccacgcctgcctaattttttgtattttttagtagagatggggtttcaccgtgttagccagggtggtctccatctcctgacctcatgatctgcccacctcggcctcccacagtgctgggattacaggcttgagccaccgcgcccggcccctttaataaactttctagggccaggctcagtggcttatgtctgtaatcccagtattttgggaggcggaggcagacagattactagaccccaggagtttgagaccagcctgggcaacacagtgagatcccgtctctacaaaaaatacaaaaactagctgggcgtactgacgcgggcctgtagtcccatctactccagaggctgaggtgggaggatc

SEQ ID NO: 1561126 - DNA, 4001 bp, Homo sapiens
acgtgcctgtaatcccaaatactcaggaggctgaggcatgggaattgcttgaaccagggagacagaggttgcagtgagccgagatcatgccactgccctccagactgggggacagagcgagactgtctcaaagaaaaaaaaaatgcgtgctcacagaacctgctctatttcacttaatcctcgaagtaaggaggcagtaatccataatcctcgcatggtacttcagaggcaagctggaccctttttatttatcttttttttttttttttttaagtagagacagggttttgctaggttggccaggctggtctcgaactcctgacctcaagcaatctgcccaccttgtctggactcttttaagggggtctctgccctcacgaagttcacaggtgtgtgctggctgaaaaggagcaagacaaaccttctctgggcccatctccttggaatccattaaaagcagctctgtgaaagcagttctatctgctggaggaaggtgtcaaccaacacacataactgagcataacagagtaggaagggtgggaccacaaccctcgcaaatcgtggttaggaaagaagagatcaatcttttttttttttttcttcctttttttgagactctccctgttgcccaggctggagtgcagtggcatgatctcggctaactgcaacctccgcctcctggactcaagcaattctcctgcctcagcctcctgagtagctgggattacaggagtccgccaccgcatccgactaatttttatattttaggtagagatggagtttcaccatgttggccaggctggtcttgaattcctgacctcaagtgattcgcccgcttcggcctcccaaagtgctgggattccaggccgtgagccactgcgcctggcccaggatcactcttttcccattcacagactcagcagggcacagaggctctgagaacttccttcccttctaaaagaagcctcttgacagtgagtggcgggacccccaaccaatgacaatgaactagtgacagttcattctgcgctgggtccttgcgcgatctcccaaccacccactgaagaggcgggtcctgttatgaatgacattagggtgaggaggcaaagggagacagactcaacgacccattcaagaccagacagcccagatttgaacctggcaaaaagggtattcgtgcatccaaagccccgaagaatgagtaaaaagattaagcaacattttggggtccaggggctgcatccttaaccatcaagatatcccgcttcgcaaaacctccaacttcaagagacaacccgtagggtccatttcccatcacgatcaccgcctcccccacccgcctcccccagtcccatccttcagcccttttcccggggcgcccccttgttctctgctggcaaagggcagggttcccgggtcaggtgacccaggttcaaatcacacgattctaagctttctgtgcttccgtttccccacctatggaatgggcagccagtaaaggggctggtgtgggggctgaaccggttctaaagagggcaagggcccgatgcagcgctgggcgccgttatctcctcccgagcgggggccgctccgagttcgggaggaatgaatgaacgactgaaccaatgagcctttgtggacgcggcccgccgtctcccggcctctgcgggcgaggaaatgggggcgccgggcccgggaggccgcagccggccacccaggccaacccggcggggacgcggccgccgccgcagccagagggccgagcctgcgacgccatcacggagcccggggcgggcccccaaggccgagcccgagcttcccaccccgggagccacccaccgacgacgccagggcccgggcctcaccccgagaccaccgcgcgcggagccacccccgccgccgcctcaggctcctcacccgccgccgccgccgcgcgaggcggggacatgcaaatgaaccaacggtctccgcagcgccgcgccgcgcaggcgcaagccgccgccgagtcctggtgcgcaggcgcgggccgccgcggcccggctctcttgcgcaagcgcgctgtccgcttcttctgggcggacgctctggaggcaaaacatttccctgctgggggcggcgaccaccgtgagcgtcccggaaggggcggcaaagacgcctccgtcgcgcacgaggtggcctcgttggctttaccttggttcgcggtcgtccttggttatcgtgagcgtccgcgagtctctgggaggccaagcctaggggcgccacagcgcctgcgcgcgtacggcggccggaaggggctagaggcggctccctgggtgacaaccgcgcgccccacctttccccacgtggccgcgaagaccgggtgagacgctgcggctgccgaggcctgtcccgcgcggagtggggagtgggggtgccgcagggtcgggctggcgcgaccctcgggtacgtggtttggggggaaaaaaaaaatgaaagaattttacagaagccgcctggggacaaaatcctcggcttccctggcattcgctttattttcattcattttatttattcattcagcacctgtgcactgagtgcctgctgcgtgtcgggccccgtcctaggcagtggggacaaggaggctacagggtacaaataaatgagtgaacgatgttgctctagatacaggtaatggtgtgcaaataataacagagtgatgggacgggaaagcagggctgctctttatctagaagtggttttgaaggctgtctcttgagtgctgggaaggatgagaaaggcggggaagaggaacttggaaggcttagatagagaaggtgcggataaggaggctgggttttgttctgagagggttgggaagccactaccgggctttgagcacgtgagtgaggtggagtctaggctctgggagtggcaggtgacgccgcccttaggggaggctggtgtttgaaccagagtgggtgtggctggtagagggacatgtggatggagtcttttagagtccccagcatgtcatggcacacgtttaattttcttttgagacggagtctttctctgtcgcccaggctagagtgtagtggcatgatcttgactcactgcaacctccacctcccgggttcaagggcttcccctgcctcagcctcccgagtagctgggactacaggtgcgcaacaccgcacctggctaaattttgtattttttttttttttgaaacggagtcaaaaggagttcaagcgatctcctgcctcagcctcctgagtagctgggattaccggtgtgcactatcttgcctggcctttttttttttttttgagacggagtctcgttctgtcacccaggctggagtgcagtggcgcaatctcagctcactgcaagctccgtctcctgggttcaggccattctcctgcctcagcctcccgagtagctggaaatacaggcacccgccaccacgcccggctagtttttttgtatttttttagtagagacggggtttcaccgtgttagccaggatggtcttgatctcctgacctcatgatccgcccgcttcggcctcccaaagtgctgggattacaggcgtgagccaccgtgcccggccctggctaattttttgtattttcagtagagacaggattttgctatgttggccaggctgttctcaaactcctgacctcaagtgatctacccgcctcagactcccaaagcgctgggattataggcctgagccaccgcacctggacagcacagttttcttgatgagcagattcctggctgagagaaggaaactggctgccagttaggggccttactcatcttctgttttaccctcagcatgccctgatggataatagggactggtaatgctgcttcccccttttagcctaggctgttctccaggtaattcttacttggccatctccaggcaccatcttatgtgttccaaatctgtactttcctcctccaactcagccctgtaccagatctaggggaccttggaggactcaggt

SEQ ID NO: 1561127 - DNA, 4001 bp, Homo sapiens
tcgatctcctgacctcatgatctgcctgcctcggcctccccaagtgctgggattacaggcgtgagccactgcgcctggctttttttttttttttttttagcgatgaggtctccctctgtagcccaggctagagtgcagtggtgcaattatagcccactgcagccttgaactcgggctcaagtgatccttgtacttcggcctcctgcttcagcctcgcaagtatctgagacctcaggcatgtgccatcgcgctgggctaattttttgaaaaaattttattgtagagatcaggccttgctatgttgcccaggctggtcttgaacgcttgacctcaagcaatctgcctatcttgccctcccaaagcactgggactgtaggcgtgagccactgcagccagctctcaaccacttttttttttttttttttttttttttgagacagagtcttgctctgtcacccaggctggagtgcagtggcatgatcttggctcactgccacctccatctcctgggttcaagtgattctcttggtcagcctcccgagtagctggaactacagacgtgcgccacagcgcctggctaattttttatttttagtagagacggggttttgccatgttggccaggctggtgtcgaactcctgacctcaggcaatccacctgccttgacctcccaaagtgctgggattacaggtatgagccaccatgcccagcctgtcaaccacttttaagcctacggtttcgtagtgttaagtgttaagtatattcccagtgctgctcaaccaatctccagaggatttttgtgttgcaaaaccgaaactctatgcagagccagcaccgactccccatttacccttctcttcagcccctggcagccgccagtgtactttctgtttctatggacttgatgactccaggtaccttatgtaagtggaatcacacactatttgtatttttgtgactggcttatttcatttagcataatgtccttgatgtttatctctgttgtatcatgcatcagaattttcttccttctcaaggatgaataacattccattatagctatataccacattttgtttattcactcacctgtcagtggatatctgggttgcttccatcttttggctatttgctgaaatccctcttattatgttcccattgctcttggcctctcagggccatgccacttccaatgtcttcagcctcaatcctcaccgcatccgcagtgctcttaccgccctccacccacagccccactcccagagacatatgatcctcatctttcagccccttgagattgcctggctcttttgtggttcctggccattgccctgatgattctcctatctgaaaatagccctccccccaagtaatttcatactcattctttgcatttccatttaaatgctatttcttctttcaggacatcattggtcatcctcagccatcctccctcccactgccaccaaacaaacacctgaatttgccttgggattcactcctgtggattctcctaataccttagattacccctctgaacactcatcctactgtgtaatttcctgactaaatccttttctctgattgtcaatggtattaggcattcctctcttccccttaaagcattgtacactgtctgacataaaggaagaactccaatcatgcactgaatggacaggaacacaaccacagcctttctcagttcacgattctgcctccttacctgatttggggtaagtcaatattattacatcttcatcccttatcacgaactcatcacgtacttttcttaaggtttcggatctgaaacccatagtagggaaagctatgccttcaaaccataagaaatcgtccgacatgatgatgacctcttcctgcgtggtgtgagggtttcaactgtagccaccgctggaggctgtggcagctacaggcagatcagcttttacagcaaggataaaacgatctttaaccttgtcccagcatgtcacatgtttgttgtaaagtttacttgctgataaagagaggtataatgtgacccatactcaaaagattgaagatgttgagcaatcatgaacttatctagagaccattttaggggtcatctgagcttgcgttcctgagagtgaactgcaagatcgaataacaaacacgaggacaaatattttttttgataatatgggtgaatttatttcttaaggtttgagtgcaaacttaaaaacaagaacaaagcttttcatcaagcataaacacaaaatctaaataatcctgcaatcgtgcattttaacagaaagtacaaatatgaatacattataatttgtaactgcatttaaaaattaaaatatgtctctccaaatccaaaagaccacacagtctttatctgttctcatcttgttaccttagaaacatttgtcatatgctctcaggaaaatataggcaagaattactaatcagttattcacgatcaaagaaacattattctccctgagactttttgaatcatttatctgtatttctgaagtatcacacaattatacctccactctagagaaaaaaagagtaagtacaaatattagcagtgtatatattgtagtaaatttttaaagtacaactttagttgatggctgacgtgtatgtaataattgtgaacaatttaaacggtataaaaatgtgagatgaaaatctttagactcaaatacttgaaaagtcactatgaatatggaaagatttgtttgcataaacatgtatgtttttagatggaaaatcaagaggtagtggcatctccctgtttccttaataatatttggattttcacaaagaattggcagcacccaaccttaagtgttaattatgtgtttgtttgttttttttttttttttgagatggagtctcactctgtcgtccaggctggagtgtagtggcgcgatctcggcttgctgcaagctctgcctactgggttcatgccattctcctgcctcagcctccagagtagctgggactacaggtgcccgccaccacgcccagctaattttttgtatttttagtagagacggggtttcaccgtgttagccaggatggtttcaatctcctgaccttgtgatccgccacgcccagcctaattatgtgtttctaaaggacctatacaacagatcagttggcagtgttctagctttagggagatgggggtggattgggggtgcaaatatctgagataagataatgcatgcactcacacatttaaaatcaccattctaaatgggaaaaaaaaatcacatattgggaaagtccaagaaactcattcttaagggataaacagcagggcaggagcaaaagctgaatagaagtctacttgataataatgttttttcactcttcaaaggcaagttgggaagaatgagaatactcacatacacataacttcagggaaaacgtgcctagaattttaccttgcaaaacactgaacagaaatctttacaaaaaccttcattcttggtctgggcacggtgtggtggctcacgcctgtaatcccagcactttgggaggccgaggcgggcggatcacgaggtcaggagatcgagaccatcctggctaacacggtgaaaccccgtctctactaaaaatacaaaaaattagccgggcgtggtggcgggtgcctgtagtcccagctactcaggaggctgaggcaggagaatggcatgaacccgggaggcggagcttgcagtgagccgagatctcgccactgcactccagcctgggcgacagagcgagactccgtctcaaaaaaaaaaaaaaaaaaaaggaaagaaaaaaagccttcattcttgtttataatacttgatttttcccttattaccaccctgtacatcacatttaagtattttctttataaatattttagagcaaaaagaatttattttgttgcaatggtggcccacatctgtacaaaacaacctaaacaagatatatatgtatatatatatgcatatatatatgcgcatatata

SEQ ID NO: 1561128 - DNA, 4001 bp, Homo sapiens
ggaggaggtggggaagagaggagaaaaaagggaaggaagagtttttgttatttccctttggtcatttaaatgctacttattgaccgggctcacacctgtaatcgcagcactttgggaggccgaggtgggcagatcaagaggtcaagagatcaagaccatcctggccagtacggtgaaacctcatctctactaaaaatacaaaaattagctgggtgtagtggcacacgcctgtaatcccagctactcaggaggctgaggcaggagaatcgcttgaacccaggaggcagagattgcagtgagccgagatcacgccactgcactccagcccgggcaacagagcaagactctgtctctaaaaaaaaaaaaaaaaaaaaaaaaaaaaaagacggctcagtggctcacacctgtaatcccaacactttgggaggccaaggctggtggatcatgaggtcaggagttcaagaccagcctggccaagatggtgaaaccctgtctctactaaaaatacaaaaataaaataaaataaaataaaaagaagtagccgcgcatggtggcgggcacctgtgatcccagctactcaggaggctgaggcagagaattgcttgaacccaggaggcagaggttacagtgagctgagatcatgccactatactccagcctgggcgacagagagactccgtcacaaaaaaaaaaaaaaaaaaaaaaaaatagaggggggtttgccattttgcccaggttggtctcaaactcaaacactcaaattgtgtgtaattcaccactttaaagtatacaatttagccaggcgcggtggctcatgcctgtaatcccagcactttgggaggctgaggcaggaagatcgcttgagcccaggagttcaagaccagcctgggcaacatgatgaaaccctgtccctacaaaaaacacaaaagttagccaggcatggtggtgcacacgtgtggttccagctactcaggaggctgaggttgggcggatcatgtgagtccaggaggtcaaggctgaaatgagccgagattgtaccatcacactgaagcctgggcagcagagcaagacctccaaaaaaaaaaaaaaaaaaaaagtatacaatttggtggtgaccagcacctgtagtcccagcactttgggaggccaaggtgggaggtttgatgagctgatattgcaccactgcaccccagcctgagtgacagagcaagaccttgtctcgaaaaataaaaataaaaatggtcaggtgtggtggttcacgcctgtaatcccagcactttgggaggccaaggcagaaggatcacttgagatcaggagttcaagaccagcctgggcaatgtagcgagaccccatctctacaaaaaaaaaaaaaaaaaagagaagtagagggtaaaggggaaagggaggaacagaacgaggacgctatttcagccagggaggtcagggaaggtgaagtgttgagaactgacctggaggggagaggctgggcaccgggtgggtatccctgggaggctacttctggcaggggcaccgctctgaacagacccggccccacttttcctcctcccctccttctctatgtgcctttcctgtcctctgccgcaccccctccccactctccccagcccccgacgcccgcagcccggcaggtacctgacttggggtaggtgatgataaagatgtcgtcgtcccgcacatcttgggtgttctccgccaagctgatgctctcgagcgagtacaggccgacggggaaggggacgcccttgtaccggaagtattcacctggcaacttctggctgtggaaaggtgggggagacgccatgagggagagtagggaggtgggtgctggagttctcagggtggcgacactcggaccctggcaaggaacttcctcctcagagcctcagtccctcttctgtaaagtggtgacactgtccctataaactttataaagctggtcaggcgcagtggcacactcctgtaatcccagcactttgggagacagaggtgggtggatcacctgaggtcaggagtttgagaccagcctggccaacatggtgaaaccccgcccctactaaaaagacaaaaatcagccaggcgtggtggcgcatgcctgtactcccagttactccggaggctgaggcaggagaatcgtttgaacccaggaggcggaggttgcagtgagccgagatcacggcaccattgcactccagtttgggcgacaagagtgaaactccatctcaaaatatatataaatatatatatatatatatttttaattttaaaaagttaataaagatcccaggcgcggtggctcacacctgttgtcccagcactttgggaggtcaaggcgggtggatcacgaggtcaggaggtggaggtttcagtgagctgagatcgcgccactgcactccagcttgggcaacagagtgagacttcatctcaaaaacaaaaacaaaaattagccaggtgtggtggtgggcacctgcaatcccagctactcgggaggctgaggcaggataattgcttgaatccaagaagtggaggttgcaatgagccgagactgtgccattgcactccagcccaggggacagagcgagactctgtctcaaaaaaaaaaaaaaaaaaaaaaaaaaggttaaaacagagagtagctcatagtctgcattccataactttgagttaaaattattatggctatttcatgcagtagcaggcaccacggggccttatgtgaactcagaggaggcctgcctagcacagccttgcgcacacagtaggccttcaataaactgcagttactttgtttgttcagtgatgtcatcagttatcccataggttgagcgtgggcgcggaattagtgatgatgtcatcggttaccaggcaaatttagtccagtgggcaggcgcagtgaggtaattagttttcaggaggattagccactgagcgcctgctgggccttggctgggcttccataggtcctacttgtcctttctgtgccttgggcagcggacttcacttctttgatcctcagtttcctcatctgtcatgtgaggataagagcaatctctgctttgaggttttaatcctacttggggattcaacgggataatatattttaagtgcttggctcctgatacatttatcaggaaacggaagctctgtttagcattattttagtctttgatctggccaacagctccttgagggagaaatctccttcccagcttacaggagaggaaaacccagatgccaacaagaaaagaccctgtgcccttggagaggccctgaaggaataaatgaatgaataggagggcatcttgcccgttcctcttggcacctacaatctccaaatcgggggtccctcccccactccccagaggccagggtggagcccacagtgctgggacttgttggtgttcaaccagtgtttgattgaatgagtgtaggaaggaaggaaggaaggaatgaaggggtttaccaggacaaaaggaaagtcaaagacacttatggctttcagctgctgtagcagttctcagccttgggtgctgtggatactttgaaaactcctcaagggctgggcgcagtggcttgcacctgtagtcccagcactttgggaggccaagacaggaggattacttgaggccaggagttcgagaccagcatgagcaacatagcgagaacactgtctctgtttaaaaataaaaaattagccgactgtggtagcatacacgtgtagtcccagctacttgggagtctgaggcgggaggatcaattgagccaggagtttgaggctgcagtgagctgagattgcgccactgcactccagcctgggtgacagagtgagaccctgactctagtaacaaacatagaaacaaaccaattgtcgtgcagtgggtggggtagaattgggctccgctgtagcttccattgctacagagaggacatggagcttcaaggagggaagcgatttgactgtggccacacaagagctgaacaga

SEQ ID NO: 1561129 - DNA, 4001 bp, Homo sapiens
gtttgaggtcctaagggcacccccccagggctctgcagccatcagggctggaggagtcttgcaggggagggctattctcccccacgatgacgaaaccgagcttcgcagagggtcagtgactaaaccaaggtcacccacttagcgaggtcactcagggcgttttatgaccagctggcagagccgtcgcggagataaaaaaaaggctcccaggtgcctggctggggtgggggtgaggccttcccagaggcgggaaccctggaggcgagctggcttatctgtttatctctggagagaagaattgcagaactcagaagtcctggattagacaatgttgagtaaagaatgctggggcctccctcacgcagaactgggccagcctggtcacagctctcagcccaggaggcccagagacatcaggaagcttgtctaggtcacacagcaatcaggattgaactgctcctgtctctggagtcccaggcacccaggaaggcctcttcatgccccagcttctggctgagggaggggaggggagggcctgaaacagtggaatgaaatgaggcggccaggcgtggtggcccacgcctgtaatcccagcactttgggaggccgaggcaggtggatcacctgaggcaaggagttcaagaacagcctggccgacatggtgaaaccctttctctactaaaaatacaaaaataaaattagccgggcatggtggcgggctcctgtaatcccagttacttgggaagctgaggctggagaatcacttgaacccaggacgcggaggctgcagtgagctgatatcgtgccattgcactccagcctgggcaacaagagcgaaactccatttcaaaaaaataaaataaaataagaaaggaatgaggcaactgggctgagaacaggtcttggttgtctccctcctcacagcccacggtggctggaggggcccaggctgccaggaaggtctcacttggcaagagtgcaagatacgaggggttggagattgtctcagcagtttgctgtgtgatctggggcaggctgcctgccctctctgggcctctgcgctcccctaaaagatggagccacggggaggggtgtaaaggggacatcaccaaggctgtgaggagcaggagaaaccacaggctctggcgtgagacagaccgggttcagatttgcttctagctgcgtaattgcggtcatgtcgcgttccctcccagcctcagtttccccatctggaaagcaggtactgtcaaagtgtctgactcatccccaggaagagggagtcacgctgagctcatggaagtgggcagtgctctgccctaaccactgttaggagacctgaagagtccagagcctgccctctccgccccaagtgccctagaacacagcttctccctctgggggtctcagcagcatcccagtctctcccatttcacccccaagcacccccgttatttcagggcttgcatggggtgtcctgggtactacaggctgttgtgtttcctgagcaactactatgcaccaagctgcctgctctcttccactgctctatcagggagacacagggcttgtgggcccctttgacagacagaaaaactgaggcccggagagcgacagggacaccccaggcatccccactggtgactcaacacggtcgggtcctcactcccttctcaggagggacctatacaccacactggatgccccagcccagcccagcccctccagctaagtctgggccaggcctgcggctgcgggtggctggaggccacccttgccacagtccccggctcccccaaacagccacctcctccctgggatctcctggctcctgcccaggtctgggcctcacctgatttccgagatgtcatcttcataggtgtcccacaagcccgggatctggggctcggcgggcccgtccatggcaggtgggtgagggtggggaggggaggacgagcagggagcaggcggcacagaggccaggtgtgcgcagcgacagcgtctgccacctggggagcccgccaggtgcctactccgtgcccggcccaaggggaggggcagcacccagccggttctcccagctgctacccacgcctccaacagcggggagaggccagagggagccaccctgctctgagggcggggaggagcagtgatgggcacgtcctggcgtctggtgctcagctgggggcagagtccagggggtcagtgccaagcccacgccagaaccttccgggctggcagttctgggcctgtgggcacccacctggagcccacgttgctcatttgggaaatggcgctgatctcgcccatctcagcgagttcattcattcattcattcattcactcattcattcctttattcatttgagaaatatttactgagcatctcctgtctgccaggcgctgttccaagcactaggccaccgctggggaaggggcagacagaaacttgccctcacgggctgacgcgtaaggggcaccctggaaacagacacagggacagaggcacagccaggaccacggcagcacagacagggcgggagccagggagaaagggagagggcagagggcatgggagacagagaccaggaggggactgagatgcacaggggccagagaccttgagagacgcaacagagatacacggagggcggagacagagacacacggacacccagaggagacagagacacacaggggtcagagaccctgagagacccagcagcgatatacagagggcagagacagagatacatagaaaggtcagggacagggagagacacagatatgagagacaactgccagatatggttgggcgtgagagtctgaaggtcacagccctggttcaaatcccagctccagtgcctcccagctgtggggccgggaaccatcttgctcataggctcatcttgccttagtttccccatctgtgaatggcacccatcgggctgttgtgaggactgagggagacactctcagctgctggtggaggatctggtacacagtgagctcagcatagacggtgttctcttctcttctgcccccaccccaaaccctggccctccccagctgttggtccctgacccctcagagtcctggagtcatgaagccagtctccccaccagtggtggcaggtgcctgtaatcccagctacttgggaggctgagacacgagaatcgcttgaacctgggaggtggaggttggagtgagctgagatcacatcactgcactgcagcctgggcgacagagagagactccatctcaaaaaaaaaaaaaaaatgccaaaagaaagcctgtgcaatggctcacgcctgtaattccagcactttgggaggccgaggcgggtgaatcgcctgaggtcaggagttcaagaccagcctggccaacatagtgaaaccccatctctactaaaaatacaaaaaattagctgggcatggtggcaggtgcctgtaatcccagctattcgggaggctgaggcaggagaatcacttgaaccctggaggcagaggttgcagcgagccaagattgtactgttgcactccagcctgggcaacaagagtgaaactccatctcaaaaagaaaaaaaaaaaaagccaaaacaaataaaattgtatatactgaccaattattgttgcataggtgagggggatggaagacgtcagactcacctaacagatgcaggaagggggcccagagaggtaatgtggcttcccccagggcacacagcactgcccgccttcactctgatggtaagcagaaaaggagggttctggggtatcccatctctcaattcaccaccccaagacccgtctccaggaggctgagctgtgggagcacccgcccctgcccccagccactaccgagtccacatcctcaacattctgccttgatactttcagtgttaagccttgatgttcctgctgataaaaaggctctcttgcagggtgggtggaagggtgagagggccaggcatccccctctgaggctgagtgaacccctct

SEQ ID NO: 1561130 - DNA, 4001 bp, Homo sapiens
ctcgggaggctgaggttgcagtgggctgagatcatgccactgcactccaacctgtgcaacctagtgagatgctgtctcaaaaaaaaaaaaaaaaaagataatggcaaataaaagaacatttgaaatcagaaatgccccaggaaatgttggttttttggttcctggaacagaggtacaacagacccaaagccagagtgatcctttcaaaacattagatcacatcttccacttgctcaaactttttcgtggtttcattttactcagttaagaccaaattccttaccacagccttcaagatcctatatgacttggctctcataaattctttgttgcactcactctgatccaaccaaagtggaccccctttttttagggggtggtggggagacaaagtctcactctgtcacccaggctgcagtgcagtggcaccatcacagctcactagaccttcaccttctggctcaagcaatcttcccacctcagcctcccaagtagctgggactacagaagcgtgccaccaagctcagctaatatttttataagacggagtcttgctcgtcgcccaggctgcagtgcagtggcgcgatctcagctcaccacagtctccacctccctggttcaagcgattctcagcttcagcctcccgagtagctgggattacaggtgggcgccaccatgccaagctaatttttttgtatttttagtagaaatggtgtttcaccatgttgaccaggctggtcttgaactcctgacctcaggtgatccactgtcttggcctcccacagtgctgagattacaggtgtgagccaccaagcccggcctcagccaatggtttttatatttttgtagagacagggtcccgttgtgttaccgagattgctctcaaacttctgggctcaagtgatcctcccagcttggcctctcaaatcctcgttaatccctgaacacggcggacacactcccatctctgcacctgctggtccccctcactggaacactacacttccagctaaccacgactcactccctcacctccaacaagtttttgctcaaatgtcacccctcagactcatgctgatgaccctatttcaagagcaaccaggactctccattccccttttctgttcttttctccagagtaccttccagcttactatatagtttattccttggctatatttatttacattcccgaaggcagacatttttaaaatctttttgtttactggtgtaccctaagagcaaagaattgcgcctggtacatagtaggcactacaaatatagttatggaatgactagacataactaaaaaaaaaaactaatgctaagtgcttactatatgcacacagagtaaactttcaaaacatcacctgttatctcactggacctgacccatttctggcctccagaacctgtccctttgcttgacttcgacttgcctaattctctatctcttgagacaatctgggagttcccagaagccagagcccgctgtgaacccctcgagcctcccacaggggcctttctgcccggagtcctgtccccagacgcaatgtctcccccagcgccccagccacagacctcggcctcctcgccgtcactgctgcgctcgctgtcctcctcctcggaaaagttgctgtcctcgctgtccgacatcttccgctgctgctgggaaagacagcagccttggcgcgtcccacaatcctgcgctccaccccgagcctcagtttccccgctggttccctgggagaagaaaaccccttagggcgcttccggcaggctcgttttggcaatcgcgaagcggagtgaggaccccctcctacgccacatgctagacctccccagtttccgaatctgttctctacacctccccggcgcccggaactgccacctctgcacacgcacttacctctcgggctccacctccgccttcggtaccagctgctgttcgcacgacgcctgactggggctgacgggtcctctcgcgagaacctacccgttgacctcgcctaacacgagatttccggggctggcacgggcgacgcacttccaggtcgccatcttgagagaggcagggctggcctgggcggagtgcggggccgacatctgcggagggttaggaggggaaaggttttttctacccgccggctcggcgaccaggctgaaactcatgtttgaatttagtgagccgtttgttcgttagtccggaacactagcgcggtaggccaagctgcgaggaggcggcgaaatcagcgaatagcaaattataaaagaaacaaggctttatctcctaggccctctaaagcatccccaggagatccgtatccccgttttggagagaacgctgaagctcagaaaaactcagtggaaagcggcagacccaagcctcctcgccaagtctgagtgaccgtgaagccctggtttttccttctttttctttctttttgtactttttttttttttttggtagagtcgggctgttgcccggcctggtctcaaactcctctaactcaaactaaaaagccatcctccggcctcgtcctgccaaagtgctgagatcacaggcataacctgccgcgcccggcccaagtccctatttttctttccaggcttcctaagttcatttaaaggcgaatttatctattagtaatgacggctgacgagtgatggcagagtggacaggtgtaatggagagatgaaaaatgaaccttcgcctgtaatcccagcgctttgggaggctgaggcgggaggatcacctgaggccaggtatttgagactagcatgggcaacaaattgagaccccatgtatccaatttttgtgttttttttaatgtggtgtggtggcgtgtgcctgtggtccctgctactccaaaggctaaggtgggaggatcacttgaacccatgttgaggcttcagtgagctatgattgcaccactgcactccagactgggtaatagagaccctgtctctaaaaaaaaaaaaaaaaaaaaattaaaacttaaatttttaaaaattgaaaaattaacctgataggggaaattttaaaaatcagaagtctatgtcagtcgcggtggctcatgcctgtaatcccaacacattgggaggccggggcgggcagattgcctgaggtcaggagttcgaaaccagtctggccaacatggtgaaaccccgtctctactaaaaatacaaaaaaattagccgggcgtggtggcatgtgcctgtgattctagctactcgggaggctgaggcaggagaatggcgtgaacccaggaggcggagcttgcagtgagccgagatcgcgccactgcactccagcctgggcgagagtgagactcagtctcaaaaaaaaaaaaaaaaaaaagaagcctcaggacacattggtaaaatttctcacataagtatgacacacctgggccgggcgcggtggctcacgtctgtaatcccagcactttgggaggccgaggcgggtggatcacgaggtcaggagaccgagaccatcctggctaacacggtgaaaccccatctctactaaaaatacaaaaaaaaattagctgggcgtggtggcgggcgcctgtagtcccagctacacgtaaggctgaggcaggagaatggcgtgaacccgggaggccgagcttgcagtgagccgagatcgtgctactgcactccagcctgggcaacagagctagactccatctcaaaaaaagaaaggattctccaccgggcgcggtggctcacgcctgtaatcccagcactttgggaggccaaggcaggcggatcacctgaggtcaggagttcaagaccagcctggccaacatggtaaaaccctgtctctactaaaaaatacaaaaattagccaggtggcgtagtggcgcacacccgtaatcccagctactcgggaggctgtggcaggagaatctcttgaacttgagaggtggaggttgctgtgacaaaagagcaagactccgtctcaaaaaaaaaaacaacaagaaaataggattcta

SEQ ID NO: 1561131 - DNA, 4001 bp, Homo sapiens
tcaggagttcaagaccagcctggccaacacagtgaaaccccgtctctactaaaaatacagaaattagcctgatgtggtggtgcatgcctgtaatcccagctactcgggaggctgaggttgcagtgggctgagatcatgccactgcactccaacctgtgcaacctagtgagatgctgtctcaaaaaaaaaaaaaaaaaagataatggcaaataaaagaacatttgaaatcagaaatgccccaggaaatgttggttttttggttcctggaacagaggtacaacagacccaaagccagagtgatcctttcaaaacattagatcacatcttccacttgctcaaactttttcgtggtttcattttactcagttaagaccaaattccttaccacagccttcaagatcctatatgacttggctctcataaattctttgttgcactcactctgatccaaccaaagtggaccccctttttttagggggtggtggggagacaaagtctcactctgtcacccaggctgcagtgcagtggcaccatcacagctcactagaccttcaccttctggctcaagcaatcttcccacctcagcctcccaagtagctgggactacagaagcgtgccaccaagctcagctaatatttttataagacggagtcttgctcgtcgcccaggctgcagtgcagtggcgcgatctcagctcaccacagtctccacctccctggttcaagcgattctcagcttcagcctcccgagtagctgggattacaggtgggcgccaccatgccaagctaatttttttgtatttttagtagaaatggtgtttcaccatgttgaccaggctggtcttgaactcctgacctcaggtgatccactgtcttggcctcccacagtgctgagattacaggtgtgagccaccaagcccggcctcagccaatggtttttatatttttgtagagacagggtcccgttgtgttaccgagattgctctcaaacttctgggctcaagtgatcctcccagcttggcctctcaaatcctcgttaatccctgaacacggcggacacactcccatctctgcacctgctggtccccctcactggaacactacacttccagctaaccacgactcactccctcacctccaacaagtttttgctcaaatgtcacccctcagactcatgctgatgaccctatttcaagagcaaccaggactctccattccccttttctgttcttttctccagagtaccttccagcttactatatagtttattccttggctatatttatttacattcccgaaggcagacatttttaaaatctttttgtttactggtgtaccctaagagcaaagaattgcgcctggtacatagtaggcactacaaatatagttatggaatgactagacataactaaaaaaaaaaactaatgctaagtgcttactatatgcacacagagtaaactttcaaaacatcacctgttatctcactggacctgacccatttctggcctccagaacctgtccctttgcttgacttcgacttgcctaattctctatctcttgagacaatctgggagttcccagaagccagagcccgctgtgaacccctcgagcctcccacaggggcctttctgcccggagtcctgtccccagacgcaatgtctcccccagcgccccagccacagacctcggcctcctcgccgtcactgctgcgctcgctgtcctcctcctcggaaaagttgctgtcctcgctgtccgacatcttccgctgctgctgggaaagacagcagccttggcgcgtcccacaatcctgcgctccaccccgagcctcagtttccccgctggttccctgggagaagaaaaccccttagggcgcttccggcaggctcgttttggcaatcgcgaagcggagtgaggaccccctcctacgccacatgctagacctccccagtttccgaatctgttctctacacctccccggcgcccggaactgccacctctgcacacgcacttacctctcgggctccacctccgccttcggtaccagctgctgttcgcacgacgcctgactggggctgacgggtcctctcgcgagaacctacccgttgacctcgcctaacacgagatttccggggctggcacgggcgacgcacttccaggtcgccatcttgagagaggcagggctggcctgggcggagtgcggggccgacatctgcggagggttaggaggggaaaggttttttctacccgccggctcggcgaccaggctgaaactcatgtttgaatttagtgagccgtttgttcgttagtccggaacactagcgcggtaggccaagctgcgaggaggcggcgaaatcagcgaatagcaaattataaaagaaacaaggctttatctcctaggccctctaaagcatccccaggagatccgtatccccgttttggagagaacgctgaagctcagaaaaactcagtggaaagcggcagacccaagcctcctcgccaagtctgagtgaccgtgaagccctggtttttccttctttttctttctttttgtactttttttttttttttggtagagtcgggctgttgcccggcctggtctcaaactcctctaactcaaactaaaaagccatcctccggcctcgtcctgccaaagtgctgagatcacaggcataacctgccgcgcccggcccaagtccctatttttctttccaggcttcctaagttcatttaaaggcgaatttatctattagtaatgacggctgacgagtgatggcagagtggacaggtgtaatggagagatgaaaaatgaaccttcgcctgtaatcccagcgctttgggaggctgaggcgggaggatcacctgaggccaggtatttgagactagcatgggcaacaaattgagaccccatgtatccaatttttgtgttttttttaatgtggtgtggtggcgtgtgcctgtggtccctgctactccaaaggctaaggtgggaggatcacttgaacccatgttgaggcttcagtgagctatgattgcaccactgcactccagactgggtaatagagaccctgtctctaaaaaaaaaaaaaaaaaaaaattaaaacttaaatttttaaaaattgaaaaattaacctgataggggaaattttaaaaatcagaagtctatgtcagtcgcggtggctcatgcctgtaatcccaacacattgggaggccggggcgggcagattgcctgaggtcaggagttcgaaaccagtctggccaacatggtgaaaccccgtctctactaaaaatacaaaaaaattagccgggcgtggtggcatgtgcctgtgattctagctactcgggaggctgaggcaggagaatggcgtgaacccaggaggcggagcttgcagtgagccgagatcgcgccactgcactccagcctgggcgagagtgagactcagtctcaaaaaaaaaaaaaaaaaaaagaagcctcaggacacattggtaaaatttctcacataagtatgacacacctgggccgggcgcggtggctcacgtctgtaatcccagcactttgggaggccgaggcgggtggatcacgaggtcaggagaccgagaccatcctggctaacacggtgaaaccccatctctactaaaaatacaaaaaaaaattagctgggcgtggtggcgggcgcctgtagtcccagctacacgtaaggctgaggcaggagaatggcgtgaacccgggaggccgagcttgcagtgagccgagatcgtgctactgcactccagcctgggcaacagagctagactccatctcaaaaaaagaaaggattctccaccgggcgcggtggctcacgcctgtaatcccagcactttgggaggccaaggcaggcggatcacctgaggtcaggagttcaagaccagcctggccaacatggtaaaaccctgtctctactaaaaaatacaaaaattagccaggtggcgtagtggcgcacacccgtaatcccagctactcgggag

SEQ ID NO: 1561132 - DNA, 4001 bp, Homo sapiens
gactccactcccacgctactcagaagccatgggggacgctggtgagccccacgatctcatctgcaaaatggggagaaaagcagtgctgacttcaccaggccgctggcgaagatggaatgcaacaagtacttctgagagtagggaaagcccagagccatgtcagccatcgccttagctcttgctcttgctccgcagcgcagacacagatcccccctaaacacacaacccccacatgcacacccatgcacactcagactgacacacgcagatgcccctgcccatatgtacagagaccccctacacacacacatctctttgggcccagagaaggctgactgattggcagccgggatcaccctaaaggcttagcaccgtggggagccgcttcacctctagccctcaaggaggaaaagtcaaagcttcccgccagcccgaggtcccgccctccacccccacctcgacccagcctcggtctccgccccctgcctccccggcagccttcgggagtggtcaggaggctccgggtgaagccccaggcagcctggaggcgggtgacgggagggagggcaggggagggatcccagcacctgctccctctccaaggattccaggggaggggggctcagaggacaaaagcgggggtggggaggggagcaaaggaagactatggggaggcagcacaggtcaatatttacaaaaacatttttttaaagcggagccaggagagaacggagagatgaagaaaaccacccaaacccctaacccggacggagggccagcctcgtccccgcaccacggcgctcgaggctcatccgcgcccaggagaggaggagatggggcagggcaaggagcgggagctgcagagacggctgtggaggggtcggggacagactgcgaggctgcgggagagaaagagggggcgctgcaggaggacgccagggacagcggggaagctggagagggggctgggggcaaggagagaaacgcacagcggtgggcacggcagggggctgtgggagggagaaggctgcagccgggcctgggggcgctcagaggggtgtgaggaagggatgggggtgccagggaggacagagagcggggaatggcctagggactcagggaggagccagacgggagacctgggtcggggggcggtccagggatggcggagaagatcctgggtgtccagtgagtgaagggcctgagagggcggacaggggcccagggatccaaacgggcttggtggggtcctgggggatccaggaaagggagaccctagggaagggcctggggacccagggaggcgcctgggtaggcggtgagagcccagggcaagggacctggagggtcagaggccgacctcagggtccagggagtgccaggagagggacagaggggtcagggagaggttctagggcacagaaagacctagagggtccagaaggaggcctggagggtgagaggaggtcggggattggccctgggagtgcagggaggtcccgggggtgagagaagggtcagggagaggccctgagggtgcagggagagacctgggggtgcagggagaggcctggagggtgaggtcagggaaaggccctggggggtgcagggagaggcctggagagtgacaagaggtcagggagaggccctgaggatgcagggagggccgtggacgtaagaagggggtcagggcccgggtgaggaagcacaggaaggaggctgcagtgccgcggagcccgaggcccggcgaggggccgggagacgtgggcgcctggacacgaggaggggccgggcggggtggggggcagtcggggcagggggcgactggggagccaaggcggcgcggggctggggccgtgaaggggctcagagatcgggccccgcgccgcccctcacccgcttctcctcctcctcctcaggcgcccgcgccgccgccgccaacacctcccacagcctccttcggctctcgtcaaacactgtcgccgcacctcccatctgctctccgggccagccccgccaaggccactgaggctttctattggccacagccaccgccactcctccgttgctacgaagctcacggcgctcccattggccaagccccactctttccctccgcgcccggctctcgtcaatacacagataaaaccccgccacgcccccgccgccgtcaaacgccgcgaactgttgtcagtggttcacatcgctgtcctttagtcgctgccatggagacttgtcccgccttcgctcacactggggctcgaaatcgacgcactcattggccgaaagcgcagtctctccgggcgaaactcggtttgggtcgggttattcaggtccaagtggaaagagggcgggctctgccagctccagtagtcgtatatgattgcctggccttgggacagctcctctttccattgggtaaggcctccgtccatcaccatagagtcgcggcctccctcttctatttctccgaggaaagcttcggccacaggagggagaaagccagacccggcgggagggaggcggtgaatgcgcgcgcaccgccatccctctcccctcccgccccgcgaggcctgcggttaccaaggcgacgaaactttattgacagctctgcctggctacaaagggctcctcagtctctctccctccctccccgtttacaccgttgcgttttgggagtatccacacgcactctgtgggaccttcccgcgatatgaacggggtcggatggagggaggggaggctgagggaggagtggggacttttgagacaagccctgactcctggggcgctcccctggggcaccccctaattgggatcaccccccctacctcaatcctagaggcaaacgtaactaacaattcatcataattacgccgagaataataagctccacactcagaacaggcggtctttgtttgcttgtttgtttgtttcgccacagccattcttcccttaacgacactgataccatctgggcagtgcgtgctcaggcgatgtcgtcatcctgccagcatcctagagcaacatcactcacacctacgtggcagggctgctggcacctgggctgtaaggtggccggcggctcctgggccacacagctgtgcagcatgttactgtccggtaacacaatgtaggcgcttgtgtgtctacacatataggatcactgtcagacatgcgctccactgtacagctatagatcgtgggcacttaaaacaatgcatgccacagagtaggtgctgttttggtgtgctgtttttggtgttttggtgtgtgtgtgtgtgtgtgtgtgtgtgtgtgtgagagagagagagagagagagagagagagagagagagagagagagagagagacagagacagagtatcgctctctcgcccaggctagagtgcagtggagtgatctcggctcactgcagcctctgcttcccaggttcaaacgattctcctgcctcagcctcccaagtagctgggattacaggcatgcactaccacccctggctaatttttttttagacagagttccctcttgttgcccaggctggagtggaatggtgcgatgtcggctcactgcaacctccgccgcccaggttcaagcgattttcctgcttcagcctcccaaatagttgggattacaggcatgcactaccatgcccggctaatttttttttttttttttttttttagtagatacggggtttcaccatgttggtcaggctggtctcgaactcctgacctcaggtgatccacccacctcagcctcccaaagtgctgggattacaggcatgagccaccatgcctggcctgtattgtgttttgagacagggtcttcctctgttgcccaggctggagtgcagtggtgcaaggatggctcactgcagcctcgacctcctgggttcaagcgatcctacagcctcagcctcctgagtagctgggaccacagacgcatgccaccatgctcggctaatcctttaatttttgtagagacagggtctctctagg

SEQ ID NO: 1561133 - DNA, 4001 bp, Homo sapiens
aaacacacacacgtaccagggcatgtgtgcaagaatgttcgcagcagtaaataaggcaatctgatgaagaaatcagggtatagtcacccatggaattatatgcaatatggaaaaaggaatgaactaaaaaaatgtagatgaatcttagtaacaacgttgagtgcaaaaagaaggaagtctcaaacttttttttttttttttttttgagatggagtctcgctttgtcacccaggctggagtgtagtggcacaatctcggctcactgcaacctccgcttcctgggttcaagcaattctcctgcctaagcctcctgagtagctgagactacaggcacctgccaccacacccagctaattttttttgtacttttagttgatacagggtttcatcatgttgggcaggctggtctccaactcctgacctctggtgatctgaccgcctcagcctcccaaagtgctgggattacaggcgtgagccaccacgcctggcctgaagctctttttataaagtttaaagcaatgaaactataaacaacatattgattgggtaaaatatatacaagataatgctatacttttaaaagagaaaaagcactttacattgtttaggtctttggatctgcatatgtccctgaggtaagtattccagccatgggaaactgaagcacagagaggtagtcacccaccaaagctcagggctggcctccagagcttgaacccttgcctgagctggggtcaccagcctgggtgggccacggagcgatcatcatttctccatctgatcggaaagtcacccaccactctgttctggggcccagcccgcctggctccaggcaggctcggaggccgtgctctcctggacctggtgcatctggctgcagccagcactgggcaggaaaataccgctggagcagtgccaggtgcaggacgtccccactacctgcttcctcctgggtctggagggccaccatgagcccacaatcccggccaggcccaagccggtggctgaagtgggcagctgtgtctagaagtaaggcaatgaggtaggcggcttcctggggctctgggtcttccgctaggtactcttctaggccgtcgagcagcagaagggagggggctggccccggggcctcatgggcagagcacaggagccggaaaagctctcgggttgagggtgggtactggaagcggatcttctagaaggagaaacagaaggaaagggccggattcagcacaggaagccagactccttaaaagtaaccctgcctccttgcatactttccttggttccaggatgaaccagttcagagctgttaaatattcttatattcgcccgtttttccagcactcatcactgccgagtattagttgagggcaagccatttttgcttgtttgtttttggccaaatctctagcgcaatttttccacggaaaaccctcccccagcattctcggtctgaccccatccttgacactaacaggaaccaactcaggtccagaatggacccaagcttagccccgccccttgatgggccggacttcaatctctgggcaccgcctcttgctaacaccgcccatcattggatgggctctcacttcaatcttaactaagctccgcgtggtgccactcctcactccgcctgcctgactccgccccatcgtggctgccctggctcgctcttccaccgtcctctccattggcttgtctacctgttactcaatatcccggatctactccaccattggctagaacgcctctgctcccacccccacggttacctggagtcgcattgggtctagagtcgttccggtcccgcggggcatgctttgaagaggccttcgtgtcaggaagaggactgggccttggccctcccccgccgcctctagggccgcagcaaatagcagcgctgtttttccagatcctggtgtaccgagcagcagcaaaggcggtccggcggcaggcatgttctcctccccggaccaggccgcaccgcccctggttagcacccgcctcagcgtctccgccattcgccgcgtagctctgaccaatcggtggctcgttcccagccttagtcccgcccaagccgtggccgcatcggtacagttcacttagtttctctattggtctaggaatctgtccatcaaaactcgattcctcaggtgaatgggcaaatggttagaacctatgcggaggaatgggtgcattcgagggaaataagacccttccctgagggaggctgctgggggaaccagcacgaatactattattgtcagctaatcagacaaatataagggttgaaagttggaggagtagaccagaatgagtgacatattatttaaaggctcctagcctcagtttgccctgctgtaaaatggggcttatgatatctcagaggagtattgtgatcggcatgtatttgtgtgtggttttgctgatgtcatccaatgacaactgagagttttggagagggggatgagctgtgtgcttgtctttctgtgcacctgagtatgggccggagtgtgtgtctggggacacaggctcgtggacaaaacatcaacggccatccccgaaagtctgtgagatgaagcctctcaacttacttcctcactggctaaggggttctgtggggccgcctttgtggtacggggggaaggcaggaccgcaggacaaagaaggaagcaggagagataaagagacaggagctggaagactgaaggagagatacagcagggacattgtcttgttcacttctgttctccagtaccgagaatagcacctagcacatttgtaggttctcaaatacgtgctcgttaagacaatgaaggaagggaggtgggattgatgagaaacagggagaaagggaggaacaaagtgaatgatcgtgatccctggctggatcttctcacccagacttcgccccagagctgccactcacgcctgtgttgccctggcaaccttgtctcctggtaactccaaagtggtgccgttgcctggagacccaggggcagggagaaagtgagatttcctgggctttctctctccctctgggaccagaaaacagctccacgacatcccccaacacacccactcacacagctgggctcactcacacccctctacacacacacacacacacacacacacaccatggcatctctgaatatattctactttcagaatccccatcatccacatgctccaaccttgccctatcctgacacaaagcatcccatacaaactctgtcccacattcatcccccacaccctttctcttgcaaaacacgcaactatgacattgccactacacacacagacacacacagtgaagcacaccgatacactgcgctgtcaaacacgccacctcagcccccatcccccagcagatatacaacgcatgattcacctcacatttcaacactccaaatgcacatacaggccaggtgtggtggcttatgtctgtagtcccagtgctttgggaggccaaggcaagaggattgcctgaggccaagagttcaagaccagcctgggcaatgtagggagacccccatctctacaaaatacttcaaaattagccaggtgttggccgggcgcggtggctcacgcctgtaatcccagcactttgggaggccgaggtgggcagatcacaaggtcaggagatcaagaccatcctggctaacacggtgaaacccagcctctactaaaaatagaaaaaaaaattagccaggcatggtggcaggcgcctgtagtctcagctgcttgggaggctgaggcagaagaatggcgtgaacccgggagatggagcttgcagtgagccgagatcgcgccactgcactccagcctgggcgacagagcgagactctgtctcaaaaaaaaaaaaaaaaatttagccaggtgtggtggcgtgcacctgtagtcccagctccttgggagtctgaggcaggaggattgcttgagcccaaggaagtcaaagctgcagtgagcagtgattgtgccactgcact

SEQ ID NO: 1561134 - DNA, 4001 bp, Homo sapiens
ctcaaactcctgacctcatgatctgcctgccttggcctcccaaagtgctgggattacaggcgtaagccaccgtgcccggcctactaaatttttcttttttcttttttttgagacggagtctcactctgtcaccaggctggcatgcagtggcatgatctcggctcactacaacctctgcctctggggttcaagcgattctcctgccttagcctcccgagtagctgggactacaggcgtgcaccacaacacccagctaacttctgtatttttagtagagacggggtttcatcatgttagccaggatggtctccatctcttgaccttttgatccacccccctcggcctcccaaagtgctaggattacaggcataagccaccattcctggctttttttttttttttttgagacagcgtttcggtctttttgcccaggctggagtgcaatggcgccatctcagctcactgcaacctccacctcctgggttcaagcgattctcctgcctcagcctcctgagtagctgggattacaggcatgtgccactatgcccagctaattttgtatttttagtagagacggggtttctccatgtttgtcaggctggtctcaaactcccgaccttaggtgatccacccgccttggcctcccaaagtgttgggattacaggtgtgaaccactgcacctggccaatattttttaataaattggcccgacattctggcccgcctctagtcccagccatttcggaggctgaggtgggaggatcacttgagtctgggaggtggaggttgcagtgagccgtgatcatgccactgcgtggtgacaaagcaagacgctgtgttaggagggaaaaaaaaagcagcagacactggcatagccttgtggaagaaaagggtgaatgagagggacccaggggcctgtgtagacccatagggctgggatcttcctcacctagctggccctccaccagcttcctcctcgcagttctcttcccaccgcggatgctccttgctctcccccaagggctgcggttcctggtctttgcatttcacatggggcacgtccacctgcaagcacagtcaggacggaggccaaggagggaggatgaggagtgaacagatcgccctcctgccgacccttcaaccctggtcacctcgatgtgctgctgcgggacggtggggacccgcaggaaagacgggcagggctggggcaggtgccatgagggcaggggcatggggtgaaaggacactctgtccctaggggacaccaggacaccagacctagaggggccgggtgagggcagggctgtgggaatgtaactggaggacctgggctcctaactggtatgtgtgttggctggagtccttcgagaaaggagaagaggtaggagaaaagagatgaggccgggcgcggtggctcacgcctgtaatcccagcactttgggaggcggaggcgggcggatcacgaggtcaggagtgcgagaacagcctgagcaatatggtgaaaccccgtctctactaaaaatacaaaaattagctgacgtggtggtgcgtgcctgtaatcccagctactcgggaggctgaggaaggagaatcacttgaacccgggaggcagaggttgcagtgagccgagatcacgccactgcactccagactgggcgacagagtgatacttcgtctcaaaaaaaaaaaaaaaaagaaatgaaagaaacgggtgcggtgcgtgggtgtttgtgcctttctctactccgttccggccacgcgccatgtgtggaaatcagacccgtcagtgcgtcagtcagggccgggttcagtcagtcaggaaatttgaggccaggcctgatgagagggagccccaatggcaaaggacaagcggccgggctcgggtccgctggagatggctgggatcgcagccgttccctgcctatctgtccgcccgccccacgcgcgagaaggaaacaagcgccgcgtactccctgtcgctccattccgtattttcccgccttcaagctcgcaccctctgcgcatgcgccgaccccgcccctggccagctgcgctcccgcggacgagtgtgttgtgacgcgtgctcccggccccgccctctttgagaacttgcgcggccaactgggcggggccgaccgttaagcagcagtttcgcggtccgcgggctgcgcgcgcagtcggcgccccttgggagcaggacggcgcgctctgggtgcgcttgtgtgcccctgtgaggctcctgggttccacggggcgcccaggttatacggatctcagagtcctgtatttattcggtgcttctaacttcatccactctgccttggaaaatatactccataacaatttttttttttttttgagacaagatcttggtctgtcgcccaggctggagtgcagtggtgcgatcacagctcactgtagcctcgacctcccaggttcaagcgatcctcctgcctcggcctcctgagtagcagtgtcattcaccaggcccttctaatttaaaaatatttttctggccgggcgcggtggctcacgcctgtaatcccagcactttgggaggccgaggcgggtggatcacctgaggtcatgagttcgagaccagcctagccaacatggtgaaactgtctctactaaaaatacaaaaaatagccgggcgtggtggcgggcgcctatagtcccagctactcgggaggctggggcaggagaattgcttaaacccaggacgcagaggttgcagtgagctgagatcatgccactgcactccagccggggtgacagagtaaagctccgtctcaaaaaaaaaaaaaagattgtatgtatatatacacacacacacacacacacacacacacataattatatttttttttcctgtagaaatgagatctcactgtgctgagcccaggctgatccccaactcctgggctcaagccgtcctcccgtcttggtctcccaaagtgctgtctcaaaaaaagaagaaattatctgatctaccctattgactgtaggtcataagacccccgtttcaaagaagtttctgccccacacaaggcctatctatctagattcttcttggcctctctgagcatgcattcctgagactccaagaagaatctagacagataggccttgctgggtttccccactcagcctattagtattagacgacccccccggctttttttttttttttttttttttgtcttgctctgttgtccaggcaacactggagtgcagtggcaagatctcaactcgctgcaaccttggcctcccaggttcaagcgattctcagccaaccaagtagctgggattacagatgcaccatgcccagctaatttttgtatttttagtagagatggggtttttccatgttgctcaggctggtctcaaactcctggcctcaagtgatccacccgcctcagcctcccaaagtgtcaggattacaagtatgaaccacgacaaaccctttttgtccaatcaaatttctacctgggtgttcaaactttgctgaacctaagcataagacacttttcattaatcaggcatggtggcgggcacctgtaatcccagctgcttgggaagctgaggctgctgtgagccaagatcgcccctacactccagcccagggaacagagccagactccgtctcaaaacaaaacaaaacaaaaacacagtttcccctgtatctctggatcttcattctgaaggcttgtcaggtaacactatgatcaaatacattcgtattccttttctcttattaatctgccttttctcagtaatttttagtgaaacttcagagggcaataaggaagctttctcttcacccctacacagccaaagttcagatttgatggaaatggcaagattccagggtacttgtgtttatttagacacataaatatgtatttaacgacagggtctcactctgttgcccaggctggagtgcagtggtgtaatcacggctcattgcagcctcgacctcccaggctcaagtgatcaac

SEQ ID NO: 1561135 - DNA, 4001 bp, Homo sapiens
tagctgggactacaggcgcccaccaccacgcctggctaatttttttgtatttttagtagatacggggtttcactgtgttacccaggatggtctcaatctcctgacctcgtgatccgcctgcctcggcctcccaaagtgctgggattacaggcgtgagccaccgcaccccgccctaatgtttgtatttttagtagagacggggtttcaccatgtttgccaggctggccttgaactcctgacctcaggtgatccgcccacctcagcctcccaaagtgctaggattacaggcctgagccaccacaccagggctaaggaagggctattactgaaaaggatggggcatgtttcatatttaacaatcagcccaaggttcccctgcagttcactcacatgtccttctgtgggcgtgtgtcttcgtgcacacctaaaaccatgtccgagtcgatggcgtgtccttatccatggcattgtcctgggtatgggctgacccaggcccaaccaccctgctgtctcctccatcccacccggtccttgcatcccagggacaagcagatgacagacggggacaactgcacaaaggctgtattgcaggggaggtgggagggggcaggcagaacgctcctcctcctgggtcttggggccccggagcagagcccagggatgggctgagtgaggggcttggcactctgtggaagctgcagatgagagaccagcaatgcatcagctgcacctgaaatgtaatcaagaattccttccaggggctctcagagacccagagtctggtgagttctagaagcctgagactgggtgggggctggggagtctgggtctgaggctccaagttcaggaaccagggatcctagcctgggagtttggagctgggggctccttggagctcttgggggacaggagtggctggggagggtttgggagggtgtcaccgctggatctaggtcccaggtctgtgagtgcaaggtggcctcagggacctccagggttgggtcttgggggtgggctgtgggactgattttagggctgaggctggtctggagggtctaggggagtggagagcatgaaggctacactgggtgttcctataatcgagtctggagtcttgaggtctgggttagttttggagtctgggagctttgagatgtgatgatctggggagtgggggctggctttggttctggggactccagggtgagggggtctaggagctctcagtccccagaattagccagccctctctgggaagtacagctgtgggcgggtgggtaggcggaagattccagaaggtggagggttggctctgaatctcagagctggggcggaaatctccgtcccaggggcctgggctgcaggtggagtggggaccgggtgctgggggtgaggagaaggaggacctggtttgggtgaggactctgagatgggggcctccaggactggttctagggaggcctggtgctccctgttacagtcgggagctcaggggtgtggagcagcctcggggcttgggtggtgggtgtgggggcttatgcggagctggggcctgggcctggggtgggctcggagctttgggcggccgggcacctgcagtagagcgcggagatagcgttggaccagtctcctaagatgccccggcggtactcctccaggcgcgggtaggtgccggcagagaacttgtgcgtcttgcccgccttgccttgccgggaccacacggtgagctcgcagcgcggggccaccacaagtgaggaggcggtgttggcccagttggagggcaggtagggcaggtctgcgcccgactccagcgacagctcggcgcccccgcagcagttctcatagtaggggtcgctcttgtcatagagcttggcgcaagtgcgcgtcccgtccgagtgcttgaggtcggcggaggcggggcaggcgccctgggcgcaaggcacggaggcaagggccagggccagcagcagcgggcgcagcggggacatggtggcagtgccctgccgcagccccgcgcgcttttatgcgcccgacccgtgggaagggacaagctgcgagataaggactcatcgagggaaggggagggcgcccctccctcaggagccgggagacctgcctaacctaggtcggaagcccacaaccctgagtacaaggtggacgctgtgtatacaacttagcaccttaagatgttaggtgaccaacaacattataaagagagacaatagacagaacttgaggaggagtcatttgcaacacagagggtggcataggttaatagacagaaatgggaagagctcttaaaaattgacaaggggcttgctggttgctcacgcctgtaatcccagcactttgggaggcctagacgggtggatcgcttgggcccaggagtttgagaccagtctgggcaacatagcaagatcccatccctactgaaaaataaaattagctcagcgtggtggcatggcctgtagtcccatctactcacaaagcagaggcggaaggatcgcttgagcccgggagttcgaggctgcagtgagccgagatcgtttcactgcactccagcctgggcaacaaagacaggaaaaaaaagataaggaatggaacaacccttattctaaataaggaaagactgggagggggaggcaggagtgggaggctggggcctcctggctgggcaggctccctccctgggaggcaggaccttgggaaaggagaagctggagataaggatagaggccctcgtggtggggcgggggggggcaggtagagaaggagatggggaggagcccaacgccccaccccccacccccaccaggctcagactgggcaatcttcccaaccaaggctggcaatccagaatctgtgaagtacaagatagcagtatttgcataacacgttaaaaaccttttgcaagacagtgtacaaaggcttgaggagatatttgcaacatttcaaaagcatagcattgcaagctataatatataaagagtgcacacaggttgggcgcggtgactcacgcctgtaatcacaatactttgggagactgaggcaggtggatcatttgaggccaggagttcgagaccagcctggccaacatgatgaaaccccgtctctacttaaagtacaaaaattagccaggcgtggtggcacatgcctgtagtcccagctactcgggaggctgagggatgagaatcacttgaacccagaaggtggaagttgcagtgagccgagatcgcgtcaaaaaaaaagagtgcatacaaattgacaagaaatgcactcctccctcccacatgctaaggacaggcctaggagagggagagggagggaacagcctgcaactcccaccccaggagccaggagactttcttaactaaggttggaaatcttcaatctataaaacttcaatcttgttttatagattttgagctgtataaaactgtaaaaactgtcatatagcaaaaacaaaacaaaacccacaaacccatccagggaaaaatagactcaattcctatcatataaaatgagctcttaccaatcagccaatagaaatgaaacaagggccgggagcagtggctcacgcctgtagtcccagcactttggaaggcccaggtgagtggatcacttgaggtcaggagttcgagacccgcctggccaacatagtgaaaccctgtctctactaaaaatacaaaagttagctgggcacggtgacacacagagcctcgggaagctgaggcaggagaattgcttgaaccgaggaggcagaggttgcagtgagccgagatcacaccattgcactccagtctgggtgacagagtgattctgtcaaaaaaaaaaaaaaaaaaaaagagagaaagagaaaagaaacaagcaaaggaaaaattagagcagtataggaaggagagggagattggaaccctcgggctgaacagggacccggacctctgggagcctggccaaagcccttccaaggttctttggagttcccagcctcttcccaaaac

SEQ ID NO: 1561136 - DNA, 4001 bp, Homo sapiens
caggctgtggccccgggggctcaggtgctggaggtctggggtcttcctcagggatggggttgtaccagatctcgccggcgggctccccagtgccaggtaccccaggccctaaagaggtgtcctcagctggcttggccccacccagcacccatcggcggctactgggctccaggctttgcaggtaggctccccgtgcagggctccttgatgcctcggggctggagggcccctctgctccggcctgggacccttcgggagcctggggctctggctctggagggctgggctctgggcgctgggctgggtggcctggcagagagcaaggggagtgagacccacccagcccctcactgcctgcagagcagccctgtgcaattgatcagtgggtgggatgctgtgtacggccctggccggcccctgataagtcatggttccttggatcctgctgttttgtttggaataggcagccacaggctagcgatctcagttatcagcttagagcaccccctactcagtccctggcatcccaaaaggggactccatccctgcagcctcagggttctaagtcaggcttcctggggcccgtaggtactgcgttccagtctccacttcctctaccctctcaataaccgtggcatggagctttgcacctgcgtggccttgggcaagtcgcttccctctctgaggctcagtatcctcctgtgaaatggggggatgtgatttccatgtccagggaggcttccaggagccttttggaaaagtatacagcccacagcaggcactacgtgctcaggagtgaggagctgggttttctattccctgcagcacagtcactcccagtcccctgccccttttaccctccctcctgtcttccaaactctgtcgccatcctgggatgggcccttgtccctcagcccaggccagaccccccacgctcaatgctttgggacttccccttccctccctcctctcctgtctcatgtcctgggctgtttcctgtgtgtgtttgtgtttgggcatctctgtcccttctcccttccctgggaacattgggaatctttgggaaggcctggggggaaggggtacgtccatggaatggtctggccttcctcctttaactccttccttcctgggtccccctatcccacgcagctgtttctctaaggtttttacttgctaccctgctgaactcctcctctggccacctctgatgtccaccctctagggtctctgtttgtagcatagtccaaagagctgtttaagtcgatggccctgggcacatgacccaattgctccgtgcctcagtttccccatctgtataaaagggacagtttcctggggctaaggcaggcgcagttgccgtcactgttagtaggtgggaggcggagggggcagctactctgattgacgggccgcccctctctttcctttgcaggagtacgcctcccatctcccatcctgcgcctccagggctcccgatgccccttgcccagcccgactgggccccagtgtcccggcctcccagcccctcctcccctccaccctccaggccctcagtcgcggccccatttcctgtcgtgggcgaggccccctcccgggcctcccaaggagcccgcagcgctggcatccccggccagcagcacataacggtccgcgcccccctccctcccagccccttccttccaggacccctaccctcccctggctggaggcaccccagtctgcagcggggtgcggggggctccccctgatcccccccaccgtctgtcctcggggccctgggaccccgctcccaggccgggtggggctcggcgccccctgttccccaccgatctccgcttaccgcgctccttggcgtccgactttttccggggaagtttctcccggccccgcaggcgggagaaggttttcctgagtagcggctcggccatgctgcggcccgggccgggccgagccgagtgcgcgccccgggctccggccgcgccgccccgcgccctccccgccccgcccgggcctccccgcccgccccccgccccgcgccagcaggaagcacattccgggaatgcttggcccaaactttttttttttttcccctttcccgcggcccgagcgggcgatgctgggagatgtagttgcctggggccgggaggggttggaatgggggctccgggtgcccggatccgctccagcttcgatgggacgtgacgatcgtggcgcaggcccgatcccttgtcttccacctcacccaccctccctggatgggactctgggtgatggcatccaggaagttctcttgggtctgtctccaaatcgcagcctccacgtatcctctctctccttgccaggtactgcttcaacctggtgcaagccgtagtgtcattcgtttcaatgaccgtccccactacccaccccaccccaagcttcttccttggtctccccatgccactctttccccactcaattctctcacctccaaattccaattactactgctgtttgacaaaccatccccaaacgtaatgatgtaaaacaaccatgtcgtgattgtgaaaggaaaataaatcttgagacctccaaatcactgagccaaaaggaagaagtcaaactggtaactgtgtaggacaaacctgcctcccattctattcctaagtaagatagctacaaggttaaaaaagctagctgggcgcggtggctcactcctgtaatcctagcactttgggaggctgaggcgacggatcacttgaggtcaggagttcgaaaccaggctggccaacatggtgaaactccatctctactaaaaatatgaaaaagaaaaaaaattggccaggcatggtgggtgggcactggtaatcccagctatttgggaggctgaggcaggaaaattgcttgaacacgggaggtggaggttgcagtgaatcaaaattgcaccactgcactctagcctggtcatcagagcaagatgccgtctaaaaaaaaagaagaaaagaaaagaaaaaaaaagctacatacctcccccacaatttgcctacaaggaaattccttatggatgaaggacaggcagaactcaaaattgtccctctgctcacatgagacaaacacatatctgatcgcttccttacctatttgtttcactaagccagactaaggcataagtgactatctctgtaaattgcatattcagaaaggctagtcagaaactcgaaagaatgcaattgtttctctcttatccacctataacctggaagccttctccctacttttgagttgtcctgccttcccagaccaaacccatgtgcatcttacatatattgattgctgtctcatgtctccctaaaatatataaaactagaccaaggtggagtgcagtggtaccaccacagctcactgcagtctcagcctcttgggctcaagtgatgctcctgcctcagcctcccgagcaagtgggactataggcatgtgtcaccatacctggctaatttccctactttttgtagagatagagtctcatcatgttgcccagactggtctcaaactcctgggctcggctgggtgcggtggctcacgcctctaatcccagcactgtgggaggccaaggcgggcggatcacctgaggttgggagttcgagaccagcctgaccaacatggggaaaccccttctctactaaaaacacaaaattagctgggggtggtggtgcatgcctataatcccagctactcgggaggctgaggcaggagaatctcttgaacccgggaggcggaggttgcagggagccaatattgtgtcactgcattccagcctgggcaacaagagtgaaactccgtctcaaaaaaacaaaacaaaaaaacaaaacaaaacaaaaaaccctcctggtctcaagtgatctgcccgccttggcctaccaagtagctaggattacagacctgaatcaaggtagtggccctgactaccctagtttatgttgtcaggagcttctaagtctgtgtcacaggcatgtccataa

SEQ ID NO: 1561137 - DNA, 4001 bp, Homo sapiens
ttctgctttttggtttatgctttcagttttgttttgttcttttttaaacacacatacacaaaattctcctgcaggagctagattttatgcaaaaaaaggaaaaaaaatgaaaataaaaaaacccatatatacatatttccctttcatttacaaaaagagcatacacagggccgggagcggtgactcacgcctgtaatcccagcacttcgggaggcggaggcaggtggatcacgaggtcaggagttcaagaccagcctgaccaacatggtgaaaccccatctctactaaaaatacaaaaattagccaggcgtggtggtgtgcctgtaatcccagctacctgggaggctgaggcaggcgaattgcttgaacctggaaggcagaggttgcagtgagccgagatcacgccactgcactccagcctgggtgacagagtgagactctgtctcaaaaaaaaaaaaaaggagcctacacaggccgagtttggtggctcaggcctgtaatccctgcactttggaaggctgaggtgggcagatcacttgaggtcaggagttcaagaccagcctggccaacacagagaaaccccgtctctactaaaaatataaaaattacctgggtgtggtggggcacgtttgtaatcccagctactcgagaggctggggtgggagaatcacttgaaccagggaggtggaggttgcagtgaactgggatcgtgccagcctgggcgacagagtgagaccctgtctcaaaaaaaaaaaaaaagaaaaagcatatacaataaacaccaacctccacttcacttgttttcccttaatatatgttggaggccactatatcagtgtatagagattttcatcatttccttttatctacctcattcctttttagagttgcatagtattttttatgtggatgtattatagtttctttcagccaatcttcttatttaagaacatttgggatgcgtgtagccttttgctatgatgaacagtatcactgtttccccttccctctcgatgtactcgttaagaagtggtaccctgccccactgctacctaggaatctgatgactaccctgtttccccaaactggctctaggagtatcttttattccttcaacgaacattagctgggcgtctccggcgtgattggcgctgtgctgagaacacagtggcgacagagacaaacctagtccctaccttcatggaacacacggtcatagacatcataaaacagcacacagataagagtcggataacaaattagaccacacgtgacatgaaggaacacggaccgacaaaagcatttaacaggcggatttctggatggagggcagggaaggagggcttcgcagaggaagtgacgttggtgccgagacccgaaggatgaaatgggagttagccaagccgaatgggtaaaaggatgttgcaggcagaagggacagcctgtgcaaaatccccgaagcgggaaagcgcatggcaagtttaaggaaccgaaaggccagggcggctgttagaggtgggggaaaaagcaaagaggccgagtcgaagcaagcgaggtctgcggggcggtggcgcccggggggccacgttggaactttgcctcgagggcactagggagccaaggaagggtcctgagcaagggaagaaacatgggtcgcgaaagccactgttcccctctccccacggcgatgccctccccgcccgagcccctgcttctttaggagcctcctcctttcgtctccgggcccaaacgccgcctcccgctcaccgcagctctggcctccgttcccctcgcgccccctcagcagtgcctcttcctacactccgccgccgccgccgccgccatcttccgttcgtcgccgggaacggtgcgcacgcgccacacacccagggccgccgggaaatggagtccagagcacagcccgaccccgcccatgcctcgtcccgtgcgagcggcattctgcccgcctccatactacggcgagcagacccttcatttccggctctgggtccggctaggccttctgggaaatgtagtcccttcggaggcaccgggcggaaagggagctagagcattctgggaaatggagttctcagtggtgctgagtccctggacggctggctggtcttggagagtgcggagttcgggcagcgaagctcctgggtcttggaggggaggtggtctgttgccctagtggggtctgcggagaggccccgatcccctccatctttgttcttgaccctttcaacagtctgaagcatttctttttcttttcttttctttctttctttttttttggaaacggagtcccgctctctctcccaggctggactgcagtggcgcgatctcggctcactgcaacctccgcttcctaggttcaaacgattctcctgcctcagcctcccgaatagctgggataacaggcacgcaccatcacgcctagctagttgttgtatttttaatagagatggggtttcaccctgttggccaggctggtctcaaactcctgacctcaagtgattcgtccgcccgcctcggcctcctgcagtgctggaattacaggcgtgagccaccgcgcccggccaagttaagcatttctagccgtcggaagcctcagtcttcctgtctgtccaatggggatgtgatttcggggaccttttacgggtccttgtagtcgcatagtggccctagcgttctgattcccctttcttccgccacggtcatgcagggctctggctcttcgtcctctcctgccgagatgatgaagccccctgaggtagaaaggctccagagttctgacctcggggcccttggtatctgcagcgtcgctgcgggcagctccctcactcctgaatcacccccagctgtcgcgtcctggggctgcggcccccggcgcctgaggtctgtctcctggcgatcccgcagggggcgccccagtccgagcgcgccgccctcggggaggcgggaggggagcccggggcgggcgagggcgggggtgtcccggctataaagcgtggccgcctcccgcggcgctcgggacagccgtaccccgggcggtcggacgggcgggcgccggtgggagctcgggccgtgcccgctgagagatccagagcgctccgttcccccggggccggagcgggggcgggtgggggcgtaagcccgggggatgctgggctcagtgaagatggaggcccatgacctggccgagtggagctactacccggaggcgggcgaggtgtgtcctcggggatggcggagcgggaagttgggggcaggtatcggggtgtgggctcacatggagcagggactggttgtgggttcaaatggaggcaaaggcgtctacttgggcagctgaggaactgggaacacggagaccaggtgtggaagtcggggaccggggacgaggcatggatgggagcgctgtttgggcagcctcgccgcggccagggcttaaaaatggaagtcaggaaaatttagccaagggtcgggtcacaccttaaacttgggagccgggtgttggagccccaaaaagcaagggatttatatgtacaaaccaaagataggaatcagagttccagggtaggggacagactagggggtttcaggatgtgaggttcaaagttggagggaaagaaagactaaaagatggaggaggagtcaccattaaggggaagactgaggtgggagctcagggccagcacacagtgttaaagaaccggggttcggggctaaggatcagctggtaatctaaggtagggtcagacatagggattggtgctcaggggtcagagatgggggtgctcagagatgaagcttcgtttttggagtctgaaataacaggtggcttagagttgggcatctgggagcagaagatgtagccatcagcattggcaggagaggggccgatctccacccccccatccctacccatgaccctccgcagggactccccaagtcggaagatggagagttttagattgtgcaccttcccctgctccccg

SEQ ID NO: 1561138 - DNA, 4001 bp, Homo sapiens
ggcctgcagctgccagagccgccggaagatggagtctcggtaagctcccagggcccgcaggatctgctccagggctgcccaggccctgggctcactccgctgtgccagcccctcaccaaacgctagcagcgcctccacacgctcagctgcccctcgtaggtccacctggagggcctggggacatatggacatcaccccacgcacacaccagggacccaaaacctggagttacccccctcccccatttcctatccaaaggcctggaacatgcactcaacccatttcccatcccggaaagctggcacccactgctggggccgtgcccacccccacatcctggcctctcctgcctacctgcagctgcaccatcccactctgggccaatgcccagtgccccaggccttgctccaggtcctgcagccggcggcccagccccagcaggcacaggtgcaggctgttctgctcagcctctagtacctccaggccagaaatggggtgctggggaacacaggagccaggtcagggccagtgggccaatcaagatatcacccctgctcccatccccacccctcttctgtaagcttctggaaacttctctgtggcacagtccatctccgggtctgtctgcaccaggatggctcccactgggggggccttcccagtggagccaggcctgaggacagatatctagttcaaggtctccaggttttcaaagctcctggaaacttggatgtgtgaggcctggggggtctggacagggagcggggctgggtaccccccaagaagaatggggctacaccaggagcaatgatgaaatgcttctcagccgggcgcagtggttcacatctgtaatcccagcactttgggaggccgaggcccgaggatcacttgagcccaggagttcaagaccagcctgggcaacatggtgagacatcatctctacttttttttttttaataaaaaagaaatatggctggacacggtgacgcacgcctgtaatcccagcacttcgggaggctgaggtgggtggatcacctgaggtcgggagttcgagactagcctggccaacaagtcgaaaacccatctctactaaaaatacaaaaaattagccaggtatggtggcatgtgcctgtaatcccagctactcgggtggctgaggcaggagaatcactgggacctgggaggcggaggttgcagtgagcagagatctcaccactgcattccagcctaggtgacagagagactccatctcaaaaaaaaaaagaaagaaagaaatacgtctccccagttggtcagatattgaaacacttttccagaaggtccctccccctacagacacccaacacctttccagaatcatcacccggtcctcagtatggaggccagactccaggggacagagaggaggtggggctggcacaaggggtctgggtcacctcagctcacctcacagtgtttgcccccagctgggtcctcgtaggaagagggtgttgaccatctcggggggtgagcggcaggctcattgccccttggcccaccctggaagtgctcaggagggcccaaggagtcctgtcccagggtctgggcctgctctgggctaggaggcagggggcggtgactgggtgagtctcgacacctcacttttcagcctaccgtcaccccaaccctggtggcctctcctatgtccccaggcgatcacagccatggcacctcctaccctcacatggcccctgccaccacgcctacccttttgggaacaagcttccaaagccccggcccccacctcgtgctctcctctccggacgcggggcagacggtgcatccaacaatgtccgcctctctaggtgctcccggtgggtggttgaggggctctgagccaagtctagggcccagaggcagggacagggccatggctgggggcctggggacacaaagtcaggtgagggcagccagtaagacctcttccctagacaagggtgtcccagagctcctccgctggagtcacccgggcctgaggctgcaggagaggcccaggacaggtctggctccgccccttccaagaggaacctggacccggccatttgatgcccagctcaggtgacagaagagtcacttaactccttcctccctagcaggccagtagctaaatctcccagcatcactccacgccatccaagagggttccagatagaacccctgcgccacctcctcaagagccctggattctgccccactgggaacccagaaatcggacctccagggcctaccccattcatttaagaccctagatgccgctcccctcaggaaaccaagcatctggcccctaaaaaataaaaatataaaaccaaggaaagatttttttgtttatttggtatggggtcttctgtagctcacacaaaattattgggaaaataaataacccaggggagccccctttgcccacggttcctaggtcgcggagtcacagcagccccaaaggggcaggaacctgggaatccgaggggtcccggccctggcggtcacttgcccagcaggaggccggcgcgcagcacgcggggcacgcggcggatggtcagcgagacccgggtgccgcgcaccaggcaggctcccggccgcgccgacgggcaggctgccgcattgggcggcgaggaggcggcgtccagcgcgtctacgcgggcggcggcgatgccgtggagaagacgcgtgtaggcggggccgcggagcaccagcaggctgcgcggttccagcagtagcgaggtggtgggccggggcggaggccgaggctgcagggcgggttgagggtcagcagggctcaagaagtcggggggtgggggtgggcgagaggtcggtagcctccggggatcagctagtccccaggggcaaaagctgaagagcaagtgtgctcacaatgatggaggctttggtggttcaggagtgaaaattgctggggcctgggctggggctgctggaaagggagggcgagggctctgccgtccctcgggagggggcaggatctaggtggcagatgggggcgtcaaagggtcagcggccggtgggagctgcagctgggatctcaaaggggctgaggctggggctgggacccaggaataggcagtccccaggaaatacaggcagagctgggctgagagagcatggctgaagccaggaccaggtgaggagagagtgaggcagaggttagaggcagtgggggttcccaaggacatcaggacattagaggacaaccgcacagctgagggagtgtcagagcatccaggagcatgcagggctcgagggcaagcctcaaggagtgggtcggcgtgttcaggggcgtttctgtgaacactggggtgctagaaatgcatcactcagagaaattgtgtcaaggggtcaaggagaatctgggggtgtcctgcaccccaaatcacattcctggagtagcaggacgtctggggcaccctgagcaggggcagatagagcatctgggaggaggtgaggccccccgagttaatggcggtggggtatctaaggatatcagtgtctgctggggagtcaggggtatccattcagcaggttggggcatcggggagcctgtgaaaatcatggcatgtgggacagacaccctgtaagcagatgggttgggtgtctgggaggaagtgggtacaccccatgaggggacaagggaaggtatctgggagagtgccaggagtaccccgaaggcatgtgggaccaggtcatcttggaggatgtgcgaggttgaagtgcctacaagcagctggggcagtgtctgggggcccacctgttctgtagggtcatcgtcctctggccgccgcggctcgtagaagtccagcacggtgtgggagcccaggctgatggtgctgacagtcgggtagtacagtggtccgtcctcgtggggctagggagtgggcaccagggctgggcagggcaggagtccacaacccccaccctctgggtcaaaggggggcttcccaagccagggacag

SEQ ID NO: 1561139 - DNA, 4001 bp, Homo sapiens
ggaagatggagtctcggtaagctcccagggcccgcaggatctgctccagggctgcccaggccctgggctcactccgctgtgccagcccctcaccaaacgctagcagcgcctccacacgctcagctgcccctcgtaggtccacctggagggcctggggacatatggacatcaccccacgcacacaccagggacccaaaacctggagttacccccctcccccatttcctatccaaaggcctggaacatgcactcaacccatttcccatcccggaaagctggcacccactgctggggccgtgcccacccccacatcctggcctctcctgcctacctgcagctgcaccatcccactctgggccaatgcccagtgccccaggccttgctccaggtcctgcagccggcggcccagccccagcaggcacaggtgcaggctgttctgctcagcctctagtacctccaggccagaaatggggtgctggggaacacaggagccaggtcagggccagtgggccaatcaagatatcacccctgctcccatccccacccctcttctgtaagcttctggaaacttctctgtggcacagtccatctccgggtctgtctgcaccaggatggctcccactgggggggccttcccagtggagccaggcctgaggacagatatctagttcaaggtctccaggttttcaaagctcctggaaacttggatgtgtgaggcctggggggtctggacagggagcggggctgggtaccccccaagaagaatggggctacaccaggagcaatgatgaaatgcttctcagccgggcgcagtggttcacatctgtaatcccagcactttgggaggccgaggcccgaggatcacttgagcccaggagttcaagaccagcctgggcaacatggtgagacatcatctctacttttttttttttaataaaaaagaaatatggctggacacggtgacgcacgcctgtaatcccagcacttcgggaggctgaggtgggtggatcacctgaggtcgggagttcgagactagcctggccaacaagtcgaaaacccatctctactaaaaatacaaaaaattagccaggtatggtggcatgtgcctgtaatcccagctactcgggtggctgaggcaggagaatcactgggacctgggaggcggaggttgcagtgagcagagatctcaccactgcattccagcctaggtgacagagagactccatctcaaaaaaaaaaagaaagaaagaaatacgtctccccagttggtcagatattgaaacacttttccagaaggtccctccccctacagacacccaacacctttccagaatcatcacccggtcctcagtatggaggccagactccaggggacagagaggaggtggggctggcacaaggggtctgggtcacctcagctcacctcacagtgtttgcccccagctgggtcctcgtaggaagagggtgttgaccatctcggggggtgagcggcaggctcattgccccttggcccaccctggaagtgctcaggagggcccaaggagtcctgtcccagggtctgggcctgctctgggctaggaggcagggggcggtgactgggtgagtctcgacacctcacttttcagcctaccgtcaccccaaccctggtggcctctcctatgtccccaggcgatcacagccatggcacctcctaccctcacatggcccctgccaccacgcctacccttttgggaacaagcttccaaagccccggcccccacctcgtgctctcctctccggacgcggggcagacggtgcatccaacaatgtccgcctctctaggtgctcccggtgggtggttgaggggctctgagccaagtctagggcccagaggcagggacagggccatggctgggggcctggggacacaaagtcaggtgagggcagccagtaagacctcttccctagacaagggtgtcccagagctcctccgctggagtcacccgggcctgaggctgcaggagaggcccaggacaggtctggctccgccccttccaagaggaacctggacccggccatttgatgcccagctcaggtgacagaagagtcacttaactccttcctccctagcaggccagtagctaaatctcccagcatcactccacgccatccaagagggttccagatagaacccctgcgccacctcctcaagagccctggattctgccccactgggaacccagaaatcggacctccagggcctaccccattcatttaagaccctagatgccgctcccctcaggaaaccaagcatctggcccctaaaaaataaaaatataaaaccaaggaaagatttttttgtttatttggtatggggtcttctgtagctcacacaaaattattgggaaaataaataacccaggggagccccctttgcccacggttcctaggtcgcggagtcacagcagccccaaaggggcaggaacctgggaatccgaggggtcccggccctggcggtcacttgcccagcaggaggccggcgcgcagcacgcggggcacgcggcggatggtcagcgagacccgggtgccgcgcaccaggcaggctcccggccgcgccgacgggcaggctgccgcattgggcggcgaggaggcggcgtccagcgcgtctacgcgggcggcggcgatgccgtggagaagacgcgtgtaggcggggccgcggagcaccagcaggctgcgcggttccagcagtagcgaggtggtgggccggggcggaggccgaggctgcagggcgggttgagggtcagcagggctcaagaagtcggggggtgggggtgggcgagaggtcggtagcctccggggatcagctagtccccaggggcaaaagctgaagagcaagtgtgctcacaatgatggaggctttggtggttcaggagtgaaaattgctggggcctgggctggggctgctggaaagggagggcgagggctctgccgtccctcgggagggggcaggatctaggtggcagatgggggcgtcaaagggtcagcggccggtgggagctgcagctgggatctcaaaggggctgaggctggggctgggacccaggaataggcagtccccaggaaatacaggcagagctgggctgagagagcatggctgaagccaggaccaggtgaggagagagtgaggcagaggttagaggcagtgggggttcccaaggacatcaggacattagaggacaaccgcacagctgagggagtgtcagagcatccaggagcatgcagggctcgagggcaagcctcaaggagtgggtcggcgtgttcaggggcgtttctgtgaacactggggtgctagaaatgcatcactcagagaaattgtgtcaaggggtcaaggagaatctgggggtgtcctgcaccccaaatcacattcctggagtagcaggacgtctggggcaccctgagcaggggcagatagagcatctgggaggaggtgaggccccccgagttaatggcggtggggtatctaaggatatcagtgtctgctggggagtcaggggtatccattcagcaggttggggcatcggggagcctgtgaaaatcatggcatgtgggacagacaccctgtaagcagatgggttgggtgtctgggaggaagtgggtacaccccatgaggggacaagggaaggtatctgggagagtgccaggagtaccccgaaggcatgtgggaccaggtcatcttggaggatgtgcgaggttgaagtgcctacaagcagctggggcagtgtctgggggcccacctgttctgtagggtcatcgtcctctggccgccgcggctcgtagaagtccagcacggtgtgggagcccaggctgatggtgctgacagtcgggtagtacagtggtccgtcctcgtggggctagggagtgggcaccagggctgggcagggcaggagtccacaacccccaccctctgggtcaaaggggggcttcccaagccagggacagggaggtgaatgcctgtttgggag

SEQ ID NO: 1561140 - DNA, 4001 bp, Homo sapiens
tttttgagatggagtctggctctgttgcctgggctggagtgcagtggtatgatctccactcactgcaaactccaccacccgggttcgagtgattctcctgcctcagcctcctcagtagctaggattacaggtgtgtgccactatgcctggctaattaagattgtttcaaagaaaaaaaatttacttaacttttctaagccctagttttgttatctcagagatgggacttgcagcacctactgtgagggctgttccttactatgagagtccatcagtgcctcaatagcatagggcctatagtggggtgctcaggaaaaggtggtgtcagcatttgctccgttgtcttgtttccccgtctgaccccttccttgtcctcccatctcccgcactgtgtctgggagttgagagctcctggctcctgtcacccaggggcacagtcgggccatgggagggcctcaccccttcgaagacccgcgtgatggtcttgggccttctcagaaactgcacggcttcgctgttggccagctcctggaggcttttggggatgtgcatggcagctgttttcctttggggccactgggaggtgggagccagggtgctgggcgctgcctgctgggcactgccgtccgggggcttcaggccagccctgggcttggctgctgtgggatgacacagatgggggatgccagtcaggggcacggggtggaagggctgttgggggccccaggattgggggacatggggtggggatggggggggtccccggaatggagttgtgtggggtgaggggactgctgagcctcttaggagtcagggtgtggggtgaatgggctgtcaggggccccagaagtcggggacgtaggatgggggtgcaggtgggtcccagggaatgaggttgtgtgtgctgagggggcttctgtgggccccaggagtggggggcataggatgggggtgctgggggtcccaggaatggggttgtgtggtgagggggctactaggggtcccagaagtgggaggcataggatgggggttctggggggtcccaggaaaggtgttgtgtggagagggctgctaggggtccctgaagtgggggacataggatgcgggtgctgggggttcccaggaatggggttgtgtgtggtgagggagctttctgggggtcccaggagaggggggcataggatggggatactaggggtcccaggcaaggtgtcgtgtggggagggctgccaggggtcacagaggtggaggtgcaggatgagagagtcgctaagggtcccctgggttgaggtgtgggttaagggggtctatggaggattccagagaggtgagggcctggggtgagggtgattctgggggtcccaggagtgggggacataagtgaaggggctgcttcaggttccagaagtcaggaatgtgggctgagggggttgttgggcgagagggctgtcagggatcccagaggtggagtgcaggggagggctgggatatttggggaccacgtcttgtgacccaggagctgaagggcctgcagagggactgggtccttctgtgagaggacacaggtgggactttctggggactagggggtgcggccattgagatcagagcccctgggaggtctgaaaccgaataatccctttcaggtttgggggtgacagcacccttcgtggagaacccaggtatctcagggcatatttcaggctgtccttgtcacttggggccatttcccagaataagggcctccctttcgaattcagctccattttcacggaagtgcacctcctcaagctgggagtcgggacctcggatttgtggggaacctcagaatgaggccacgccccggcactgggctaccttcttagaatcgcggtctcccctttaaggacctggaatggcagtgctgaggtttgggggtgacggcacctgagaaggggccgccccttctctggagggccaatctgcgtcacctgagggcccgcccttcctttcgccacccccacccctcctggtccctagcgccacctcagccttcttttggttccgctttttcccgccttttcgctcctccacagctgattggctgcgcccaagtcccgccccctccctctttccgcctactcaggagctgacacgagccggggcgtggcctcggcgaacgttggactgcgcgccgttggcggactgcgcgcgggagccctaccccgccccatccctctagggagtctcgcgtccacaccgccccttccctttgtagcaagctgacaaggagacactcctgcggcgcatgcgtcgcgcccaaacgaggccggcggtggagaaaggcaggcaacgcatgcgtagttgatgtagggagtcggcggtgagaaatggacagcccgcattgaccgaagctttgcgcatgcgttttactgctgggtgaagccgaacctcgggagcccaggacgccctcctgcacatgcgcaggaggctcaatgacagtcgagctttggctaaggtgagggagaaatcgggggattgcatggccagggagggcggccctgcaccccctaggtaacctttacgagcatttcctgctctcctaagatctacctcgctgtctagaccccaaagaaacgttgtaccactacagggtctctgggcctgaaaaacgccccagaacctaagacctctgacccctgtctgggacccaggccaactgagcagtgtgggaaggggacaggcaacaggggctttgaggcgagcggatgggctctgcgccctgcctggggtagagacggcttctggagggtgggacgtggaggtggagagggcgcttttcctctagatggcctttgacccctgcccattttcctctgtttaggctccggggaaagggtctagccatgctgcatgtgacccggggggtctgggggtccagggtccgagtatggccactgttgcccgcgctcctcgggcccccccgggccctctcatcgctggcagccaaaatgggggagtatcgcaagatgtggaaccccagggagccccgcgactgggcccagcagtaccgcgagcgcttcattcccttctccaaggagcagctgctccgcctcctaatacaggtaccgcctgtcccaggcccaagagcctggggactacggctcccagcaggcttcgcggcggcagggccctagttgctgcagagagctgccctggcgcctcctgggagttgtagttcccgggtcccttcgtgtttccctagtgggcgggagatgagctggaatgcaggagccaggtctccgagatgcagacgcagcatccattcccaactctggcttgttctgagggcttgaacaggcactctctggggcatggtttttccctctttaagatgggtatagtaatcatcctcatcattactatttctactacctgataataattgtacctataaagtcacaacgctgtaatcataattattatcacacaatttgagctctgactccatggcactgtgccagacatttttcatgtattgttgaatcatcagtaagagagataccaccatcatccccattttacagatgagataatggaagcatagggaaggaaagtgacttacccaaggccacaacatagtggcttagatttgaaccaaagtggtctgactccagagctggcccaggactagggttaggcaagtagggcactcgcttgaccctaagagtgagtgccccgttaaattttgcacccttgggtgccatattcacctcatcctagtcttggtctcactctagaacctgaggtcttattgccaccatcatcatcattgtcattattgaggattttgaggattattattcatttatttttctttatttatttttgtgagacagggtctcactctgttgcccagactggagtgcagtggcacaatctcagctcactgcaacctctgcctcctagactcaagtgatcctccttcctcagcccccgagaggctgggactcttgcctggc

SEQ ID NO: 1561141 - DNA, 4001 bp, Homo sapiens
caaagattagggctgcacagatgaaggaacaggagttagggatgagcagacaaggtgccagccattcatcattcattcattcaacaaacatccatccagcaccaactacgccctacgtgctgtgctggttgctgcgaatccagcagagaacaaggtcctggagttccctgacctcccggtgtcacaatccaacgagaggagacatagagtaaacaagcaaacaaaaacacatacacaaaccggtcactgtcagactgtctgtgagaagcgctccacaggacacagctggagaatgtgtcacaaaggaactcagaggggggcggtcagggagggctctcccaaacctgaaggatgacatggagccagccacaggcggggggcagtggcgccaggatgggaaaagcattttaaagaaaagcattttagacagtaggagcaggatgacaggggcttagggtaggaaagcagttggagggtccagggaccaaggaggccagactggggtagacgcggggagggccaggagagaaggatggatgtgggtagagagattggaggtggataggtatggtgggagctgggggtggagaggtggagatgcagagatggggaccaagttgagggagggagagatacagggaggggagacagagataatgtgaagggcagactgaggctccgaagagatggagaggtgaacaggcaggcagaaggaaagtcaaggattgagacttgggatggacagtgacaaggaatgaaccgagatgtaattaattcacgggggcttgagagacgagaggacgagagacggtgaagaggggcaggcaggagtgtgggcagaaatatctttgaaagagaaacggtcgaacgggaggatggatgggtgggcaaggacagcagatgatggctagagatcgcagatagacaaaaggagacaggagggctgggcagacagacatgggttcataagggaaggttcaatgagcacataaatgagaggaggctaggaaggagaggtggatgtggggagagggggaattagtgacacatggctcggagccaggcatcaagatgggttgaaggggatgcaggggaattaggaacagacagaccagggctcacagatggacaggtgtcgtgggggtgctgcagaaggccaggactccaagacaggcatggccacactcacctgcgcttatctctgccgtgtcctgggtggcagccgaggcggcggcgggcggcagcccatgggggttctagggcggacaaggggctgtggacccgttcccacgcgccgggtaatgagagagaatgtctgatctaggggctgaggccgggagaaaaagctcagcttaacagtcacatcttgccctactcgagccagctgcccgaccccaggcgacccactgggagcccggccaccccctcccacctccgggcccccagctcccgttgagggcttagagactacaattcccggcaggtctcgcgctcgcgctgctgcggcttcatagacccggcgctgcaggatctgctgggagttgaagtccttaatgcctccgggctgcagagaggatgggattttttttttttttttaaggttttggggggttaagatgctggggtcccaagacgcttcaggggaggggaacgatgtccgggacttcgaaaagccacggagccctaagtccttaggggccacggaatgaggaaacgatccccccgcgctggggatcggtgggcgaggggtgggatacacccaggtgtttcgggacccccttccagggccacgtgcccctcccccggggtggccagagagcgctgcagcgctcccactccccggcccgagatccacgcgcctctgcatctaccccgcccccatgcgccggggccgaccccagggatttgactggggctggggctgtggcaggaggagggggaggagcggactcacccggagccgccgctgccgccgctgccgccgccgccgccgccgcagccccgcgcgccagccgcggtgccggctcggctcctcccctcgccactgtcgcaggtccgcggctcctccccctgcaccccctccttcccccactccgaacccgcggcaagaaagccgaaatcacttggcctcagcaaggaagcagggagattgcccgggactaaggcagcagagacccagtgggtttccacactggggacccagagatctaggatcacgacgtgctgcttctccagggtccgggggcccagttctccgccccgctatctcacagaggtagaagtccggggaccccaggcccctcttcccaggaacccaggacttcaggccctccaacctgagccgctctgaaggccggtggtaggagcggaagctgagactcaaaggtacagtgccacagccaggatagaggtactagcagggacctgggtttgaatcccacctgggccaactcctgcctgtgtgcgcctcttgctctgaggccccgtttcctcatcagcaaaatacacaccataaacttatttcctaagggatccacagtttgaaaaaccggtcagtgtagacaaaacattggtaccaactaggtacttaatgaatatttctcaaaagtagtgagtaacagtttctggtatattaatagcagttaatggcaattgtcatttcctataagtggtgaagtgctaagtgctttgaaagcgttttctcatttaattttcacttgggtgcaattatgacattcccatttcacagaggagacaactgaggcccatggaggttaaatcccttgggtaaggtctagatcaggggtgtccaatcttttggcttccctggactgcattgttgtcttgggctacacataaaatacactaacagtaacaatagctgatgagaaaaaaaaaatcacaaaaaaatctcataatgttttaagaaagtttacaaatttgtgttgtgccgcattcaaagctgtcctgtgctgcatgcgggcctcaggccatgggttggacaagcttgatctagatctacatagcctggagaggtggctcggaggccccctcagtgctctcaatcagtgacatccaaataaatacaacctctaggtaaaaatcaaaggctgggctgacacctgtaaatcccaacactttgggaggctgaagtgggaggatcccttgaagccaggagtttgagactatcctggacaacgtaggagactccatctctacaaaacaaaaaaaccaaaaaaccaaaacaaaaccaaactagtgggtgtggtggcgtgcacctgtagtcccacctacgcaggaggctgaggtgggaggattgctggagcccaggaatttttttttttttttttttttttttttgtgagacagagtcttgctctgtcgcccaggctggagtgtagtggcgcgatctgggctcactgaaagctccgcctcccgggttcactccattctcctgcctcagcctcctgagtagctgggactacaggcgcctgccaccgtgcccggctaattttttttgtatttttagtaaagacggggtttcaccgtggtctcgatctcctgaccttgtgatccacccgcctcggcctcccaaagtgctgggattacagacgtgagccaccgcgcccggcctagcccaggattttgaggctgcagtgagctatgattgcaccactgcattccatccagcctgggcaacaaagcaagacccccatctcaagaataaatagccaggtgcggtggctcatgcctgtaatcctagcactttgggaggccaagtgggcggatcacttgagctcaggagttcaagaccagcctgggcaacatggcaaaaccctgtctctacaaaaaatacaaaaattagctgggtgtggtgatgcatgcctgtagtcctagctacttggggggctgaggcagaaggatcacttgaacccagaaggtggaggttgcagtcagtgagccaagattgtgccactgggctccagcctgggcgacagagt

SEQ ID NO: 1561142 - DNA, 4001 bp, Homo sapiens
agttcgagaccagcctggcgaacaggatgaaaccctgtctctactgaaaatacaaaaaattaactgggcgtggtggcagacgcctgtaatcctagctactctggaggctgaggcaggagaatcacttgaacctgggaggtggaggatgcagtgagccgagatcccaccattaattacactccagcctgggcaacaagagtgaaactccatctcaaaaacaaacagacagacaaacaaaaacagtttcctgagttctgtgagtcaatgattctagcaaatcattgaacctgagggtggtcatgggcacctccagactacagtgctgtactagactatgcaggattcagttctgcctctgctaccattgagcctctgggcaagtgactgctgctctctcggccttatccctcatgactgtcacctggacatcctgcacatgaggtgccagaccctgccctggtgctcagcaagtgtgactgtggttgtaatcactcagcacatgcttcctctggtcaccgtttcctcatctggacaatggcactcataatgtttcctcattcccagaaccctgctgctttctagctgtgtgaccttggacaggtcacttcacccttctcagcctcagtttcctctgttgaaaatggggattatatgttccacaaagggtcactgtgagtaatcattgagatgtgcagaggacctcgcatgctgcctggaccacagttggtgctcagtaagtgaatcccagcattgttctaagttcttcgtaggtgttatatcatttaagtctttcatctgctctatgaagcatcccttttattatccccattttccagatgaggagactgagtcccagaagaagagtcacttacctacagccatgcagttattaataaagtgagggagatgggacttgaacccaaacaagtcagtctgactcaagagcctgacatttgcacaagatgcagagagatatctgaagggggcatttggtggtggtagtcggagggaggcccacagggcaaaactcaaaaagcagaccacacagctccttccccttggatcagagatttgggagaagggcagcagcaggcagaatgggggcaagacgctacgagggactgaccccacaagcaatggaaagctgagcagttctgctccgagtctcctggccatagtgcaagcagggggctggccaagacaggcaggggtgctgacctgcatctggaccccggggatagcctcggattcggtcattgaactcctggcacctgtcgttggtgtcagcatctcggacccgcgcacagaggtccgagaccaggatgagtgcccgccggcagaggtcatcctcgtagtctcctgacatggtggccgtctggtcctgtgtgtgggagggatggggcaagggtgcagatgggaaacagaatgggagtgcagggtgggcaggtgtggagataagggtggaaagagacaccgagaaaaggaaggatgggcaaaggggacagagattaggggcagatggattagggatggagattcgaggaagaaggacaaggtgacaggtattagggatggacaaggaaaaggaattaggagtagacagacaagagggcagaaattagggatggagatagtagcagggactgggtaagtcaaggggacagagatgggcatgagtggagtagaggacagagaacagggacaaatgaacaaggaggaagagatggagaagggcagtgaaggggctaagaatgaggatgcacaaataaagggatggacagatgaggaaacaaagattagggctgcacagatgaaggaacaggagttagggatgagcagacaaggtgccagccattcatcattcattcattcaacaaacatccatccagcaccaactacgccctacgtgctgtgctggttgctgcgaatccagcagagaacaaggtcctggagttccctgacctcccggtgtcacaatccaacgagaggagacatagagtaaacaagcaaacaaaaacacatacacaaaccggtcactgtcagactgtctgtgagaagcgctccacaggacacagctggagaatgtgtcacaaaggaactcagaggggggcggtcagggagggctctcccaaacctgaaggatgacatggagccagccacaggcggggggcagtggcgccaggatgggaaaagcattttaaagaaaagcattttagacagtaggagcaggatgacaggggcttagggtaggaaagcagttggagggtccagggaccaaggaggccagactggggtagacgcggggagggccaggagagaaggatggatgtgggtagagagattggaggtggataggtatggtgggagctgggggtggagaggtggagatgcagagatggggaccaagttgagggagggagagatacagggaggggagacagagataatgtgaagggcagactgaggctccgaagagatggagaggtgaacaggcaggcagaaggaaagtcaaggattgagacttgggatggacagtgacaaggaatgaaccgagatgtaattaattcacgggggcttgagagacgagaggacgagagacggtgaagaggggcaggcaggagtgtgggcagaaatatctttgaaagagaaacggtcgaacgggaggatggatgggtgggcaaggacagcagatgatggctagagatcgcagatagacaaaaggagacaggagggctgggcagacagacatgggttcataagggaaggttcaatgagcacataaatgagaggaggctaggaaggagaggtggatgtggggagagggggaattagtgacacatggctcggagccaggcatcaagatgggttgaaggggatgcaggggaattaggaacagacagaccagggctcacagatggacaggtgtcgtgggggtgctgcagaaggccaggactccaagacaggcatggccacactcacctgcgcttatctctgccgtgtcctgggtggcagccgaggcggcggcgggcggcagcccatgggggttctagggcggacaaggggctgtggacccgttcccacgcgccgggtaatgagagagaatgtctgatctaggggctgaggccgggagaaaaagctcagcttaacagtcacatcttgccctactcgagccagctgcccgaccccaggcgacccactgggagcccggccaccccctcccacctccgggcccccagctcccgttgagggcttagagactacaattcccggcaggtctcgcgctcgcgctgctgcggcttcatagacccggcgctgcaggatctgctgggagttgaagtccttaatgcctccgggctgcagagaggatgggattttttttttttttttaaggttttggggggttaagatgctggggtcccaagacgcttcaggggaggggaacgatgtccgggacttcgaaaagccacggagccctaagtccttaggggccacggaatgaggaaacgatccccccgcgctggggatcggtgggcgaggggtgggatacacccaggtgtttcgggacccccttccagggccacgtgcccctcccccggggtggccagagagcgctgcagcgctcccactccccggcccgagatccacgcgcctctgcatctaccccgcccccatgcgccggggccgaccccagggatttgactggggctggggctgtggcaggaggagggggaggagcggactcacccggagccgccgctgccgccgctgccgccgccgccgccgccgcagccccgcgcgccagccgcggtgccggctcggctcctcccctcgccactgtcgcaggtccgcggctcctccccctgcaccccctccttcccccactccgaacccgcggcaagaaagccgaaatcacttggcctcagcaaggaagcagggagattgcccgggactaaggcagcagagacccagtgggtttccacactggggacccagagatctag

SEQ ID NO: 1561143 - DNA, 4001 bp, Homo sapiens
agcctcctctgtctgaccctctgttttaaactttttcctactgtaaatatgtcccattttctgaaaaaaatcagcatattttaaagtattctggcacaaagctggttttcagctttcagagccatttatttatttatctatttattggagacagagtctcgctctgtcacccaggctggagtgcagtggcgcgatcacagctcactgcagcctccacctcccggtttcagtgcctcagcctctcgagtagctgggattataccacaccaccatggctggcttttgtatttttagtagagacagggtttcatcatgttgcccaggctagtcttgaattcatgacctcaggcaatctgtccacctcagcctcccaagtgctaggattacaggcgtgagccaccgcacccggcccagagccaaatatttatatgtttctgtaggtttctatacagtgggatgccttttctgtgctcctatgagaccctgtagtatggcacatattaccctgtgtggtgagtgtctgtgtcagtgcctgactctcccaccagactgggaagttcttgggaatagcaactagttctgttccatctctgggtccccagagtccagttgagggctagacacacagggaggatgagccagtaaggtgggttcctataggacagaagggagcagggactgggaccagctgggccattgagaggagcagggtgcgggaaggggccaggtggaggggctgggctgggccacaccttgtctatgtaactctggcccagccccttcacttcctgaaggtggacctgggcttgggcctggctcttcttgcctgtccgcctccgacagctcttccggtagagacagaaacagcagctgaagatgaggaggcctgagaccagcacgatggtggccagggcccaggggggcactgcagaggggtggagacaacacacattgaggcctgggcagcacgcaggctgattcagtcctgattacacgtggaagctggaatgctggcctccttttccctccagccattttcattgcatttcttcctgtgtttttcttccacctaatgtggcctatagagagattcgatgccccaacccaggctgacaccatctggatttgcttgcttgttagttctgcctttccttacccgaccccgccccccatttctgctcaactcctgatgcttttacaagaagccctgctcctcatcgggcctgtttccttatctgtaaaagaagagctaggtggaccttccaattctaagatcccattccatgcaacaccccttgatccggtttcgatttttttttttttttttttttttttttttttgcaaatctgttccttccttttaccccatttcgttcgcattccagtccaggatgacgacccgggatcccagccggattttccagcccgcctgcccgagtacacccgtccgaatcccgcccctcggaatcctggccaggctttctctctgctcggccccccacccccgggtcttgctcacctgggccgtggctgatgcgactggagtcgggaggcgtgtcgggcgatggaggccccggggttgggggctccgggaacatggtggcggggtcctggagtcttttctgcagagacactcaagcaccctagtcccccattcccaccccagacgtcctttgagccccacgcacaacaaagaactccaactcccatgaggcctttgcgcgaacagccgcgcagaaaccggacagccaccgcgagtcatgctgggagttgtagtatcagcctccccgcacttgagagggggtgtccaggacctagttccatcctaaagggataccctcttcctccacggccccacaggcatcccgctgacttctgcctcgtcctcgcccctccgcagggtctgaaccggaagcgggcgaaggcagacgtgggaaccagcagaccgcgttgcccagagcaacagccgggctcctctcaagcggggtgagagcaaagctggttgcccgggcaacgggttgttgccaggacaacgggcggggctgacgcacagacgcggagtcccggcggggcaggctcgctccggggcccaccggtgcctgggaaccccccaatagcccgactgggatcctgaggtcccgcgaggtggggagcgggcagcctgtggtccgagcgcccacagccgactgctccctccgcacctggtcctgggagctgagacgcaggttccctcttccctctccccaattttgctggagggcgggtcgggggctgcccggtgcctgtgctgagccccctcatccttcttggcctgttggtctctccacgcatccgtgctgctctcgtgaccgcctcggtctccacgctgcctcttgaccccacataggcgtcttccctgtgtctgcctccccaacccgcctgtctctcttccctatcgcctggcctctgtctccagggtctctccctctcccctccgcctgcgccccactccccgccctcggctctttgtcttctccatacctgtctcgcgtccccagatccctgtctctccgcttcaggctgctgccctccctctggttgtctccccagtgccccagcccccactcgcacacccctttcctctagggatgcggatgcggatgggctgagggcgggggtcccagcagctcctacctgctcggcggctggacgggacactcccgggagacgccgaggcgccagccccgcccggaccccaccccctgcacgtgggcggtggcgctgtcccgggtgctgatcgcggagctctccggggcgggggagccgcggagcggagcaggatcccgtgcgcgcgtgtgtgcccgtgtgcgtgtgcgcgcgtgtgtggtgtgtattgtgtgtgcccgtatttggtctcgggtaggcggaaagccctgccccgcccctcctcccgcctccacccgggaacctcgatgacgcccacagatgtttatcctggtgctttagcattttctgccttctggtccagtcgttggccgtccagaccactccactcctcccgccccaacacacacgacacacaccctgtatagcccaaagaacggcatgccaggatactcagtcctaggacctaggagaccccagacccccattggagacccagactctgcagggttcagcatcaaagtccccagctatcagcccccagacatcgccctctaagttcccctaacaccagtcccaggaggcggccagtgcggtggctcatacctgtaacctcagcactttgggaggccgaagcaggaggaatgcttgagcccaggagctggagaccagcctgggcaacatagcaaaatcccgtctctacaaaaatgagccagcgtggtggtgcgcacttgtgatggcagctactctagaggctgaggtgggaagatcacctgggcccaggaggtcaaggctgcagtgagccactgcactccagtctgggcaacagagcaagaccatgtctcaaaaacaaaaacaaaaacagaacaaaacaacaacaacaacaacagagaagagtaaaagaaaagctcagaaggcaagtccccaagcacctagctccagcgagccctgtccatactgcccagaccctggacacagacgtctggacactgccttctctgagagactcaaccacccaaacctacattttttcatgtgcaaatgtgtgggtccctctagtcccctcctggacgttcgcctcgatccctagataccaggaacccatccctactcccaatccaatattatttccagacccagaaatccatgggacaactgtctctggggagaacagtgatttaataaattatgggatagaaggaaaaatacatgtggatggtggggtgcagagagaccttgggcacagggactccctccgaccccagattatagaagactgatttggtttctgaagtaaaatcaaggcaggatccttcctgcctttggtcctcaagtagccagaactccagacccaaatt

SEQ ID NO: 1561144 - DNA, 4001 bp, Homo sapiens
agggcccaggggggcactgcagaggggtggagacaacacacattgaggcctgggcagcacgcaggctgattcagtcctgattacacgtggaagctggaatgctggcctccttttccctccagccattttcattgcatttcttcctgtgtttttcttccacctaatgtggcctatagagagattcgatgccccaacccaggctgacaccatctggatttgcttgcttgttagttctgcctttccttacccgaccccgccccccatttctgctcaactcctgatgcttttacaagaagccctgctcctcatcgggcctgtttccttatctgtaaaagaagagctaggtggaccttccaattctaagatcccattccatgcaacaccccttgatccggtttcgatttttttttttttttttttttttttttttttgcaaatctgttccttccttttaccccatttcgttcgcattccagtccaggatgacgacccgggatcccagccggattttccagcccgcctgcccgagtacacccgtccgaatcccgcccctcggaatcctggccaggctttctctctgctcggccccccacccccgggtcttgctcacctgggccgtggctgatgcgactggagtcgggaggcgtgtcgggcgatggaggccccggggttgggggctccgggaacatggtggcggggtcctggagtcttttctgcagagacactcaagcaccctagtcccccattcccaccccagacgtcctttgagccccacgcacaacaaagaactccaactcccatgaggcctttgcgcgaacagccgcgcagaaaccggacagccaccgcgagtcatgctgggagttgtagtatcagcctccccgcacttgagagggggtgtccaggacctagttccatcctaaagggataccctcttcctccacggccccacaggcatcccgctgacttctgcctcgtcctcgcccctccgcagggtctgaaccggaagcgggcgaaggcagacgtgggaaccagcagaccgcgttgcccagagcaacagccgggctcctctcaagcggggtgagagcaaagctggttgcccgggcaacgggttgttgccaggacaacgggcggggctgacgcacagacgcggagtcccggcggggcaggctcgctccggggcccaccggtgcctgggaaccccccaatagcccgactgggatcctgaggtcccgcgaggtggggagcgggcagcctgtggtccgagcgcccacagccgactgctccctccgcacctggtcctgggagctgagacgcaggttccctcttccctctccccaattttgctggagggcgggtcgggggctgcccggtgcctgtgctgagccccctcatccttcttggcctgttggtctctccacgcatccgtgctgctctcgtgaccgcctcggtctccacgctgcctcttgaccccacataggcgtcttccctgtgtctgcctccccaacccgcctgtctctcttccctatcgcctggcctctgtctccagggtctctccctctcccctccgcctgcgccccactccccgccctcggctctttgtcttctccatacctgtctcgcgtccccagatccctgtctctccgcttcaggctgctgccctccctctggttgtctccccagtgccccagcccccactcgcacacccctttcctctagggatgcggatgcggatgggctgagggcgggggtcccagcagctcctacctgctcggcggctggacgggacactcccgggagacgccgaggcgccagccccgcccggaccccaccccctgcacgtgggcggtggcgctgtcccgggtgctgatcgcggagctctccggggcgggggagccgcggagcggagcaggatcccgtgcgcgcgtgtgtgcccgtgtgcgtgtgcgcgcgtgtgtggtgtgtattgtgtgtgcccgtatttggtctcgggtaggcggaaagccctgccccgcccctcctcccgcctccacccgggaacctcgatgacgcccacagatgtttatcctggtgctttagcattttctgccttctggtccagtcgttggccgtccagaccactccactcctcccgccccaacacacacgacacacaccctgtatagcccaaagaacggcatgccaggatactcagtcctaggacctaggagaccccagacccccattggagacccagactctgcagggttcagcatcaaagtccccagctatcagcccccagacatcgccctctaagttcccctaacaccagtcccaggaggcggccagtgcggtggctcatacctgtaacctcagcactttgggaggccgaagcaggaggaatgcttgagcccaggagctggagaccagcctgggcaacatagcaaaatcccgtctctacaaaaatgagccagcgtggtggtgcgcacttgtgatggcagctactctagaggctgaggtgggaagatcacctgggcccaggaggtcaaggctgcagtgagccactgcactccagtctgggcaacagagcaagaccatgtctcaaaaacaaaaacaaaaacagaacaaaacaacaacaacaacaacagagaagagtaaaagaaaagctcagaaggcaagtccccaagcacctagctccagcgagccctgtccatactgcccagaccctggacacagacgtctggacactgccttctctgagagactcaaccacccaaacctacattttttcatgtgcaaatgtgtgggtccctctagtcccctcctggacgttcgcctcgatccctagataccaggaacccatccctactcccaatccaatattatttccagacccagaaatccatgggacaactgtctctggggagaacagtgatttaataaattatgggatagaaggaaaaatacatgtggatggtggggtgcagagagaccttgggcacagggactccctccgaccccagattatagaagactgatttggtttctgaagtaaaatcaaggcaggatccttcctgcctttggtcctcaagtagccagaactccagacccaaattccttcctgcctcagaatccaggccccagcctgtttctttctgcatcctggaaagacctagggaatccaagctatcatccctctcctccttcagggaaccaggaatccagatccccagctcccataggactcatctgaagcccaccagaccactctctcctggggaaaccagagtttgggataccagccccctcctcccacagcacccaggagtctgggagcccagccctctgctcttccaggaatctgggctcaagtgggtgtccagagcttgaggatgcctgggctgccgacccagccccctcgtcacttagacctccaacttgtgggcctggatggcggccacgttctcgtagatgaggttttcgacatcctcatacgggacttccttctcggctggggcctgggctgactgttggaggaaccgcaggatgcactgatgcaggaatacgtactgagcctgggaagcaggcacgggagtgagaggcgtccccccaggtctgagctgcgtggagccccagggtccctcgtcccactgcctcccgtcctgtgttgctgagggactgcctcacctcagtctgcaccatcaacggccgactctctctcatcttccttacaaagctgaagggcccaaggagaccctcggactgcagctgccggagcaggacgtccagggcaatgagggttcctgtgcgacccacgccagcactaggcagaacaagggaagggtcagaccaaggggcaggagtgtgagggtccggggtcatggctgattggagggatctgtgtttgaatgatgacaataactatgcctgctcacacctgtaatcccagcactttgggaggctgaggccggtggatcacccaaggtcaggagttccagaccagcctggccaacctggcaaaaccg

SEQ ID NO: 1561145 - DNA, 4001 bp, Homo sapiens
gggaattgtgattgttaatttgatttatcagctagaccaggccacaggatgctgggatatctggttaaacattatttctgggcgtgtctgtgagggtgtttttagaaagatcagcatttgaatctaatgctgagtcgggcaggttggccttcctaatggaggtgggtattctgctgagggccaggatgggagaaaaaggtggcagagccaccacagtggctcacgcctgtaatcccagcactttgggaggccaaggcagaagggctgcttgaggccaggagtttgagaccagcctgagtaacatagtgagatcccgtctctacaaaaaatttaaaaattacacggggcactgtggctcacgcctgtaatcccagcactttgggaggctgaggctgaggcgggcagatcacctgaggtgatcacctgagggagctcaagaccagcctggccaacatgatgaaaccccgtctctactaaaaagtacaaaaaatcagccgggtgtgtggtgggcacctgtaatctcagctacccaggaggctgaggcaggagaattgcttgagcccaggaggtggaggctgcagtgagctgtggtcataccactgcactccagcctgggtacagagtgagactttgtctcaaaaaaaggaaaaggagggaaggaaggaaggaaggaaggaaggaagggaaagagagagaggaaggaaggaatgaaggagaaagagaaagaaaggaaggaaggaaggaaggaaggaaggaaggaaggaaggaaggaagaaagcaagcaagcaagcaagcaagcaagcaagcaagcaagcaagcaagcaagcaggcaagcaagcgggggctcacgcctgtaatcccagcactttgggaggccgaggcgggcagatcaagaagtcaggagatggagaccatcctggctaacacagtgaaacctacgaaaaaagccgggcatggtggcgggcgcctgtagtcccagctactcgggaggctgaggcaggagaatggcgtgaacccgggaggcggagcttgcagtgagcagagatcgcaccactgcactccagcctgggcgacagagcgagactccatctcaaaaaaaaaaaaaagaaagagagagagaggaaggaagggaggaaggaaggaaggaaggaaggaaggaaggaaggaaggaaggaagggaaggagaaaaagaaagaaaggaaggaaggaaggaagaaagaaagaggttttagtgtagatagtggtgatggttacacagcggcctcaatttactttatagttatctatttgacactaaatttttatttatggtattaaggtttctgggccaggcacagtggctcacatctgtaatcccagcactttgagagactgaggtgggcagatcacctgaggtcgggagttcgagaccagcctggccaacatggtgaaacaccgtctctactaaaaatacaaaaattaaccaggcatggtggcgcacccctgtaatccagttactcaggaggctgaagcaggagaatcgcttgaacccgggaggcagaggttgtggtgagccgagatcacgccattgcactacagcctgggcaacaagagcaaaaccctgtctcaaaaaaataaaataaaataaaataaaataaggtttctattctgaatacttttacttacacacaaaaagtcagagttgatcctgagaaaaggggtaagccaatgaagccaggtggtggaggcattcagcaaaactcacgaagttgaaactacaggagttgaagtttgcagagcactcgtttccagggaatgtctgcagtgcactcagcaggacgtctcactcctcccgtgtgctcagtaagccaaagttgatgttattatttccatccccagcccaactatcccaccagttccatgattttctgcagtcccagtggatagccctgtgagacttactgaaacagaggagggaaagcagcttagggatcatgatggctccttagccctcccagagtccgtcttgggttctgcagtccacagatgggagaagagctggagtcgtcgctgcctctctcccaccccagagtgtgggcagtaacagcctttcctagcctttcagtttcccctcccatatccacattcaggaaacatgttgatgttgctgattgcaacatgctccttacacacaccagtgttcgagcacttgactcacaggaaatgctcctctgtctcaggcagatttcaggcatcaaacaggtaaccccgaaaatgcttcagacttggccctgaagggttcgtattgaagagatgaaagcacttcactcttttttttttttttgagatggtgtctggttctgttacctgggctggagtccagtggcacgatctcaggtcattgcaacttcagcctcctgggttcaagcaattctccggcctcagcctcccaagtagctgggattataggcgcatgccaccatgcccggctaatgtttgtatttttagttaagatgaggtttcacaagttagctgggctagtcttgaactcctcgcctcaagtgatccacctgcctcggcctcccaaactgctgggattacaggcatgagccactgtgccaggccttcatcaccattttttttttcttttgagacagagttccactctttcgcccaggctggagtgaagtggcaaaatctcatctcattgcaacctccaacccccaggttcaagcggttctcctgcctcagcctcccaagtagctgggattacaggagcccttcaacacgcccagttaatttttgtattttttagtagagatgaggtttcaccatgttggccaggctggtctcaaactcctgatctcaagtgatccacccacctcagcctcccaaagtgctgggattacaggcatgagccactgtgcccagccagtcatgagctcattttttaagttcagaatatttcagtacatatctatctttatcaaataagaaccattttaaaaataatataagcaccacagcactgtcacatcaagaaagttaagagtacctccttgataccagctaatacccattcagtactcaaatttccctgattgtctcaaaaatgtcatttctatcaggtttttaaagaataaatcaggatccaataaaagtctacagattgcatttgataattatgttaatttagcctggcgcagtggctcatgcctgtaatcccaacactttgggagaccggggcaggtagataacctgaggtcaggagttcgagaccagcctggccaaccatggtgaaacctcatctctactaaaaatacaaaaattagctgggcgtggtggtgcacgcctgtaatcccagctactcaggaggctgaggcaggagaactgcttgaacctgggaggcaaaggttgcagtgagctgagatcgcaccattgcactccagcctgggcaacagagtgagactcagtctcaaaaaaaaaaaaaaatgttaatttgaatcagacaaaattttttatttttttgttaaaataagaaatcaagcaagttagtttttaaccatgttttttttcatcttgcatttggaagaagagcaaaatgccccgaagtctcgtttttgttttcggattttttgtcttgatagcacctactcttcttactgttttggaacatagaaaagtcaacaaggcaacaaattataaggagtaaaaccaactataattacaggtgtttctttgaaagttattttcacaagatgtggcaatgatttttaaaggcttgggactcttacaagacccttttgttcaaataacagttttgtgtatgaatttatttcaacagagaacaatttagtaatgtttgtgaatattcatttagttctccatattgtaccagaaaacaagactgatattcttgtgaatcttctcaattcaactctttatcaaatcagattccttaaattagtgttgtgactcagaaaaaatctttctccttatgcagtatcagggaaaagaggaca

SEQ ID NO: 1561146 - DNA, 4001 bp, Homo sapiens
tcatcttcatcttcatcctcctgccctggggcagcgcaggtggtcagctcagccttccagtgtctcgtcactagctctgtgggtgccgactgacttccggcccctgggtggaactcatcagctccaatggaggtctcattccccactaaagaacccccctacagaggcatccaacttctccgtgtgccttgaaggttgttctgctgtccctgaaataccttcttgtcctttcatatcctgggagtcccagctcaaatgtctgctctcccaggaagcgttggggatctggaatcagactgtctgggtgcaaaaagttccaacacttcctagcgttttcgacctcatctatcagtttctcaaaaagtgagtaagggtcagggcttaggtgggtctggatctgacttatctctgggtctcagaattgcccaggacggggtccagccatgggaagtcccaggagacataacgaagggaaagccgggagcagtgacgaagtgggtgagtaggctgtcaggccctgtcctctggcaccagaggaaatgccatttcccttcaagcaactcgaatccacatcttgcaccctggcagggatctcccaagaagcaaagggagagaggggtcagccgtccccacgaccgtgcgtcttatgctccctgctctttttccttgaatgggcatcctctgcccatttcacagagaggagcaaaaggagaggcagagtacccaagcctaaacagggtcacacatgccccacgagtaggtctgggattgtacgcaggtccctcaaatgacttacaacagcacggacctagaaaaaaagcgagtggagaagggcaaagcgggtggagcctaccttcttggagaagaggatttgggtggaatctccagcctcctctacaggagcccagtgcaggaggacgtcattgtcctagggtaaggagggaggcggggttagaggcgctccccaaaccacattcccaaaactttccgttgcaaatttccaaactttcccagtttctaccctcagcctttcaaagtcccgcccctcattccagttcccacacccagccttcttcaggtcccactgctgaccgccagaccaaactcctacagctgccgcctgcatcccagaccgcctgcatcccgctcggagcgggtccgagccctgctccctcccagcgcaccttttccacgacacggatgacaccagcgatgagagagtctcggtcctgatacttcttagcgctggtgtgcaggtacactccgcccttctcaaacaccacctgagttggggggaaccagcgagggctggggcccaagcgaggggaccagcctggggagccaatagggacgggcccagggaggagccaccctcagggggcggggccgggagggccattgccccgggaccaaggcggggagaatggtccagcccgcgttcggatgctgacgtgcgttccacagggggcagggctcaaggagtcgcctgagccgggggggcggggccatgggaggttcttccctggggcggtggacgggagggtgacggcgcgtttataagagatcggtgtttgccaaggccgtgccggattctcgagagccaaggcctgagagaagagctgatcactagacggggcgtttcgcatacactgaagcgagggaatgcgtcctcagtgcttaccctgtagccggctccttccatagtcgccgccgaaggccccactgccccgcctcctccttttcctagtcagcgtgttgtcacttccggagaaaacagttcccctccgggccggacagtggtagcggcccgacccgttctagagaaggagcgggtgaaaccatttttcagaagggggttattccactggaacctcgagggtggatcggagtcacgtggcgcagacgctgaaggtggatccggctacggagagtgcgcaggcgcagtgttcgccctctcgccacgaagtaaacaagtgggagggtctgagagctgcaccacctggggcaagcacgccttgaaacgcccacttccttctccatattgtatactggaattgaagccaaggaggtaccattttgctcgagggcatggcctaagccggtcagctaaggccatgttaatacggggctgtcccatctctctgcggggcgcgacagctggaagagccgaacggataagagaagaggaggtgagaggagctgtacaccacaagaggcactgagggactcaggataacgggatgaagccgtcagtgcccccagaaacgaagcggccccggacgaatttctgagtcaccgtcgcgagaaagcgggctgagccgccattttgaagcctggcaaaccgaagcaagaaatgctgccgtgttggatctttgccagccttcgtgccgaatgggagcaggttggagggagggagagccaatatacactatgggctgattaagcccggttggctgccatgttgttaacgagcaccgatttcctctacttttgtcgaagaagtttattgtgggtcagggacgtcaggtcgcttgccttcgtttactgtggtcatgattgagcatatgaggacggccattattgttgggggcaaatggaaatgctctaggcggggccatttttcttaggggcaagctgtcgtcacccttgtcaactggttcggatgaagcccctgtggccgccatcttgatctcgggcggccccgataagggaggcggagtgtgcggagaggaggcggggcaactgcgcggacgtgacgcaaggcgccgccatgtcttttgagggcggtgacggcgccgggccggccatgctggctacgggcacgtgagtggaggcggcgttgttaaccgcggtgtggggaggatttggccgtcctgaggcagcggggcgctgggagggcgagcggctcacgggaggggtatggcctgcacagatcagagggcagaggtctgccagcgatcctttgctgagcgctggaagggggtcgcccgtgggaatcgtcctgtcagacctgaggcaaatcgtagacagtctcaccttgcggttccagagcgcctgggatctctacctgggccgtggaccacgtccacggggtcgggggatggtttggggggcctcggggcgcccctcacccgtccaaaggcgggacttccggtcctggcctccgtctgggcgggatttcctgttttcttcctagaccagtgggtcctccctggaccccgggcgaggttgggaggtctcggggcagctgagcgtggccccaggcgctcaccccatggctaccgcgttcatgctcaggttcctcacatcttggggtgtggggtactaaaatttcgacaggaggggtggttccacccctctcctccttagctcttttccctcctccctgcatccaaagaggacagccacatcgtgctccccctcctgtggggaacacgtctcactttcctctaatctctccctgatcttacacgaaactcgtctatcggggcgggttcttcctccatctctcagctccttggaggaaacaggacctcctctagaagctgaagggtaaggaggacccccaggtcttggctactctcctgttgggtagcattacagggtgcccctggaccttggcaaagaggtctgtggaagtcgccctgtcctttttgctcatgtctcctgagttgggggagccctcacaactcactcaccctatttcactctttaatcccgtggctactccaagattgagtacacggagagttcatcctgacgttctcttccgggacctcctctccccctcttctccgcatgtcattaggggctggaggcccgtggaagtgagagccccaggcctagcacggcgaggcagttgactttggaccagccatttcttgcttagagcctcagtttcctccctcatcagctgggaaggacatgggtgtgtttgagacaccgggtaccccccagttcagtggggttttggggctgggcagtcagcagtttcagcccca

SEQ ID NO: 1561147 - DNA, 4001 bp, Homo sapiens
actgtgcaaggagcaatgtggctgctacagactgagtgaggtcgggagggaataaggacagaaaggggctgggcttggtggctcacgcctgtaatcccagcactttagtaggccaaggtgagctgatcacttgaggtcaggagttccagaccagcctggccaacatggcaaaaacccatctctactaaaaatacaaaaattagctgggtgggcacctgtaatcccagctactcgggaggctggggcacaaggatcacttgaacccaggaggtgaaggctgcagtgagcccgatagtgccactgcactccattccaggttgggtgacagagtgagactctgtctcaaaaaaagacagaaaggatgtactgagtggatgcacaaagagatcctgtgttctggtttctcccaagctgtccagcctggtcgctcactgtgacctacctcacattctaggcctctgtacaccctgctccctcctttccacctctttctcttaagtcaccctttcctcatccctcagctcagacatcccttcctccaggaagccctctctgattctcccaggtggagtcaggcacctcttcttggtggctccagtcccctgggatttcctgatcccagcccagaccactctaggctgtccctgtctaatgatgggtctgtctctcgtcaggctgcactggaggctccacgaaggcaggacctatctcgggtatgactgagggcaaagcccagcaagtgtctgttgaataaccaaatgaaaggtggggtgggggagtgtcccagatagagagtcctcacgtggatgcggcagccgtcatctacagggtaggagcccaggagcgcatcctcttgatccagcttgctgtagaacttgtcgtcaactccatacagctccagttccatgcaggaagcagggctgcccaccagcaactccagtttacactgtgaggaggaggcagggtgagaagaaggaggccacggaggccccgccccttgcatcaatgaccatcgccacgtcccttttcctccaaaagaccccccagtcaggacgcacggggccgcaatccagcccctcgcctcttgcccccgccctctggaccgtcggatttttcgctggacccggccctcatctctgcactctcgagttctctccggacccgccccgccgcgaccgggtccccagcctccgcagcctgggatcacctccgggcccgcccagtcactccccggcccctcccagcctcccccttccgggaaccccccaatttcttcgccccgcccctccggaccccgcccccatggccacaccttgaactcagcgatggtgaggctgcggctgtatcgcttctcggagcggaaggtgttgagggagctgctgatgaaaacggtcaccgtgggtgccgacacccccgtcacctccatcttgccgcgccctgcggatgcctgcagcgcggtccagccgcctcacacccgctccgcagccgccgccgccgctgctgctgctgggctatcagccccgcctcctgctccgtgcctgaccaatccgcgctctcctgccaggagcgtccgccaatcgccgccgtcccttccccaccgccaggaagagggctctccttactcttgggccagcccagccaatccagaggggccttccatagttcacggttcttccaatagcggcccgggaaaggaccagaacaggcggcgaagactgaagcccggaggtaggagtggcaagagctcgcccagtccgcgaagggtaaactcgcgcatgcgcactggccttcaaccaagccaagcgccttggcttctgtcctggatgctcagtgttttgcggtttacgatgcgcatcgttttcccggctctggcaccagatccatactattctgtaaactgaggcggcgatgcccaaaaattggaagcaattactctaagatatcaaaagattgaagcaagccatgaaacctctgcgcggagagagccgagcccgaggcggcggggagccagcacgtgtgcgcagctccgccctcttttggcgaagcacctaggcctggcccctcccgcgacctgtagcgcggcggagcaagcgcggaaggctgggagggctgcgcgggctgcgcgtcgccatggagcccgacgggacttacgagccgggcttcgtgggtattcgcttctgccaggaatggtgaggcggagggagcgggtgatgttagaaggcgggcgaggaatggctccagaactaacccctggcacctccccctccccacagtaacaacatgctgtaccccaaggaagacaaggagaaccgcattctgctctacgcggtgagcgccggggtcttccccggcaggtccacctgttcccagcgtggccccgccctgccccctgcctctgtgatcggactccctgttcgccctccgctgcacctcaagtgatcctgactctcatgtcctgcccatccccaaagagagtcctgtcgtcatatcctccgggatcaccctgccctctcctcccaatcttgtctggaatccttccgtgaccccctttcccccacactcgccctctcgtagtgccggaactgtgattaccagcaggaggccgacaacagctgcatctatgtcaacaagatcacgcacgaagtggagtgagtggcgggccctgagctgggggcgggggtgttggctctggaggctgggtctgagcgtaattttgcacccccgcgtccctgcagcgaactgacccagattatcgccgacgtgtcccaggaccccacgttgccgcggaccgaggaccacccgtgccaaaagtgagcgttcagctggtactggggaggtaaagtgaggctcgtctcctcactgggcgaagggaggagggaagggtgtgaagcctccggtgaccgagcccctaccctctcaggtgcggccacaaggaggctgtgttcttccagtcacacagtgcgcgggccgaggtaagtggcgcgagggctttctaagtatctggggcttgtttggtcctttctgggggcggggatatcaatgtgggtgaccctgcgcttcttggaactctgccgggcccttacctattggtgaagttctcttgcctgttcttttggggtaaggcgctgctgggtccaaatccttcctaaccatgcatcatttctgccaggacgccatgcgcctttactacgtgtgcacagccccacactgcggccaccgctggaccgagtgacctcctctctcccccgagtgtaataaacaccagattccatgcgtgagttttctgtgtttatttgcctcgtggggaggacgctggcacaccgtatcaggctgcgcggtgcagggcgcggtgctgtgcgtaggtgtcgggccgggagctggtgaagccgcagtcctcgcacacgtgcagcttctcgcggcgctcacggtaagcgtagctggccggctgtccatgcaccttagcaaggtgagcttccagggagcagcgctgcgtaaacgctttcccgcaagcactgcagcggaagggccggatccctgcacagatgggcgcagaggggagggctggacagagagggcaatgggctctggactaaagcgcccccaccctgctttccagtgttgagcatttctggtacctattccaagctcttcagactcttccgcccatgacccaccatctgctaccgtcacccagtgcagacatgggccagacacctgtgtctccactctccctcaccaggatgctccctcccctgggggatggagagggaggccttcccttgcctttcgatctggagcctgaatcgtataaccggcatccgtctgcactctgcattccgtgacaggcccctattttggtgccaccttacacccacccactggggtccgagagacatcatgtcttgattctccataccccacatacacaaaccatggacactccacagcccagcacctctctccatttccttccatccccacctggggcccagcaacttttc

SEQ ID NO: 1561148 - DNA, 4001 bp, Homo sapiens
atgccactgcacgccagcctgggagacagagcaagactctgtctcaaaaaaaataaaaaataaataaataaactccaccctgaagctaaattttctcttctgcaaaatggggataattacattatccttgtggtcttactttatggattcaattcatcattcaacaatgattcacagggctgggcgtggtggctcatgcctgtaatcccagcactttgcgaggctgaggtgggcagatcacttgaggtcaggagttcaagaccagcctggccaacatggtgaaaccccaactctacttaaaatacaaaattacaaaattagccaggcgtggtggtgcacacctgtaatcccagctacttgggaggctgaggcaggagaatagcttgaacccaggagacagaggttgcagtgagctgagatcacaccactgcattccggcctggggaacaagggcaaaactctgtctcgaacaaaacaaaacaaaaaacgattcacggactatcctccctgtcccaggcactattccaagtactggggacacagtagtgaattatagtgatcaaaatttccaccctcagggcactcgaatccagggagacagagagtaaataaaccagatgagagaaatccagagtgtgtcagaggagaattacttgtaaacacaaaaatctaaaataaagcaaagaaggggaaaggaatgaggtaaacgttaacactgaggccggtgaagacttcactagaatactgacactttaaattaagacaggaaggaagggtgaggcacgcaggcatatgacaaaagaaccattcaggcccaggatccagaggccgagctcacctggactgtgcaaggagcaatgtggctgctacagactgagtgaggtcgggagggaataaggacagaaaggggctgggcttggtggctcacgcctgtaatcccagcactttagtaggccaaggtgagctgatcacttgaggtcaggagttccagaccagcctggccaacatggcaaaaacccatctctactaaaaatacaaaaattagctgggtgggcacctgtaatcccagctactcgggaggctggggcacaaggatcacttgaacccaggaggtgaaggctgcagtgagcccgatagtgccactgcactccattccaggttgggtgacagagtgagactctgtctcaaaaaaagacagaaaggatgtactgagtggatgcacaaagagatcctgtgttctggtttctcccaagctgtccagcctggtcgctcactgtgacctacctcacattctaggcctctgtacaccctgctccctcctttccacctctttctcttaagtcaccctttcctcatccctcagctcagacatcccttcctccaggaagccctctctgattctcccaggtggagtcaggcacctcttcttggtggctccagtcccctgggatttcctgatcccagcccagaccactctaggctgtccctgtctaatgatgggtctgtctctcgtcaggctgcactggaggctccacgaaggcaggacctatctcgggtatgactgagggcaaagcccagcaagtgtctgttgaataaccaaatgaaaggtggggtgggggagtgtcccagatagagagtcctcacgtggatgcggcagccgtcatctacagggtaggagcccaggagcgcatcctcttgatccagcttgctgtagaacttgtcgtcaactccatacagctccagttccatgcaggaagcagggctgcccaccagcaactccagtttacactgtgaggaggaggcagggtgagaagaaggaggccacggaggccccgccccttgcatcaatgaccatcgccacgtcccttttcctccaaaagaccccccagtcaggacgcacggggccgcaatccagcccctcgcctcttgcccccgccctctggaccgtcggatttttcgctggacccggccctcatctctgcactctcgagttctctccggacccgccccgccgcgaccgggtccccagcctccgcagcctgggatcacctccgggcccgcccagtcactccccggcccctcccagcctcccccttccgggaaccccccaatttcttcgccccgcccctccggaccccgcccccatggccacaccttgaactcagcgatggtgaggctgcggctgtatcgcttctcggagcggaaggtgttgagggagctgctgatgaaaacggtcaccgtgggtgccgacacccccgtcacctccatcttgccgcgccctgcggatgcctgcagcgcggtccagccgcctcacacccgctccgcagccgccgccgccgctgctgctgctgggctatcagccccgcctcctgctccgtgcctgaccaatccgcgctctcctgccaggagcgtccgccaatcgccgccgtcccttccccaccgccaggaagagggctctccttactcttgggccagcccagccaatccagaggggccttccatagttcacggttcttccaatagcggcccgggaaaggaccagaacaggcggcgaagactgaagcccggaggtaggagtggcaagagctcgcccagtccgcgaagggtaaactcgcgcatgcgcactggccttcaaccaagccaagcgccttggcttctgtcctggatgctcagtgttttgcggtttacgatgcgcatcgttttcccggctctggcaccagatccatactattctgtaaactgaggcggcgatgcccaaaaattggaagcaattactctaagatatcaaaagattgaagcaagccatgaaacctctgcgcggagagagccgagcccgaggcggcggggagccagcacgtgtgcgcagctccgccctcttttggcgaagcacctaggcctggcccctcccgcgacctgtagcgcggcggagcaagcgcggaaggctgggagggctgcgcgggctgcgcgtcgccatggagcccgacgggacttacgagccgggcttcgtgggtattcgcttctgccaggaatggtgaggcggagggagcgggtgatgttagaaggcgggcgaggaatggctccagaactaacccctggcacctccccctccccacagtaacaacatgctgtaccccaaggaagacaaggagaaccgcattctgctctacgcggtgagcgccggggtcttccccggcaggtccacctgttcccagcgtggccccgccctgccccctgcctctgtgatcggactccctgttcgccctccgctgcacctcaagtgatcctgactctcatgtcctgcccatccccaaagagagtcctgtcgtcatatcctccgggatcaccctgccctctcctcccaatcttgtctggaatccttccgtgaccccctttcccccacactcgccctctcgtagtgccggaactgtgattaccagcaggaggccgacaacagctgcatctatgtcaacaagatcacgcacgaagtggagtgagtggcgggccctgagctgggggcgggggtgttggctctggaggctgggtctgagcgtaattttgcacccccgcgtccctgcagcgaactgacccagattatcgccgacgtgtcccaggaccccacgttgccgcggaccgaggaccacccgtgccaaaagtgagcgttcagctggtactggggaggtaaagtgaggctcgtctcctcactgggcgaagggaggagggaagggtgtgaagcctccggtgaccgagcccctaccctctcaggtgcggccacaaggaggctgtgttcttccagtcacacagtgcgcgggccgaggtaagtggcgcgagggctttctaagtatctggggcttgtttggtcctttctgggggcggggatatcaatgtgggtgaccctgcgcttcttggaactctgccgggcccttacctattggtgaagttctcttgcctgttcttttggggtaaggcgctgctgggtccaaatccttcctaaccatgcatca

SEQ ID NO: 1561149 - DNA, 4001 bp, Homo sapiens
ccgtgtcacccctgtcggccttggaccttggacccacagggcccttttgggactgaaacttcagggaccggccagaccctcccatgcctgctgtagatctgaacgctcatgggcgtggacccccacatggtagcggaggcagacacactccacaccctgatgggcccacctcccctcatcgcaaagctccatttccgagaacatttcctgtttgtgacaccaacagggtccccagcccacacagtgcagggcggggactcccccagccagccagactccggccagccttgttggggccctaagtcacatggccccctgtgagcctcgctttccccatctctctagtgggggctccccagggagcatgtacggagctccgtcacacaggggccagcagggaccagggggcgggacccgggaggtgcagctggtggttaatggtggaccacaagttacagtgattccaccaacatgcacctcaggccaccaccgtgtgtgcacactcgagacacacagacacagccagacacacacaggcagaaacacagcagacacacaggcagaaatgtgacagacagaaacacagcaggcagacgcacagacgtgcacagacacacacacagaaacatggcagacacacagacacacacacagatagaaacatgacagacacacaggcagaaatgtgacagaaacacagcagacagatgcacagacatgcacagacacacatacagaaacatggcagatacacagacacacacagatagacacacacagaaacaccacagacacacccagacagaaacatgacagacacacaggcagaaatgtgacagacagaaacacagtagacagacgcacaggcatgcacagacacacatacagaaacatggcaaatacatagacacatacagatagacacacacagatggaaacatgacagacacagacacacacaagcagaaacacaacagacacacagacacacgcagatagacacacacaagcagaaacacaacagacacacagccacacacagacacatacaggcagaaacacgacagacatagacacacacagatacacacataggcacacaggcagaaatgtgacagacacagacagaaaaacacagacacacaggcagaaacacaacaggtacatagatacagacagacacagaaagacacacagaagaacacacagtatttaacagtcacagactctcggcagaaacaaacacacggtcacacacacaaaaccaccacacacgcacagacacagacacacaaccagggccatgcatggttcactcccagagacaagatcacacacacagccgcacaaccacactcgatccctgccacacccagggcctgggccccctccccggctgcagccccctgagtctgggacccccattcacagccatgtggccccacagagaccagagagccccccggacagaatcagcctgggccgcacccagacccagccgcctgggcgcccagggcaggcctcagggcaccatgccacccgccgggccacacaggggacacctggcacctggccgctgtcaccgcgggctttgcgacacacccacagcagggcagggccagcgccggatgcgcccagcagcccgggctcacaccagagcagtgcatcccgccctaagccagcggggcgacctcaccttcagagacctcatctgcggggctcccacctggctggatcccgcgcccgggggtccgggcgccgtctggagctgagcaggcagatgtgcgggcgccgagggtggggcgagggctgggggcgggcagagggaggggaaggacgggctcgagcgggacctcccagggaaactgagtcagtctggctgtgaccaggggcgggcccagcagaggacccacacagatggagggcgtggcggcacaggacgccctggggtcgcggcctggaggggtccgcgggggctaagccgagctgggacgggtgggggccgctggcagcccgcggctcgctctctccgtccagtctctgtctcccgctgtctctcatcagccccgcccaccctgcgctggccacgcccctcgggcccgggcctggctgacttggagtcagtgggtgccccccgcacgccgggacaccctacagccttctggggaaggcggcgcccttgggacccccaggccaccggtggcagggatgcaatggcccgcgtaggggtggcaggggcgcttcctcgggagcctcagcccctccagccgcccagcgccctgccaggcctcttcccggcgctcccgccgccaggcccgcattattcaccatctgggcagcacccaaggcctggagggggcggggcaggtccaggcggatcggctcccgggggtcgcccagactccagggctccaaattcactgggtgcgctggaacgcggcacacagtagtagtatgccctgcttaatacatacaggacatatttgaggccccttccaggggtggggtgggaggacagagggatggggggtgcaccagacgacacagccagactgagaaaggtggtcccagagcaggtgagccgggagggctggggtgatggcatcgcatgggagggtctcttgaggaggctcggaggtggctttggagccagaggaggaacagtctggagccgggaggctgcagtgggggatgggcactctttcctggccaccccccagctcgggctggggaaggagggatggagcccaacaggaatggctgagaaggtgccggacgcagggactgggaccgtctctttgcagaggggggaccttgggcttccttggccttgtttgtacacccgagccggacagaaccttgagttagggacctggagtgggaccggacaagctgaccttgccctgactgcaccccaccccgtcccctgggcccgggagggctgctagtccaggctgtgagtgaggggtattcccagcctggcccggccctctcgtcagcccagtccggaagccccttccccggctaccccgcccactatccttcctcctcctggccttcggccacacccaacctccctcccaaagctctatcccattaagtcaccagccatttaacacaacttctctctttcctggcaaggaggctatccaactcctatggatgtggcaaaaccctggctccaaggctgctttcccgtgaagccgacctaatctccaagtcttactctccccaacccctctctgtgttcagcttatacagtgggacaattatgagctccaagtgagacctgaaaccaggcctgcccttcaggatgccctaggctggagaatgaactggacacaggctgttccagccccctggggtcagggctgggccaaaggaagagacagggcctagggaagcccagaggtgagctaggaagacatcttgtgaggagagggcatgggaagtggggttttgtaggatgaataggagctccccaggtctgggctacgtggcagtgacaggaattgcatgtataaagctttggaggcaagagagagcatgaggcccttgctacactaactgcaaggagggcagatgttgggggaggaggatgtggggctggggctccagatgagggggcagtgagagacggaggaaggctgtcctgtccccacttcctctgtcctcggccctgagataacaaggacaatgactcttctgggaaacagcctgggcagagttcagagaaggacacttgcatttagcttaagcctcaccacatctctgcaaggcagggggtaaagatactcttaaattttagagatggggaaactgaggcacaaagggggaacaatgccacgcccatgtgtgggattggaacatgagcactgggcttccctgtcatctggggctggttgctggtctcccggtcttggcccgccccccgccccccaccccccgccagcacttcgggttcaatgggagcacaggaggctctggtgggaggagttgtg

SEQ ID NO: 1561150 - DNA, 4001 bp, Homo sapiens
caggggctgcctctgcctccccgtcctggccagggaggtggaactccacctctgggtaaagcccgaggggggacgcccggagaggacgggcacctcgccgctcccagcctgtttcctcatctgggaacggctccgacccgggatggggagacgtgctgagtggcttgaggtgaggagtcaggtcctggggctgaacctgtgccccctccccccaaacgctggtctgttccagcccagcggtctgtgacttgtcagtttaacaaaaaacaacccaactgcacctcgggttactcagccagggaagcaaaaataaaacggggcttaaaaataccagcatggcccttccggagccttggcccctccggcccttgggctgtttttttccgcagggtggccggtgttgtttcagtttggggacttttgtttttgacagacctcagtggcctgtgcctcataggcgggagggttaaattcagactgaaagtgccctcccccaacctgtttcaaccccaaacgctgccactgggcatggggggggggggggagcagaatttaaggacatctgtagacaggccagaagaaacaaaccaaggtccctgggcttctccaggaacccataacacatggccccactgtaccagcaggcaaaccgaggccccgggcctttacagcacccgtcagcggccggtaccccagggggctccggcattccagcctcactgcacctgcctgaactgtgtgacttctgaggaccagcaccctctgagcctccgttcacccaggtggagaatgggccgtacagggacagatccaaccacctaagactctgaagaagccgccccgccctccccaccgggcctgcctgctccgcagtgataaccgtggcagtcacaatggtggcgctgctgtctgctcggtggcccatgaattcccactcaatcccaatccagcctcctcctggcccaagctcggcttctggcagcttaacttcagcacccacgtgtgactaattaaccacacagtcagtttcatgcccgcatcctctgcccaccaggggagtcccgtatggggcaggttgtgtctgccctgttcacggagggtggtccgctcagcactgggcaccccctcctttacttctttgaggaaggatcttactctatcgcccaggaaggagtgcagtggcgcaatcacagctcactgcagcctcaacctccagggctcaagtgattctccttgcctcagcctcccaagtagctgggaccacaggcatctaccaccactcctagctaattttttgagttttgttttgtctttttgagaaatggggcctcactatgtttcctgggctggacttggaactcctggcctcaagcgatcctcccgcctcagcctcccaaagtgctggaatgacaggtgggaaccactgtgcccagcccccctcccatttactgaaacagggtctccagggtctcactgtcaaccagactggagtgcagtgatcttttacttacttttaatttttgtatctacaatgaggtaagcgaccctgatcaggcccattttacagatcagaagatcaaggccgcattttgcttacccagccaagctgggggcccaggaccatgcccctgaggactcagtttccccatctgtaaagcagtaggctgtagaatgctgcgtccgggcaaaagccccatagcacacgtgctgccgtgcgctgtcagcctcctgccagagagcggcccactcccccagccccaccggggcctcccatccaaacagctgaggctccatcgctgaagtattcagcaaacactctcccctgaaaaccttcccgtgaactgtggaggcaaaggggtgtcgggggctgggcgggggtcctggctcaccatgctgaagtccaggaggtcactgagctccttgtctgtgcccacaggcgccatcctctgcggctggttcattctcctggggccagggcgggcacctcaggcctggaaaccctgcttggtggatgtggggacagatggacagggagaaacagggaggggagaagagttgtgagtggtcaaagcacagagtgctaaaagccacctaaaaaaccctcaaccgccctggggtctgagttccagcagagccctgggggcacggggagccctgggagcaggcgcagggaagctggaattccagagtctaggtccctgcagagtcctccccagagaccacagggagtctgaaaaatggggggagggtgtgcaaatataaactccctaactcccccagggaacaccagggcatcaagttgccaagtttaaactgcacgcagggcagccagaacctctcctttctccaactctctcatttccaaccaaccccgggcttcctctgaggccccctacccccgggaaagggaggaacagcccgatcctaccccgccccgagggaaatttggtgattcccccctcccccagcagatggcacagcccgttgaagaccaggtcgcccccaaattcaacatgaaggaaatccacaagtcagaaaaccacgaaactcttttacaagcttcaagacttaaagtgccgggggtgggggggacgcgcatcctatgcagggaccagcaaagctttcctccaccctcaatctccctccccccaagaaaaccccaacagtattcaggaaagaaaaaaaaaacagccctagattgctttactgtcgcgatgtatccgggaattatttttaagcaaaactttgacaacatcccttgcctgccctccatgagcggggagagcgtctcaagaccagggtgctcccgcgtggtcccagggggctccattctaagatgggggatgggggatccacctgccaagacccattccacccccagaaaaaggtacagagaaaaatttccattccaaagaaatgcactccaggcccctccagtctcgactttccccaggggtccccaggtggggacgggggcagcccgggagacacctccgaggctgggggtggggaggagcctccgaggtcgagggagacccaacttcagaagcagagaaatcccctctttgtctgccaactggaggccgggtgtgaagcgggcgccccagcgcagcccctcccccgctcagtttttttcttttttggagggcgtgtgaaactgactttttttgaggactacgaaaccgcacttttttgtggggtagctgaaaccgattttaagacagacttagttgggggggtggcgagctaaaacgggcattctacgggagctggaagacttctggggcgtcccaaggactttgagagacttggagaatgtttgaagccactttgcacggcgccgaaggcggggggcgcgctggaacgcctttttcccggggggaggcggcccgggaagccggacccccctccccccgcagccggtgcaggcggtgcggcccgggagcctttgaagctcgcagcgcggccgccgcctcgccccgcattaacgcggagcagatgttacccgcgcgcccccccccggcccgcccggccccgaccagcgcctgcagcgcgcggcaccttccccgcgcagacaaaaggacgtccctcccgcgcgctccccaccccaaactccggcgcccgggccgggcccccctctacccgagaaagggggcgccccggggtccccgtgcgcccgggctgggggggacggtcctcgcgcctaagttgcacagcccgtccggcgccccccgcgcccccgcccggggctgcttaaagtttcccgaagtgcccggcccgacgggggcgacgcgggcctggcgagctccgggctcctccacgtcgccgcccccccggcgccgcgcgaagttggagaacaatgactcccgggccgcggggcgccccccgacaccgcccccgccccaacttcctccgcgcccccccccaacaagcgcgcgcggggcgggccggggttccctgggcacaaagcacgggggtaccgggcgcgccccccgcccccc

SEQ ID NO: 1561151 - DNA, 4001 bp, Homo sapiens
gaggggagaagagttgtgagtggtcaaagcacagagtgctaaaagccacctaaaaaaccctcaaccgccctggggtctgagttccagcagagccctgggggcacggggagccctgggagcaggcgcagggaagctggaattccagagtctaggtccctgcagagtcctccccagagaccacagggagtctgaaaaatggggggagggtgtgcaaatataaactccctaactcccccagggaacaccagggcatcaagttgccaagtttaaactgcacgcagggcagccagaacctctcctttctccaactctctcatttccaaccaaccccgggcttcctctgaggccccctacccccgggaaagggaggaacagcccgatcctaccccgccccgagggaaatttggtgattcccccctcccccagcagatggcacagcccgttgaagaccaggtcgcccccaaattcaacatgaaggaaatccacaagtcagaaaaccacgaaactcttttacaagcttcaagacttaaagtgccgggggtgggggggacgcgcatcctatgcagggaccagcaaagctttcctccaccctcaatctccctccccccaagaaaaccccaacagtattcaggaaagaaaaaaaaaacagccctagattgctttactgtcgcgatgtatccgggaattatttttaagcaaaactttgacaacatcccttgcctgccctccatgagcggggagagcgtctcaagaccagggtgctcccgcgtggtcccagggggctccattctaagatgggggatgggggatccacctgccaagacccattccacccccagaaaaaggtacagagaaaaatttccattccaaagaaatgcactccaggcccctccagtctcgactttccccaggggtccccaggtggggacgggggcagcccgggagacacctccgaggctgggggtggggaggagcctccgaggtcgagggagacccaacttcagaagcagagaaatcccctctttgtctgccaactggaggccgggtgtgaagcgggcgccccagcgcagcccctcccccgctcagtttttttcttttttggagggcgtgtgaaactgactttttttgaggactacgaaaccgcacttttttgtggggtagctgaaaccgattttaagacagacttagttgggggggtggcgagctaaaacgggcattctacgggagctggaagacttctggggcgtcccaaggactttgagagacttggagaatgtttgaagccactttgcacggcgccgaaggcggggggcgcgctggaacgcctttttcccggggggaggcggcccgggaagccggacccccctccccccgcagccggtgcaggcggtgcggcccgggagcctttgaagctcgcagcgcggccgccgcctcgccccgcattaacgcggagcagatgttacccgcgcgcccccccccggcccgcccggccccgaccagcgcctgcagcgcgcggcaccttccccgcgcagacaaaaggacgtccctcccgcgcgctccccaccccaaactccggcgcccgggccgggcccccctctacccgagaaagggggcgccccggggtccccgtgcgcccgggctgggggggacggtcctcgcgcctaagttgcacagcccgtccggcgccccccgcgcccccgcccggggctgcttaaagtttcccgaagtgcccggcccgacgggggcgacgcgggcctggcgagctccgggctcctccacgtcgccgcccccccggcgccgcgcgaagttggagaacaatgactcccgggccgcggggcgccccccgacaccgcccccgccccaacttcctccgcgcccccccccaacaagcgcgcgcggggcgggccggggttccctgggcacaaagcacgggggtaccgggcgcgccccccgccccccgccgggctcacctgctgggcgcggccgggcacgcggcgcgtgggggggggcggcggcatgaagcgggggggcccccccccggacaaaggtgcgtcgcggccgggcccccgagggtcgcgcgtgggcggcggcggcggcgcgcgtggcccgggcccctcccacccccgcgtggcccgtcccgcggggcccgtgcgcgcggccggccggggcgcccctggggcagcggcgtgcgcggtgcccgcggtgcccgccgccgcgtcggctccggcccgctacgcccgcagccgccgccgctgcctcatcttcctgcggcgggagacatgttccgccccccgcccgcgccgccccgccccgccccgtgcaggccccgcccctgccccgcccccgagtgccccgcccggcggcccacgcggatccctccgccacctccgggcggctcgggcccgaacgccctagctcggcctctcgagcaccctcgtgaggaccccgaatcccgtgaggtccagagcctgggagcggggacgcgcagaggaggcggtcgggccacggcgcggggagaaatcacggactatccccgtccgcggaagcacacacgagctgtgcgcttagtccatgacgcaagcgagtaaggcccgtgagattgaaagctaaggcagagcagtctggtcaatcggaagccgcgaaagtctgatgggcggggatcctagccattcgtggtgaggccccgcctcctttcttctcggccccgcccctcagcagaggcgggactctgcgagcgagaggccgcgagaggcggccggggtgggtcctggagttttgttctcaggttggcgtggccgcccgcgcggagccttctgcttggttatatttgcgttcctcgggccggccccgcgtgctgagtggtgcgagcgggtatcacggccccgagggggctacgtcagacccattttcccggcgggaaaaccgactctggctccggctctgggtcagagagccccgcggggagtctcagcggtgcctttgccgacttgagtctccgtctcggcatctgtgaatttggacctgactttggacagaactcaggccagatctggcttcctgattcttagtagtccgtgtctacattttagtaaaaagtgaccccgcctaggatcgggcgccgtggctcctgcctgtgatcccagcgctttgaaggaggccgaggcgggaagatcgcttgaggccaggagttcgagaacagcctgaacaacatagtgaaaccccccccacccacacccgtctctaaaaatatttaaaataatttaaaataataatttaaaaagttgaccggacgcggtggcccacgcttgtattcccagcactttgggaggccaaggcgggcagatcacctgaagtcaggagttcgagacctctctggccaacacggtgaaaccccatctctactaaaaatacaaaaattagccgggcatggtggcgggcacctgtagtcctagctactcgggaggctgaggcagcagaatcgctttcacccgaaaggcggaggttgcaatgagccgagagcacgccattgtactccagcctgggcaacaaggacgaaactccgtctcaaaataaataaataaataagtaaaataaaataaaaatacaaaaattagctgggcgtggtggcatacacctataatctcagctactcgggaagctgaggcaggagaatcgcttaaacccaggaggcagaggttgcagtgagcagagatcgcagcactgcactccaggctgggcgacagaacgaggctccgtctcaaaaaaaaaagtaaaataactaaacaaataaatgaaaataacacaatctcccagggctccctggggccccaaagggaaatttacactccactcccagcctgggaagatgccaccatctcgctggcccgcttggctccagccatcctgccctctggatggtccagaacttgctaagctcatccccaccccgggcctctacgtttgctttgtcctctacctgggaggcttttcccacccctatc

SEQ ID NO: 1561152 - DNA, 4001 bp, Homo sapiens
atcgcgccactgcactccagcctgggtgactgagcaagactccttctcaaaataaaataaaataaaataaaataaaataaaataaaataaaataggccaggcacggtggctcacgcctgtaatcccagcactttgggaggcggaggcaggtggatcacctgaggtcaggagttcgagaacagccacgtggtgaaaccctgtctctactaaaaatacaaaaattagccaggtgtggtggcaggcacctgtaatcccagctactcgggaggctgaggcaggagaatcacttgaacccgggaagcggaggttgcagtgagctgaggtcacaccactgcactccagcctagacaacaagagcgaaactccatctcaaaaaaataaatgaataaataataaaataaaataaaacaatcccacaatctgctacgtccagctcctgggcccactgaagtgtgattttcaaagtatttagatttcctttctccaataacccatacccacccctctgctctggcctgtcaactccttcctccagcaacgctttccccttcaccaatgagccctcactggactccaagggggaaaagcaagggtccaggcgggcgtcccttccccgaggactagaacaacgcccacgcagagcccacgcggtgagcggatagggcaacagagactgggggcatgagggaagcccggacccatgggctggggctgcccgggccacccgaccctgtccaggcgccgagcctaagggccccgtggagtacggagagcggggccctggggacgccagtgtcgcttggcccgggtgatcgagcattcggaggagcaaccaattccgcgctcctccaggtgcatcccggagcacgccagggcccgtgaaacccgggctcatccgggttctaccccagctcccagcccggggtgccccctggtgggggcgcagggagggttcaggtgggggagggcggggtggggttggagtggaggtggggtgggctgcggctggggtgcaggtgggagtggagatggggtggtggtggggtgtgtggggctgagtgtggggggatgaaatgttggggtggaggtgtgagtgggggcggtgggaataaggatggggtggggacaggggcgagggtgtgactgtggggtgggcagcgataaggaaacgggtgggagctggggctagggtaggagttgggggtgtgtggggttgggagtgggatgggttggggtgggagtggggtgggagtgggggcgtggtgtggcggcatgggatatacggggttgggatgtgtgggagtgggatggagtgtgcagcagtgagatggggtgggggcatgtgtgagtgtgggggtggagctgggtgggagtgggtgtgggaggatgtgtgggttgggggaggagtgggcgtggggagtaggtgtgggctgagagggagtggacatgggggggatgcgtgggctgggaggagtgggtgtggagggatgtggaggctgggatggggggaggggtgggggctgtgtagggttggggtcgggggtgggaggctgtgcggggctgcggtgggtgtaggaagctgtgcggagctggggtgggggtgggaggctgtgcgcggctggggtgggggtgggggactgcgtgggtctggcgtgggtctggcttggcggcgctcaccttcagcaccaggagctggagcatcctcctggcgcccgagggcagatgggccccctcgccctggaagtcccctaccgtcgcgggtgaggctggctgcgtccgccccggccaggcccccgccgcgagtgcgttccttccctccacctttagcgcctgggccccccgcggcaggtgccccacactcctcgtccccaggagccctcgcggaccccggggtcggctcgaggcaatgcgctccgtcctggcagtaaccagcccctcgctgcgggatccctgcctgcctggcctcgggcctcccgcacccaccggatgcccgcgcacgctgagcaggccttgaggcgtcggagaccacgtggtccacccaacggcccaacaacgtaaggcacagcgccacgcggtggccaggaggactgacgcgcggaggccctgggaggcccggctaggggtcgcgtgattctctcttttgcagccagcaggactgccctgcaggccccagggacactcgcctgtcccccggagggacagaggggccgcgtgcggctgagtccgttggaaaccacctttgcaaaattgtaactgaggaaattgtgatggtgaaagaaatcagacctaatcaactccatcttgcctctaacctttaagctgtccttgtttattcctgggcggaagcccaactaaccttgggaaggaattcagtccatggtttgactctgaaacaaaattgataagagcctgtgaatcctgaaaatgtgagataggtctcagttcatttagaaagtttatttggccagcagagcgaggtggctcaggcctgtaatcccagcgctttgggaggcgaggggtgcggatcacctgataaggttaggagttggagactagcatcctcgacatggtgaaaccccgtctctactaaaaatagaaaaattagcctggcatggtggggagcgcctctaatcccagctacttgggaggctgagacaggagaatcgcttgaacccgggaggcagaggtttcagtgagctgagatcaggccactgcaccccagcctgggcgacagagtgagactctgtctcaaaaaacaaaacaaaacaaaaaattttgccaaggttgaggacaggcgcccctgacacaggaagtcctaacgacatttgctagacgtggtcgaggcacagcttgtgttaaagttggagggtgtccaggttcttggtgtcttgaagaaagaatttgacaaaaggcacacacaaagcaaggaaggaatgaagggttttattgaaaaagtacactccacagtgtgggagcaggcctgaacacagggactcaaaggcccggcagaatttctgtgaatttaaataccttctgcttggggtacgcccgatgtaaatgaagacggtgaagtaaagttacgaagtcatttactcggtgtatgccctatggagagggtatttccccttatagctgaagcgtgaatcggccttatgttccctacctccagaccctattttcctgcctcacttggtcttttacattttagggaggcatgagacaacaatccttgaatcagctcagtggatcagctgacaccacccacaccgataatctgcctcaaccagttctgccaaaccaaccaggaagagtaaatagcaagaaaaactccaacaacctctgattccatcttcaacctggccaatcagcactccccacttcccaagctcctacccgcccaattgtctttaaaaactctgttcctcaaatgctcggagagactgatttgagtaataataaaactccagtctcccacacagccggctctgcgtgaattactctttctccattgcaattccctgtcttgataaattggctctgtctaggcagcgggcaaggtgaacccattaggtggttacaagttcattattttatttttaaagagacaggatatggctctcttgcccaagctggagtgcagtggcacaatcatggctcactgcagccttgaattcctgggctcagttgatcctccatcttcagcctctcaagtagctgggactacaggcatgcaccaccacgcctggataattttttaatttttttgtagagatgggggtctcgctgtgttgcccaggctggtgttgaactcctgggctcaagccatccttccgcctcagccccctgagcagctaggattacaggcatgaaccaccacaccaggccctcagttggtccttgttgcctgctaaggggcccctgtcctcctgctttctctaggccagcctacaccccttaaacgctgtgagctggaagccttggtggtgaggaagagtcctgga

SEQ ID NO: 1561153 - DNA, 4001 bp, Homo sapiens
gctgaggatgggagtgttctcagagtttccagaggaactcaattgtgatgaagtcacaatgattaccctagagtaatgccgagggccatgaaggctaaaggttcgggtatgaattacgggttttaaagaagacaggaggcaaaagttagtggtggggaaggaaggtgtgggtgaaacttcccctgtcccaccccaagaacaggtggtaagatgtgagcagcagctgccagaaaagaagaggggccaagcaagactgaggggaggtctagagagagggggacagagacccagagagggagggggacagagacccagagaggggatggggacagagaccagcaagggggggggacagagacccagagagagaaggggacagagaccagagagagagggggacagagaccagtgaggtggggatagagacccagagacagagggggacagagaccagagagagaaggggacagagacccagtgaagggggggacagagaccagtgacggaggggacagagacccagagagagagggggacagagaccagagggagggggggacagagaccagagggagggggggacagagaccagagagggggacagagacccagagagagggacagagacccaaaaagagagggagacagagacccagggagagggggagacagagaccagaaagagggggacagagaccgggggggggggacagggaccagagagaggggtccagaggcccagagagggagacagagacccagagagagagggtgacagagacccagagagagggggacagagacccagagagagagggacagagacccagagagagaggggaccagagacccagagagagggggacacagactcagagagagggggacagaggctcagagagagggcaacagagacccagagaaagggagacggagacctagaaagggcagggacagagactcagggcagcagctgaggccgagaccaggagagacccacagaaccacaagctgggggacaggggcgccctgccatcagaagagccagaacaaagggcccaggcgtcccctcccccagcttcccacaacccccatcaggggaggggcttgccggccagggcgactcccctccggcaccgggccccgcccctcccctcccccgtgcgccgtgggctctgatccaactcaagttcccagtgactttccggaggccgggaacagggaaaactttttccaatacagtcagatcccgcctccccggaggctccatgtcctccacagctttcccaggaccccagagtccaggcccctattcccctcctcccgccgaccatagcagacaaagaccccagccaagcccagtggcgctgcggcgttcaggacccccgtaggccaaaatcccagcccagcccttccccatgtggccagacaaagggacggtggagccgggtaagaaaggtccccctaatttcccgccccagaccctaaacctccaaagaggcaagacttaagatccagaaagccccgtaacctcccctcggccaccccagaggccctcccttctccgtaagaaggaccaaatgccccccagattacacaaggggtccttctcactccaaagtgacaccgccgcagacgcacgccccacaccccgccagcgcccttggcccgcacccgctcctgcgcgcacgcccaaactcagacccagccgcaggcaccctaactccggccagagttcccactcctcactgaggctcggtcacgggagcaaattcgggcccccgggcaaaaagagggctgcgaaccattcagagacggtcccgcaaacgcacgcctcacctcctaagaagcaactccccaccccaactcacacaccccaaagcaggatccccgactcccgccggcgccttcctacctcccggcctggggctggggagccgcgggcgggcggggcgctgcgagggagaaagttgccgggagctttgtttgggaaaagtgggagggaccggaggggggggcgggcccggccggcggacagcgggaagggggatccgacggtgacagtttggggaaggatttttgctttgggagagattagtctatctcggggctggtaggaactcaggatttgggtgcttgggaaaggagggggattgggggttcggactccaagtcggagggaaaaggctgataggagccagaaacccctgatctgagggaggagaggctgggggctgggactcctgggtctgggggctgggactcctgggtctgggagaggaagcggctggagagagatatgggctcctaggtctgagaggggacggggctaggcgcctggaatcccggctaccctcgtgtttgtgtattgggggtgcggaagtgatacgaatacaaagagtctttactgttaagccctgaggttttttttctttttttctgtttggtttttggtttttttgttttttgttttttttgtttttttttttttttgaggattggggtctggggatgggttttgactgattcctatgacgacctggtttccttgtgacctcaccacagttaagagtcgtgggcaggaccaccgggagtttattggaggcccacgtaggtgcagattcctcatctacaggcgctagtggactggagacggctggcggctgtcccgggacggggaagagagctttggtgcctgagggaagatggcttagggcccggtcccttaagggtgaaaggctgcgtgttcaaaattacgggactagagggggcgggagtccggacctgaggtcctcagggaaaaggaagtctgattctgggttccttggaagatgaaatataagactggatttagggtttccggagacaacgggactttttagtggagcgggagcgggaaaaccagaagggacacggagaaaaggttccgaaacagatacacaattagagtgagagctaaaagggatgcttgtactccggtgtctccagtaggaggagcctaggactggaacttggggtgatgagggcaagatctgggacgcaggggcgtggtccagtgcaggggcgtggcccagtgcaggggcgtggctttcagccaaggggcgtggccattgcgattgggcgggactccgaaacgagggccgcaatcagagaacaccgccaggacttccaggacttggtctccaggactgaggtcaactgacgtgggcgtggtctgactgtgtgggcgtggccagggaatgaactcacggctctggcttaaggggtgtggtgaacgaaggatggggcgtggctgtgtcaccaagggcgtggtcatggagtagaggcccgggctcctgggtgaggccggcaagtttggagcgtggtcagacaataggggcgtggctacggctcgcggagcgcaaccaacgctctagaccagacctgggctcgagaccataactgtttggctttaacagtacgtgggcggccggaatccgggagtccggtgacccgggctgtggtctagcataaaggcggagcccagaagaaggggcggggtatgggagaaggtgaggattgagatctggtggtgaacgtgggcgaaagtgaggaaaagaccattggatgaggccgggtgctgtggcttacgcctgcaatcccaacactttgggaggcccaggtgggcggatcgcttgagatcaggagttcgagaccagcctgggcaatatgtcgaaaccctgtctctacaaaaaatacaaaaattagccgggcgtggaggcgcgcgcctgtggtcccagctacttcggggggctgaggtgggagaatcacctgagcccggggaggtcgaggctgcagtgagccgtgattgtgccactgtactccagcctggactacagagtctcggtctcaaaaaaaaaaaaaaaaaagcatatgagacagaacccagaagagccagacctgggagaagacggggcctggcaaggtggagggtgtgggagtagaagaaagaagcagtgggg

SEQ ID NO: 1561154 - DNA, 4001 bp, Homo sapiens
cgacctgaagattcaaagacggaacagagttagttagactttcaacagaacttccccacagcatggacaccagggaagaagaaagcagcatgggtccccaaaggtctgcagcaagtgggctgccggtcccctcagctacgtggaagccagactgcttgggttcaaatcccagctccatcacgcactggctctgtgcgaccataagcaaatcacttaacctagctgtgcctcagtttcctcatctgtgcaaatggtgatgctagctcctacttcagagtgctccataaaccttggttactgtcattattcatcagtgggggccagggcaaaagacagaagtagactcaccatacatcttgccttcatcagacaaaattattttccggcggccgcagggtggatagatggccagggcctcctggaagctctgctcaatgtctgggctccacaccccctctgcatccgggcccccgtcacccccagccccctcactgccgccggtaccctcctcactgccttcctcactgcccgtccagccgctgccatcgtccagggcggccccagcccggggttcccccatctgggcctggaggaacacagaactcagcaagcttcccccaaaccccaccctcaagggacttgaagctgagagggctgggactctggaccactgggtctgagggaggaggggctggggacctggactcctgggtctgagggaagaggagctggggggtattcctgggtctgagggaggaggatctggggcctgaactcctgagtctgagggaggaggggctggggcccggactcctaggactgagggaggaggatctggggcctggactcctgggtctgagggagcgggggctggaggcctggactcctgggtgtgagggagaaggggctggggtctggactcctgagtctgagggaggagaaggagctggatttcttggaaagctgaggatgggagtgttctcagagtttccagaggaactcaattgtgatgaagtcacaatgattaccctagagtaatgccgagggccatgaaggctaaaggttcgggtatgaattacgggttttaaagaagacaggaggcaaaagttagtggtggggaaggaaggtgtgggtgaaacttcccctgtcccaccccaagaacaggtggtaagatgtgagcagcagctgccagaaaagaagaggggccaagcaagactgaggggaggtctagagagagggggacagagacccagagagggagggggacagagacccagagaggggatggggacagagaccagcaagggggggggacagagacccagagagagaaggggacagagaccagagagagagggggacagagaccagtgaggtggggatagagacccagagacagagggggacagagaccagagagagaaggggacagagacccagtgaagggggggacagagaccagtgacggaggggacagagacccagagagagagggggacagagaccagagggagggggggacagagaccagagggagggggggacagagaccagagagggggacagagacccagagagagggacagagacccaaaaagagagggagacagagacccagggagagggggagacagagaccagaaagagggggacagagaccgggggggggggacagggaccagagagaggggtccagaggcccagagagggagacagagacccagagagagagggtgacagagacccagagagagggggacagagacccagagagagagggacagagacccagagagagaggggaccagagacccagagagagggggacacagactcagagagagggggacagaggctcagagagagggcaacagagacccagagaaagggagacggagacctagaaagggcagggacagagactcagggcagcagctgaggccgagaccaggagagacccacagaaccacaagctgggggacaggggcgccctgccatcagaagagccagaacaaagggcccaggcgtcccctcccccagcttcccacaacccccatcaggggaggggcttgccggccagggcgactcccctccggcaccgggccccgcccctcccctcccccgtgcgccgtgggctctgatccaactcaagttcccagtgactttccggaggccgggaacagggaaaactttttccaatacagtcagatcccgcctccccggaggctccatgtcctccacagctttcccaggaccccagagtccaggcccctattcccctcctcccgccgaccatagcagacaaagaccccagccaagcccagtggcgctgcggcgttcaggacccccgtaggccaaaatcccagcccagcccttccccatgtggccagacaaagggacggtggagccgggtaagaaaggtccccctaatttcccgccccagaccctaaacctccaaagaggcaagacttaagatccagaaagccccgtaacctcccctcggccaccccagaggccctcccttctccgtaagaaggaccaaatgccccccagattacacaaggggtccttctcactccaaagtgacaccgccgcagacgcacgccccacaccccgccagcgcccttggcccgcacccgctcctgcgcgcacgcccaaactcagacccagccgcaggcaccctaactccggccagagttcccactcctcactgaggctcggtcacgggagcaaattcgggcccccgggcaaaaagagggctgcgaaccattcagagacggtcccgcaaacgcacgcctcacctcctaagaagcaactccccaccccaactcacacaccccaaagcaggatccccgactcccgccggcgccttcctacctcccggcctggggctggggagccgcgggcgggcggggcgctgcgagggagaaagttgccgggagctttgtttgggaaaagtgggagggaccggaggggggggcgggcccggccggcggacagcgggaagggggatccgacggtgacagtttggggaaggatttttgctttgggagagattagtctatctcggggctggtaggaactcaggatttgggtgcttgggaaaggagggggattgggggttcggactccaagtcggagggaaaaggctgataggagccagaaacccctgatctgagggaggagaggctgggggctgggactcctgggtctgggggctgggactcctgggtctgggagaggaagcggctggagagagatatgggctcctaggtctgagaggggacggggctaggcgcctggaatcccggctaccctcgtgtttgtgtattgggggtgcggaagtgatacgaatacaaagagtctttactgttaagccctgaggttttttttctttttttctgtttggtttttggtttttttgttttttgttttttttgtttttttttttttttgaggattggggtctggggatgggttttgactgattcctatgacgacctggtttccttgtgacctcaccacagttaagagtcgtgggcaggaccaccgggagtttattggaggcccacgtaggtgcagattcctcatctacaggcgctagtggactggagacggctggcggctgtcccgggacggggaagagagctttggtgcctgagggaagatggcttagggcccggtcccttaagggtgaaaggctgcgtgttcaaaattacgggactagagggggcgggagtccggacctgaggtcctcagggaaaaggaagtctgattctgggttccttggaagatgaaatataagactggatttagggtttccggagacaacgggactttttagtggagcgggagcgggaaaaccagaagggacacggagaaaaggttccgaaacagatacacaattagagtgagagctaaaagggatgcttgtactccggtgtctccagtaggaggagcctaggactggaacttggggtgatgagggcaagatctgggac

SEQ ID NO: 1561155 - DNA, 4001 bp, Homo sapiens
gactgtaattccggctactcaggaggctggggcaggagaatcacttgaacccgggaggtggaggttgcggtgagccaagatcacgccattgcactccagcgtactcaacaagagcgaaactccgtctcaaaaaaaggcttcaaaggattgtgggtaaatttccaaaaatagtagcaataaagggggcaggaggcagaggtagtaatattcaacttgtcaataaaaacaaacagccgggcgcactagctcacacctgtaatcccagtactttgggaggccgaggagggcaaatcacttgaggtcaagagtttgaggccagcctggtcaacatggtgaaacccccatctctactaaaaatacaaaaaattagccgggcatggtggcggtcacctgtaatcccagctattcaggaggctgaggcaggagaatcgcttaaacccaggaggcggagtttgcagtaggccgagatcgcgccattgcactccagcccgggcaataagaccgaaactctgtctccaaaagaaaaaaaaaatccttctacgtatccaaggtacctagagtagtcaattcattaagacggaatggtggctgagtagaatggtggctgccagaggtggaggtggagaggaatggggagttagtatttaacgtctacagcttctgttttccaagatgcaaagagttctggagatgggtggtggtgatggttgcacaacaatgtgaatgttcttaatgccactgaactgcacacttaaaaatagtcaagatggtaaattttatgtgtattttgccagaattttttaaattggaggggaagtgagaaacaagaaatcgctcgacctgctatttttcatttgaggaccagcatggcatagtggctaggaactaagaccttggcgtcctgagttcccctatctgttttgcatttactaactaggggcctttgaacaagtcactttatatctctgagactttattcatccttacaaacaggaataataatagttcttatacaaggtaacagaatctcaccagcacaagagtaagcacttgctaaattgttattttgaattttaataacaaattttattatttgatgatagttacttaaaagtcagcaataattcagggataattggttgaattattaatattatattatcacctagggcgataagcacatcagaagacttcgttttaagggaaaaagagacccaagttaggagtcagaagacttgggcttcaagagtggctgtgggtgggtataagatttctccttggtgacacccaagggttgacgtagatgacctctttgataaccagaaagcaagatcagcttcgctgctctgcgaaagccagccgtggagctgcacctccctcaccgcctaagtctcccgggaacgtcccgggcgagggaaggggtccaaaggtcgtacacaagaatactgatagcaaagccccttcctacgctggtgacggcggcgtggcgcaagatttgtgcaagactccctcggattgggagcaagggtcccgcaccttcgtggctcccatgacaaagtctgcaactcagcccgctgggggagctgcaaggaacctgcaagcgtcccagcccctgcagagacccccaagaaaaagtacccccaaaacagcctgggttgcagatttataaatacttcctgcgcacatgcgcattggaatttacgagtggcccggggcgcaacgcttgcccactgcgcctgcgccgtctggctcttccttcggggcacaggaccagaaagtggggtcccgtggtcccgcaaagaaggaaaaagaatgggtcagcagtggccacacggcccctgtttctcgcttcttacctcgtaatgcttcatggctccctcccacggcggctactgctccgcggctgctgctgcctaactgcgcggcacagcacaggctccctacagcgctcgcaaccgcagcgatagactaaacgcggctctgcgtccgccccgcccctccaggccgcgcgcgccccgtcggccaatcagggcacgaggcgcccacgttcgcccctgctccttggggccggtccgaaccaagactaggactagcaccaggggattgaccaatcaacttgcgagaccaatcgaagggggcggaacgcctgtaggaggggctaaagagaaggggcttgaccatccaccaatccaaaggaggtctctgccccgcgcgtccctttgccacgccccctgatggcgtcgctgtggaaaccaaggtaagcgacggttaggccagacgcgggggcggggtaagaagttgagtgacaggcaaggcagcatccacatgacaggcggcgccgaaggggtaaattctgaggtgggcggcccccggggtacaccgggaacagcaggagagggctaggggctggggtcgcgggctgcggagtctggttggcgaggaggtcactatgggaggagactcttgagtgggagggaaggaaaggcgaaacggagtcgcgaaaagctccccatttgggaacccccaacctgcaagaaccttgagccccagccccattctggggtggcttcactgccgtttttaatgaaagccccgccccactttgtttttctgttttgttttgtttttgaaacaatctcgttctgtcccccagctggagtgcagtggcgcaatgacggctcacgcaacctccgcctcccgggttcaagcgattctcatgcctcagcctcccaagtagatgagattacaggcacccgccaccacgcccgactaatttttgtattttttttagtagagacggggtttccccatggttggccaggctggtcttgaactcctgacctcaggtgatcctcccgcctcagcctcccaaagtgctaggattacaggcctgagccaccccgcccggcccccctccacactttgctccgccctatggacaggggaactacattggtctctgcctgacgtccagaatcgtgtctagtggctccaatggggccactgagcccttgaaatggggctggtccaggccgggaacgatggctcacacctgtaatcctagcaccttgggaggccgaggggggcagatcacgaggtgaggagttcgagaccagcctggcagatatggtgaaacctcatcgctactaaaaatacaaaaattagccgggcgtggtggtacacacctgtagtcccagctaatcaggaggctgaggcagaagaattgcttgaacccgggaggcggaggttgcagtgagccaagatctcgccactacactccagcctgagcaacagaccgtctcaaaaaaaaaaaaagaaaaaagaaaaagaaatgggactggtccaaattgagatgtgctgtaaatgaaaaacacataaatttctggccaggcacggtggctcacacctgtaatcccagcacttcgggaggccaagacaggcagatcacatgaggtcaggaattcaagaccagcctggacaacgtggtgaaaccctgtctctactaaaaatacaaaaattagccaggtgtaatggtgggcacctgtaatcccagctactagggaggctgagaatcgcttgaacccgggaggtggaggttgcagtgagccaagatcgcaccactgcactccagcctgggcgacagagtgagattctgtctcaaaaaaaaaagaaaaaaaaagaaaagacttttgacagacaaaggaacaggcagtacctggcacacttcttcacctcctctccttactcttgtttccagatcctgcccctgagctttcatgagctgttgaaccatctggaattcacaggcctgtcatgagagacacgatgagaagtccttaaaggtagatcactgattcacaggggagcaggcggaggcaagggtgagtcagtgcttggaactcagtcatccagatttggctctggaaacttctgaagctgtagcctttggggatccctgactgcgagtacaggaagccaacgctatgtggtcttctggaaac

SEQ ID NO: 1561156 - DNA, 4001 bp, Homo sapiens
tttttgtatttttagtagagacaggttttcaccatgttggccaagctggtcccaaacccctgacctcaggcgatccacctcacccagcctgtcttattgcttaataaacacaaaacccagtttacactccaggcttcactggtatctcgctgctctgagcagtgtttagatcccaatgaacaattcagaaacataaaattacttgaactgtgaggtactttggggtatggaccacttaggctaagccaagtcagaatgcaaagggaggccatacacaagctctttatggagtttctcttagtacctatctcccccacttccagggtacctgtggtctcactgaactcccaaaactgagacaggctgtctttgtcattacagaaggaatcctcacagtagttactgtaggaggtcacgatcaggccgggaggtgaagagtgctggacaattgttatggcctcctccccttccgggatgcagcccttcgtggccaaaatggctgtctcagtccctgttatgagacaggaaggaggggaaatggatggtggccgtcacaattggcctggacgaagggaacaagcattggcatggagataatcaacctccctcctacccagcccaaatgccccatctcatttcacctgctttaattattagtatggtttcctggcaaagtgcccctttgtcacaagtctccacttcctctgtggtccagttaaacatattggctggatctgcttccacagtcatggacagacccttttgacaatacagctctaggcccgctgaggagaaaacaagaaaaggataagcacttctccatgggccaaggcggctcccttttcatcatcagtccaccttctgtgacacacggctctcccctatgtcccccatacgcacaggtcaggagggaggctcctaggaccaggaggatcagcaaatgctggatacgaggggttcccatggcttcttctggagaggtctgggaggagctggtctggatctgtgaatttgatggagagaaggcaattaacttttcagccagagtgcatgagatcaaatctaggtcctggcaagtactgacttcagggtggggtgttttaatctgcattttttttttttttgagacggagtcttgcactgtcgcccaggctggagtgcagtggcgcaatctcggctcactgcctctgcctatcaggttcaagcaattctcctgcctcagcctcccgagtagccgggattacaggtgcccgccaccacacccagtgaattttttgtatttttagtagagatgacgtttcaccatgttggtcaggctggtctcgaactcctgatctcaggtgatctgcccgcctcgtccccccatagtgctgggattccaggagtgagccctgatgcccggcctcacagtggggtttatggtgtatatgaccacgacttctaaagtcgttctgtccctaaccggcttgtgagctggagcgagttcacaggtttatcacgccccagtttttcatggttttaattctcaggcccggccacccagtgccctccaacttcaggatcaggagtgtggccctgaaggccgcttctccctcagtctcaggggtcccttacattctctcagggacccagaatctcggcccccagccccagccccagcctcatcagaacccgggattctgagagcccagccccgtcctatgtagggatcgaggagtctgggttccaaccaccttttcctgcgggacacaccattctggtcccctccctctcaggcccgggagcccaggcccccaaccctcgttcccctcagagccaggatctgggtccccagccttctctttcctcagaatccaggaatctgagtccctagccttctttttctctttaaagaagcaaaattgctgccggcttccaggcagacgcctcacaagaatctcacgacgccaaagttgaggcccggaacgccttctccccgggcttggcattctcttacgacgcaaggccgggccagcctggccacacagcactcgaaaccccattggtggatgcaaaagcatcggataagttcattggatgagcctggaggaacgcggcacctcattggccacagagaagtcaattcctggcaatctcggagggtgcgcatgctcggaaggtgagtggcgggcaaaccggccggaagatcctgcctgtttttgcagccagaggcacgcaatggagggtgggcagtgcgttgccagatggcctcgcctggcccatttctctttttgcactctgttgtctctgcttctccagccacactaggaggtcagacccttggccctcactcacggaacttatctccctacccaaatggcctctcatgttcccagcctggcccctgcctcggcacccaccttagtggccctagcctctgggagtcagcttggcctcttgagtcttcacttgcagtggcccctgtgcagcccaggcgtcttcatctgattgcgctatcgcaccagcctcctcatggtctcctggagggttgaatctaggaatgcccccctcagcatcactttgggcaccccgaatgcatgcatgagcagtagctatgatggcacaggctgctgtcagatcgaacccacgcgtccgtgtcaggaccatgaagaagacatgtcactcggatttgttgctcatggctggcagttcactttcacatctatgtaaccttcccttccctcccctcccctcccttcccctccccttcccttccctttttgacagacttttgctctttttgcccaggctggagtgcaatggcacaatcttggctccctgcaacctcctcctcctgggttcaagtgattctcctaccacagcctcccaggtagctgggattacaggcataagctaccatgcctggctaattttttgtattttttttttggagacagagcctctctctatcccccaggctggagtgcagtgacgtgatctcagctcactgcaacctccctctcccaggttcaagcgattctcatgcctcagtctcccctgagcagctaggattacaggcacctgccaccacacctggctaatttttgtatttttagtagagacggggtttcgccgtgttgaccaggctggtcttgaactcctaacctcaggtgatctgcccacctcggcctcccagagtactgggattacagacgtgagccaccacccctggcctatgtaagctttccaggtgtgacatgaagttgtagcaggatgagctgcagacaaaactcctcagatactggattaaagaaggaagaggtttatttggccgggagcctcagcagacttgcgtcttaagagccgagctccctgaaaaataaattcttggcctttttttttttttttggagtctccctctgttgcccaggctggagtgcagtggtgcaatctcggctcactgcaagctctgcctcccgacttcatgccattctcctgcctccgcctcccgagtagctgggactacagtcacccaccaccacacccggctaatttttttgtatttttagtagagatggggtttcactgtgttagccaggatggtctcgatctcctgacctcgtgatccgcccgccccccaaagtgctgggattacaggcatgagccaccacgcctggccaattcttggcctttttaaaggcttacaacttcgaggggtccacatgaaagggtcgtgataaatcgagcaagcgtgggaaacgtgactgggggctacatgcatcaggtaacagaacagaaagttttgcaatgctttttcatataatgtctggaacttacagataacacaagtagtttaggtcaggggttgctgttattattattactttttttaactcctagggctgggtggtggtgccaaggttgactggctatttatcttacttctgtttctttccaactttttgctttctctctttcctcctgtcttgtgaactaggcaaggtcgggggaggagggcagca

SEQ ID NO: 1561157 - DNA, 4001 bp, Homo sapiens
cctgtagtctcagctactcaggaggctgaggcaggagaatcggttgaacccgggaggtgaaggttgcagtgagccgagatcacgccattgcattccagcatgggtgagagagtgagaactcttctcaaaaaaaaaaaaaaaaaaaaaaaaagaaaaaaaaagaaaagaaaagagaagaaaagaaaaaagtcattaaaatggtgaattctatgttatatatattttaccataatttacaataattcctattgttttgcataaaacagctgtagaaagctttgcaggtcatgaacagcacagctggctactgggtctggcgtggggctaggacctgggtgcatagggaacagggatgagacacaggctcttcatgcctgcacacatacacagatacacacggatgcaaatttctgagccatctaaatacaacacctattcaaaaaattaaacagaaaaaggaaatgtaatggagctgaaggatgagggtaggtggggtggttgctcaggaggacagtggaggccacatcacccaaccttcgaggcctctcttagcagctggagcacatcccagggacttgggagctctggaaacagaagcaggagagggccatggccggaggaggcctgaaaaagatcatctctgccacagagaagaagctggctcggatgctgctggccccagtggagacagggagacccggggagacaactgtattcattcaaggaggaatgggtggtggtgcaaacttaggtggaggccacagggtgcagaagacaggacacagcagagagagatgtaggacatggaagggacataaaggagtgaccactggacataaaggggcaaggaagtggaagcatgagaacatctgctaggcatccggctgaggggtcgggtgcccagggtgcccttccctaagggagaacccagcacaggaacagattcagagaaaaccgcccagctcactccagcaagaagcagaaaagggactggttaaaggacagggtaggaaggtcaccaagctccaagggccctcatgaagccagcttggaggccacagggcccagggcaaggaccaaaccacaggcacaggacagctccggtcaagatcttctggctactgcaggaggcagaaaccacaccctgcaccctgcactgctgaggctggccctggagtccagaagcttctgtccccgatccccactcaaaaaattaaaacaaaaacaaaaagcaaatcggtgccatgcaccctctgcttcctggtgctgttcgggatcctgagtctttcacgggagcacctgatggggaaagcctggacccgtgtctgtgtccctcctgcaaagagtgctgggaaaatgaactttccggcttcctccttgggaagacagaacattccccatgtgtactggtggcatttaaaaactgcactgcagccagagaatatgtaccgtgttccacctggagagttcccggcgggaagtcctggtgcagatgcccgtcccaaggtgggtatttgagctgaggaactgagaagccggtttctgcctagagttagagatccgagaggcatcagcacatggaagggagggaagctacgatgcctcgagggtgggagatcagatgaaccaggagaggcagggcccgggaggaaccccggggagcagccgcctttaaagcctgggggaagtagcttcagagaaggtggggtaggttgggtgggggttgctggaaaaatatgattaagaaacaaatttctgctcagcccagaaacccccctcacatccatagaagtaaaagaaacttgtcttatgactgagtaagcattaagccaaaatgtgatacaatctgctaagagatgacaaagacagaaagaaatcccacctttgtatccagccaagcaggtgcaacccgttacacacatggtctccagatacacggtgactcgttcccagttgagaggactcaacggcaccatttgtcacacatagttcatcctaaattcacccagtaactgtgttgattctctgtgtggttaattggctttatccacaggaaaaacaaacctctcttatctatgacaggaggtagttttgcaactgggagtgagatgcccccagaactgaggttccttccttctcacagaaactgggagacaggggcgctttctgcccggatgcctgcctttcaaagagagggctcctatggccttgaggaggacagttctgggttgtgaggcaggcaagatgcttatgtatgctttagaaagctttacatacatcttcaagggacagagaaagaattttcaattacacctcttctaaaaaataaatgctctcaaagtccagcctaggcaacatagcaagatcctatctccacacacacaataacaataatcaatttgctgggcatagtggggtatatgcgtgtagtcccagctactcaggaggctaaggagggaggatcacctgagcccaggaggttaaggctgcagtaagcttggatggcaccactgcactccagcctgggtgacagagggagactctatcaatgaatgaatgaatgaatgaatgaatgaatgaagagaaaatgatctgagtgaaaagaggagagtctctatctttttgcaacaggctaaacaaaatttttaaaaatgtatatttgcctcacagagattattccaggaaaagaagtggccctcagcgtcaaaggatgcaaaactaacctgtgagttcctggcaggtttagcaataaagcaggatgttgctgatctcagtacaagcaatgttagagaaaggggaagatggaagtggacatggatgagtgagtggaaggcgacaaatggaagcaaagaaacgtatccagaccattgaagatgcttgagcgagaagaaagaggcggtggagggaatggaatccggaggaagtcatttgttgcaataagaggcctcagagcacgtgtagggtgcggggcagagcccatgcagaggggctgtggaaggctggtagggtgcaggtggccccactctccatcaccctgaggagtatgtggtcagagttaaagctcagtctgtttctgggatcaggtaagaggtcagtgtccagagaagagaggtggatcttcagatcctgcagacctccaccgcgccctctgtccctcttgactgctttttctccatctccattgtctggctcacattcctgtcacgtcttcctttctccctacccctcttttctcttttctcctctctttttcttaacccttgtacctttggaagtcccactaatagaatttaaacagcttttcaagttggttttttgttcccagaaattgactttagactctccatgaataatgtggaaatcaaacgagtataagctggttcatgtctctgcaattaaacaaataaaatctacattccaatgtttcttcttccagagtagcccacatttgtttttttttttttttaattactgtcacttgcgatagatttttaaatcttgtaacctggttacacaaataccatggggccaaagactgacttcctgtgagaggaaaccaggcttgactagcctcatgctggctttgaagaagtaaaatcaggggttgatgaatttacatagggtaaatatcaaaggtcgaaagtcaacaataggtggtagagggaataccccaaattacaaaagaacaaactgtttaagccacaacagaattatcgtagaaataaaccacggtccttcctgctaaaatattccacttagaattgtaaaatattcttctcaataactcctggaagagcctattaagaaattaaagaggccgggcgtggtggctcacacctctaattccagcactttggaaggccgagacaggcagatcacttgagtttaggagtttgagaccagcctggccaatatggtgaaaccccgtctctactaaaaaatacaaaaattgcccaggcgtggtggcagtcgcctgtaatcccagctactcgggaggctga

SEQ ID NO: 1561158 - DNA, 4001 bp, Homo sapiens
ctgtttaatcctcattgattgattgattgattttgagacggagtctcactctgtcacccaggctggagtacagcagcatgatcttggctcactgcaacctccgccttccgggttcaagcaattctcatgcctcagcctccctagtagctgcgactacaggtgcgcaccaccacacctggctaatttttttgtattttagtagagatggggtttcaccatgttggccaggctggtctcgaactcctaacctcaggtgatccgcctgcctcagcctcccagtgctaggattacaagcgtgagccaccatgcccagcccatccttattctcagcaaggaggctattgcagtcattcagcccagacagctggagtttgcaatggcagccatagggatggaggagaggagaagggtccagagacactcaagaggcggaatgaatgagtcgagaggagtgaatcctggcaggggtatgggagatgtgaagagcttgggctttcacctgtgagcggtgccacgcattgagaggcccccgggagacatcagagaacccatctgcgttgtcagggaagctccacgggagatggcccttccaggggcccggcacagggccagacacataatgcatgctaaatgactgaatatataagctaaatgactgaatatatcagcaagccaagaaaggctgggcatgtggaaaggcagagattgcggggggcggtagtttaggccaggggaccccaaaaccgggggatccgcactcacctacctgctcgatctcccggcagcgccgacctagtgcctggtactttctgcgatttaattcccgctggcgccgccgccgaccccgggctgcctcttcctcttcatctcgctcccggagccctgagccgcccagaccacctgacacaaactccacttccgtctccagctcgctctccaggatgtggccaccaaataggggaggcaacgccaactctgagcctggcggcgctgagaactcctcaaagcccacggctgccatggtcctgagaggcagggaaaggctcaggggccctggatcctggacccccagccccttctcccactgaaccaggagcccagaccccaacccctcctccctgagatcctagaatccaggcccccagcccctcctccctcagaccgtagaatccagctcccagccctcctccctcagacccagaagtccaagtccgcaacccacccttcgcagcacccacagggttcaagccctgaccccctcctcccaggatgcaagagtccagacctccagactttttctctccaaggacccagggagtccaagccccaaccctcaaccagacgcaagagtcctggcttccaacctcctagtctgtcagatccagcagtccaaacccctaaccttctcctccctcaggatgaccccagtccataaaagggttctaaggtaaagcagttgcatgaactacaacccccatcagacctcagcgtaaaagctcatatggttgcacacaatgcagctgcactgttttctgggattcgcactttttcacaagggctcagccacatacccttctctctgctccaattccatctccgcgacctccggaagccccgggcctcagagcttccgacctcttcaatctgtaggttaagccgttcgcaaaactacttgtcccatcaggctcagcagccgaggacggcgggacgtggccctaggccttgtgggagttgtagtttcctgtttccggcttcgcttcggcccacccccacgtccaccccgaatccctgcttaaaggccttgctttcttgtctaacgccgcaaccagtcctctgagttgccaacgtctttcttcttgtctcgacgccccgtcgtccggccacagcgattctctgcttagcaggatcggtccacagcgggacgtgagtccctttcctcctcgcggcttaccgcctctctccgcctagtgccaggtgctaataaagttgttgtttcaaatgcggccaggaacatcgcgagcggggaccaatcagagagtagctttgcctctataacggcgcgagagtgagacgtcatcggtgagcgactaacgctagaaacagtggtgcgcggagaggagaggtgagtgtgatggggaccacggggagcgggaggctgggctcctgggtctgggagaagaagtgtgtgaggaaaaaggcgggtctttacagcttggtttttgtttttttgttgtttgtttgttttgagacggagtctcgttctgttgcccaggttggagagcagtggcgcgatctcggctcattgcaacctccgtctcccgggttcaaacgattcttctgcctcagcctccagagtagctgggattacaggcgcccgccaccacccctgactaatttttgtatttttagtagagacggggtttccccatgttggtcaggctggtctcgaactcctgatctcgtgatccgcccgcctcggcctcccaaagtgctgtgattacaggcatgatccaccgcgcctggccagttgtttgtttgttttgtctgagacggagtttcgctcttgttgcccaggctggagtgcagtggcgcgatctcggttcactgcaacctccgcctcccggattcaagcgattctcctgcctcagcctcccgagtagctgggattacaggcgcgcaccaccacgcccggctagttttttgtatttttagtagagacggggtttcactatgttggccaggctggtctccaactcctgacctcagatgatccacccgcctgggcctcccaaagtgctgggattacaggcatgagccaccgctcccggccttttacagcctgtttacccaaaagtcttaatatgcgcctaccatggtgtggccctggggatgtggaaggagcaaaaattgttcgctaccctcttagagctttggttgatgcctggcagacaggctttatcaaataattacttcattaatcacaaatgtgtgaagtgccttactgtagacacgcagagcgtgcgggacacgttatcacaaagcaacctcctgtagtctagagtggggcgtgtgggtcagggaggtggaacgtgagagctgaaggctgaggagatgctgggctactaagaagtgaggagagccagacgccatggctcactcctgtaatcccagcactttgggtggcccaggcgaaaggatcgcttgagcccaggagtttgagaccagcctgagcaacacagtgagaccctgtctctacagaaaaatttaaaaattagccgggcgtgctggtgcgtgcctgtcatctcagctatcgggaggctgaggcgggagaatcgcttgagcccaggtgatcgaggctgccgtgagctatgatggcgccactgcactgcagcctaggtgacagagcaagacatggtctcaaaaaaaagaaaagaaaagaaaaaacaaagtgaaggaaagggccactttagttacaagggactcctgtacaaagacctggaggcgggaagagaccgataatgtaaccaactcaagtttctgctactcagaggcagaggaagtggggggtggtgaaagtaaagcagctttactgatcaaatgctcgcagatgagaaatggccaagctaatgtctttagaagaccatttcaagctttaggctggggagaggggcttaaaaaggggaactttgaatgggaggcatacaggagtggtgctgggtacaaggtatgtgtgtcttgctccgaaggctgtcttgagtcacgggccacctggagcatgggctggtgtcaagtcaacaatggccacgttgtagattgatcgccttgaggtgatctctggagttttgcagctgggtttccatacctagtttgtttcaagattagcccctgcggcgaggcgcggtggcttacgcctgtaatcccaacagtttgggaggccaaggtgggtcgctcacttgaggtcaagagttcaagaccagcctggcttacatagtgaaaccttg

SEQ ID NO: 1561159 - DNA, 4001 bp, Homo sapiens
gctgggctccccactctgtccctcacgtccctgtgtgaaacaccgaggacacctctgcatcccgggcgccctcccgagtctccgctcctctcccgcttgcctcctccttccaataacctcccgtccctttctccccacatttatcacacgcacctctgtttctctttctacgactctcccccacccccgcatcccgcgtgttcctggcagcctctggaagtgggtccgctctcactttcctggcaccctctggggttgccttcatctagcttttctgtccttcttgaatctttccacctcaggacccccaagctctgggtcaactttctccagcgcctctcctttcccaaatgctggggtcttcgcttctcccacaccaggctcccttctctgcacctggcaccccacgacccccccccccattcaacgcgtcctggaagagggagccttctaccctccccctattgcttgtctccctctaggggactgcccccacgaccccgcatgtttctgtcgcactctagaagcggtccacttcgctatctcctcctctccaagaccagacacctgggtggtagggggctcagtgccatcctctttcggacacccccctcccaccatcacacgttccctttgccccggggtgtcctcttcctccagccagtttcttctgccagtcacttcctacccgtggccccggcactccggcgccccctgggggcccccctcccggctcccctgcccctccgagctcaccgttgtgggtttccaccattagcacgcgggtgacctccttggcgtagtagtcggcctcaggctcgggctccggttctgcactctccccggccacccggtcgcgggtgctgttgtacagggcgagcacggcctcgggcagcgggccgggcggcacctccccctggctcggggggctggcgagccgcagcttggacaggatctggccgcggatggcctcgatgcgcttccgcttcaccagctccatgtcgatagtcttgcaggtggatagtcccgcggccggccggccaggcgtcagcaccagtagccacagcagcggtagcagcagcggcagcagccgcagcccggagggcggcatgggggaggcggcgccccccggcactgccgagagcgcgaacagggctggtgtggtggggaggccccgcccctgcaggggctgggggtctcccggcaaaaggtaggagggcctcgagggaaagctgaggtcctcagggagaagggcgcagtggtggaggggaggcttggaccgggggtgtctcagtatcccacggaaataacctagatgggcgcgatctggtaccagaaggtgggtggtcttgaataggggatctgtggcaggtcggagagagatccgtctcctggaggagaaagggtctaggatgcgcgggggctcaggagacaggccggggatgaaggcggcgtgcagggggtgcgcccgaggtctggggaaaagtctttgcgggaggccgggtcggcgactcccgagggctggtccggaatgggggcgcctgagggacgccgtgtagggggcagggagggagcaagcgtccccggcggcaaagggaggcggtctggggtccccaagtcctgcctcctcgcggggcagcgtcgcgccaagaggtccccgcgcctccggctcccagcggcaacggaaaagtctcaaaagtttttttcctcttctcccgaccagctcgtccctcctcccgctcctcctccccctcctccccgcagtggcgggggcggcggcggctcgtctcagactctggggcctcaggctgctcctcggcgactccttcctccgctccgggccgaggccggccccgcgggcggctcagagccgggggggtgccccggacggggcgtcccccctgcccccggccggggccctcgctgtctggctgctccgcggagggaggtgggagggagatggcccagggcgcgaagggcggcggcggcggggaccggctgggtcggcagggggttttgaagccgcccccggccccacccaggaagcgcacggggcgggagcgggggcggcccccagggggagggcatgggggggctgggccaccgtcctcatctcgcgtgggcgggctccgaggggggtcccttcagccctgggggaaagggggcgggcaccccggctccgccccgcaaacagggtgctgcctcctggcggccaagcgccaccaaagcgggtgatccagatgcgctgtggctttgcgggcggtgtgggtcaccagagaaagaggaccaggcggagaaggcttaatccgggggatgagacacaggggagccgaccagaggagggggacccagaacggaaggagagtcaggctgggaaacaaggtaggagaagagggtctgtcaacatgggggcctccggagggtgtcagtgggaggagggggcaacaggacacctgaaggatggaagggtcaggaggcagacacctgtaagaattgctctcctttactgagcacctcccatgtggctaagcagcctcctgtcactcaacaccctgcgaccccatacatttactgtccccaatttacagatagggaaactgggcccagagggaccccgaggtcctagaaaggacagaagcggtgccatgccttagctggggtcagctctgacagtctctagagtctgtgctcttgaccactgtgccatcctcccccatcactgggtgtccggggtgtggatggtggtgacgttggaggcagagtccctcagcactccacgccgtagcggtcgaagttgcggagcagcaggccgatctccaggtgcacggtgccaccagcagctgtgtgcaggcgatagcggtcggccccactgtagatggtgtccccatgcagcagctgcggcccaccacccacgaaagcccgtgccaactgttctcgccaactgcccaggggccgccacgtggggcaggccagctggtgggtgcccgggctactgggcacatggcaaaatccatagcctgcaagctggcagcggccaaagctgtcctgggaccacacctggaaatggagccggggccagcctgcaggaaaggagagagaggggaaaggagggatgggtggggaccagactcctgctgattccccactccctgatactcactggagaccccaggcccagtcttttcctctctgggtttctgtcccagagtttccaacccagcctcctttctaggctcccaccgtcttatctatccccacacagcagccaaagtgatctttccaaatccatgttactcccctgctaaggatccttccatagctccccagtgccctcagtataaagtccaacctcttcaacattcaaggcccttctaatcagacctctgctgaatttcctctctgtgttatcctcctccatgaccccatgtcagggcagcccattgctcctccagtccccaggtaaccatcatgggccttgtcagggacacctcctgccttccctcatgtccctgccctgctctctttgggcccagggccttctttcttgcccctctctaatccaccttccacctggcatctggaagcatctttctctccttccatagctttgcccatgtcctcagaacacagttcagctcctcagtctggtagtcaaagcccttggagatccagccccatctcatctcatgctgatcccttctcctgtgctagactctgttctagctagctggggacacggcagacatgaacatggatggcagacaaaaattcctgcccccgtgaagctgatatcctagacaacgaatgtagtaaataagcaaattatagggtagatcagatggtggtaattgctgtgagggaaaacagagctgggtagggtgagggtggggataccgctttagcaagaaggggatcaaggaagcttcattaagaaggtgacatttgagcaaatgctaaaaggaaggaagggagtaggccatgtggccatctagaggaagagt

SEQ ID NO: 1561160 - DNA, 4001 bp, Homo sapiens
ctccacctccatacctaccttcctcactgggacctcctgggctggggaccgctgggcgaggctctcgcgggcgggccaggggcgtggggcgctggaagggagaggcgagctgcagaagggctgctgcgcgccacgccaggctaagggcggcccctgggggctgctgcgggcatcgcggaggcaggcctagctagggttgatcaggccccgcaggcgggatcgcggccgccccgggtcccgacgcgcgggattagactgggggcccggcttggcggaggtcgtcggtacctgagtgcgcacagacgagacccagcccggcggccagcgcggcgcccagcacgaaggctgccaacaccagcgccaccaccggcgcgggttccagggccgcgggggccggcgcgggaggctcagggcgcactgcacggccggggacactcttgggcggccctgtgggaagtgccacgctgagactgggtccagctcccaggcgtccttcccacccgctctgccgccccacggccccatgcggaggaggactgcgtgctcactggggggcggccgcggcacggtgaccacgataggctgcgtcagcgtgtgcaggtgggggccgtcagcagccaggccctcggcgctgccactgccagtgtcggcgcacgcctcgtcctgaggcagacactgggggagaggaaggtggggaagagacggggacatcagggcaccgggatcgtggctctggtccccagggcccccaagagagacctgagtccagctctccaccacagccaagatgggacccctggaaatccggccccttagggtgccctgagcccagcccctacgcatacaagtggctagccgcccagcccctaaggaccccaaatcccagccccacaagatcgcatggtccgcgtctcccagcacctagcatgtgaggcccagcaccaggttcccagaaatgtgtccccttagtggccttctgcatccaacccccagccctgaaggattccagagctgtccatgggggaacccagtgtccacactgtccccggagaaactctgtcggcagagatggacccttgcgccccacctcccccaacccccagatcctcagaccccgagagtatcctctttccactgccagagtcgcccgtgcccagcccccgaagggccccagcgcccggattccaggctctgcgcccgcgcacccgcgatggcggcggcggcggcggcggcgtcagaggcgcaggcgcccggcggactccccggaggcggcggcagcggctcagctggcagtgcaggaactgcaccgaggcgttgaagaccgggcgcaggcggaagctgaaacgcgcggggcgggcggcacccgggctcggcggcggcggtggcgggaaggcgacagaggtgtcggcggggcagccctcacgcagcagagccagggcgggccccggggccgggcgtgaggacggcgtcactgagcagcggtgcagggccaggccccagcgcggggagggacgggccaaggccgcctgggggacggaggcgccatcagggatcgcccgtccccaccggcccccatccgcccctggtgtccccggggtccccacctgcacgaacacgcggctgtcggccgggacctcgagcggccccgcgcggcgaggaaagacgtcctctgtgtcggacagcttcaggctgaagaggggtctgcgcagccaggggccgggcgccgcggggaacgggggagctggcggggcggggaagggcggcccaaaggagagaaaacgcgcgctgccctttaggcctccgggaaaagtgacccgaccacctcgcccccgccgccgcctttggaaaagggatgcggttgcggcggccgattcacccatgatgggctccgcgccactttcccccctgacggtgatgtgccccctggcgacccctgggactcgcacagcccagcaactgagccggttgcagagccatgcgcccctagagaagcctccgaagctggcgaagccctccctggggcggaagagaagcggtgaggagcacccgatggtggggtccggctgggtgaagtcagagctcccccaccttccccagggctgctcttggggacgcagcaggacaggcggctcccctttctaaggggagataggtgctgtcaccaacgaggaagggaagtgaagaggataccctcccaagaggctctcctgggcacagccaaagcccagccaggccaccaagatctgagacgcttccacttgtccaggctgaggcagccatgggacccctcccctcttcgtgcccctaaacacacgctgatgtctgccttcaggtgctgagcggggtcctggtaaaacggctaatctccaaatacgaaagattgcctgcacatccatttttcttgttttctgagacagggtctccctctgtcgcccaggctggagtgcagtggtgcgaatacagctcactgcagcctccacctcctgggctccagccatcctcctgcttcagcctctcgagtagctatgaccacagccactcgctaccacggccatacggggtctatgttgcccaggctggtctggaactcctggcttcaagcgatcctctcacctcagcctctcttaagtgctgggattacaggcatgagcccccttgtccatccgcacaccacacccacttctgaagagcacctgggtagactggccccctcccacaactctggccctctccgtggctgcagggagctttgccgaagtggggatgtgagccacccttgggatgggggacagagaccccaccccactcccctgccctgtccccacccccatgaggaccaccaccaaaggtctagttgaaagagagtgacatcggtggggcgcggtggctcacacctgtaatcccagcactttgaaaagttcgaggcgggcggatcgcctgaggtcaggagttcgagaccagcctggccaacatggggaaacgctgtctctactaaaaatacaacaattagccaggcgtggtggtgcgtgcctgtagtcccagctactcaggaggctgaggcaggagaatcacttgaaccggggaggcggaggttgcggtgagtggagattgcgccactgcactccagcctgcgtggcagagcaagactccatctcaaaaaaaataaagagggtgaaacagggatagaagcatgacagacccgtcacctccctgcccatacataccaggtggcccgctgggtaaggtggtgatccctgggagcagggccagcagcagcacggtgcccagcatgctggaccagctgaggtcggagtgtttggggccagagcagacaccagctgggctgcacccaggtcccgcacgtgggcaggcggccctgtccttggcaaggagggaggcagggagcgggggtggcagactgaggggctgacaccagagccaatgcccaaggcctgaggggattaagggatcctctgctgcccgacctgtggccactgggggcagggggtcccttacaccagctgcttgatacccatcggcaagtcactacaaacacctcccgtctagctcccaaacctgcctcagtctcccctcaatgcagaaacctccccccgcaaccacccccttcccacctcgccctgccaggcccatgacacaccacagactcggtggaagaaaaggaaggggtttattctcaagcgtctaagggtttacaaacgagggcattttgttttaaaaaggggcagggcgacactggcggcctgaggaggggtccattggctggtgggctggcccgagccaccctcaggcccctgcccacccggtccgccctctgcctggtccagagggatggctggtgacgaggggggaggtcttgggagaggctgggaggcaggagagactcccccagggctccccacttaacactgaagggggtgggggtgggcggacacacactcataaaacagaaaataaagttaaataaaaataaaaccaggcag

SEQ ID NO: 1561161 - DNA, 4001 bp, Homo sapiens
cctccaagcaaaagtgagatgtttcattcttacttgatgtgatttcaaacagcaaagtttgtgatcatctctgactttagacaaccaaagtttcctactaagaaagcagtagacactcaaaggatgggaattctgccactttacatctgcagtatgtccaagagaaatattttttcctggctgggtgcagtggctcacgcctgtaatccaagcactttgggaggccgaggcaggaggactgcttgtgcccaggagtttgagactagactggacaacatagggtgatcccatctctctctttaaaaacaaaatttttttttttgagacggagtctcactcttgttgcccacgctggattgcagtggcctcatcttggctcactgcaacctctgccttctggattcatgcgattctcctgcctcagcccacggagtagctggaattacacgcatgagccaccacgcccatctaatttttgtatttttagtagacacggggtttcaccatgttggccaggctggtctcgaactcctgacctcaggtgatctgcccgcctcggcctcccaaagtgctgggattacaggcgtgagccaccaagcctggcaaaaaaaaaaaaaaaaaaaaaaaaaaaaaaaaatttaaattatccaggcatggtggcgcgtgcctctggtcccagctacttggtagggtgaggtgggaggatcacttgagcccgggaggtcgaggttgcagtgagctgtgatcgttccactgcattccagcctgggcgacaaagcgatcttgtctcaaaaaaaaaaaaaaaaaaaagcaaagaaatgttttttcctagtaattcttccaccaactggcttatgtcagccagataaataaggagacagatcttttacagtcgaagctaattctgactttcccaagtatgacgaaagaggtaaggatgacattttttaaacctaagcaacaagaagaatgaagcacgctactaagataagacagactggaaggttttggggagacacgatcgcaagctcagtttcggatgctctgagtttcagatggctcaaatgcgtggggagggcaagtgggcatctgcaggctctctaacagcctgcaccgacttcacttcttacatccctttcactcttcggctcgcttcgctcgctatctgtagtcaatcgtctactcctgtttcccacgcctgcacctttgtatgtgcaatggacactgccaggaaggccatctcctcatggtttaaccccacttcctaacaccctcaagcaagaccagaagccccgcacagcagcactaatgctcgggccccacccctctcagggtcccgcctccctcaagccccgccccgcgctgcgctcacttgtagaagctcacagggcggttgtctgcacccaggcggcccgcagtgttggagcagttcggcgccctgcagtacttgggcatggctatccagcccccgctgagttttgccgggtcagcggctgcactttggttctcgcggagcgccgcctaaccccgccccacccgcgctcgccgcctgcctcacgtgacgtccgtggagtctcgtcacgtaccggggagagagctgagagcgcctgcctactaggcgcccctccacagtgccacagtcccgccctcgtcacgtgacgaatgggccatagcgagtactgtgcacctgcgcaaagccggcccttcgtcaccccgactttcatcacgtgttggggggaagggcggcgtcacggcgtttctgagcctgcgccaaccaaatcaactggctagtcaatctcttacggctccaccctacgcctacatccgggcaaccgttggggcgcacatagttcctctaggtggcggcaaaaaccgaggtgaggcggccgtggccttagcctcgtaaaaattaaaacctgtatgtttcagcgaataatgaaaacgcagtctggatgaaagaccccatgacgcttaatcaggcatccagtacactggctgtggccccgccccgccaggcactcgctccgcctcttcgcccccattggttctaagcgccgcccggcatccctgcgattggctaggccgggcccgtcgcgtccaataggcggtggcgccggctttcccgcggctgttcgctgttccagtgggtcgtggcggtggcggcagcggcggttaggggatgtaacggtcgcccgcctccggcgtgacgatggcggccgtagggtccggaggctatgcgcggaacgatgcaggggagaagctgccctctgtcatggcgggagttccggcgcggaggggccagtcctccccgccccccgccccaccaatctgcctacggcggcggacgcgactctcgacggcctccgaggagacggtgcagaaccgggtgagaagctgctcgccatgtctaccccagttccaggcttcctaggtttcccctagtcccgtcctgagaactgtggccccgacatcagcccccggccagtcccctcaggttgttccctgccatgcctcgtcccctaacccccgcccctttagccacggcccctcccactttctcctcgctgctttcccggctccaccctcagcgttggagcaattcgggggttcctcgctggttcccacccgtggaaatgcattttgcttctgtaaatcacagcctagtcctgctatattttaacccccgttctatcgcctttagacgtcacgatcatagctcactgcagcctcactgccctggcccccgctgagtcattaaggtcccttcgagggttcggtccagagtgttacctgccccaactcttcctcgcttctaccccgccttctctcaccttctgcgatctctatcctttttcctcaccaaggtgggattcttaatccatattgtcactcaaaactatgagaaagacgtgagaagttatttataaaatctctgcagtgctgcctggggaggagggcgtacagaacagttccctaaatcctgagacagaaaaatggaaagaaatgatttcacagtaggtagaaggaattccattagcacagcggcaattaaaaaaattgttttccagctgtgtaggcacaaaatctgtttttataaaatggagatgataagaaccatactactggtagggcgcggtagctcacgtctgtaatcccagcactttgggaggccaaggtgggctgttcacctgagatcagttcaagaccagcctggccaacatggtgaaacccgtctctacaaaaagtagaaaaattagcccggcatgctagcgcgcgcctgtaatcccagctactcaggaggctgaggcgggagaaatcgcttgaacctgggaggcggaggttgcagtgagctgaggtcatgccactgcactccagcctgggcgacagagtgagactctgtctcaaaataaataaataaataaattatactattgcattggagggaaatgaaattttaattgtgatcttcttggcacggagtccagataaagggaggatacctggtagctgctggtggagcttgttcctgccccatgactttctcctgcactgtgattataccgcccactcctggctacagggctctggctgtacctcccatgtgctctctgtcaccaaggttcagtcacactggcctgcttttggttttcctgaggctccatattcttttctgcctcctggcctttgtgattggtgagtcctcagcctgggctttttgctgcaatctgcctgtctggctccttcccatccttcaagtctcagcctgaatgtcgctatcttgaaaggccttctcgaaccccattctaaagcaaacagccaccttcatctgtcacccagcaccctatacttcatagcctttatcttatatgttcctgaaagtgccctttgagctattaaactacatataacaatagcaaattcagagaggcgttatagcaaagtggctaagagcacagactgctgctgatggtatggttggacccaggcagcctgagcttaaa

SEQ ID NO: 1561162 - DNA, 4001 bp, Homo sapiens
gcgaggagacagggtccgagccccactgcctcttgccctgggtctcccgtttgctcccaaactcctcactctcctttggccaccgcccagagggccaccgttccctagccactcccagtgtctggccacctccttaactggccaaccccacctaccctaagtttgctggatgtggtggcagctgggggaggggagccgagcagtggggacaggaggagcccgggaagggtgcagagaaagccgcccacgctgcccctacgaggccgtggtctggcgtgtcctcacctgtctttcaggacttgccagtttatcttgggctctgccagctccatgagcctcctccgcctcctcctcttccttgctttggtcatggtggtgctggggagcttctggctgatggacagccggctttgggagaattccacgttgaagttggagctgctttcccgccccgatgcgtttgggagcccagagaagcgtgggtcttgctcaagcgccttttgtctgcactcaccctgcccacccgcctctcctttccctcgaggggtctctgagggaggactttggcaccacgaaggcctggaccaaccgcagctccactgctcgctggatggaagacccgtccaggtcacctgtctcccctggtcctcagcttcctcctctgtgaattggaggtgagaccagctcccacctggcggggctgttttggtgagtactaaggtagtgtttactcatctcacagacatctgtcaagtgcttactgtatgccaggccccagaggggcaaccaccctctaaagagagcggctcctgcctcccagaaagctcacagactgtgggagggaaacaggcagcaggtgaagatgccaaatgccaggatatctgccctgtccttgcttgatgcagctgctggctcccacgttctccccagaatcccctcacactcctgctgttttctctgcaggttggcagagccccatgagggcagggcagccactttgttcttgggcggcaaacctccctgggcggcacggaaaccacggtgagaagggggcaggtcgggcacgtgcagggaccacgctgcagggaggacgggagccgagtcccagaggtatgtagagtgcgcgccttgctggggacactccagcaactgcccaaaatcagcgcccccagtgctgattggccgaagcgtcagttcacccagaacgtgttcctcccgaccatttaaaaccttttagccacgtgtggtgcttagaatggtttcaacttttgagttgggaggctttttttttcccatttcttattctctctgtctgacttgaggccatcactcgctaaactctgaactctgggcacctgaactcagtctgcctgactccaaactcagcgctgtttactcctcctcctgccaccagataggggagcgtctgctggtgtctgcctcagggcccagtgaggggtgctggccgccaaccgaccaagcccacacctaggctgactcggcagggccgggcccctcgggagcagcgagccaggccggtggccggttacgaccctttcgcccgcccagggggctgctgccctccccccactgccaggggctgagccctaccccaccgcacccaggcaggcccgttccccggtgcccacctgatttcaggaatgtcctcttccaagtccttgtccaggactctctccaactcagaaagtgcctctttgggatccagggtctccgggaactcctccccggccacctcctcggggggaagctcctcttctgggtcttctggtcccagctctgcattgtccaggtcctggcgttcggggtctgtgacccgccggctctcgtacacagagctctggaggccacgggggtcgccgtcctgctccctttccgacctgcccgcagcctcagagctgggctggttcccgagtgaccttcgcctgctgtcccccatacaccggtcccttcccagcccccgcggcctcactctcccggcacccaaatgtgtctgtggtggccgcggcaacaggagagcgtccgtcacattccccacggtccacattctaacccgtgcgccgtctccaatgctggtcacctgggcttgcgctgggatcaggactcagtcctggtggtcacggctcactcaggacctcccaggattggtttaggaaggagacctgacgggaacctgcaggggcatctagctatggattccctctctcaaaaggagacacaaggaagagaccgcgtctcctgttcctgtccctgtggggcccgtcggtaatgtccagagcccaggcagccttcttgtgaccatgaggcctgccatctgagggcagatgaactgaaaggtgggcctttgatgtggctgtcgagcctctgaacttagcagccttggaatccactctgtgtccaggcttcttgttacttgaaacagtaagtttccttagtactaagtcgttttggcttggtttccaattcctagcagctaaaactgcaccctaggtgatacagacgcttccagccccaacctctcatgagaaataacttcaaaataggctgttccaaccctcacaacaaaataatggttataactggagtattccccaggctgctgccttcaggaattcctcgtacgtcgccaaaggagctgaatttccagcctctccccctctgtgccccacccagcctctccccctgtgtgccccacccagcctctccccctctgtgccccacccagcctctccccctctgtgcccccacccagcctctccccctccgtgccccacccagcctctccccctccgtgccccacccagcctctccccccccgtgcctccacccagcctctccccctctgtgcccccacccagcctctccccctctgtgccccacccagcctctccccctctgtgccccacccagcctctcccccgtgtgccccacccagcctctcccccctgtgccccacccagcctctccccctctgtgcccccacccagcctctccccctctgtgccccacccagcctctccccctctgtgccccacccagcctctcccccctgtgccccacccagcctctcccccctgtgccccacccagcctctccccctctgtgcccccacccagcctctccccctctgtgccccacccagcctctccccctctgtgccccacccagcctctcccccctgtgccccacccagcctctccccctctgtgccccacccagcctctccccctctgtgccccacccagcctctcccccccctgtgccccacccagcctctccccctctgtgcccccacccagcctctcccccctgtgccccacccagcctctccccctctgtgccccacccagcctctccccctctgtgccccacccagcctctcccccctgtgccccacccagcctctccccctctgtgccccacccagcctctccccctctgtgcccccacccagcctctccccctctgtgcccccacccagcctctccccctctgtgccccacccagcctctccccctctgtgccccacccagcctctccccctctgtgccccacccagcctctccccctctgtgccccacccagcctctccccctctgtgctgtgtgcccccacccagcctttcacccttctgtgcttggtggttttctactcatcattgaagactcaagcctgtcggtcccccacgcagggagagtccctgaccatccctcccctttctgggctcccaggcctaggacccccacccctacccccacccagtgctagcccaccccgaggactgctctgtccctcacccctgccaccagcgtggggccggccctccgggcatggtgaccactcggcacgcaagagacccagttcatcgacacacacaaagccctctccagctcccatcccatctccctgatgctctgctcccagacgcagcctcaccaccacctctgtcaggaaaggggtctctcggaggactccaggcagaa

SEQ ID NO: 1561163 - DNA, 4001 bp, Homo sapiens
ctacagctggcattgttcagaggaagaaggaggcacagggaaatactttagcattctataataaagtagttcatggcacaattaaaatgatgtagtagaacagtaacatgatatgctgaatttaaataactgaagctgattaaggaggacgtcagaattaaatgcttgatggaattgacataacacatccaagatggcctccccatgtttcagcggagagatggtgccaatcattgatattttccaggcaaatttgttgatagataaaacatttttatagactttccattattccttgtagacatcagcttttaattttctctttctagttaatatacttgtgtataatttaaacagaaaactgttctgtttcatcataaaagatttgcctgttactttgggtgtgtaaatcaagtgggcagcacaacattcttgaaacttgttttttaaggcatttgttgacaacaacagaaaggaagatcacagacaccgccaataagcatggacatcaattattttttaattgtataggagtacagtacactaattaaaactagtatatcttgcaatgccaaaggcaaaattaattattaatttttattaatattcagaagtagcacaaggaatgcattaataaagatttggtggttgtgactgagatcttgttttgctttatattttagaaaaaaaaaaaaggttttctggctcgatctgaataaaaagaagctggcaccgaagcgatgatctttattgaaatggaatatgctcaccagagtgggtatttagtgacagaagatgagatgtggaaggagattatgtgaaaaccccaaatgcttgtctataatggtttgacttgacaactctacaatcacctgcaaaattgttgttgttaccttagatacttttggttattaaattgagtattttagttaagccatcttgagttgacatttaataattcatttaggagccgtgcacagaatattacccagctcaccaaatccaagatgaacaaaattagttttgtgcactaaaaagattttgacaagcctctctcctcctctcctcactctcccctccttctcgtctcctgttctcctccttttctccctctcccttcctggcctctcctcctctcacagttagaagcaagcccgtaaggctttcttgtcctacagggcaaagacggaagcacatttacagtttttaggctagggtctttaagcccatctaggcgcagtcctaaaaccgtgtaggatgtagataggtcattaatctgtgcttgctttttttaagcagccctgattttagatctttcatgtccacttccttgagaaacaattttgcctttgtaaagtctgcaccagtaaaatccttcagtgacacccaaaatgtcgacacagccagcgggagggctgcatggacatgtgggctggtcagccgcaagctctgatatcccggaacacacgtccatcctcccgggtggacggcagtagagccatcagacccacatccgccttcgtctaccatgtggggaatgctatgcctcgcacagctcaatcctgcatgttcgcgaatcttcaggggtgaaaaggagaggaacggagcattcacagctacaatgaagctacaagcagttgtaggcaaaactgtatggtacagcatatgcacagtgcatgccttcccttcacacctcggaaggcagcaggactccccggcaagcgcaagctgtcaccattcccttgggaaggcagctctctgaagaatacttcttccacctgatggtccaccttccagaatgcagctcctgggaaacagcaacaggccagtctgggaaggcatgtgtttcctcagatgtgttggaacatttcctctgaaaaataagaggaaaagtggatctgatgtcatactggcaacctctctgatgggactcacatacctgagggtaaaggtggccatggagttagaatcagcattgactccagataaatgcatggccatgttggctcatttctccccatcagagtttagacaggggtgaaggaggatggcttcatcacaccatggcgtgtgatgcaccagctgcctgcaggtgatgttgaagatagccaggtgatctctgactcctaggactttaaatgcttagcagctcgtatcaagagaggttactgtcttgccttggtattgtttttttaaattattcctccaaaatcacatagataaatactgcaatgtataccagctgttagtgagacattatgatgagttggtttacaaaaaggagatttaattaattcattcaaacaacgaatactttttgggcacctacactattctgggagttttgctaggtctggggggttccaaaataaatatgaaaggtaagtgttatgagtttgctgttgctgcataacagacagcccaaaacttgtggacttaagcagcaatcctgcattaccacccaggtgtctatgagttggctggggcttggatgatctagaatgggcttgactaagcagctctccatctgggattgctagggtgtctacaatgtctctttccacctgtctctcgcactttttggatcagagaggtaactggggcatgttctccccatggtgataccagaggcacaagagggtctactgaaatcaagggcttctaaatgcctcatctcaaaattggcaccctcctgtctccatctacattccattggctaaaagtaaatcacatagccaacctcagagctcagagttaaggaagcatatgcaacctgtgatgaggccacagcaagggtgtggatgcaagaaggtgtgatggaggtcaacagtgacacctacagtgggaagatatcatttcctattcttcatgctgctgatgggcacaggaatggtattttggtccattaaggctgctataaccaaatactatagactgggtggcccacaaatgacaggtatttatttcttacagttctggaggctgggaagtccaagaccaaggtgctggcagattcggtgtctggtgaatcagctttctagttcatagacggtgactgcttgctgtgttctcacatggtggaaaagaaaagagatctctcttgggcctcttttataaaaccaccaatcctgtgcattaggactccatctccatgacttaatcaccttccaaaggccccacctcctaaggccgtcaccttaggggtgaacttcaacataggaatttggggaaaaagcacaaacattcagagagtagcaaatgatgacttcttccctgaaagtattggggggaaaattcccactccattccctctttcctgaaggacagctgctgggaaggatgagaagatgtccatgggtgtcttaagctacgaaagagttgctattccctgtggtctgcctcaatttttcctttagggaccacaggggaaagatgctgttggcttctgcttccatgtgacagatatccttccccacagcaagtctacggcctggttctgtctctgcctggactctgtcagtggccggagactagacagaggaagacagggaggcttgggctctctgcagatccaatccagctctgcaaacaaccatgctattttcatcaacccttgacccttgggtctacttctcatttgtttgagaactcagaggagaaggcctctgattagcatcttagaagttcccaaaatgtcacatggattctgtccttgcagagctcccagggtgatatggggcttatctggggatgacacggggccagggccttgacatccctacacacagaggcatcccccttactgaggttcacaggatgtagcatctacctcctctctgcacctcaaatattccccaattagtgtccccattgacctagtggggtgaatcttcagcttcgcatcataatgtggaagacaggtggtgcttacatgagaaagagaacagaagagaattaacacatgatgcaagcaactggatcaatggagacatcccaatttg

SEQ ID NO: 1561164 - DNA, 4001 bp, Homo sapiens
tccagtcctactgctggtgccccagctcttctctgcactagctctcatgctttccgcacttctgtccactcacctgcaagatgcaggtgaacacaggaccccctcttcagatgactgtgaacctccgtgagatccagtggatgggaagttcttagcacagtgcagggcacaccggaaggacagatgggccacgagtttcattattgacctagcgcacacattctttgaggtagaggctggcagagactcaagctgcatcctcccccgaacagatgtggaccctgttaatcgtggtctttcatctttgcttacagttatgtgacactgcttctctaagcagatttggggagagatttgttttcataaatcatgtttatatgttaccgaagctttgtttactcatttaggaacaagttaagggcattggggtacatgtctgtggggacagatgggtggggaaaggaagtgtttgaaggagttctttggtacatacacaaaggtaggaactgacccaagaacctggcttcaaagtcagatgtcgagctgtttcactatgtgacagactgagggccagactcaaagcggggctgggtaaggcttcttcacccagatcctaaaattacgcaagtccatgaaaatcccgttttgattacatcaagaacttctggcagaaatatttctggtacctaaccttaaactggaggatattgcattggcggtggcggcgctgagagcacgaagcctcagaagtgggacagctgtcggaaatcagatgttgtctatgagagtttattatgctccctctacactgctcaccctcggcaaaagccaggtgagatcctttcaccaatgaggatgcgtttcctctctagggtttcctgagccacctgtagggccaggagagtccctgaatattcagaatatgcagaaactcctctgacaagcagctttgcttaagcagagaatgtgatggtgtccaaggtggcttggataaactttacactcacagagaaggctctgagccttcttctgggctgtgggcattaacctgaaccaagtaattgtgtattttttttaacttttatacttttctactttagatatgtactcacatgcagaaaagaaatccctatgttattttttgtcaaaacccagtttacttgttattttctttttaaaacttccccgacaactccactggtcacttccatatgaatttcaactctattccccattcatacctctctggcatcaccagcttgtgatggtggtgatgtcatctgactcctggctagagacccacgatcaccctgagacagcatgtatgtcttcttctttatgtacttccagtgcccaaccaaagccactggttctgagatagtttcagagaaggtggggctgagctgaacgaacacatccagcatgggtctaattatttgaacaagtaattggattggattaaccactagcacgttaaccacctgacgagagtgagttgactaatcttaccgtcttatatataattgagagtagattccgaatgagaggtgagaagagcatctctgcatttttaggggcataagagaggccttgtttattaattcaaccataatcattggttatctaccttgtgtaaggccctgtcataggcacaagtgataggtttatcactagtactagtataattgttacagcaggtagctagtcagacaggaacagggcaggagagcccccctgactccctccctctctccctcaccaatcaggaatgtcaggcaaccatcaagtgatggtgaggtagttgttaagtatctctctaaaaaaataattgatcaatgacagggaaaggcagtctcccaatacacagaaacacctgtaattgctgatcagcagcttcccgatgacatctcaggagttgggcaagcgggctcaagcatgagcactaagaggcaaaatggcggagtttaaccggtatagcatttggactggtaaaggaagaatgcctcatgtgagcatgcgtacaactccagtaaacgcaccacgcatgcagcccctcccaagtgctactgggccactgtacatgggcacagcccaccgcaagggaagaatcaggggagaagtttttaataaactttcactccttctctaaacttgcctcggtctctcactctgctcttcgtttggattctttcttctgaggagacaagaactgaggttgctgcagacccgtatggattcgccgccgcttacatactttggtgctgtgtgacttgggtacattcagttggtaacataactaggaaggggtgtataggcacatgggtggaaaaaagtatgtataaagctccatcctcatggagcttacattctaatgacagggagacagacaaaaaccaaactaccaaacaggtcagatgttaagtgttgtaagaaaaataaagtaaggcggggttacagagagagccatggggacagagcattgcagtattgaaaggtggttaaaggaccccacatagactgcaacattcgagcaaaatgcataaaggattgagggaactgaccatgcaggtaatgggggaagagcatttttcaagcagaagcaatgtcatatgtaaaagctacaaaaatattaaagaaagctttttgggtagaggaaaaatgacaccaaattgaaacagatttataaaaaggggtaagtgccagggaaaggcagtctcctgatggacagaaacatctgaaactggtgatcagcagcttcctgataagatctcaagaactgggatcttataagattcttgataagattctgtcaattcttgataagatcaagaattgggcaagcgggcttaagcatgcccactaagaggcaaaatggcagagtttaactggtttaactttcggactggtaagggaagaatgcctcacgcattcagcaactccagtaaacacactgccagaaatggctaataagtgagtaatcatgaaataggtttcaatttttttttttttttttagataggataactttaaaaagatatagatatagatagtagtgtagttcaaagtgtctgcagaattaaaatgtctgggcacaatagcacaatggatgggaggacgggaaggagaaagtggaagatactattttaaggttcttatgttaaacctgaggtaacataatagtatttcaaagcagcctttaaagaagtaaaggtacacatggcaagccataagcaattgctgaaaaatggaagaaaaatgtatacctgataagcctaaggtaaaaataaaatggaatactaaaaaatactcgattgattcaaaagatggtaggaaaagaagcaaagaacagatgggagaaatagaaaataaatactgaaataccacattaataattataataaatataatagtctaacacaccaattaaaagccagagatgaacagactcgatgaagaaacaagaccaaatacatgcttaatgttttcctgtgaaaattcctgctctgcattttgggagatttttatatttcagtcaagaaattgggaaaatgaaaaaagtataaatcttggatgcaaattcaaggttaacgataaatatagacatttcttttaattactttcaaaggcaaaaaccgcaattacttttgcaccaacctagtagttttgaggaatccactgatgtcaactcaaaagcatgaacaggaaccactaatgtgcagagtctaaggttaagataaacatttacagaaaccagggaaggagcaggcagaagagtaaccataacctcctcggttagtctcagtcatagctgttgccaggctgtaaacacatgtttgtggaatactctgaaataagattagaaactgatctaaaacctgaattgcaaaaagaatatcagtttcattagcaaaaatcaaaatcaaggcaagcacacaaaatatttttattgttaaaaaatgatataatctgatatgaagaaacatgtgccctaaagcctaatt

SEQ ID NO: 1561165 - DNA, 4001 bp, Homo sapiens
agaaaggatggagatggatgggaactggaactgtcagaaaattctcctgcaggagttaggatttgaaaaacttgtggacgtcagttcatcctgtaaatatttactgattgtgccaaggatccagtagcaaacaaggcagacaacattccttccttcccaaggcctgaatatccctgactatcattattacaattatcaccctcatcgcaatgggctggacaaagagctgggggagtgtggctgggcaagagaaaagccaaggatcaggcaaggagttgcttcaacaacctgagtgaccttctaaaacccaggccgggcacggtggctcatgcctgtaatcccagcactttcggaggtcgaagcagacggatcacttgaggtcagaagttcgagaccaccctggccaagatggtgaaaccccatctctactaataatacaaaaattagccaggtgtgacgggcgtggtgactcacgcctgtaatcccagcactttgggaggccgaggcgggtggatcacgaggtcaggagatggagatcatcctggctagcaccgtctctactaaaaatacaaaaaaaattagctgggcgtggtggcaggcgcctgtagtcccagctactcaggaggctgaggcaggagaatggcgtgaacctgggaggcggagcttgcagtgagccgagatcgcgccactgcactccagcctgggtgacggaccaagactctatctccaaaaaaaaaaaaaaattagccaggtgtggtggtgggcgcctgaaatcccagctgcttgggaggctgaagcagcatagcttgaacccgggaggcggaggttgcggtgagcctgtgtgagcagagattgcaccactacaccccagcctgggagacacagactgtctcaaaaaataaaccaacaaataaataaataaacagtacacaggtcacatcgcccctttgcctctaaattaaaagggtcttggctgggtacagtggctcatgtctgtaatcccagcactttgggaggccgaggcaggtggattgcttgaacccaggacttcaagaccagcctgggcaacatggcgaaacctcgtttctacaaaaaattagccaagtgtggtggtgcaggcctgtagtcccagttactcaggtggctgaggcgggaggattgactgagtccaagagttcgaggctgcagggagtcgtgatcgcaccactgcactcccgcttgggagacaaagtaaataaataacaaaattaaaaggtcccctcgttacgttccagccaaactgactttctgctctccaaacacgttccctcctcccgggacgcctccttccccggtcttggcaggacacttgcttctcccaatcaagcaagtcgacgctcacctcttcagaaaagccccccaggaaccaccctctctctaaaaacgtgtccctgggactgccccgttcgtgtttatctgcaccagagcaccgatccctccctatcttcgatcctctcttatttaatttttgaatgtctgtctgtggctctagaattccaggaaaacgggactggagtcgttaaatcacggcctccccagggtccgccacggggcccgacccatccggaagggaagcgccatcaactttgcagaatgaatgaagcgctggaaaagctggttcattcattcggcaaacgagagagcagggtcgtccacctcccccgctgcccctccagcccggccgagggtggctcgggggtcgcttcgctccagccttaggcccaagtcgcgaccccgggaggagcgagggtgcaggggacgcccgggtccggcgagcggggtagtcggtacctgcggggggcttcatggcgggtgggtctgcgcctgcggctccctccctccttccacctgctacgcgtccagccacctcggccactgaggccgcctgcctcggcccaaccgccgccaccgccgccacggccgcctgaggaccaaggggcccgccgcccgcgctcccggggcatgctggggcggcgcgcgcacagggagggcaggacgcacgcgcccctgagccccgcccacagctaaaggaggagggccgggagtgcgctggagccctctgcgcactcgccgtaaccctcccggtccgttattggtctcggcggtgcgtgggcggagcctcttgctctaccattccagagccgctggggtggctaggacggacggtttccttggaaaccgcgcacgccgctgacgcctctgagcctctgcgcggctcattgcgctgagacttcgcttgggcttcaggctaccgcgttaatgtgtacttgcctcgcttcttatagctgtgtgttgggccagtgttattattgatcgcttactgtatatcccaggcccactttccagcatctgaatccgacgaatcaattaaattaaccagaagttttggtgctttggttgtttttgagacggagtctcgctctgtcgcccaggctggagtgcagtagcagcaatctcggctcactgcaacctccgcctccctggttcaagtaattttcctgcctcagcctttccaggagctgggactacaggcgccagcccccaccccggctaatttttgtatttttagtaaagagggggtttcaccatgttggccaggatggtcttgatctcttgacctcgtgatccgcccgcctcggcctcccaaagtgctgggattacaggtgtgagccaccgcgccgggccaagtttttttttttttttttttttttgtcagaaacaaaagcaagtaaacggattcatgtcaaataacaggtgttgtggaacagtgcagtagcctgacctacatgcagtgttgtgggttaaaacaaaaaacatcttgaaccatctgtcttgaactgttagggcacccagaaaaaacaatgtactacaattaaactggcaaaaaccaaaacaaccgacctcctttcttccctttttttgtttttgttttgttttcttttgctttggaggggctggagggagtctcgctcagtcgcccaggctggagtgcaatggcgcgatctcggctcgctgcaacctctgcctctcgggttcaagcgattctcctgtctcagcgtcccgagtagctgggactacaaatgcccgcaccacgcccggctaatttttgcatttttagtagatacagggtttcaccgtgttggccaggctggtctcgaactcctgacatcaagtgatctgccccctggcctcccaaagtgctgggattacaggcgtgagccaccacggccggcctcacctcctttatttctgcaaaagaaattaaaataatccacgccattaatcgtgcatgtattttgagtaggacgaaaatgaattgggagaacatttctggcaactgtaacttagatggtgatcagttttctgtcgtccttggaaatgtctcatcacatgtcttgagcaacaccaagattaattttacatcggcgttcattttcgctgttccctgtgcctggggtccgtttggactttcctatccttgaaatccaaatgtaaaggatgatctttcctacccatcccatgcgacttagctcccagtgacaatcacactaccttcattttttttttcttagtgtttgctgtgaaatttgtttctctatttatgtactagtttattagtttatagtccgtctaccccaatgcaaaataatgagagtagacactttgctggtttttatggctgctttgcaataaatattgaatgaatattaggcacctgctgtctacaaatggctctatactcacaaacgtctcacactgcatgaaagaatgcatttgtgggtgagtagatgggtgggtgaataaatgaacaaagatagtaagcgggtaacactgactcccattcattgcgcagctgtgacgctctggagtccaggtgtccaaacgcggctgcaccacgtggccggcccagcaccacgtggtcagctcggcgaccggctggagtcagccactgttccaccgtg

SEQ ID NO: 1561166 - DNA, 4001 bp, Homo sapiens
attggcagactttttctcttcctcttcctttttaaaaaaatttttgatttttaatttcatttctttttttttttttttttttttttgacacagagtcttgctgtgtcgcccaggctggagtgcagtggcgtggtctgggctcactgcaacctccgcctcttgggttcaagtgattctcctgcctcatcctcctgagtggctgggattacaggcatgcaccaccacgccccgctaatttttgtatttttagtagagacagggtttcgccatgttggtcaggctggtctcaaactcctgacctcaggtgatctgcctgggattacaggcgtgagccacctgcccagccccatttcattttttttagagacagggtctcactctgtcacccaggctggagtgcagtagtgggatcacggctcactgcagccttgaactcccgggttcaagtgatcctcccacctcagcctcccgagtagctgggactacaggtgtgcggcaccacacctggctaatttttgtatttttggtagagacagagtctcacccatgttacccaggatcctgggctcaagcaatccacctgcctcagcctcccaaagtgttgggattacaggcataaaccactgcacccggctaactttctttttgaatttttttgtagaggtggagtctcgctatgctgcccaggcttgtcttgaactcctgggctcaagtgatcctcccaccttgtcctttttaaatgttttaaccacctctcccactctccttcccacactctcatgcagcctttcatgcatcgaatatgcatttattgagcacctactaggtccaggaactgttcaaagtgccactgcatatcaaggcaggcacatctaccctcacagagctcccagtctggttcagggagaccaacagtaagcgagaaaataacccaagatcatttcagagaatgaaaagtaacgtgaaagccatgagccgggggctgtgtggctctgagagactggctgggaaggggctacaggggaccacggtggtcaagggaggcctttggggacaggaggtaacattgagctgagacctaaaggagctgagggaggaggctgggtggagatcagggaggaaagcttctggaaggtgaagccacctgcccaaaggccctggggcaggactgcgcctggtgagctggaggaacagtaaggaagcccatgtggctggataaccgttaggagggggagaaaggaagaaggtgtgtggtggtacagggtgtgaggttgggatcctgggtgtcagggaagagtttggggtgtcagggaggaatttggggtgtctgggaggaatctggggtattcgggagggatcctgggtgttggggaagaatccagggtgtcagagaggggtcctgggtgtcacggaggaatttggggtatcagggagggaccttgggtgtcagggagaaattcagggcgttgagagaaatatggggtgtgaggtaggaagcttgggtgtcaggaatttggggtgagaaggaatatggggtttcaggtaggaatcctgggtgttggggaggaatctggggtgtccgggaggaatctggggtttgggggaggggtcaggctgtcggggaggaagccagggtgctggggaggatcccgacagtgggggaggatctgggccaccagcgcggggagctggaggttgaggggaacgtcaacctcccaacgcgcggcgccaggccccctcctccgcaccggggccctaagagggaggccaggtggcctggagccctggcgagcggcacgggctcagggccaccccccacacccccgacaccttctccacctcaggcccgtcctcgccccttccccacctaccagggatccggggctgccggctgcgccactgggtcctggggtcctgggggctggggcttctgcggagttgcccgcggaccgtagcgcgctgagggcgctggctccaccccgcggcccgcgccctgggaaggaagcgcgccgccccttccgcgtcccgggtgggtgtgggacgtgaggtcacggtttcggagtcctgccccgcagcaccgggaaagtccccgggtcgccccgcacccatgcgctctcttcccaacccttgcggtcacgttcagcaagtgtgagcacctactgtctgcagggggccagaagaactcgcatctgctctcggggagcccacagtcatctgggcgggggtcccagatgagaaagtaatcacaattgtaaagtgggatcatctccgttagtgataggtgctttccaggaaataaatgtagcagctgtttttattttatttctcttattttatttgtttgtttgtttatttatttttttatttattttccgagacggagtttcgctcttgttgcccaggctggagtgcaatggcgcaatctcagctcactgcaacctccgcctcccgggtccaagcaattctactgcctcagcttcctgagtaactgggattacaggcatgtgccaccacacctggctaattttgtatttttagtagagatggagtttctccaccttggtcagcgtggtctcgaactcccaacttcaggtgatccacctgccttggcctcccaaagtgctgggattacaggtgtgagccaccgtgtccggcctcccttttttttttttttttttttagttggagtcttactctgtggcctaggctggagtgcggtagtgcgacctcggctcactgcaacctccacctcatgggttcaagcgattctcctgcctcagcctcctgagtagctgggattacaggcacgtgccaccacacctggctaatttttgtatttttagttgagatggggtttcaccatgttggccaggctggtctcgaactcttgacctcaggtgatctgcccgcctcggcctcccaaagtgctgggattacaggcgtgagccgctgcgcccggcctaattttatgattataataattattattatttgaaacggggtctccctatattacccaggctgctttcaaacttccaggctcaagcaatcctcccgcctcggcctctcaaagtgctaggattacaggtgtgagccaccgcacctggcctatattatttttatcaccacattaaataagatctaataatcacagtgattttgccgtggtgacaagtgtcagatgtgtttctggttgcaatgcaatctgaaagtatctgtggtttttattagggacaaacggacaaagtcccaggtcctgtggttgtcttcattaataattgagggaatggtaattatcagttagagtcagtgaaaataaagatgtgaaatttttttcctccatcagaattcacagacaccctgaacacccctaagaggctcagggaccccaggctgaagttcacctaaaagttcttgtagggagatagcaatggaagttatgttgatgtcaaatcccccacagttccccttattgagtacttctctccagtgagggagaaattttattgagcactgactgtgttccaggaacgtctaggctctgggaatacagtagcggggaagacagaaatggtcttacccttcagggtctccagggctggtgggggagagaaagttaaacacatcctcctggcctctctgtctcccaccccaaaattaccaattcaaggagtgtctcataggtgcttgtacccatgcaaaactgtgcccagactttttttttttttttttttttgagacagaatctcactcagtcaccaggctggagtgcagtggtgcaatctcggctcactgcaacctcagcctcccgggttcaagcgatcctcctgcctcagcctcccgagtagctgggactacaggtgcatgcccccatgcctggctaatttttgtatttttagtagagatggagtttcaccatgttggcaaggatggtctcgatctcttaacctcgtgatccacccgctcagcctcccaaagtgctgggattacaggcgtgagcc

SEQ ID NO: 1561167 - DNA, 4001 bp, Homo sapiens
tccccaacagggtgacgctgggggacccctggcctgcagggagccctctggacggtgggtgctaactggggtcactagctggggctatggctgtggccggccccacttcccaggtgtctatacccgggtggcagctgtgagaggctggataggacagcacatccaggagtgaccaccacgtgactgcccaggccgagactctacgtgaaagcaacaggagcagcaggccacccaacaccccaccccaccgtaccctacccaaggacgggtgtgggggggctgtgggtcatggggatgcattttggtaccaccctttgttccaataaacacagcccctccaccctagctcactggctcagcacctcagtgtcacagcgaggaccacctgcctggtgctccaccaggacccggggtggaacgaagcagggtcaaagcaagccctgacaaggggaaggctgtcccccttagcctttggggcaggggtggcagcagcaacacattcctcgtgactcagcagcccggtggcactaaggggaaagatggacttctcccaacccaggggaggctgagaccctccgagctggggttccagggacacgcgtcacctcttcccagagacccctcaggagggaaataaagaggtttctctccgtcctccaccaatttatttgcccatccgcaggaggtgacagctcctgtggtgtctgaccacccccaactccgaagtccagacaagctgtccgcccagaatatgaggctgacttgggcacactaggggaataccccaaaggcctgaaggaggtgccactgggctgccagcacttcaggaaggcacagggccccacacccccgagatccaagctgcactggctggcagggggcagggcggggggtggcgaggacacagtcccgtgtgtcccagcaccggtgccaccctcctaagccccgggcaggcagtacgtacatgcggaccccgcctctcaaagcacgtttatggaaatgaacagggtggggtggcccgcgctcgccggtcacatgttggctcgttcccgctgcagccgcgagttgtaggcgcgagacacggtgttccaggcgtccatgtagcggtccatgcacatggcgatgcacttctgcgggagcggaggggcgcacggctcagctcgggacttcgcggccccggggaccgccctgaccccggctccaggacgcccgggctgcagactacgcacgtgcagtgaccactccgtcgcacctccccgttagtctgcgcacgcgcagacacctcccccctcgaatctaggccctcgcgacccttgccccgaacctccgcgggtctcacctgctcggagttgtccagggagcccccaggtttccctatacacttccggaaacacttgtccgtcatcctctgtggagacacgcgaggctttagccgcgacgtcggcccccaggggtggccctgtcgcccccagcgcccgtccccggccagccccgcacctgcagcagctcctgcgcgttggccacggcgatctgcactttcacctgctccattatgagccctgggtccagcttcccgctgccggagcccccgaaatcggagccgaagccgccctccatggctccgcaaagtcaaccggaccgaggccgcgtgcgccgactcgtaactaactgcgccggaagcgggccgcccggggcaccacgggaaacggagtccgcgcggacggggacggaggactacaactcccacacgaccgcgcgcgcccgggccattcaaggtcgcgcggggggccctccgctcatgcggaggcctggacctgccgttacctacacgagctacccgtggttgcgactccgcgggaagagggaggccctgacttggccggggagtaggggggctactacgtgcggccgaggccgatcactttgtactcacgctctgcctccagctcgtcccgaagggcctgccgcgcatgcgcacgaggcacccggcgcgtctatacagcgtgttgccgccggggcggagcccggtcgcatcacgtgacgaagagtcagcttgtgcaacagcgtcggaggctcactagaaaaaaaagggcagggtcccatgcatcgcctgggtcctgtttacactagctacactagccagtgacctttttccttgggggtggagggatctttcttagacatccgcttcattagggcagaggccccggctcgagcttcccctcaggaataaactcagaggcagaacctaaaatcaaaatgtttattggagtgttgtacaaaaaagtttccagtcataaaatgtatattacaaatcattggaaaaaaaaaagaacacattaggcatgcatcttcttaaaaaccgaatctctgaaatgaaagtccatgccagccccagctgcagcccagctccgtttttgcaggttgtgctgtgacgctcgctggacgcagggcttggaagaggctgcaggcggcgacgccccaggactgaggagtccctcagatctttaacaaagaactgccgcgtgcaggcttcagaccaaccccagccaaagccgctggcatgaggacaggtgcatgatcggattctgggtcagcccgcaggcctcccggctcctgggctcagcggggcaggcttcagcgttaacctggcgctgtgcaccccagaacccgcgttggtccagcaggcgtgggcctccccccagggctgggtggcgtctgatgcttcgcagggagggcgctaggcttcgagtcacacggcacgggcttacacagagggatggtttcgcatcgttctaagcggcacacagctaagcgtatttggggacaaatgcaaattgtttcccaggccataaataacttttaaaaatttgattttcttagtgtttccaaagactcaattctcaatgaacctccaattacccacaggctgcccagtccacgcttctccccacccccttcagctaagggcacccgcagtcctaggaccacccccagctccacccaaggcaaatgtagggtggggggttctgtgggcctggggcgtgctgttttcaggacaggactgggcagcgtctggacatgaggacctgcgggttttgggggggactttgtccctgagcccagcctgcaaggctgtcggcaaatcacagaccaactccaggatacagctttgctcctccagagccaaaatacataggatgtggctgagaccactgcagactccccataggacaagatcaccaagacccacccccagaaccctcgctagcacgaagcccagccagtcgggtccgggtgattcctgctatgaaggtgggaaagaggacacagtctgtcgccagcattcccacttccagcggctggcagagggtatccccggggcaggcaaagctccctaccagccgcctgactgggagcacagcggcgtagcctccaggaggaaatgctttggtaagatgcgcccccctctatctacatgggaccgggacttctgagagcaaggacagcgagcaggggctacgtggagcagcgggtgtttctgctttgtcggccgctggctccttcccggcctggggctggggccccccattccttcctgccacaggcaggtccccagggaggcgggatgcagtcacaggggagcggtgccgcccccgccctgcagtgaacgccatggcccggagacggcgcgtgcccatggctcagttttggtgtctttaagacttgagctgcactttctgaaggaggctctgccgtcggagggtgccccagccccacgccaccccggggaggagggtcagcctgtcctcaaggccctggcgtgagctcctgacctgtgtactgaccaatgtaaaaaaataaatatccattaaaaaaataacttctgtgtatctatgagggagggtgtaaacggtgagctattgccgaaggggggtgccaggcattgggaagctggactgaggggcttgggtgcgtcgtgataggagtcaggtggcctt

SEQ ID NO: 1561168 - DNA, 4001 bp, Homo sapiens
ggcactctaagcttctatgctagtggcaagcagtcttctcttgcgagcccaccccatttctgccagcctccaaagatgagagaactggatttttcagacacaaacatcgataatgtgttgccccagggacaactctggaataaacctacaatgtcctcctcaagggttgagctataaacagagtaatttaggggagtcgctctgggcaaagactgggctgatctcatgtaaaaggcacttgctggctgggcgcggtggctcacgccagtaatcccaacacgttgggaggctgaggtgggaggatcacccggtcaggagttcgagatcagcctggccaacatggtgaaatcccgtctctaccaaaaatacaaaaattagccgggcgtggtggcacacacctgtagtcccacacacctgtagtattgcttaaacccgggaggtggagggtgcagtgagccgagatcttgccttaagttctgtgcaggcactgagctggtggctcatgcctgtaatcccgatactttgggaggctgaggcggaaggatcgtttgagctcaggagtttgagaccagcctgggcaacatagctagaccctgcctccataaaaaattgggggaaaaaaaaaaagctctgtgcaggtcctgttcagctcggcaccctgtcacccagcacagaacctggcgtgttgatgtcaaaagaccaggtacaacttctccaccatttccacatttcctgggccgtttttctctctgttctctgcctcctacctctgagaaccctatgcaacatcccaaacttacacaggtgcctactatctcctgtatttacttgaggataacttttttttttttttttgagacggagtctccctctgttgcccaggctggagtaaagtggcaggatctcggctcactgcaatctccgcctgccgggttcaagtgattctcctgcctcagcctcccaagtagttgggattacaggagcgcgccaccatgcccggctaatttttttgtatttttagtacagatggggttttagtagagatgggatttcaccatgtgggccagtggatctcgaactcctgacctcaggtgatccacctgaggctgaggcaggagaatcgcttgaacccggaggcagaaggaggcagaagttgcagtgagccgagatcgcgccattgcactccagactgggcgacaagagcgaaactctgtctcaaaaaaaaaaaaaaaagagaaaaaagaaaaaacgaagagcacgagcaatatgaagtactactttctgagtgcgccttacacgtcttgactgccactgccctgtggacccaagagcctgctagggcgcgaaccacctctcgcacatccacaatgaacgttagaagaaacgagacaagaaatgctctcggtagagaacttggcatttaaccgcgagctgtgaatttcacgtttttttgccttcccctctacttttttccacgggacgccgccgccccggctaccattctctctcctgtatacgtggagtctgatcagagggcgaagggtgatcagctccctcccaggtcccgcgcatcgccgccccctgcccggtaagctcggtccccgccctcaggccacgctctgtgccccctgtcctggcctctgctacccaaagatctaaccccaagctttctaaggagcccaagcaagggtcgcgaaggccaagggtctgagaagaaagccttggtggccgaaggcccagaagacccctaagctcgccctgccagcgccgcaccgccgctcacccgtggacagcggcaccagccactccgcagggccgccgccgccatgttggagaatcgtgtgaccttctcgcggcgcggcccggttgcgtcatccgccgcttcggcctagagccgcgcaagcctgagaaaagccgctccaggagcggggtttcgggtagggagagccctccgattgggtccgtcatagggcggggcattaaaagggtagggaatgcctagagagcttgacctctgatagggcagtgttttggaaggacggggcccgtgactggatgtggcccgggggagggcactcctgggagggtcagatctgtgattgggcgcgactacgagggggcggagcccaggggcgtgtattccgtcacttgcggtgattcggctacagaacgcgccgggcgctggtggcaggtggtacaggcacgtggatccaccgaccacaaggacggattcgattggattctgattgaccggcggaccagctccagagtaattgtctatggctgcccctgcaatgactgattgattgacaatggctgagagaccagcaagtgagtcgctccgagaaagcgaaggagcccactcttgtgcggcgctttgggaagacgcctgttggttttgaccccgaataagaagaggaagctgagagcgggctgactgtggtccagtcctacttcgattcagtgtgaactgacactctgatctgaagacgctcaggcctttgtcatttcagcaccccagatgctattttccattcgaagaatgccgccaccaggtggcggtattttaacatggccatgcaatccgggtatgaggaggagggttggtcccctgggagagctaatgtatgttgctgttgctgtttgtcttattggatccttttttttttttatagagccagaggcttgctctgtcacccaggctagagtgcagtgtcgtaatctagctcactgcagcctccaattcccaagctcaagcgatcctcctgcctcagcctctgagtcactgggattacaggcgtgagctaccgcacccggtctttttgcattactaacctgtgatatgggtttatgggacttcattatttcaaagggaggcagcttggccccggagagcatgcattcctggcttctgcgatggatagacttgtgttctccatctcaggagctccccctcaaggtgggggtaagagatgagggcttccactctggctttgttcgagatgtcttgatgccaagaggagcaaactagttaagcggttggtgtacacaggtgtgttgctaagaataaggtctgggctagaaatatggattcttagttgtggttgaaagtacggagtttggccgggcgcggtggctcatgcctataatcccagcactttgggacactgaggcgggaggatctctccagcccaagagtttgagaccagcctgggcaacatagtgaagacctcttctttacaacaaatacaaaacattagcttggcgtggtagcatgtgcttgtagtcccagctactcaggaggctgagatgggaggatcgttgaggcccgggaagttaaggctgtagtgagccgtgatcgtgccactacactacactacactacactacactacctgggcaacagagagagaccttgtgtcaaaaaaaaagaagaagaaagaaagagagagagagaaaggaaagaaagaaaactacagcattggacactcagaggcagtgtgtcatataagcatgtcaaagacccaaagataaagtggagatagaagactcctttaagccaggatccgtggctcagtcctattatcccagcaactcaggagcctgaggcaggagcatcatttgagcccaggagttacagaccagtctgggcaacataacgagaccctatctctacaaaaataaaaaaataagccaagcatggtgtctctcgcctggaattccagctacttaggaggctgaggtgggaggatctcttgagcccattagttagaggctgcagtgagctatgatcacccactgcactccaccctgggtgacagcatgagacctccatctctttttttgttgttttgagacagagtctcactctgtcgcccaggctggagtgcagtggcacgatcttggctcactgcaagctccgcctcccaggttcacaccattctcctgccttagcctcccgagtagctgggactacatgtgcctgccaccacacccagcta

SEQ ID NO: 1561169 - DNA, 4001 bp, Homo sapiens
gtgctgggattacaggcgtgagccaccgtgcccggccgggtctgtgggatttaaagtaactagtgggaaggctggatttttggctgctgaggaaagacaaagtttaggaagctgatccaggcctatccttccccatcttcccctctttcctttatcctggtacaggaaccaactagaaagactagaaccttaaggagtggaagggagaagaaagaagacttccctggttttcaaggtaggtgtcttatttggctgccctattgaggaaggagccagggaatgaagacgagagaagctggtagtgggcaagagtgggaggttccacagtggaccagggaggccaaggaacaaaactgggggacagggatatgtccctcaccaaagatatagacgacgctcacagtcccaccagctccaagcagcccagcaagccagagcgcaacttttttggcatagctgggaccctctgagcccggctgctgctgtggcccttgcgccttagtgctcccgcggctcccgatctctgcggcctgcggttgagaaaggggaggtcagccaagagagaagagaggtcaggatggtccccaccctccagtccaagaagaatcaagttcaggagccaagaggcagacacccacagagccctggacatctgtgtccctggagtagcagtcaggatgtggggctgctcagagggtcaaaaccagactgtcccgcaccaggatgccaggagttttaaaagctaacaggccaggtgcacaggatcctgaaggcaacaggactggagggtctgcagcccagaaaagcaaagcacggagaataagggatgggagggcctaaacactgggatgagagggaacggagggcacaagtggtgggggaaggggtacagacagaaccgggagttacgacgtccggctgcttggggctaaaagtagcagagttatagggtaagggataggagcggaggcggggaagggcaatcacttgtctggggcttggggaactaaggcacagaagtgatagacttggaggtcagaatggctgggtctctgtcaacatggaggcaagtcgaattggaaacccaaacgtctacctcgccaccaccaacgccacagagaaaataactcccacggccagactgggactccagcgtcccaggcccctcctgctcaagtatcacctgagtggtcactgaaacggggaacggtaaccccctcctcctccggcacccacgtgggtgggaggtggggtctaaggacacacctggattcccagcctccagcctaggggagcaaccacccaggaggttgggaagggccccaaaacacaagcggcgtttcattcagcaccctgaggtgaggcgtcccggaacccccaaggggcggcgatatgtccgtaactccagggaagggaccccacattcagagggccaccctcgttccgctcacctgatctggggcccggcggggcggcgtcgccaacctcgtgcacagtccccgcgagccgagccggagcccgcttcgcaagcgcgagaacaccgctgccgaggccgccatcttgcgctgacgccacgcggccccgcccactcgctccctcttcgcccgccccgggccggagctacagccaatggaaacgcgggggaggggcgggtggacggaagcccgagagagaccaaaggcatcgggcggattgccgcaggcgcgtttgcttctgactagtctcctggctgaccctgggggcgacaactgggattcaaagtcatctggaccacgcccccttgggccttgcagagcgccaccgcccctgcaaaggacgcagcgaaggaagggatcacacttattgcccagagataaagctgaggccataatgaagggagtcagtggctgcctgatttgtccaaaaaaatagtcacgagtcaggccgcttgtctcaccgtgtaaggcaatcggccctcacctcccaattgtctgaagggatgggttgcccctccacacctgtgggtgtttctcgttaggtggaacgagagactttggaagagaaaaagacacagaaacaaagtatagagaaagaaataaagggggcccaggggaccagcgttcagcatacggaggatccctccagcctctgagttcccttagtatttactgatcattcttgggtgtttcttggagagggggatgcgtcagggtcataggataatagtggagagagggtcagcagataaacacgtgaacaacggttcatagacaaggtaaagaattaaatgctgtactttagatatgcatacatataaacatctcagtgccttacagagcagtattgttgcccgcatgttccacctccagccctaaggcagttttcccctatctcagtagatggaacatacaatcgggttttataccaagacttgcccagggacgggcaggagacagatgccttcctcttgtctcaactgcgaagaggcgttccttcctgttttactaatcctcctcagcacagaccctttacgggtgtcgggctgggggacggtcagatctttcccttcccatgaggccatatttcagactatcacatggggagaaaccttggacaatacctggctttcctaggcagaggtccctgcggtcttccgcagtgtttgtgtcactgggtacttgagattagggagtggtgatgactcttaaggagcatgctgccttcaagcatctgtttaacaaagcacgtcctgcacagcccttaatccatttaaccctgagttgacacagcacatgtttcagagagcacggggttggttatagagaaccccgtcatctataacagggtatggttatagattaacagcatctcaaggcagaagaatttttcttagtacagaacaaaatggagtctcctatgtctacttctttctacacagacacagtaacaatctgatctttcttttccccacattgtcagaaatagacattgaggcccagaaaacgacctgaaaagccagccctcgaaaactcttctggccaggcgctgtgactgacacctataatcccagtgcttcgggaggccgaggcaggaggatcgcttgaggccaggagtttgagaccacactgggtaacatagcaagactgcaatctctatttttaaaattaataataataggccgggcgcagtggctcatgcctgtaatcccagcactttgggaggctgaggcaggcggatcacctgaggtcaggagttttgagaccagcctggccaacatggggaaaccacgtctctactaaaaataacaaaaaaaaaaaaaaattagccaggcatgatggcacgcgcctgtagtcccacctactggggaggctgagcagaagaatcgcttgaacccaggaggcagaggttgcagtgagcctagattgtgccactgcactccagcctgggcgacagagggagactccgtctcaaaaaaaataaaataaaaattaataataaaactcttcctcacgtggagctgggaggcagaatctgttttctctcccattccttcctgccatgattttctataaaggactggagagccaaccattttacctgaggctcagccaaagaacagcagtatctggctgtacagggcttgagtgagaaacgaattagaggctatagataagacaccacgaacctcccttaaattgagtggaagaaaaatcagatcctgtttatgtaaactttaaaaccaaataccaaggtagtaaaaatacaaattcaagaaagggaaagacacaaggaactcggccctcctggttacttctgggggaatggatttagggtgctgctgaagtgggtcctatctagtacatattgtttcctgtttcctcagctggctgatggggacattggtgttcttggtatataatcttgaacgtctgaaatgttttttggtgtttttttttgttgttgttgttggttttttttggttttttgagacagagttttgctctgtcaccctggctggagtg

SEQ ID NO: 1561170 - DNA, 4001 bp, Homo sapiens
ctctgagccagggttcatcctctacaaaccaggaagctgatgagaccagactccgattcggaccgggatagctcgtcttgaccccagaatgaccgagaatctgttacccgctttattacatccggcactcaacagccctgtgccttggtgactccatatccccccacccctttttttttttttttttttgagacagagtctcactctgttgtccaggctggagtgcagtggcacaatctcggctcactgcaacctccacctcctgggttcaagcaattctcctgcctcagcctccggagtagctgggattacaagtgcttgccaccatattcggctcattttttgtatttttagtagagacagggttccaccatgttggccaggctggtctcgaactcctgaccttgtgatccactcgcctcgacctcccaaagtgctgggattacaggcgtgagccaccgcgcccggccctcaatatccccattttacagagcaggaaacagaggcccggagagaagggaggtgtggaagccagatctaactgagtccacgggtttgctctcaaaacccaggcaaggtgggatccatgtcgcccacccccacggactcccgaatctcaagcaagcctgctccctgggagctctgcagccacacagccacaaggtgaccccaaatgccgggccgctctgtcccccactatgcgatcatccatgcctcctcggccccgggggaccctcttggttctggagagagacttgagatgcaatcggacacttggctcacgaggaagctcccttggtcttcccatttgggagcaaatgacccagaaaaacacttttgctgccgacccctcccctctctggctctgagcgctccttcctccttcccctctgccccatcccacagagattttgctcggaggagtaaagattagaaaaagaagtctgggcgcagtggcttgcgcctgtaatcccagcactttgggaggccgagggggttggatcacctgaggtcaggagttcgagaccagcctggccaacatggtgaaaccccatctctactaaaaatacaaaaattagctgggcatagtggtgggcgcttgtaatcccagctactcgggaggcagaggtggaggcagaggttgcagtgagccaagatcgcaccactgcactccagcctgggcaacaagagcaaaactccgtctcaaaaaaaaaattagcaaaagaaaggccaccccaatccctccctgcaaagctcctggaggttccagcggtgagaacagggtgaggggttggggggcgggagacgcagttgtttcaaaacttgggagccttttaagaagttccaggaggctcagagatgagtgaggtcgcagcctttcccacctgtcacctcctagcctcgggctgcaggaggtaaacccaggctccgtctggactgatatcccctcccctcctcagttagggggatcagagaccaacctgtgcccctttgccgcctccccggtccctgcgccacctaggtaacaatgacccttttaagtttccagctcagcgtcctgggcaggccgccaggtgcagtaactgccggtcagataatccctacgaaactatgtcagatgcccacgcaggagtgtcagtttcctgctttccgaggagccggggagacagctcgtggtgggggaggttgggggggagtctaaggaccctcagctggggaaggccagctcagacaatgcacactgggtggaaaagcacagtggggcgggggacttacctgtctaggaggctgggtggcctctgggcaggcagcaggtgccagggcccgggtgcctgcctggcacgggtggtggggagggaacccgaggcttgtagctctggcctccccacctgtttgaccaacttttcctctcttgtggtggcaacagggaggcaggtcccctgccagtggaactgacgaccacagacacagggagacggaccagggtgaggggcgggccagcaggaggactgggtgtgtggctctgtcgcaaggtgccctcacgtgggagcaactggccttaacccctgcttgcccagaggtgagcttgctcctgcctgtgccctcaccgccgaggccctggtatcaagcgtccgcacatggtaggtgcttaggaaaccctcgttggctacattcagacatgaatggaccgcactcccggagtccccctccctcctgcttcttgcatctggagctgcccagtctctgtgcttgctgagcctcctgccaggcacgccggcccatcaggctgtggcttggcgcactcccttccccacgcagatctgtgcgcagtctgcctctctgctacgaagtgactgggttcctacgtacagaagcttctgccacttccccgctgtgtggctttgggcaaattacaggggcttcttgctgtcctcatctaaaaaacaagaaagggtcaggtgtggtggctcacacctgtaattccagcactttgggaggccgaggtgggaggatcacttgagcctgggaatttgagaccagcctgggtaacacggtgaaacccatctctagaaaaatttttatatatcttttgtttgttgtttgttttgagatggagtctccctctgtcacccaggctggagtgcagtggcgcgatctcggctcactgcaacctccgcctcctgggttcaagtgattcttctgcctcagcctcccaagtagctgggattacaggcgtgcaccaccacgcccagctaattttttttttttttttcagtagagacggggttttcctatgttggccaggctggtctcaaactcctgacctcaagtgatctgcccgcctcggcctcccaaagtgttgggattacaggcgtgagccaccgagcctggcctagaaaagtttttttgttgttgctgctggctgttgttggttttgttttgttttttgtttttattttattttttttttatttttttgagacagagtcttgctatgttgcccaggctggagtgcaatggcttgatctcggcccactgcaacctttgcctcccggtttcaagtgattctcctgcctcagcctcccgagtagctgggattgcattacaggcaccagccatcatgcccagctaatttttgtatttttgtagagacggagtttcaccatattggccaagctggtcttgaactcctggcctcaggtgatccgcctgccttggcctctcaaagtgctgagattacaggcgtgagccaccacgcccagcccagaaaacttttttaaaaattagccagatgtggtggtacacacctgtagtcccagaaactcaggaggctgaggtgggaggatcaattgaccctgggaggttgaggctgcagagagctatgactgtgccactgcactccaacctgggtgacagagcaagatcctatctcaataaaataaaattaaccaggaagggttgggcatgatggctcacacctataatctcagtactttggaggccaaggtggcaggatcacttgaggccaggaattcgagaccagtctgggcaacatagtgagacacccccccatctttaccagtacattaaaattaaaatttaaaaaattaagtctgggctcaatggctcacccctgtaatcccagcactttgggaggttgaggtgggagaattgcttgagttaggagttcgagaccagcctggccaacatggtgaaaccccatctctactaaaaatacaaaaattagccgggcaaggtggcatgcgtctgtaatcccagctactcaggaggctgagacgggagaatcgcttgagccccagaggcagaggttgcagtgagccgagatcgcgccactgcactccagcttgggagacagagcaagacgctggctgaaaaataaataaataaatattaaaatgccacctcacagaggtcatggactttgtcgtgctcatccctgccgtgtcctatggcctagcacagtgcctggtacacagtag

SEQ ID NO: 1561171 - DNA, 4001 bp, Homo sapiens
tgcctcagcctcccaagtagctagaattacaggcgtccaaccaccacgcccggctaatttttgtatttttagtagaggtgggggttcaccatgttggccaggctgggctcaaactgctgacctcaggtgatccacctccctcagcctcccaaagtgctgggattacaggagtgagccaccacgcccagcctgttttattattttttattcaaggcatctaaaaatcatctttattctctttaaccatcggttagtatgtttctggtctttcctcttaggctgtgaaaggagacatgtctgtctctctggctacttaaggcccaggtgattggccatcagcctcctttccaggccttgagtgctggtactggactccctggcaaactcctattcatccttcacagccccagcctcttcctccgtacgcatatcatacatccttccctctggcccaaatgtgatgattggggtgtgggatgtcagagtggatttgtccaccttacaccttccccctcagtctgagcgctcccgatgggcagggatgggcccctgggaccccataggaccaggcccccttagggaagagtttgaggaatgagtgaatggttgagtaaaacacactgtggccaggtgctcaacaggtgtgtcctgagttcccagccctgcccctgtccaggtgaactctgagagggtggggcttgggtctttgtccccgccccccgcccagggctggacacaaacaccgaacaagaggcccgcccagaggggacggggccggtaccaagtcacaccgcccccgggtacggggctcccgggccgccgtcccctgtgccccccccccccgccaccccatctccaggaacaatggcagagagggcggtttcagcgaacaaatacaccgattggggaggggattctgagagctgtgcctggaggcaaggaagaagtcagcgggaaccagaagtgccgggtcctgaagcttggggcggagtggcctgggtctggccgcataccgctgcagtcccagtctaccctggctggtgggtctgaagaaaccagcccaggctccatgcctggagggtgaaatccctccggagacaaggatcgccccccgccccgcccccgccacggcgcaccccagccggcttgctcaccccacccctgcctctgcctggtaatgcctgttaatagctttgtacacagtaggcacccaataaatgctggtgctccctcgtgcagccttgtaggaggtgaatgttcaccaaagccaccccagcccccaaatgaagtcactgcccaccgtgccaccgcgggcgcccaagctcagccggctgcacgcccccagcaaagggggatgaacatcttttctgcccacctacgatgcgccaagctcttaaaacacatttttctctctgtttaaaatgccgatcacccatttttcggatgagggaaggagagggttcactcactggccccacgttacacacagcatagtggacagaaaattcgggatttgaacccagccctgcggtattaaaggaggccggtcctggggcagaggaggctccagaagagatggtctttggaggcagggaggggggcgcggacgcgcggacgcatctcgaagtgcaacctccagctagccacttcatccctctgggactcagtttccctgcctgttatgtaggtaggcgttctggggtcctgggtccgactcccaaaccctgctttccccccaccccacctcagcccgagcccctccccctgccacccttggagggttactcgcctggaatctcaccgccatggtccacctgggggctctccagcccccctacccgagggggtcctggaaacagtcaatcggcccccaccccgggctgggggagggggctgaggagagtcacagcgggctgagggccgggctctcgtcctcctccctccagctccgcagctcccggctgcacctgcccctcttcctcctccaggtctcgggtcagccccgcccctgcccagacacgccccctggacgcggcggaggtttctctccccacctcccatcacaggagccaggtcctgaggcggaaactccaggccgggttatccacgcagccgagagggggccggcggccgcggccagagcccggcccgacaaggctgccagcaagacccggcaggaataacccccgcgcttggaacggagcctactatttggaaggtgtttccgtccgcgaaatgggcacattttgaggtgcatctgggaggcctcttggattagaagcttgtcgaaggccagagacctccttagcatagcgctggtccctgggtcaccttatctctggaaggtttgccccattccacagaggggaaccggaggccccagaggccagaggcgtggactctgaagatacaacagcggctgcgtgcctttttcctgcggtcttggcctgcgggctctgtcttcacacccagcatccagaaaagaaagggggcagggcagggccgggcgcggtggctcatgcctgtaatccccaaattttgggaggccgaggcgagcggatcacgaggtcagcagttcgagaccagcctgaccaacatggtgaaacgtctgtctctactaaaagtacaaaaattagccgggcgtggtggcgcatgcttcagctactcgggaggctgaggaaggagaatcggttgaacccgggaggcggaggttgcggtgagctgatatcacgccactgcactccagtctgggcgacagagtagagtgagaccctgtctcaaaaaaaaaaaaaaaaaaagaaaaggaaggaaggaaagaagggaaggaaggaaggaacgaaggaaaagaaaggggcagagtgcaaggcaggaggaaattcttcaggctctgggagggagtaaaggtcgtttccttcttctcacccagcccagcccagcctcccgctcaggggcctgggattccgggattcctaaggttagacctaggagggactggaccagggtaggaaaccttcaagtcacctgggtgggcggggctggtcgtggctgcacccccacattccttactataaaaaaaaaaacctgcgcccagctgtgcctgggccccaccccaaggttaaaagggtaaaagggcaaagctacacataaacaccccttcccagccttatccagtcagggctgggcagggacaggagtcccaggttgtggctaggggtgaagagcatagagaaaactctagcggtaaaagaaaggctgcctggaggagggggcatcgtagctggggatttgaaggttggttaagagtttgcttagtaaacaaggccaacaatatcaaagtcttagagggtccccgaagatgacatctcacctcctccactgcaattgtacccaaaacactagtccagagacccaagtcagctacagtcagcccctcaagggtctccaagggcccgaataaagcattgccaaagcctcttgtggggacccacttggaacttcagagctaggagagttctaaaaccagctctcacctatttgctgtgtgacctcagacaacttactgcccctctctgttcctcagtttccacatctgtaattggggaaaataatagcccctacatcacagggttgtcaggaggattaaaaggggcgtagaggccaggcacaatggctcactcctgtaattccagaactttgaagagtcaggtgggaggatcacttgaggccaggagtttgagaccaggctgggcaatatagcgagacccaatctccatacaaaataaataaaaaggagcatgtagttctcttcccttttgcggccatcacagaagtgggagcagccaaaatgaagttcaatccctttgtgacttccgaccgaagcaagaattgtagaaggcatttcaacgcaccttctcacatcgcatgaaggttatatgtcttcccttcttttttttttttttttttttttgagacggagtctcgctctgtcgcccagctggact

SEQ ID NO: 1561172 - DNA, 4001 bp, Homo sapiens
gtgaaaccaccccccaccccaccccgtctctactaaaaatacaaaattaaccaggtgtggtggcgggcgcctgtaatcccagctactcgcctgtaatcctgaagcaggagaatcttgggaggcggaggttgcagtgagccgtgattgcaccattgcacttcagcctgggcaacaagagtgaaactctgtctcaaaaaacaaccaatcaaatggttaagatcctgaatttcctgcatttgaatccagattccctggctctgtgaccacttagagcctcagtttccttatctgtaaaacagaccctccttcagagagaatcctttgagagatccaattttcactgtaccactcaagcactgctggaggcgtgatagatgttcaggacaacacagccggtattactgttgttatctttatgatatctttgccttcctaattagtctggttgcccctaggggggcaaagaggtccctgagcagccagcaggagactcagctacagccctgacttattcctgcccttgagcaatgttctgatgtccgtgggcctcagttttcccatctgcaccatgggaagagagcgggatcatttctagctccctaattccaccagcactgcaggtgcagcttttattttctcccccaagactgcctgaagggcacacagagggacggagaaggctcagctgcagacaattcagccagcgcaggcacctggccggcctgactgtgaatgtctaatgcgtcctagctttagctcctattccccgctccttttcctccacccctccccgcccccaaccgggctggggatggggaagggggattctgtaagtgctcccaccctctgctggaggccagagcctggccctttggggtgcagatggggggaaatggaggatttcagaccccggagtccccagtcccctgacagacacccccccaccccccaccccacctccgctagagtcctgccaccggggcctgtgggattctcctccctccactgagaaccattgtgtggatgggggcaatcgaggcccagcgggcaggggatctcctcacctgctggaacgtccctcagaatgggggaggggggctgggagaatggtggggtcggagaaggggagagccttggagaaggggcttccagaggaaacagggtgttagagcgggagaggtaaccagaaaggaatatgggcccaccccagtcctctctgctcccctctggtcccatccaaggagctgggagcatcgctgtgcctccccctcctccctctcctcctccccctcctctgcctccccctcctcctcccttccctccctccttctcccccaccttcctattcttccctcccttcctgctattttctctccctcctccctcccctcagttttctccccacgcccctccctctccctcccctccctccccctccctccacttccctcctctctctcctcccctcctccttcccctctccccctcctctccctacccccgcctccccgctgttctctcccctcccctccccctaccctcccccgtcctccgcctcattaggcgcggccgcggcgcggggcccattagccgatcaattagccgaggtcgcccgcggcgcagtcgttaagcgcggggcggccgcggcggggagggggctcggagcccgcgcctccgcccgcccgccccggcttcccggacccgagcacgcccccccaggacgcctcctgccacccgccccccagcgggccccgggaccctccccaaaccctgcgggggcctgggagacccccggatcgcaggccaggccgtggctgagtaggcaggaccccttcttccgagaagaccccttgtgggggtgtcgggcttgtgacccccccccaggcatccttctgctgccagcaacatcaatatcagtaatacttactattgttattattattattactagctgacactcttgagcccttgcagaagttctaattctcagtacaattttccagaaattgagatcagagcgtgacttcacttgccccgaatcacccctaagggtcggagatgaggagccccaagtaaatatgttggcattcctgcagttctttctatgtgtagatttcacacacaaaaacgcaacccacactccccgttccccgttctcctccgcctagtctttctctatcgacacacccgctgacacgccgtatattttacttgtttatctgttcaccccagccaggagggcggggctttctgtcttgttccctgctgggcctctgggactcagggtagagtctccacagacgaatgaatgggccgggctgcggtgtctctcgcctgtaatcctcgcactttgggaggccgaggcgggcggatcatctgaggtcaggagttcgagatcagcctggccaatatggcgaaaccccatctctactaaaaatacaaaaaattagccaggtgtggtggcgggcgcttgtagtcccagctacctcgggggctgaggcaggagaatcacttgaacccgggaggtgggggttgaagtgagtcgagatcatgccactgcatgatctgggcgacagagcgagagtctgtctcaaaaaaaaattaaaaaatgaatgaatgaatgcaccagcctctgctgtgagcactttccttggattaaaatggggtcttcctaacaaggatcggttctgtgattatacccattttacagatagagaaactaagccccagcgtggtgaagccacttgcctgaatcaaccagctgtgagaggaagagccaggatttaaatccaggctggacactccatgccgaggaacatcctaggacacctgtgccacttctgtgacagctgctgatgccttttgcactcagtttttttttttttttttttttttttgagacagagttttgctcttgttgcccaggctggagttcaagggcatgatctcggctcacttcaacccccacctcccgggttcaagggattctcctgcctcagcgtcccaagtagctgggattacaggcgcacgccaccatgcctggctaattttgtatttttaatagagacatgatttctccatgttggtcaggctggtctcgaactcccgacctcaggtgatccgtccgcctcagcctcccaaaatgctaggattacaggcttgaaccaccgcgcccggcctgcttttgttttttaataaagacagtgtctcgttctgtagccaggctggagttcagtggcgcgatcatggctccttgcagcctcaaactccggggctcaagcaatcctcccgcctcagcctccagagtagctgggactacaggcacacaacaccacgcctgactattttttggatttttagtagagatagggttgtgccatctcagccaggctggtcttgaactcctggcctcaagtgatcctcccaccttggcctcccaaagtgctcggattacaggcatgagccactgcactccgccttatttttattttttgtagagatgatgtcttcctatgttgcccaggctggtcttgaactcctgggttcaagtgattctccaatctcagcctcccaaagtgctggggttacaggtgtgtgccagcgtgtctggctggactcagggtctttgtgtgggaactggggtagggatgttgcgaaacccaccctgcttttggtgggtgagagtcagaggaggccttcagaaaagtgacttctagggagtctcagagaattagaatgcctgggaggggaaataaagagaaccctgttccaggcagagggaacagcatgtgaaaaggcctcaaggcaagggacagcaagatgtttcaccttggctgcagcctgttgagtaggagtgaaaggagggatgggtagggtctcctgggccgaggtgaagaatttcgaattaattccaagggcagtgagagccaaagataatctttttttttttttttttttttttgagacagaatctcactctgtcagccacgctggagtacagt

SEQ ID NO: 1561173 - DNA, 4001 bp, Homo sapiens
actgtcttcagaaggtgggactcattttccttccacgaggctgaaatctgtcttcctggtcccagatgggccctctgtgacctctgcggagatttcaggatgagacccgtgttccctaggtctgctctggccccggctgcccactctgggtccttctcagggcttccagacccccaccctccctcctgaacacgcgtaaccccaacccagttacctgcttatgcatttcaatgttgagcccgtacgacatctcataatactgcaaaggaaaaaccaagtaagaacgtctagggtggagatgggtgccctcctccagataggtgatgccagggtcttccaagagtccccaggttcaggggaatcacagcaggaagcagagccccccccagctccacggggtcccagaggaggaagcgggggctctgcctggaagggccccctctactctccccagagaggcagggcaggtaggaagtgtccagaggccctggcccgacagagactcccatcaggcgaggggtcctccctgtctccccattcccagagctgggaggaccctcctagagagcctgaaatcccaacctgcccaatgtacagacggggaagacgaggttcggagtggggcagggacctaccccagagtccaccgtgactcaaagccctgcccgcctctcccctcaccctggcatcataagtgccctcaccatgacataatgtcgctgcatttccgtcttctcgctggccagcttctcacattctagcttgaggctgagaagaagagagagggcaaggggctcccacccgccccatgtgggccggcttccaaagtgagaggctggatctccccctcccgacttccttacagacctccccccacctcctgtcccagtccctccccgccccttcctgggctccaaatgccccagctctgactgtccccagacccctctgcacctgcgcttccacctggaggcctttgtcgcgccccccctccaaccgggagcccctcctccccgccctataccccggaggcctcgccccgccccggcgcccaggtgaactcccgcggcccctggggcggcccccctcacctgtggtattgagcctgaagaaactggaattcttctttgatgcggtcgcagatctccaagatcgagaacttgaagggctggccggactggagcggggtctggggggggtgtgggggaaacgtcagggtctgagttcccggacactgggggccccctccccgcagtccgcactcaccgggtgccttccctgggggtacatcctgccgatccgaaaagccccccaggcgccaccagagcttgatgatatggaggcggcaagagtgggggaggctgaagtggggtggtggggaggctgcccgaagaaagagggaggagggagaagcggcgcggggcaagggaccctggagtccctggcgcgcccccaagcgcgcgcgcccggggtcgtgggagcccctccccgggttggggtgcgcggggcgagcggggcgggcaggggcagcggccggggcgggagcgcggcgagggcggccgcggcagccggcgcagaaggtcgggcgcgccgcggccgggtttcggtggcggcggcgcgggcggcgggccccgcgcggagccgcctccctccggcggggctcggccgggagccgcgggctgagccgccttaaggtggcgccgccgcccccacgcgcccgcggcccgccccgcgcccacccccgcgcaccgcccctccccgcgcccgcgccccccccggcccccgggcacccgcccccttccttcagtccctgggccgttggggaaactgaggccgggtggggaggcgcccagtgccttaaaacagggtccccaccccctcccggaggggcgggagaagaaaaaccagtgaagaaattcacaccgtgttacccaccgtgggagcgggggggggggcttgcggggagcggggaccagtctggagtcggaaatggcttttctgagcaagtgacattgggttgagattgaagggtcagcaggacgcagccttgccaagcgctggcagggaaccctgccagaaagggaatctcacagcaaacactgcttcccagatcatgccgggccctcgccctctgggggcctcagtagtctctgcaaaaggtcaggggtggtgcgctatctttagggtttaattttttgcagagatagggtctccctgtgttgcccaggctggagtacagtggggcaatcatggctcactgcagcctcgaactcctgggctcaagcgatccttccccctcagcttctccagtagctgggactacaggtgtgcaccaccacgcccagctaattttttaattttttgcagagatggagtaggggggcgtctcactatgttgcccaggctggtcttgaactcctggactcaagcctctctcttcggccttccaaagtgctgggattacgggcgggagccaccgcactgggcactgcacttaaatgagatagtgcatgaacgctgtcagcctctccctacacagagcaaacttccacagatgggaattgtgttcctactgccatcaccagtggactgggctgtctcccctctcagactgggtttcttgaaggcaggagccgtgtcccactcagaactggaagaaccacagctctgccatcagactcaagtctctcccacggcaaaggctccagccccgaccagagaccacagacatccagccagcatccttcaggcccacccggggagtgggaagttcttattctctttggagaaacctcaggagaggtttgtgaagtcaatcaacaaacgtgtactaaatgcatactgtggaccacacactgctgtagacactggggcacagctgggaacaaaacagagaaaaatccatgccccttgatgacacttggacttgtgtccttaggtgatcgagtacctaatggtacctaagggttagggttacaaaaacccattttgtacccttacaaaagggcacaagagcccttatcaatgggccaggggtggtgggtcatgcctgtagctccagcactttgggaagctgaggagggaggatcgcttgagcccaggagttcaagaccagtgtggacaacaccgcgacaatacaaaaaaacatttttgtgttttttgtatctctacaaaaaatacaaaaataattagccaggcatggtgatgcacacctgtggtcccggctacttggggggctgaggcgggagatacctgagccccagaaggtcaaggctgcactgagttgagatcacatcactgcactccagcctgggtgacagagcaggaccttgtctcaaaaaaaaaaaaaaaaagcccttatcaaatttaaagccatcgttttccagcccacagatatttacagagcacctatgacgtgtcaggcatccttccaggcacagggattgtaagggtggataagggagacagatccctgccctctctgagtttgtgggatgtgagtgacaggctaggcaggttcacagcttggtaattatgggactatttgtacagacagaggaagagtttagagggcagtgatagagatgaacaaaagcaaacctgcttatgtggggtgtctgggagaggacccttgggggagggtagccttggagatgagacctgaacgatgaggttgggcagctctgggaagggaggaaaagagacacagcctgggataaagatacaattgtgtgtgtgtgtgtgtgtgtgtgtgtgtgtgtgtgtgtgtgtgtagtactcactagctccctattgccctcaaaataaatccaaactcatctctcttcccacaaggctcttcacaaaactcttccccttttccccttcaccatctctttatgttttgtttattgtttatagagacaaggtctcactgtgttgcccaggctggtcttgcattcctgggctcaatcgatcctcccacctcggcctcccaaagcactgagattacaggcatgagc

SEQ ID NO: 1561174 - DNA, 4001 bp, Homo sapiens
gagaagctccagaagaggctcagagccttacgacactggagtcaatctcaaagccctgaagacagccacagagttttgaggtctattttggagtagtggggtcacagtctgaaccatggcatcaaattcagggcctggagaacaatcttggaaccttccagccaatcacactgagaccaatctcagaagcttcaaagcagcaacagaacctggggtccatctcaaaacttcagactttctgggttgaaagggacctctaagagtggccatccagctccctcctaggacagaagtcacttccacagcctccctggcctggctgccctgcctctgctatgtgccctccttgatggggatgcctggtggcccctgcccactgcctgcatctctgctggacgctccaactgctagatactgtcttcagaaggtgggactcattttccttccacgaggctgaaatctgtcttcctggtcccagatgggccctctgtgacctctgcggagatttcaggatgagacccgtgttccctaggtctgctctggccccggctgcccactctgggtccttctcagggcttccagacccccaccctccctcctgaacacgcgtaaccccaacccagttacctgcttatgcatttcaatgttgagcccgtacgacatctcataatactgcaaaggaaaaaccaagtaagaacgtctagggtggagatgggtgccctcctccagataggtgatgccagggtcttccaagagtccccaggttcaggggaatcacagcaggaagcagagccccccccagctccacggggtcccagaggaggaagcgggggctctgcctggaagggccccctctactctccccagagaggcagggcaggtaggaagtgtccagaggccctggcccgacagagactcccatcaggcgaggggtcctccctgtctccccattcccagagctgggaggaccctcctagagagcctgaaatcccaacctgcccaatgtacagacggggaagacgaggttcggagtggggcagggacctaccccagagtccaccgtgactcaaagccctgcccgcctctcccctcaccctggcatcataagtgccctcaccatgacataatgtcgctgcatttccgtcttctcgctggccagcttctcacattctagcttgaggctgagaagaagagagagggcaaggggctcccacccgccccatgtgggccggcttccaaagtgagaggctggatctccccctcccgacttccttacagacctccccccacctcctgtcccagtccctccccgccccttcctgggctccaaatgccccagctctgactgtccccagacccctctgcacctgcgcttccacctggaggcctttgtcgcgccccccctccaaccgggagcccctcctccccgccctataccccggaggcctcgccccgccccggcgcccaggtgaactcccgcggcccctggggcggcccccctcacctgtggtattgagcctgaagaaactggaattcttctttgatgcggtcgcagatctccaagatcgagaacttgaagggctggccggactggagcggggtctggggggggtgtgggggaaacgtcagggtctgagttcccggacactgggggccccctccccgcagtccgcactcaccgggtgccttccctgggggtacatcctgccgatccgaaaagccccccaggcgccaccagagcttgatgatatggaggcggcaagagtgggggaggctgaagtggggtggtggggaggctgcccgaagaaagagggaggagggagaagcggcgcggggcaagggaccctggagtccctggcgcgcccccaagcgcgcgcgcccggggtcgtgggagcccctccccgggttggggtgcgcggggcgagcggggcgggcaggggcagcggccggggcgggagcgcggcgagggcggccgcggcagccggcgcagaaggtcgggcgcgccgcggccgggtttcggtggcggcggcgcgggcggcgggccccgcgcggagccgcctccctccggcggggctcggccgggagccgcgggctgagccgccttaaggtggcgccgccgcccccacgcgcccgcggcccgccccgcgcccacccccgcgcaccgcccctccccgcgcccgcgccccccccggcccccgggcacccgcccccttccttcagtccctgggccgttggggaaactgaggccgggtggggaggcgcccagtgccttaaaacagggtccccaccccctcccggaggggcgggagaagaaaaaccagtgaagaaattcacaccgtgttacccaccgtgggagcgggggggggggcttgcggggagcggggaccagtctggagtcggaaatggcttttctgagcaagtgacattgggttgagattgaagggtcagcaggacgcagccttgccaagcgctggcagggaaccctgccagaaagggaatctcacagcaaacactgcttcccagatcatgccgggccctcgccctctgggggcctcagtagtctctgcaaaaggtcaggggtggtgcgctatctttagggtttaattttttgcagagatagggtctccctgtgttgcccaggctggagtacagtggggcaatcatggctcactgcagcctcgaactcctgggctcaagcgatccttccccctcagcttctccagtagctgggactacaggtgtgcaccaccacgcccagctaattttttaattttttgcagagatggagtaggggggcgtctcactatgttgcccaggctggtcttgaactcctggactcaagcctctctcttcggccttccaaagtgctgggattacgggcgggagccaccgcactgggcactgcacttaaatgagatagtgcatgaacgctgtcagcctctccctacacagagcaaacttccacagatgggaattgtgttcctactgccatcaccagtggactgggctgtctcccctctcagactgggtttcttgaaggcaggagccgtgtcccactcagaactggaagaaccacagctctgccatcagactcaagtctctcccacggcaaaggctccagccccgaccagagaccacagacatccagccagcatccttcaggcccacccggggagtgggaagttcttattctctttggagaaacctcaggagaggtttgtgaagtcaatcaacaaacgtgtactaaatgcatactgtggaccacacactgctgtagacactggggcacagctgggaacaaaacagagaaaaatccatgccccttgatgacacttggacttgtgtccttaggtgatcgagtacctaatggtacctaagggttagggttacaaaaacccattttgtacccttacaaaagggcacaagagcccttatcaatgggccaggggtggtgggtcatgcctgtagctccagcactttgggaagctgaggagggaggatcgcttgagcccaggagttcaagaccagtgtggacaacaccgcgacaatacaaaaaaacatttttgtgttttttgtatctctacaaaaaatacaaaaataattagccaggcatggtgatgcacacctgtggtcccggctacttggggggctgaggcgggagatacctgagccccagaaggtcaaggctgcactgagttgagatcacatcactgcactccagcctgggtgacagagcaggaccttgtctcaaaaaaaaaaaaaaaaagcccttatcaaatttaaagccatcgttttccagcccacagatatttacagagcacctatgacgtgtcaggcatccttccaggcacagggattgtaagggtggataagggagacagatccctgccctctctgagtttgtgggatgtgagtgacaggctaggcaggttcacagcttggtaattatgggactatttgtacagacagaggaagagtttagagggcagtgatagagatga

SEQ ID NO: 1561175 - DNA, 4001 bp, Homo sapiens
ccctgaagtctgtctcagaaccttggatcacactgagaagctccagaagaggctcagagccttacgacactggagtcaatctcaaagccctgaagacagccacagagttttgaggtctattttggagtagtggggtcacagtctgaaccatggcatcaaattcagggcctggagaacaatcttggaaccttccagccaatcacactgagaccaatctcagaagcttcaaagcagcaacagaacctggggtccatctcaaaacttcagactttctgggttgaaagggacctctaagagtggccatccagctccctcctaggacagaagtcacttccacagcctccctggcctggctgccctgcctctgctatgtgccctccttgatggggatgcctggtggcccctgcccactgcctgcatctctgctggacgctccaactgctagatactgtcttcagaaggtgggactcattttccttccacgaggctgaaatctgtcttcctggtcccagatgggccctctgtgacctctgcggagatttcaggatgagacccgtgttccctaggtctgctctggccccggctgcccactctgggtccttctcagggcttccagacccccaccctccctcctgaacacgcgtaaccccaacccagttacctgcttatgcatttcaatgttgagcccgtacgacatctcataatactgcaaaggaaaaaccaagtaagaacgtctagggtggagatgggtgccctcctccagataggtgatgccagggtcttccaagagtccccaggttcaggggaatcacagcaggaagcagagccccccccagctccacggggtcccagaggaggaagcgggggctctgcctggaagggccccctctactctccccagagaggcagggcaggtaggaagtgtccagaggccctggcccgacagagactcccatcaggcgaggggtcctccctgtctccccattcccagagctgggaggaccctcctagagagcctgaaatcccaacctgcccaatgtacagacggggaagacgaggttcggagtggggcagggacctaccccagagtccaccgtgactcaaagccctgcccgcctctcccctcaccctggcatcataagtgccctcaccatgacataatgtcgctgcatttccgtcttctcgctggccagcttctcacattctagcttgaggctgagaagaagagagagggcaaggggctcccacccgccccatgtgggccggcttccaaagtgagaggctggatctccccctcccgacttccttacagacctccccccacctcctgtcccagtccctccccgccccttcctgggctccaaatgccccagctctgactgtccccagacccctctgcacctgcgcttccacctggaggcctttgtcgcgccccccctccaaccgggagcccctcctccccgccctataccccggaggcctcgccccgccccggcgcccaggtgaactcccgcggcccctggggcggcccccctcacctgtggtattgagcctgaagaaactggaattcttctttgatgcggtcgcagatctccaagatcgagaacttgaagggctggccggactggagcggggtctggggggggtgtgggggaaacgtcagggtctgagttcccggacactgggggccccctccccgcagtccgcactcaccgggtgccttccctgggggtacatcctgccgatccgaaaagccccccaggcgccaccagagcttgatgatatggaggcggcaagagtgggggaggctgaagtggggtggtggggaggctgcccgaagaaagagggaggagggagaagcggcgcggggcaagggaccctggagtccctggcgcgcccccaagcgcgcgcgcccggggtcgtgggagcccctccccgggttggggtgcgcggggcgagcggggcgggcaggggcagcggccggggcgggagcgcggcgagggcggccgcggcagccggcgcagaaggtcgggcgcgccgcggccgggtttcggtggcggcggcgcgggcggcgggccccgcgcggagccgcctccctccggcggggctcggccgggagccgcgggctgagccgccttaaggtggcgccgccgcccccacgcgcccgcggcccgccccgcgcccacccccgcgcaccgcccctccccgcgcccgcgccccccccggcccccgggcacccgcccccttccttcagtccctgggccgttggggaaactgaggccgggtggggaggcgcccagtgccttaaaacagggtccccaccccctcccggaggggcgggagaagaaaaaccagtgaagaaattcacaccgtgttacccaccgtgggagcgggggggggggcttgcggggagcggggaccagtctggagtcggaaatggcttttctgagcaagtgacattgggttgagattgaagggtcagcaggacgcagccttgccaagcgctggcagggaaccctgccagaaagggaatctcacagcaaacactgcttcccagatcatgccgggccctcgccctctgggggcctcagtagtctctgcaaaaggtcaggggtggtgcgctatctttagggtttaattttttgcagagatagggtctccctgtgttgcccaggctggagtacagtggggcaatcatggctcactgcagcctcgaactcctgggctcaagcgatccttccccctcagcttctccagtagctgggactacaggtgtgcaccaccacgcccagctaattttttaattttttgcagagatggagtaggggggcgtctcactatgttgcccaggctggtcttgaactcctggactcaagcctctctcttcggccttccaaagtgctgggattacgggcgggagccaccgcactgggcactgcacttaaatgagatagtgcatgaacgctgtcagcctctccctacacagagcaaacttccacagatgggaattgtgttcctactgccatcaccagtggactgggctgtctcccctctcagactgggtttcttgaaggcaggagccgtgtcccactcagaactggaagaaccacagctctgccatcagactcaagtctctcccacggcaaaggctccagccccgaccagagaccacagacatccagccagcatccttcaggcccacccggggagtgggaagttcttattctctttggagaaacctcaggagaggtttgtgaagtcaatcaacaaacgtgtactaaatgcatactgtggaccacacactgctgtagacactggggcacagctgggaacaaaacagagaaaaatccatgccccttgatgacacttggacttgtgtccttaggtgatcgagtacctaatggtacctaagggttagggttacaaaaacccattttgtacccttacaaaagggcacaagagcccttatcaatgggccaggggtggtgggtcatgcctgtagctccagcactttgggaagctgaggagggaggatcgcttgagcccaggagttcaagaccagtgtggacaacaccgcgacaatacaaaaaaacatttttgtgttttttgtatctctacaaaaaatacaaaaataattagccaggcatggtgatgcacacctgtggtcccggctacttggggggctgaggcgggagatacctgagccccagaaggtcaaggctgcactgagttgagatcacatcactgcactccagcctgggtgacagagcaggaccttgtctcaaaaaaaaaaaaaaaaagcccttatcaaatttaaagccatcgttttccagcccacagatatttacagagcacctatgacgtgtcaggcatccttccaggcacagggattgtaagggtggataagggagacagatccctgccctctctgagtttgtgggatgtgagtgacaggctaggcaggttcacagcttggtaattatgggactatttgtacagac

SEQ ID NO: 1561176 - DNA, 4001 bp, Homo sapiens
aaggtggctcatgcctgtaatcccagcactttgggaggccgaggtgagcagaacacctgaggtcaggagtttgagacaaccctgggcaactcagcaaaaccccgtctctactgaaaatacaaaaattagccgggcgtggtggcgcgcacctgtaatcccagctactcgggaggctgaggcaggagaatcacttgaacctgggaggtggaggttgcagtgagccgagatcgcgccactgcactccagcctgggcaacaagagcaagactcaataaaataaagtctcttggccaagtgtggtggctcacacctataaccccagcactttgggaggctgaggcaggcagatcacgaggtcaggagctcgagaccagcctggccaacatggtgaaacccagtctctactaaaaatacaagaaaaatttggtggtcatggtggcaggtgcttgtagtcccagctactcgggaggcgaggcaggagaatcacttgaacccgggaggcagaggttgcagtgagctgagattgcgccattgcattccagccgaggtgagtgtgagactccgtctcaaacataataaaatcataaagtctcaaaacaaaatatccctcatctgactcctttacaaaaaaaaacgtctgctcagccctgagagcctaaatttacaaatggtcatctctgggacgcaaagtgcagggagcggggattgcttgtaaaacatcaaccaaatacatgatgtgttcctgtgtttttatcacatatgtgattagatgctacatttttttttagatgggatctcactgtcaccaaggatggagtgcagtggcaccatcatagttcactgcagcctcaaactccttgggctcaagccaaccctctgcctcagcctcccaagtagctgcaactacaggcccacgtcactaggcccagctgattcttctagttttattttttacagagacagggtctcactacgttgtccaggctggtttcaaactcctgggctcaagtggtcctcctgcctcggcctccaaaaatgttgagattacagttgtgagccacagtgtccagcctacacttaattttttttaaaaaacacggctccttggcacctgtcttgagtgtagcagcgaccagtattgtcttcagctgcgaggcctgggcggggccagcccaggtcacaggtggaaaaggggcagaaccacattgggcccgggtttcccttgagggctgatcccaccacatgccctcctcaccgaagtgcttttcggggggcccttgggtctgggctggtccctagaggtcatcttcaaggcagtagcctccaagactttagccagagtctaaaacaacaaggagacggcaggtcttgagggacagaaaataaggcagtgccagggaagcaaggcacccgttaccccacccgcacctcccagtttggtaagtctccagggacccaatcctgcggttctcccatgcgttccctaggtcctgtcctcacttatcaatgcctccagctgcccagattcatgggggcggggacccagaaagaactgagccttgcctcccaggcctcaccctaggaggctggggtggatagtgcacatacactccctgctgggggcagtcagggacgggggagcccagggaaggtcgccaaagctcaaccttagttttgagacaatttcctaaagcgcagggagatcactagaaaggggttttgaaggatgactaggagttagccaggtgcattaggcggaattcatcagacagaagaaacgacctctctccacctccatccctgctgcagcacccagcttcttccttgcctcagtcctgcccctccacgcccctgcagccccttccccggccgggaatcctggagtccccccagccccctagaacacgcctggcaactcacgtccctcaccgggcggaagctgcggaggtcagccaagttcaggccaagaggaaactcctccttcccccaccgggggccatttgacccatcgggccccgcctcgtcccgccttgtccccgccccgtcccgcccaggccccacccagccgccacctggaccgcgaagcagatcaatgaaggcgcagtagctgcacgtgggttcgggctccggggggggcaggcctctggcggcgccggccaatagcgaggccgtttacgcacgtgggtcgcgtacgccctccctgattggtcggctctccccggccgccggccatgctgtcactcagcgagccgggagcctctgctttaccctttcggtcccgctgccgggaagggcggacttgcagagctataggcaatttggggtcccagcgggggcggggatatttaggagggcgtggggcttgaggctcagaggctggaacttgggcagggataggtggcgagtagttgcattgttttacgcatttttagccttgtccggaagtggcttatggctggaggtgaggagtgggaggtgggtgggttcaatctttagcgctgtcaccccaattcttagatacgggctaattacattttcctcaatattaaataacgtgcaatgcaaacgaagcttcaagtcctctttctggagccaacttactgggtccccttgatggtcccagccccgggctatgcatttatcaccgaattttcccaactgctcttccagcccagtgacaaaggctctgagagcagaaagcgggacagcagaggccctgaggctgatacagtattgccggatgcaagcgcggggtgggagagagtggtgggtattccagacggagggaatagcggaacctctcaggcagagctgggctggttacaggagcagccagggaggctaacggggctgcgtgcactccgaacaggcctgggatgatttccgagaggtaagtgggttgctgcagagcgagagaaacctgctgtgtggggtcgtggggataggagtaaggggatttcggagttttgttttggcctattcaaaatatgaagccaagtcaccatggctcacacctgtgatcccagcattttggaaggctgaggtgggaggattgcttgaggccaggagttggagaccagcctgggcaacacagtgacaccgcgtctctacaaaaaatttaaaaattagccaagtgtggtggtcatgcacctgtagtctcagctactggggaggctgaggcaggaggatggcgtaagcccaggaggttgagtctggagtgagctatgatcgtgccactgcactccagtctgagcaacagagcaagactccatctcaaaaaaatatatagctataatatatataaagtatatatattatatatatagtggtcaagctgcagttctggagtgagagcccgtttctttctgtttggcccaggacctggtactggcattagcagttcactctgccagggacagtctctctcagacagccaccggctggctccttactccctcagctccctacttagaaatcaccacgttgggccaggtgctgtggtgcacgcctgtaatcccagcactttgggaggcagaggtgggtggatcatctgaggtcaggggttcgagaccagcctggccaacatggtgaaaccccagcttggccgggtcacacctgtaatcccagaactttgggaggccgaggcgggtggatcacgaggtcaggagatcgagaccatcctggctaacacggtgaaaccccatctctaataaaaaatacaaaaaaattagccgggcgtggcggtgggtgcctgtaatcccagctactgaggaggctgaggcgggagaatggcgtgaacccgggaggcggagcttgcagtgagccaagattgcgccactgcactccagactgggcgacagaacaagactctgtctcaaaaaaaaaaaaaaaaaaagaaaaccccagctctactaaaatacaaaaattagccaggcatggtgataggcacctgtagtcccagctactctggaggcttaggcagaagaatcacttgaacctggg

SEQ ID NO: 1561177 - DNA, 4001 bp, Homo sapiens
cctgaaactgctctcaccctgtgccaggcccttgctcaggctgtttcttccttctggaaaccgcttccagaagtcttttccacttggcaaactcctactcatccttcatggcccatccacattgttcttcctccatgaagcgctccctgactccccagaaaggatcactgtttaactcgggctagctacagaggggatattcatcagcctgtttctttttctcttttcttttctctttctttctttttttctttttctttctttctctctctctctctctttctttttgagacagagcactgacacccaggctggagtgcagtggtgcaatcttggctcactgcaacctctgccttctgggttcaggcgattatcctgcctcagcctcccaagtagctgggattacaggtgcccaccaccacacccggctaatttttgtatttttagtagagacggggtttcaccatgttggccaggctggtctcgaactcctgacctcaggtgatttgcccacctcggcctcccaaagtgctaggattacaggcatgagccaccacgcctggcctgccccttctgactttaccatttatcccatcatttgttatgtgtttgactcagtctgttcagtcattcgacaacgtcaagcccctctgtggccaggcccagctcccaagccacagggtctcgagtgctcagttctgtagacttcattgtctgacgctcccagctcctcccagctaaagtccaaatgcctctattaactccaccctacccctgccctgatctgcacccacaacctgataagacaggtcaaccagttgcatagataacagaagccaggtctctgggcagccctcaacccaggtgggcaaatccaggcccagagaggatgggagtactgtccagttgtccagggtcacactcaagactctgtccatcactctccaggcccctattttctcatgatcccctcagaacccaagatttccatcctgaccccatctaacaatgacattatagtactcagatgagaccaagacaaatctttgtacacagtttataatccttaaccgtaactatgagatgagatctaggatcgtgcccattacactgatgagggaactgaggctcccagaggaacttggctcacccaggatcccaggagatggagatgggtattcccacccagggagccaggctcatggttaagactctctccaccccatggcttgggttgagctgggtttagaagtacgaggggcttgcagatgcccactatccggtggctggacccacagggctaggatctagggttaggagacagggaccaggaaagggaaccagtagggggaactgagtctagggacatggttagccagccctgaacaagaggaaagtcacaggcctgagacaggcaatggagtagggtgtgtgtgtgtgtgtgtgtgtgtgtgtgtgtgtgtgagcaggagtcaggtacccggggccttatctgggacaatacttttacccttggtgactttggaacctaggcagggcgcatccctgggaaaaccccagaaaccctccaaagctctggcttgtggggactcatcattccttcttcccaggccacaaacatcccaggagcggccgcatcccagcctccagcccggcgggaaggggacttccggttagaggggggtgttcttctggcccaccccaatcctgccgggtcggagctgagctggggcgcagggctcgcagaagccaggtccgcggaccgcgcatcctccctccagcccacctccagtcctccccgcccccgcccgcccccactgtccccaaggccgccctggcccctctccgcacgcactgcgagagcgccgagacgtggttgagcgcgtaggacaccgggagggcgctcagcgacagcgccgcgatcttgccggccagcggcgggatgtccatagcggcggctgctggaccccggctcagccccgacgcgttctccagggcgctcggctcctcgttggcggcgagtccgggccgaggctgccagggacccgccccgcacaaaggtcgaccccgctgcgccctgggcaggccgccgtgaccgccctgcgtgttcccagggagcctccaaggcccctccccggccctccccctggcagctgccccgccccttcgcccctcaccatcgacaccctcgtctccaatggccgtcccgctactcagcctcagtttccctcactgtcaaaggctgggacacaacacctcgggatgcttctgctcttaggccaaggggtgcgccctggaggtcctggcgtgccccctctttcccctgcctccacaacttcgttctaaggaaattttctcctggactctgcgcttctaaacctctgcattccccagagtttcccatccccacccaaagatcaagtcggcattccctgtgcgcacggatggagcaacctccagctcttgggtgcaaaatgcctttcagtgggcttagatttgagttttcataaggtggccacaaatgtaaacgtgtttccaggcaggtgtgaagtttttttgtttgttttttgagaggtctcactctgtggcccagactggagtgcagtggccctcctccttgaactcccagcctcaagagatcctcctacctcagcctcccaagtagttgggactacaggtatgcaccaccacgcgcagctagttattttttgtaaagacagaggtctcacttttttgcccagactggtttcaaactcctgggctcaacagatcctcccacatcagcctcccgaggagctgggattacaggcgtgagccactgcgaggggtctttaagtgtgaggctttgactccggggctgtccctttgcaggctagtcccgggtttagggttcttcatttcggggagagggtagaaggggtcctagcgggtgggggctgaagttagaatatcgggatggagccagtttggtgaagagtttgggaacggtgttcctggcagggaggaaagtggctcaggcttggaactgagcagtggaaaggaggtcggttctgctggggtgtgatgagaagcgagacagctgtgagaggctgtgggaggttttgaacagctgggagggggccacagtattgggggggagaataaggagaccatctgtctttgtcaccccctccaaccagactctggcccatgtggagtacttgtggatgctgcagacagcaaggtgaaccatgcccacctgacgcctgccctgcgggaccccagtctgcagctggcacaaattctaaccactgcccctacctcaggccccattctgcacgcagccccttagcttgatgccaactgggtcacaggtcttcctgaactgggccacaagagggtcttctggccgcaggtctgactcagcctccttccccaggtgtccactgcccatgggtgaagttcaggttcccctggactttccccaactctagcagggtcaacaccccccaggcctgctttctgtctgtaaaatgagccttcttgtaagcgggccccagcatcccctcctccaggcagccctgcctgccacccccaccccaccttctccacacaaggccagggtgcctgtgcccagctcagcctaggggcttggccttgtcccgtgtacaggatgcacctgcacacgcacacagcacttggaggcctcgtcccctggcaaggggtaaagtccatgccctgagcctggtgagcctccaggttgctgagaactgagaagtgacttggatggctgaatgcctgggacccagtgccaggattccctgaaccactggctgcagagaactaccccgctgtgctcagggtcctggcccactgccttctgggcagccctcattcatgggcacccaggccaagcccaccaatgttactctttgctctgcctcagccacagcgtcaggaaagaacaaagggtggtatatcaccccagccttggctctgccactgcatctggcacctccctg

SEQ ID NO: 1561178 - DNA, 4001 bp, Homo sapiens
ggcacccgccaccacacccagctaatgtttgtatttttagtagagttggggttttgccatgttggccaggctggtctcgaactcctgaccacaggtgatccactcgcctgggcctcccaaagtgctgggattacaggtgtgagccactgcaatgggcccataatcatttttgaaggagggcacctgcattttcattgttcaccaggccctgcaaattatgcagtgagaatgggaaaagaaagaagttaaagagagggaggcttggaagaggaggcaaagatgaaggaaggtataaagcagagagaaataaatattaacagattttggacacacacacagagagaaactgaggcagagacaggattggtggagaccagggagacggcaaatcccagagagaagagaccccagagccatcgaaaggcagcactcacctggagtccgaagtagagacaaagatgaggggaagaaagaaaccaagagaggcagctctgagcggggcagagagaggccccagaagccaggagcggcagaggacagagggaggagaccgagtccagggtatgggagaagggcccggtccgggctgtgcgggtcccagctggaggtggggcctcacctgtgtgcccgtctggcctgcatgggccagggcagttcccgggaagggtgagggtcctgcagctctgtctgggtgacttctgtgaaggcctttctgctccttcctccatcctcctcctcctcctccagcgccccccaaggcagcaccccagggtctcggtaccgaagggtggcagcactgggcagctcgttcagcacagaagacagcgatgggcctggggaggagcagggggctgggaagacccgggagtctgggccctaattcctcctccctcagaccaggaaaccaggtccccggcccctcctccctcagacccaggagtccaggcccccggctcctcctccctcagacccaggagtccaggcccccggctcctcctccctcagacccaggagtccaggcccccggctcctcctccctcagacccaggagtccaggcccccggctcctcctccctcagacccaggagtccaggcccccggctcctcctccctcagacccaggagtccaggcccccggctcctcctccctcagacccaggagaacaggcccccggcgcctcctccctcagacccaggagtccaggcccccggctcctcctccctcagacccaggagaacaggcccccggcccctcctccctcagacccaggagtccaggcccccggctcctcctccctcagacataggaatccaggcacccagcccctcctccctcagaccaggaaaccaggttcccagcccctcctccctcaggcccaggagtccgggtgccagcctctacttcccctggacccaggggtccacagccctcaactccatccccaagcgtggaaccctcctactccagggcagtggagtccaggctttaacttccttttccctctagctcaggagtgtgggaacccagcctctcctattcccaagacacccaaactcccagcccttagccctcccctcctcccagactagcctggttctccaggctcctcctcctcagaccctggagttccagcctccagttcccttctcccccataatatcaggaagtggaaccttctctctttagccctcagactcaggaggccaggcctcccctttcctcctccagcaggactcccacctagcctgaaggtcggatggatctgagcttctcctggcattccctacctcctctggcctcccggggggccagccactccctagaggagccccaggcttctgattccaaggtcgggttttcttccatggccccaggctgggctgtctctagtggccaccaggcagacactgccccaggtaagggaggggccaggggcaggtgtgtacctggccagcaggtggcccggagggagtaaggtacacttcctgtggtttctcagggccgctgatgcgaaaggtctcctgggagctgaagtccccgtggtgccccgggcctcacagtttggttcctgggctgggcgggggggctgtacctcaccctgggacttggtggactaagtccttcccaccgtttatcacccagatacctgcacggacacgatgcctttgtgcaacactttattgggaaagatttacacacggtgacctgtcataggccaagcgatgagaagagggcgccaggagtgctggggtcccgaggtggctcagatggaagccatgggacggccgtccccaggcccgcgcacccgcacctcagtttcccctttgtgaaatgggaagcttatgcttccttccaagtctgcaatattggtgcgatgagctaaaagtggagcgaaagacacaaggaagaggcttcccactcccaggacctgcccccaagctccgaccccacattgtggatgcaaagaaagggaatttgcccaaaacccactgcccaggggccccttccgttttggggaagtgcagtgctctctggatacccagaagctggagcaggggccagtgactcttgtctggacaatactttgattttgtaggagtggaggtggcctctgggcagagggcagggaggacacccccgggtctgcttcagttgcaggcagggtatttagctggggaagaggaaattctctccaggaccctctccaaggtaaggactctttctggggaggagacagcagcctggttcacagaattcccgggaccagctggcagagggagcgtcgtgacagcttactcctcccggagcttctccggggcaaggctggtgggctgggatgctgccttccgccggctggggctgcccccacctaaagccagccccagccccagggctgccagggccaggaagtggatacagaagtagatggaggcccagtaccgaagggtgtcggccaaggagagcagcacgaagcccatgcacatgtagtcataggcgcgcatcttcaggaaccagtgcacccagtcccaggccttctggccccctgggctcagccgcccccgcagggctgactccagccggccctcggcagccaggcacagcgggatggtcaggaagctcaggtagtagcccgggtggaggccgtgccagtaggcgctcagcagcatggtccaggcgctcctgaggaggaggctgggagtcaggacctacgagtccaggtccccagtgcccactgcccccagatccaggagtccaggaccccagcccctcctccctcagaccgagaagtgcaggcccagcccctcctccctcagacccaggagtccagaccccaccccttcctccctcagacccaggagatcaggccccagtccctcctccctcagacccaggagaccagaccccacctccctcctccctcagatccaggagtccagaccccacttccctcctccctcagatccaggagaccagaccccacctccctcctccctcagatccaggagaccaggccccaggccctccccactcagacccatgaccctagctccggaaggcggaggaggctacaggcctctgtctccttcagggatccaggagctcgcagccttccatacacactcagtcctatcaagaccctcttcttctttaaagatttaacattttatattccactgcccttcctctcccaggaccaacaagtcttaattcttcagcccagtggttttttttttttttttttgagacagagtctcgctctgtcgcccaggctagagtgcagtggcgcgatcttggctcactgcaagctccgcctcccaggttcacgccattctcctgcctcagcctcccgagtagctgggactacaggcgcctgccaccacgcccggctaattttcttttctatttttagtagagacggggtttcaccgtgttagccaggatggtctcgatctcctgacctcgtgatctgcccgccttggcctcccaaagtgctgggatc

SEQ ID NO: 1561179 - DNA, 4001 bp, Homo sapiens
gtatctcactttctccacctgtaaaatggggatgacttgagcacagggtctgcttcacaaggtggtttggagatttacggtatgagttatttatgatatgagttccttaaacctttacaccagggtttatacctagaaatgaactacttttttttttttttttttttttgagacggagttttgctcttattgcccaggctggagtgcaatggtgcgatctcggctcactgcaacctctgcctcccaggttcaacttccacctcctgggttcaagtcattctctggcctcagcctcctgagtagctgggattacagacgcccgccaccacacccggctaatttttgtatttttagtagagacggggtttcaccatgttggccaggctggtctcaaaactcctgacctcaggtgatccacccgcctcagcctcccaaagtgctgggattacaggcgtgagccaccgtgcccggcctgaaatgaactacttattttaagagctgctactcttactataattcagttggagggcacaactacggaggggaggctgggtcagcccaaggggggcaccccaggtgaatcctagagatctggaaggagtggccccagcgcagcctggacacaccttgatgtcctccattttaacatccagcatctcctcgggctccacagcctctgcccatccttcgacctcctcgtcatcctggaggctgtcaaagatcagttcaaagaacaccagcttctcggagatggtgctgaaggagttgtcaaagcacagcttgtagtccccggcctccgttggctccaccctgggcagacagacacacagacatgacccagggtggccagccagccgactcagcggggcagtcagggcggtaacctgaggccgcctgggaagggcagggctgtaactgaacccaggcaggcatcaagactgaactcacgtgtgtaccccatcagccttgcgggactcgctgaccaacagcacgccctgagggctctccagcgtgaagtccacgtccagtccagcacctccgatcacctggggggcaggtaagagcgggtggagggctagcggtaggccaagggcgcctgccgaagagggctacggctgaaccaacactgatcaatacagaccaccaagggcttacctgaacggcggcacacccacacccgccccaacctgtcccagtggctgcgccccttgcctccaccctcattgatatgacagcttggggtccatactttcagctgaccacgcacctaccaaaagtacttaatggacgtttacctgaccacgcccctggttggctccgcctccgaaagaggataggcccagcctttttccttagtctaacccccgagaaaggcctgtgtgggcaacgcccccgcagttgacctatcagcactatcgccacgcccaccagccagagtcctgtcctctcagaggctccctatacttatcgatggccccgccccctctggatctcttactctagccccgcctgcttcattactccctccccttccgctcccacacaccgtccccgccccatctgtccatctctttctagctccgcccccgcgctcccaagcacggattcctcccccttcctcctaaagcgcgcctcgcctcgaccgcttggccacgccccctctccctgactctgctggccgcccagcccgcgaccctctacctggtattcggtctcgaggcttgcgttggccggcgcggactggtagaaacactgcttcctccccgccggcaacaggaacgtgaactcaccgtcctggattggcgggggccccgcccctcccacctccactggtggcattagtagccacaaggccagggctagggccgcgccggccgccatcatccgggtcaccctctggtctgcaaaggggtcgcggctcctttaagcgctagccctgccccggtgctactcggcggagctcattggcagtggcttctgtatgttgtccgtaaccagaggtgccaggagtgaaggacccccccactagagggcaggcggcccgaatgaatgcctgatgtgcccagaaacactcaaccgtctgggaatatttttctcaaaggcttcggctctcttctcggccgctggtggaggaaaattacaaaaataagtgccatgatggcgcatcttttgtaggcagtagctaagacaactaaagttacaggcggcagggtcctttttagtcacctccacgtggttttcccagagtgcgccgcgcgtgacaacctttggcgggaccgacgtggtggagtggacccaaaaatagcgtctaggcgtggccctgtacgcgacccgtagggctcgcctataaaagggctggggcggggcggagatacctgtggcgtcgtgttttgcttgctctgtgagcgtggtccaggttcgacgccttttgcgccttagaggcatcagcgtatcagtttcctcgtaagtcgggagtgatggaacgaccaccctgtagtgcggctgtgagaattgagatgaggcttggttcatattgagtgctcagctttcctggcttatagacagtggaggggcgtggccccaccatgcaccccaagggtctcagactcaagggccagcaggtaaatagagccattacagtagcctcgggtcagaaaaacgacagcccaggtaggaagagataaggacagtgtgggactgggagccacgttgcctggttcagctcctgccccacccattacttgaggcattccctctgttgagcctcagtttcctcttctgcaaaatggggataataggcctacgctactgggctgtctttaggatacgtgaaatgcttgttgagtgcttgcttccgcagtgcgtgggacatcacaggccctcagtaaataataatctgttatttggttcccgtctaaacataaactgtgtacagggagatgtttagtcttcaaagataaacccggaaaaggttggcaggtgatgacaaagatccctcaaatacagctggctgttgtcagcactttcctgcatttggagaatttggggaagtagctctttgtaatatcagtttggtattccttttcactccaactttttctatcatttacactcactgcttggacaatttgaagtaacagtggagaacgggtgactccttttcttttttttctttttttttttaatttttttttcctttttttttttttttttttttgagacagagtctccctctgttgcccaggctagagtgcagtggcgcgatctcgactcactgcaacctccgtctcctggggttccagcgatcctcctgcctcagccttccgagtagctgagactacaggcacgtgccaccacacctggctaattttttgtatttttagtagagagggggtttcaccatgttagccaggatggtctcgatatcctgaccttctgttccatccacctcggcctcccaaagtgctgggattgtaggcgtgagccactgcacccggccggattttttttaggacagggtcttgctctgttgcccaggctggggtgcagtgacgccatcatggctcactgcaatctctacctcctgggctcaagtgattctcccacctcagcctcctgagtagctgggactacaggtgtacacctccatgcctaactaattttttgtagacatgaggtttccctgtgttgcccaggctggtttcaaactcctgggctcaagccatctgcctgctccctcaccctcccaaagtgttgggattactaaaattgatttttttaaatacagtaaaattcacattgcataaaattaacaattttaaggccgggtgtggtggcttacacctgtaatcccaacacttttggaggccaaggcaggcggatcatgaggtcaggagatcgagactatcctggctaacacagtgaaaccccgtctctaccaaaaatacaaaaaattagccaggcgtggtggcgggtgcctgtagtcccagctactctggagg

SEQ ID NO: 1561180 - DNA, 4001 bp, Homo sapiens
cttggagggctacggtgagaatttgatgagattacacatgtcctatatacacatgtgtttacatatatgtgcatatatttgtatatttatgtgtgtatatttgtgtacttttgtgtgcatatatttgtgtgtgcgtgtatttgtgtgtgtgcatttgtatgtgtatatttgtgtatttgtgtacacatatttgtgtatttgtgtgtgtacttgtatgcatatacttgtgtgtatttgtgtgtgtgtatttgtgtgtgtatcaagtccagcacagaattgagtacatacagtaggtgttcagtaaataaatgttaaattaatgaatgatggtgaggtgtggtggctcatacctgtaatctcagcactttgggaagccaagatgggcagatcacttgaggccaggagttcgagaccagcctggccaacatggcaataccctgtctctactaaaaatacaaaaattagccaggcaagagtcccagcctctcgggggctgaggaaggaggatcacttgagtctaggaggcagaggttgcagtgagctgagattgtgccactgcactccagtctgggcaacagagtgagaccctgtctcacaaaaataaataaagaaaaataaatgaataataatcctcaaaatcctcaataatgacaatgatgatgatggtggcaataagacctcaggttctagagtgagaccaagactaggatgaggtgaatatggcacccaagggtgcaaaatttaacggggcactcactcttagggtcaagcgagtgccctacttgcctaaccctagtcctgggccagctctggagtcagaccactttggttcaaatctaagccactatgttgtggccttgggtaagtcactttccttccctatgcttccattatctcatctgtaaaatggggatgatggtggtatctctcttactgatgattcaacaatacatgaaaaatgtctggcacagtgccatggagtcagagctcaaattgtgtgataataattatgattacagcgttgtgactttataggtacaattattatcaggtagtagaaatagtaatgatgaggatgattactatacccatcttaaagagggaaaaaccatgccccagagagtgcctgttcaagccctcagaacaagccagagttgggaatggatgctgcgtctgcatctcggagacctggctcctgcattccagctcatctcccgcccactagggaaacacgaagggacccgggaactacaactcccaggaggcgccagggcagctctctgcagcaactagggccctgccgccgcgaagcctgctgggagccgtagtccccaggctcttgggcctgggacaggcggtacctgtattaggaggcggagcagctgctccttggagaagggaatgaagcgctcgcggtactgctgggcccagtcgcggggctccctggggttccacatcttgcgatactcccccattttggctgccagcgatgagagggcccgggggggcccgaggagcgcgggcaacagtggccatactcggaccctggacccccagaccccccgggtcacatgcagcatggctagaccctttccccggagcctaaacagaggaaaatgggcaggggtcaaaggccatctagaggaaaagcgccctctccacctccacgtcccaccctccagaagccgtctctaccccaggcagggcgcagagcccatccgctcgcctcaaagcccctgttgcctgtccccttcccacactgctcagttggcctgggtcccagacaggggtcagaggtcttaggttctggggcgtttttcaggcccagagaccctgtagtggtacaacgtttctttggggtctagacagcgaggtagatcttaggagagcaggaaatgctcgtaaaggttacctagggggtgcagggccgccctccctggccatgcaatcccccgatttctccctcaccttagccaaagctcgactgtcattgagcctcctgcgcatgtgcaggagggcgtcctgggctcccgaggttcggcttcacccagcagtaaaacgcatgcgcaaagcttcggtcaatgcgggctgtccatttctcaccgccgactccctacatcaactacgcatgcgttgcctgcctttctccaccgccggcctcgtttgggcgcgacgcatgcgccgcaggagtgtctccttgtcagcttgctacaaagggaaggggcggtgtggacgcgagactccctagagggatggggcggggtagggctcccgcgcgcagtccgccaacggcgcgcagtccaacgttcgccgaggccacgccccggctcgtgtcagctcctgagtaggcggaaagagggagggggcgggacttgggcgcagccaatcagctgtggaggagcgaaaaggcgggaaaaagcggaaccaaaagaaggctgaggtggcgctagggaccaggaggggtgggggtggcgaaaggaagggcgggccctcaggtgacgcagattggccctccagagaaggggcggccccttctcaggtgccgtcacccccaaacctcagcactgccattccaggtccttaaaggggagaccgcgattctaagaaggtagcccagtgccggggcgtggcctcattctgaggttccccacaaatccgaggtcccgactcccagcttgaggaggtgcacttccgtgaaaatggagctgaattcgaaagggaggcccttattctgggaaatggccccaagtgacaaggacagcctgaaatatgccctgagatacctgggttctccacgaagggtgctgtcacccccaaacctgaaagggattattcggtttcagacctcccaggggctctgatctcaatggccgcaccccctagtccccagaaagtcccacctgtgtcctctcacagaaggacccagtccctctgcaggcccttcagctcctgggtcacaagacgtggtccccaaatatcccagccctcccctgcactccacctctgggatccctgacagccctctcgcccaacaaccccctcagcccacattcctgacttctggaacctgaagcagccccttcacttatgtcccccactcctgggacccccagaatcaccctcaccccaggccctcacctctctggaatcctccatagacccccttaacccacacctcaacccaggggacccttagcgactctctcatcctgcacctccacctctgtgacccctggcagccctccccacacgacaccttgcctgggacccctagtatccccatcctatgcccccctctcctgggacccccagaaagctccctcaccacacacaaccccattcctgggaacccccagcacccgcatcctatgtcccccacttcagggacccctagcagccctctccacacaacacctttcctgggaccccccagaacccccatcctatgcctcccacttctgggacccctagtagccccctcaccacacaaccccattcctgggacccccagcacccccatcctatgccccccactcctggggcccacagaagccccctcagcacacacaacctcattccctgggacccacctgcacccccatcctacgtccccgacttctggggcccctgacagcccattcaccccacaccctgactcctaagaggctcagcagtcccctcaccccacacaactccattccggggaccccccccatccccaccccatgtcccccaatcctggggcccccaacagcccttccaccccgtgcccctgactggcatcccccatctgtgtcatcccacagcagccaagcccagggctggcctgaagcccccggacggcagtgcccagcaggcagcgcccagcaccctggctcccacctcccagtggccccaaaggaaaacagctgccatgcacatccccaaaagcctccaggagctggccaacagcgaagccgtgcagtttctgagaaggcccaagaccatcacgcgggtcttcg

SEQ ID NO: 1561181 - DNA, 4001 bp, Homo sapiens
gcagctcacctcccccaaccctgctccctcctatctcttcccccacaccccatgtgccagactcacatccaaagtaacaagagaggaagaagatgaggatgaagatgaggaggaaggtcacatctgtctccaggatccctgccgatttggtaggaggagtaaggttcattcaggtggatgtcccctcagtgggcacccagctctggtgtcccacagagagcctggtttctaggtccccacgtgctcaccaaactcatcagcggagaagtgtcgtgtccagaaggacttgccattggtgaggaccatctcatactccagctgcaatccatcaccctgtggggggtagggaggcctaaggggggccctgggcaagttgggggttggcaggaaggcaaagagaaggtggtccaggtggccaccccagccccttaccccacacttgctgagcgcaatataccaccaccgttcacgcactgagcggaagctgcggccactggagcagctcaggtagcgggttccctcctctgataccacctggggacaaacgagaaggctgaagcctgtccttgatgccccgaaggcttcatccttcagcacctgcccactcccccaggctgagcctgcacctgacagccggaccaggcatactgggtggtgaggttgatgacctggttgttctccggccggatcactgactccttggccaggcagtcctggggaaggcagggacagggtcactcccccggccagcaacgaccttctcccctctccccctatgccctcttcacagccctcaccttgtcccctgccttgtacacggctggccactgggatgggtcatcaaaatagaggaggatgttctgacagcacttggcctgcagaccagagatgttggggaccgggagctggggcagcctgtgcctttggaggccaagggaagtacccagcctcagcatggcgagtgttgggggagactcacctcagggtagcggaaacggaagtccagtcggccgtaatccgagaggaaacaaaatcttgtcaggaacacccagtcctgaaaaaggggcccagtctgaccctccgctgagtccttcaagaactctttactccatagacccccaacttttcttccctaccccccaggtacctggcttcccaagtactagaaggagaccaggtcacctccaaactccttccctgatcccgtcactgtgggtccaggattcctgccgccctgattttctccctccattgcccccccaagtttcctcccctccattcaaacactcctccctgcatttcccgggatctttctggggagaaagaccttaggggccagatgctcatcctggccacctcatgtcctggccaatatctaaccccgttcccccaatatccacactcccctgcaccccaccccgtgctcccaaagaccatcccgcgcgggggaatcttccaaacggccccctcccggtcctgagcgggagtgtggcggcgagctcggggctctctgctgagtgaaaagtgctgtcccttcagcaccacctctgcaccacccttcccaaactctgactctcccaacccgctccccctccccgctcagctctgacctcaacgtccctcctacaacccccaggtctggccgcgaccctacggctccccttagcctcgactctggcccagtcccccatcgccctcggccccactcccccgaggctcccggagtccgccaggaggggcggcagggggcgaggcggtacccgctcccctcgcctcccttgcgtcccccgggggccggcgggccgcagaggagggctcggcatgctcacctccttggaactgaggttgccccgcacgtacttggcccgggcgcgggggggcagtgacagcagcaggagcagcagcggcggcagcaggcggcgcagcgcgggcgcgcgcaggggctccattccgcccgctccggccccggctccgctccggctcccgcactggcccggcaatggaggcgagagcgcgcgggctggccagcgcgcgcccccgattaaaggggccgccgggcgccgcgctccctgccccctcctccaagagggcccaacctgactcctatcttctccgcgtgggagggggacgttcatcctctgtcaccccgccccagccctcccctcctggagtcccgtagatacctatggtttcctgtgtcctaaactgaactcacgtcttccaaagccatgcctcctccagactgccttctccggatccccagacccatgctctgtcctggcctcccctcaatgtagtccccaaactaattattttttgagacgagtcttgctttgtcacccaggctggagtgcagtggcgcgacctcggctcactgcaacctccacctcccaggttcaagcgattctcctgcctcagcctcctgagtagcagggattacaggcacccaccaccacgcccggatgattttttcgtatttttagtagagacagggtttcaccatgttggccaggctggtttcaaacttctaacctaaagtgatctgctcacctcggcctcccagagtgctaggattacaggcgtgagccaccgcgcctggccaacaagtctttgattgcccatcaccacctctattgcagccatccccagctgtgtccatcctggagttgccagcgttctagatctgatgcaccctgcaaagtgcccatggaggcacagagaggggaagccacttgttacaccacatggtggtggtggaggcttcagtataaccaccgtacccctctgcctgaccatgacctgtcactgcttaccatgctgtgaagctgggttgctgtgagagacagaggtggtagtgtgagatagccaaaagcatgtttcagatccaagttaaaataacttgcttgggttcattcaaatcccagcctgacccctactttttcacttgtccaccataagacctgggccaagtcattcagccctatgatctcctagcccagtcccctctatgcagatatcaaccctatggtttcccagtggacaacagcaagccctagaaaggcttttccagagtagaagccatgcccttcaccttgattttcctgatcagactccaacaaacatttctagcttcatccttctccactgcagaaaacgggggctgctcaaaataccattttttacaaattttctaagccaaggggccaagctggaaatataagtgaaacatttttaatggagagcatggatcccacaaagagggggcctctgctacttggccagttgttgccaggaaggattgtagtgctgctgccagatccttttttattttttctttccttctgaaagaagccagaaatgcaatttaaaaaaaaaaagcaaactgcctggtttgtaacagtaggcaattgattccaacatttaaaacatatcgtgggtgaaactaaaaaaagcctgtgggccagattcagccctgatctgtcactcctgccctgagcctgcacatacactgttccctgtgttcacagaccaggaggcgctcaagggcaggcccagatgtggcttactctaggtcccagcatggcctagggatttgctgagtgaaaatggccctgtatctgctatgcagcctcctccaggacttgcatatgctgttccccttgcctgaaatgttcttttcctcaagtaccaagtttccaccacccttgaaaaatagagggttcgcagggcacggtggctcatgcctgtaattgcagctctttgggaggccaaggtaggaggatcacttgagaccaggagttcgagaccagcctggccaacatggcgaaaccccatctctgcttaaaatacaaaaattagccatgtatggtggcgcacacctgtaatctcagctcctcgggaggctgaggcaggagaatcgcttgaacctgggtggcggaggttgcagtgagccaagattgtgccattgcactctagcctgggcaagaaaacaagactctgtc

SEQ ID NO: 1561182 - DNA, 4001 bp, Homo sapiens
accagggcctctgagacccaggtggacacggtattgggagacagttcccaagagagagaaatggaggcagcaacaactttccaaatactgtttacttcactaaaacctggagtgaggcagggaaaaggtacatcaatgtctgagacaccaagcctaggagtgcacattgacaacggcgacatacagggccaaagtgctgagggccagcagccccgttaccactgctcgggccagtagagctgcccaactgcccagcgagcagaggtggacgaaggtcctgcaggaaaatgtcacaataaggaagggagactagataacccaccccactttggacccagccctaaaccccacccaactcactccataacaaaggccttgtagacactgaggaacatcagcaggaggacagctggccggaaggtgtggtacagatcatagcgtgttatcatccagacctgagcagacgcgacgatgtaatggacctagagggaggcagaaagtcggggccaggccttggggaggagtatggccgccagcagaaatgtgtatgtgggagagcacgactgcctaccagactgatgttggagtctatgctcatctggatgtacttccagtcaaactcaatgccccgggctccgacccataggggaatgcagctgaggaaggcaaaggatgggattctccagtactcagacaccttcagcaccaggctttgagcccctgccctccagcacccccgtggaacccaggtgtcccttctcaggggtctgggctccaggctgctgtacgcaccgggacataataagctcagcagtggcccagcccagggcagcaaccatgatcttgtactctcccttgccggcattccgggacatgacaaggtttagacctatcaggtctgccacatccacgctggccttcatgaactcctgcgggtcaggttgaggcttaagtaagcacagggggacagggagccccattcctgaactcccttcccttccctggcccctctcaccccaatgaagtcatagatgccgccttcccaggtgggaaagaaagtggccaagaacagcatctgagaacagaaagcagaaagaggtcacttcaaggtgaggggatcaagataaaccacgtgggatttgtgggaagttcgtgggtaggaagagggcaggacaggttctgggggcccatctggaagaggaaccaccagatggtggcaaaattacaggaatcggggagatagaggataggtccccgggtccccgagggggctggaagtttgagttctgggtgatcacagggcatctgagtcaggtctgaaggtgctgctccttgggcagtgttagcagcacgtacggaatcagtgatcactcttaaccgcaccaaaaaaaacctgttagccaaccacactactgaggttttctcagttttactaagtgctacgcaaaagttgcttctaggtctcttctcaggtcgtgccctctttaaagtccatcctctctaggtatcctgacgcctcccagtgcggagtcccgagggcggtcccaccgtggggcggcgggggcgcggataggcaacgggggcgggtccctgggtctgcagagcctgggggccagaacacgtggcttcccggtggccctcaccttgcagagttggacaaagaggtaggtgactccagcctggacgcatttccagaaggcgttgtactcggacctggagaagcgggaggtgagggtcggcccgggccccgcgccctctccgccccgcgcccttcccgcactcacaggccgctgcacttgtaggtgatgaagtaggggaagtaggcaagagcgaagcagttcccgaagtgaaacagggtcatgatgccggccgcccggtcccgcccgcgcggggatcgcgaggcggcgtctccgggagcgggtctccggctccgccggctctttcgccacggccagggcctggcacccacctgactggcgggggcccgcgcgcgaccttctgggagcagtagtcccggcgcggggcgtcgcgcccagtgacgtcagagagcccgtggccggccctgggtcccaccgctgccggcccagcgctttggggagtgacttccggccatgcggggcctctaccgctgccatcgcggtcccggtctcctgaagtggaacccggcttggagtcgagcgcgacccctcgcccgtgggcgcaggcgatcgagtaagggtggggcgggcctcaaacccggatcagaacccgccctgaccggcgcagagatacgggacgcagccgtgagcactgttttttatttcaccatggacccatcggcgtggggcgcccgccccgggtgtccttcctcccccgggcagccagatgctggaacgggaggcacatgttccggccccggcccctgggaaggaaagaaaggaccttcccgtttcacttgtctcggctgaacatgtagcggaggaggtcgaccacccggtgactgtagccatattcgttgtcgtacctgtggaggaggggtcgggaggttcaagggggttccttccgaccaccccttagttcccctccctctaagtctccagctccttcccccttaccatgaaatgagcttcacgaaattgtcattgagcgcaatgccggccttagcatcgaagatggacgagtgggtatcaccgaggaagtccgtagagacgacctggaagtcagaatttcaaagataagtgtgtccggcagagcaaggacctccaggagctgaggccccgactcttaactctatcgcccatccatgcattcatctataatatttgatgtagccctactgtgtccagtctctggactggagggtatgaccaagtgcagggtatgaccaaggcactgtgtcagggtctggccaaagggcacaggtcacaaacaccctcatgctgtaccagtacatccctttcctaggaataatgcaagcgtttggaatgggccagcatggagggcctctctgaggggtggccatgagcctgggtctagatgactagaaagatctgaccggctggggccctcagcacagtgtctgaggtagaaggagctgcaggaagggaggacctgagggttttagccctagtgtcatgaaaggccacaggagtgttttcaatcctgaaaacgggtgatgcaatgtgattccattaaaacaaaagatcccagtgactgtgggaaagtggacctgcaggagttaatgcagggagacagcaccaaggtggatgtacaggggtccaccatgaccatggcatccactcctcacagagaaggcatctggccatggcctggccctgagcaagtattgaaaaaaatgggagctgttgtcttttgttcactaagcatgtattagtcacctgctgtatgccaggttggagccacaaaagtgaaaaggcagcccctaaatccctgttttcttggagtgcacacaccactggggccaacagtgactatgaaatgaaatttcaggtgaggaatatggccacaaaaagaacatattttgagggggtgccttgctgaagagggaggttcctccagagacttggaggaagtaaggacagactgtatggtcacctggcaagggaagcattccagactaaaggaacagcaagtgcaaaggccctgaggcagggagatctcccttcctgccctgcagtttctgacttggcacattgagagcagctccctggcaagtggaaatcatgtcccttcccagagggctcctcccagggtctcctctcctcagcccctacctcatcctcggtgtaggcaaggatgccagccatgggccccttggctgctgcttttacagcctccttgatggctgagtagggggcaggctgggcgaggcggcaggtcaggtccacgacagacacatccggggttggtacccggaacgccatccctgtcagcttcctggagaatcccccatgaggaacaggagtcagaacttagggacgttgccctccattccccctttc

SEQ ID NO: 1561183 - DNA, 4001 bp, Homo sapiens
agaatcccttgaacctgggaagcagaagttgcagtcagtccagatcatgccattggactccagcctgggtgacaagagcaaaactctgtctcagaaaaaagaaaaaaaaaatgtgcgactcagcgacattagtgcactcccaatgttatgcaaccatcgcctctttctttttttttttttgagacagagtctccctctgtcacccagattggagtgcagtggcgcaatttcggctcactgcaacctctgcttcccgggttcaagtgattctcctgcctcagcctcctgaggagctgggattacaggccggtgccaccatgcctggctaatttttgtatttttagtagagatggggtttcaccatgttggccaggctggtctcgaactcccaacctcaggtgatccacccgcctcaggctcccaaagtgctgggattacaggcgtgagacactgcgcccaaccttttttttttttttttttttctgaaacagagtctccctctgttgcccaggctggagtgcagtggcacaatcttggctcactgggacctccacctcctgggttcaagtgattctcatgcctcagcctcccaagtagctgggattacaggtgcccgccactatgcctggctaatttttgcattttttgataaagacagagtttcaccatgttggccaggctggcctcaaaatgctgacctcaagtgatccccctgcctcagcctcccaaagtgctgggattacaggcggaagccatcgcgcccaacccgtctggtgtattttatgctcagtgtaatgtttttgagattcatccatgttgtggcatgtattagtgtttcattcctttattttttatttttattttttaaacagccagggtcggctgggcaaggtggctgacgcctgtagtcccagcactttgggaggctgaggcaggtggatcacctgaggtcaggagatcgagaccagcctggccaacatggtgaaaacctgtctctactaaaaatacaaaaaaaaattagctgggtggccgggcatggtggctcacgcctgcaatcccagcactttgggaggccgaggtgggcagatcatgagatcaggagtttgagaccagcctggccaacatagtgaaaccccgtctctactaaaaatacaaaaattagccgggtgtggtggcaggcacctgtaatcccagctactcgggaggctgaggcaggagaatcgcttgaacccaggaggcggaggttgcagtgagccgagatcgcaccactgcattccagcctgggcgacagagtgagactccgtctccaaaaataaataaaataaaataaataaataaaataaaaaataaatcctgtcccagtggggctgatagagggcaaagctctccaagtcctcctcaccccttctgctgccaaatgcctctcctctgggtctcgtcttcctcctttcgcttctttttccggaggtctccgtttgcccagacatgaatctgagccaccccctgccctcaggggaatccctgtctgtgggcaacacagatgatcagcaggtgacagctcctctaaaggaagtcacacaaagctatgagggagcccaggggagggaggggtccatgctacctgctcctccgtcggccctcaacactgatctcctgccctgccctgtcctgtgtttgccacctggctgattcccacttctcttccaaaaacataataataataaagacgagaaagcccaggtgatcctaaggaagacttgtccccgctctgagcctccatacccaactcggtgtcctggcacaaagatgagtttggctcactggtgtccccacggtgcttatgtgacctgcttggaccctccctgggaggacaggggacagggctccagcctgccgagctactttcaagttgggaattaggccccactcaccggccacgggtaggttgggtgtctggagcctgaaggatccttccagaagctagggctgctggcctggctcagccgaggggaagaggctgtgcttttcctctgagaaagatgacgttgcactttcatattgaggaaaccgcttgtggttggtggtggggactggtttttatttttatttttatttttttattttattttttatttttgagacggagtttcgctcttgttgcccaggctggagtgcaatggcgcgatctcagctgaccgcaacctctgcccccgggttcaagcgattctcctgctcagcctcccaagtagctggaattacagtcatgcaccaccacacccggctaattttgtatttttttagtagaaacagggtttctccatgtcggtcaggctagtcccaaactcctgacatccggtgttccacccgcctcggcctcccaagtgctaggattacaggcgtgagccaccgcggccggcctatttttatttttatatccctagatgtctatgtcccctgcctggaagtttccccagagaggggatgtagacgtctaggaacacagaggtctcagaaccttccccagggaggggatgtacacctctagagatagatgggtctcggacctctgttttcttgtctgcaaaacagggatcatgatggtctgccctcgtgcaattgtgagggtttattggggttatccacataagaccctaaaagaatgcctgtctgaccgggcccggtggctcacgcctgtaatcccagcattttgggaggctgaggcgggtggatcacctgaggtcatgagttcgagaccagcctggccaatatggcgaaaccccgtttctactaaaaatacaaaaattagctgggcatggtggcgggcgcctgtaatcccagctactcaagaggctgaggccggagaatcgcttgaatccaggaagtggaggttgcagtgagtcgagattgtgccactacactccagcccggacgacaagagcgaaactccctctcaaaaaaacaaaaaagaaagaaagaaaagaaaagcaagagattgactggggatgaggttgctgaaggataaaggaggagaaaggccaggcgcggtggcttaagcctgtaatcccagcactttgggaggccaaggcaggcggatcacgaggtcaggagttcaagaccagcctggccaatatggtgaaaccccgtctctactaaaaatacaaaaaaaaaaagaaaaaaagaaaaaggaggagaaagaccaggagtggctgggagagacttcagactgcaacgtgagtgggtctgggtctgacactggagaaaggagatggggagagtggaagaatcacagaccatgtgcagttctgagaaccccggtcaggtcagctgggaaatgtggtgcaaagatcacccatacgcaagtccatggagaccgaaagcaagtcagtggttgcaaggggtgggaagaggggaggatgggaaatgattgcttatttggagtttccttatgggggttatgaaactgttttggaactagatagagacgaaggttgcacaacattgggactgtgctagacgacaccgaattatactttaaaatgcttagagtgggccgggcgccgtggctcacgcctgtcatcccagcactttgggaggccgaggcgggcggatcacgaggtcaggagatcaacaccatcctggctaacatggtgaaaccccatctctactaaaaatacaaaaaaattagccgggcgtggtggcgggcgcctgtggtcccagctacccgggaggttgaggcaggagaacggcgggaacccgggaggcggcagttgcagtgagccgagatcgcgtcgccgcactccagcctgggcgacagagcgagactccgtcccaaaaaataaataaataaatacataaataaataaataaataaataatttaaaaattaaatttaactttttttttttttttttgagacggagtctcgctctttggcccaggctggagtgcagtgacgcgatctcggctcactgcaagctccgcctcccgggttcaaaggattc

SEQ ID NO: 1561184 - DNA, 4001 bp, Homo sapiens
atgaaggagatgaccccgatgcccgatgccaggaggccattgcggaaccaggagaggaaggctggagggagggggacatggggggattaacatcacccccaaccctacctcctcaatcccccttacccagtcaaactgaggggcctcccttcagctcaccccatcccatccagccgcaaggcaagcccatcccaaatcctcacctcttccaggaagccgctcacctaaccatatccccccacatcctctctggcctccacctcagtgcccctctcccccaaactctgtaacactaaggattcaagggccgggtgtggtggctcacccctgtaatcccagcactttgggaggccaaggcaggcggatcatgaggtcaggagtttgagaccagcctggccaacatagtcaaaccctgtctctactaaaaatgttaaaattagcagggtgtggtagcacgtgcttgtagtcccagctactcaggaagctgagggaggagaatcacttgaatccaggaggtagaggttgcagcgagccaagatcatgccactgcactccagcctgggcgacagagtgagactccgtctcaaaaaaaataaaggattcaagatagtccctgcagaatgtggaggacaatctaggggcaaagttgcagaacctccatctgaggagtcatcttggccaaacccctccctctacgtgtacccccacggcctgcccactcacttctttctcagaactctgggacaaactgtttcctaatccaggccgctcttcagcctcgcccttcttttccttcaaatgccgccatctcctaccgagtatggcctgggccaatcccatccatgtcctaccgagtatggcctgggccaatcccacccacgtccgtccccattcacgtcctttacaaacagcccaccacaccctatatctagatgcccggtcctggcctagtgaggtgactcacacctataatcccagcactttgggaagccaaggcaggaggattctctgagcccaagagttcagaccagcctgggcaacaaagcaagaccccgtctctacataaattaaaatagttgggtgcggtggtgtatgcctgtagctccagctaagcaggaggctgaggcaagaggatagcttgagcccaggagttcaaggctgcagtgggctacgattgcgccactgcggtccagcctcggtgacagagcaagacaccgtcattaaaaaaataaaattaaaaaaaaaacaaacatggccagtccgctccattctggacctcgcctccgtcacaagccccgccctctgcagcctagatcacctccccctccaatcagcagagagctttctcccgattggttgtccccttctccaatcctgaacttccccctcttctgcggggatccacactcccgctctctgcacagtggtggcctctgcaatcgggatggacccatcttgtacccaactccacagaccctaagctctccctgaagcccctctccccacggcaggcgcgattctacgaggctgcctcgcgcaaccctaccaccccctccaatccctacggcgccccgttacccggggtcctcgtcctccccgcaagcccatcccctctgcgggcacctgcgctcttgcagtctgcgcttccgtgcgctcacactgaagcccttctcggagccgagcccgggccccgtttcctgcagaagcccccgccccatcaaggtcccacgcgagcccgggacccccgtcccatccgcaccgcccccacccctagccaccgacctgtctcgtgcgcttttcggaggagccaggcgtccgcacgatccagctcggacactgggggcggcgaagccccggcgcggggaccgtggccgggggcgaaggacccccgggcgcccccgctccggggccgctgaggcggcagtagcgacctccggaagcgaagacgggcaaggcgagcggcccgagcccaccaccagccgcctcccatgattcgcactacggccgccgcgcgccgtaccgccccaccggcctccggtaggttgcaacccatgtcactcaggatgaatggcttacccattggctatgcgctcgccactcaggtccggcgtgaactgtccattggtcggaatggcagtgattccctcctctgtcatctaggccggtagtgcccgtccctccttgattttgtaccggactacgaatcccagcgatcattgcgctcggggaaagccgatattcagaagtcgcaggcgagatgtctgctgggaattgtagttttaattctatcttttttaacggagtacatgccgagcacctattgtagttgtttcttggttgtttctctttctttctttctctttctttctttctttctttttctttctttctctttctttctttccttctttctttctttctctctttctttttccctccctccctcccttccctcccctccttccttccttccctccttccttttttttccccgccccgagaccgagtcttgctctgtcgcccaggctggagtgcagtggtgcgatctcggctcactgcaacctccacctcccgggttcaagcgattctcctgcgtcagcctcctgagtagctgggattataggcatgcgccaccacgcccagctaatttttgtatctttagtagagacagggtttcaccatgttggccaggctggtctcgaactcctgacctcaagtgatccaaccgcctcggcctccaaaagtgctgggattacaggcgtgagccaccgtgcccggccaggtctgtctctttaagacagatttgttttctttgccctaacccattccgggattcagctttgccttctctcatcagcataaaccttttcactagccaggaatgtgaaaaatgtgtctggaatattttcaatttgcacttaatcccatttaaagcttcacattcattgcaagcctgcaggctatgcagtgcagtccatttgaactccctcctcaagtgtaacccccttgctagctcccctacttttcctcttcataaaatccaagcccgggccaggcacggtggctcacatctgtaatcccaccactttgggagtctgaggcgggcagatcacgagatcaggagttcgagaccagcctgaccaacatggtgaaaccccatctctactaaaaatacaaaaattaggcatggtggcaggcacctgtaatcccagctacttgtgaggctgaggcaggagaatcgtttcatgcgcgtccatgtgaagagaccaccaaacaggctttgtgtgagcaagatggctgtttatttcacctggctgcaggcaggctgagtccgaaaagagagtcagcaaagggtggtggattatcattagttcttagaggttttgggataggcggtgaagttaagagcaatgttttgcgggcaggggtggatctcacacagtacattctcaagggtggggagaattacaaagaaccttcttaagggtgggggagattacaaagtacattgatcagttaggtggggcaggaacaaatcacaatggtggaatgtcatcagttaaggctatttttacttcttttgtggatcttcagttacttcaggccatctggatgtatacgtgcaagtcacaggtgatgcgatggcttggcttgggctcagaggcctgacatttctgccttcttttattaataagaaaaataaaacaaaatagtgttgaagtcttggggggtggtatggagagagaatgggcgatgtttctcggggctgcttcaagcaggattaggggcggcgtgcgaacctaaagtgggagagattaagctgaaggaagattttgtggtaaggggtgatattgtggggttgttagaagaaacatttgttgtgtagaagtattggtgatggcctgggtacagttttgtatgaattgaaaaactaaatggaataagagaaggagaaaaacaggtataaaaggtctaagaattgggaggacctaggacatctg

SEQ ID NO: 1561185 - DNA, 4001 bp, Homo sapiens
aaaaattagccagacatggtggtgggcgcctgtaatcccagctacttgggaggctgaggcagcagaattgcttgaacctgggaggcagaggttgcagtgagccgagattgtgccactgcactccagcctgggcaacagagtgggactctgtctcaaaacaaaataataataataataaaataaaaatacataaaataacagactaataggacattttctctgtacctgtgacttgtaaactgagaccagaaatcttttttcagtaatgaggttggtggcggcatctttctcatctctaagtcctcattgctcgccctccccgggaccctagtgcagactggctggctggcacttagggaccatgagtgccagcccatgggcccctgcaagccagtgggtcagggctgttgaagccccacccttcccctaggaccctgccctcccaccccccagtctgtttttctcctctctctccgacctctctcctgtgacctgccagggttttaaccacccaatcagccagcccatcaaaacctcagcacggtgacacctccagcccagacctctctgctgagctcaaccagtagcctcctccaggctctcctgggagaccctagcactcacccatcatcccatacccttccaggtggttcaggcccttcccagtctcacagtcagcccccaacttggttctgcaccctgcaggcatagctagagaccatccctccacctccccacagctcagctctctcctcagccctccctgcacccaaccactggagtctcagaggtcttcctggacctttgggctcttcatcaatgaccccaccaccccccaaaaccccccaagggaaaaggtggtggaggggtgcatctctccacctaaggctcccagaggtctgtccagggatgttctgatggccctgccctccacccagcctcctgtctcagggtcagggctctgcagacatctgcaagaattttctggagtcttccatcagctccttcttttcccttcactggatttacgattctcgaactcaagaaccctgataaaatcaatgcagcctccctcctcattcccgggagcctgtgccttcatctcctacggcgtcctgcacctccgcctgggacgacgccccactttcaataattccggccatcagtgcccttccttcagggccatctccagcgcccctcctcggggatggtcccaggcagagaccctccagttccacgtccctctctctgcccaggccggtcccgtcagggttgtgggagtcccccatctccctgcaccagcctgacccccaggggctgggctaagttttaagaacacactcaataggttggacccagagccgcgtgagacctgaaggttccaactttcctgtctcccactctgagaaccttgcccgccctgaggccaaccagacctcctgagtccacctcccacggcctcccctgcccgttccacacaccccgatatagcagggacccccgatggatcctgtcggcgcggcccccacgctcctgcaggacccccgtccccagagtggacccccaacaggaccccacaccgccttaaccaggttccaaatgtgctggggtccccagtcccctctgtgggaccacgacccctcaaaaggatcccagacccctaaaaggtctcgagggcagaatccccagaacgcttaggggcttctagtccccctgggtacaactcccgccgactccctcggaggtcctgtagcgagagcagggctcccagagagggacacacggccttcagcgtgcccccgaatccctcagagcctccaatccccaagaagaaaccccaatccattccctcagtgtctccctggaccccttcggctggacctcggccctgcagaaccccccacttcgcgggacgctcgctcaccatgacgcgtgcgagaacgcggtgcactcacccaccggcctagggctccgggcactctgcggaaactcgaccaattagagcccgactctggtctgacgagcatcccgtccgaccaatcagtgtgtcttgagccggcaaatcaccagggacgaggaggccgctcgcgttgcatgccggaaattgtagttcagatacgctggttcggatcgatcaaagtgaagattgtgtctgggaggcctgcgtggccgacctctcttaaggcttagttttctctttcctacacttatctcaaaggtttgcagcgaaagcatttattcccacctaagggacatttctgagagtagaattccctccccccatcaagaacattcaatggctcccacttagtagacgaagtacttagtactcctaagtactaagtaggctaagtactcagactgaattcagacccttctgcctgacttaaatctgctgctagcactattgtgcaccctatagtacaacttgcacccaccatgctgtctcatacctccaggcctttgtaaatatcctacatcttgcaatgccttcaagaatgcctcaatcttaaaataaaaacaaaacaaaagcaaaaaagaatgcctcaatctttttcacctggcaagtgccttattcatctctatcagctaggactctggctgtgctccacaaaatatcaactaacatgggttcaagcaaaaaaggaaaatttttggctcatgtgacagaaaatactagccatagtgtcagcttcaggcgtggctggatcaaggaccaaatgtcagcttcagggatctgatgttctttatttcaccgctaggaggaaagggcttctggtgtttgtgccccggttttgccatttgtctttctgtggatgagtgtgtctgcctgagtgtagacatatattgggtatgactgagtgtctgagcatctttatgggggtgggttcctgtgtgtggggcctgagtaattaccttttcgtttttacattttattatgtatttgtgtattaatttttttttttcttgagacggagtttcgctcttgttgcccaggctggagtgaaatggtgtgatcttggctcaccgcaacttccgcctcttgggttcaagtgagtctcctgcctcagcctcccgagtagctgggattacaggcatgcaccaccacgactggctaattttgcatttttagtagagatgaggtttctccatgttgatcaggttggtcttgaactcccgacttgaggtgatccgcccacgtcggcctcccagagtgctgagattacaggcgtgagccaccgggcctggtttatattttatttttttaactttcggctggcaagtgctgaatcctaagcgcactatcgcacgccacctcgtggtggagggcaaaagcgcagtctccctgggatggagaagtcaaaccagtctcacttgtggccctgggggctcccagccttagaaagcggcccatagttttatggacctcacactgggtgcttagcctgtgggcactaacatcagggactggcctgacttcttgtccaccgtgagggtgagatccaaaggctgggaaggctctttctctctggccatgcctcagtttcccccagggtacccgctaccttgacccttttcctcttgctcagtccctggccctggtctggatgtgcggggttggggtgccagtgagtaggtaggtcttcagcccatgtggaaggaaggccaggatcattgtcggggaggtcctcagaacagaagggtgggtaactggctgaagagtttgcatcatctgtgcatgtagcagtggcgctgctggaggtggcaggagctgcatgctcagctggacctccacagccattgatcactgccatgaggaccgtggctcacccctcctgagtggggaagggacagaagggaccaggtgggaagtgttgaagacttgagtccagccaggcatggtggcttggcgtatgcctgtagtcccagctacttgggaggcttaggctggaggatcgcttgaacccagaattttgagaccagcctgggcagcacagcaa

SEQ ID NO: 1561186 - DNA, 4001 bp, Homo sapiens
cactggcccctggggagctgggagctgaagtcatcgtccatgagggaggcccctgcccttcgagaaggcacctgtacccggaacccccaccccttgcctcgccatgctcagttattggtggagagcaacccatggtaatctaggtgcatctggggtgggggcggggggcactgtcagtcactggcactccatgtaggagactgaggggcacgtttccacagctgtggcgtgcccctctccccacccagtccaggcacccctcagaccccaccacccccacatacccccaactccctcatttcagacccgcactccagcactcgtacacctctatcccctcagtccagggtccccatgatcacagcccaggacacccccatgagcgcagatccccctcagctcggatcctccccacttacctcccagatctctctcattccaggctccccctcagctcacacccccacgaccacagcctggcgccccctaagcctccatccccaagccccctccagcccccacctgttaccccagcctctgtgtgcaccatgccccctgctccccacggctttcagagaagagaacacacgtccgtccaccgtatctgtattgagcagtcccccggggactcccctaatcctcctcttcctcgccctctgtctcctcaccctcctccgtcccttccccctcggtgcctccctccacatccctggactctttggacagggcgactggcacgctgcccgtggacggcgtcttcttggtccctcggtgcttggagagcagcgagacggacttggacatgtcacacggacccgccaggaaaccgggcatatgcagcacgtcccggcgcttggcccacctgcagggagcggacggctcagcccccgccctccgccggaccctccccctgggggtgcaggcgcccgccctatcccaggcccactcgccagaacaagcagatgctgcagctcaggaggaggaggccgctgcacgtccagaccagcgcccacatgtgcttcctccgcacgttttctggacaagggaggcagggttaagacccggggctcccgaccgccagacccacgccccagggacctggggccaggagccctcaccgtctggacgctggtggtagcagaccccattgcggtagcagcaccggagacgcaggcagaggttggggctatcgatggccgcctggcccccacagctctcccggtcccatatgtcaccctcacagcctggggaccaaccaccagtggcttgcttcatcacagcgctccgctccgaaggcctcatacacgagattccaaggccatgctcccaggctgccttcctggtgcttactctgtgcagggccccaggggtccagactccaccccctcctccctcagacccaggagtccaggccccagccccctccttcagacccaggagtccaggcccagcccctcctccctcagacccaggagtccaggccccagccccctccttcagacccaggagtccaggcccagcccctcctccctcagacccaggagtccaggccccagcccctcctccctcacacccaggagtccaggtccagccctcctccctcagaccaaggaatccaggaccccagcccctcctccctcagatccagggatccaggcccccagcccctcctccctcagacccaggagtccagacccccccgtcctccctcagatccaggagtccaggccccagctcctcctccctcagattcaggggtctgatctgggctcccctccctgggtgacccagtatttcagcggctgctcactccatgggtagaagaatccctggattccatttccgtctgcgagagaaagggcagtgttagggctgtgtggagccgggcgtccctcctcagctcccccgcctcaccagcccctcacctgccgagccctgcagcagcaggagcaggcccagcgctgggatcccacagcccaacatgtcacctccccagacccctggggccactgtgggaagaggccttacaggacatcaccccagcaaccggccccgcccgcctgcccgccaggccccaggattgtgagttctgttgctagggagtcaggggtgtgctacggacgtggaagggcttcacaccagcctggccatgcctggtctagggtgttgattctttagggacctggtggaagagtgggggcgtctcaggtttagaagagcctctttggccacttatggtgggaaagagaagtctggaagggcgtgggagtctggggcgtgtctccatatcacccggggcgccctgaggggtggggaactgggaggctttgctagggagtttctttcctaaggaaactgatacctgagaaggtggattcgggtggcccgaaggttcaggaaaccccgttgctagggagtttttcgccttaacaaccaggggaaggggagctgtgagacacagaggcctcactgagccccattgttagggaaagtcccccccgcaatgagaagacctgggagggggatgagacaaggggccggagcctaagtccgggggtctcctggtccaggggtcttgagaaaggcttttcatctcagccctgccaggcctgctgtctagggaatgtttagcagggaaggtgatagggctgggcgcggtggctcacgcctataaccccagcactttgggaagccaaggcaggcgggtcacctgaggtcaggagttcgagaccagactggccaacatggggaagccccgtccctactaaaaatacaaaaatcagctgggcgtggtgattacttgcctgtaatcccagctactcgggaggctgaggcaggaggattgcttgaacccaggaggtggaggttgcttgaacccagaaagtggaggttacagtgagtcgagatcgtgccactgcactctagcctgggtgaaggagtgagactctgtgtcaaaaaaaaaaaagaaaaaagaaaaaaaaaacaaacagggaaggggacaggccatgtgggcccctgctgagtttgagggcctggtgggccagagctgctcggagactgtaatggtggctcctggacagggagcccacatttccctcctggatttgtttccccatctgtgaacagaggttagggagtggtgggagggagtcggctaaacggagatcctgaagcttccacattgattccccccaccactccccagtgactgagagaaaacttggcttccaagaagaggaaaccggaatggggggctgggttggaaccataatccctagtgcaccccaactcatccattcagctttgcagcacagtgaggagggagtcttagctccctgggacagtctctgggctagaagtcctgcatctgaaggaaaagggggttgtaaactcagacacctgcattagagggagaaggggctggagcctggactcctgggtctgagggaggaggggctgggggcctggactcccgggtctgagggaggaggggctagagcctggactcctgggtctgagggaggaggggctgggggcctggactcctgggtctgagggaggaggggctgggggttcccagactcctgggtctgagggagaaggggcgggagcctggactcctgggtctgagggaggaggggctggggccctggactcctgggtctgagggaggaggggctggggggtcccggactcctgggtctgagggaggaggggctgggggcctggactcctgggtctgagggaggaggagctggggggtccgggtccgggactcctgggtctgagggaggaggggctgggggcctggactcctgggtctgagggaggaggagctggggggtcccggactcctgggtctgagggaggaggggctgggggcctggactcctgggtctgagggaggaggggctggggggtcccagactcctaggtctgagggctggactcccaggtctgaaggatggggctgggagccagaattgggtctgagggaggaa

SEQ ID NO: 1561187 - DNA, 4001 bp, Homo sapiens
tgttttaagtatttgaataccttctgagcctgtttcattaaaataaataaataaaaggaaaaaaaaacagtctgtgaagttctagttacccataatcccctcctgtctgtgagattattcttgaaacacctgtcaggtctcacttacccacgtctatgaaacataatgcaggcaagggaaggccagagtaaatagagaaatctgagatgcagagatagtttcttgccttgtggccagaaaaatgtgtggaaggggataggaaaccataaattcccagtcgggctggtttttaaacaataagctggggtcaatgtgccagctcagctgagtcaccacagcttggcagcaggcccagccagcgggaggagagggaacagcagctagcagggagatgctgggggatagacagggctgctggggactgttgtacaggctgtgcactgctcaagggtatccagagcccagctttgtatctaccaggaagaaggggctcccctcccctcccttcctcttccctcccctctcctttcctctcctctcctttcctttcctttttttttttttttttgagatggagtcttgctttgtcgccctggctggagtgcaatggcatgatctcggctcactgcaacctctgcctcctcggttcaagcaattctcctgcctcagcctcctgagtagctggaattacaggtgcacaccaccacgcctggctaatttttttgtatttttagtagagacggggtttcaccatgttggtcaggctggtcttgaactcctgacctcgtgatccgcccacctcggcctcccaaagtgttgggattacaggcgtgagccaccatgcctagcctttttttttccccccctggaaaaggtgtagccataggcgctgactgaggtcctgggaacaagtctccagagggcagtggcactcaaacccacgtacctggctggcctcccagaatgtgagctgagcccaagcatgctgtgaagccaagatgcagaggttgatgaaggcacagcccatggagatgtggaagtagaaggggaagagtttgctctgcactagtccgaaggtatgtcggggaaggcttcggaaaagcaggaagcctgcagggtatggggaccacaggggtgttagggcacttcccggttcccctcttatttccatccccaccccaggtacccatgacatccaagctgagggtccctacctgagacgaaggtcacccacatttgcatgccccaggcacctgacaagaccagtagatggaccatcttaatcaggcctcctaggttcccgccttcctccatcttgcagtcctgggaaggaggcaccgggtggctcagaactttacctttgcctcatgcgtggccttcagaccctgtgagcccgctcggggacagggttacggccaatccagcagagattctggcaaagcatcccgggaatgagagtgagaaaggcccaaagcagtcaaggcccaaagacaaccctcgaccccatctctccaaatgtcagccctcaagatctcaggctctctggacctcaatctccatgccacttcagaggccccaaatttcagccacagcagctccagatcatagccctaggtcttcagagatcactccactaattcccaaatatcaccccagggatccagttctgacagccaagaccactcctctcataaaataataccggatattaggtgaagatcccgaaagccccgaggaaaccctaaatctcatcctgaggacaccgatcccaccaaagccccgaggaaacgccaaatctcatcccgaggacaccgatcccaccgttaggaaccgggacctcaatccgcagcacccggattccgagaacagaggcgtcggggccaaatgggctgaatctggtacctcactcccacgcccccgggtggacagcgaccctcctcggccgcgtcccctcgtgggtttcccccaaccaataattcgtcccgcctcccagctgagcccgaagccaatcgggtcgtagatctgcacctttctatcccgccctcctgggtattgactaatcgtagaaacccccctgggatcccgccccctccacgggcttttatccaattacgccgcggctactaagcgcagctgaagcgtgaaggcgccaatgaggccttcggctactccggcaggggcggaactaaaatgccggccacacccctctctgtgactcagtctctgagcgttttaatacgatggtgtccccgcgggatcaaacttcagcgtcacagctgaggactggcttcgtggtccctgatgggagagcatgaacaggtggtatgtggtaggtggggttctggagcctggcgggtgtagatttcacaacccagggggcggagccaggatgatgaccccgccccctccctaaataattctcccgggagggacacggaagcagcaaccgggatgggacggggagagaggaggcactactggggacctaagctggttctcaaatgcctctccttttcccctccaagcctcccaggcttcctatggtccctaagtcccgggttctcagcgtgacattccagagcaaacacagctccccattactctataccaggcactggcatggattaatttatctaatcacaacatcccagtaaggtgactattatgacatctcgtttttatagttggggacactgaggcatggagaggttcagtaacgcgaccagtattacacagctggaagggacagagctaggatttgaacccaggccatctagctggagagtttccctgcttaaccgtcatactctgctgtccctggaagtgaggacctccctgaggcagtgactctcggaggggcagcttaggacatttcaggcagaagaaaaacgtgtacatcacagggtgggtgtgaagatccagtgaatgcttaggggatgcccggcactcaattaggtgctcagaaaataggagcctaaaaaaggattaaggaagattttactgaagatatgctgaatagtttttgtttgtctgtttgtgtttgagacggagtttcgctctcgttgcccgggctggagcacagtggcatgatatcggctcactgcaacctccgcctctgaggttcaagcgactctcctgcctcacccttccaagtagctgagattacaggcatgcgccaccacgcctggctaattttgtatttttagtagagatggggtttctccatgttggccaggctggtctcgaactcctgacctcaggtgatccacctgccttggcctcccaaagtgctaggattacaggtgttagccaccgtgcccagcctgagtagttctgaagagcgtgtaggagtcttccaggtcgactgaatcaggcagagggcctggcaagggtgacagagagaaaggtctagaggatttgggggaagaggctgagtgtgactcagggcaaggtgcctttcacctagaagtttctccaggcagacctgccccagatatctccatctgtgccatatgtggctatactggagggggaggggagttgaatgtgagacccagagctcagctgtttcctgtttccagcctcttctagcacgggtctgggccccaattcagctaacatttattgaacagatatgccctgcctctcctgctcacactctatggctggcattcacctgtggggccaggtcgaaactcctggcttggccgtcaatgccttactggagctgctctgctaacctcctgctgcttcctctcggacctcgattcagccatcatgaatttaccagcatagagcatgtgattccacacctccaagcttttgcacatgctgctccctgccaggaaaggccttcctttaagccaatgtcaaggtcccttttttctttggactcttctgaggcctgattttttttctttggggccttctgggtccttctcactgcccagcccaaaccttggggctgggataatcttttttgttgttgttttttatttttg

SEQ ID NO: 1561188 - DNA, 4001 bp, Homo sapiens
cagcacagtggctagaggtggtcattcaaaacctaaatcagatcaccttcctccttactcacaaccctccttagcagaagaaatcccaaagtcctatctcctctctatcccatctctctgtttcctttccttctcagcactcattaccatctgctattattattattattagagatgaggtctcactatgttgcccaaactagagtgcagtggttattcataagcatgatcatggctcactgcagccttgacctcctgggctcaagggatcctcttgcctcagcctcttaagtgtatgggactacaggcatgcaccaccacacctagctaattattattttttctttttgtagaggcaaggtcttgctatattacccaggctggtctcaaattcctggcctcccagcactttgggaggccaaggtgggtgggtcatttgaggtcaggagttcaagaccagcctggccaacatggtgaaaccccgcctctactaaaaatacaaaaattagctgggtatggtggtgggcacctgtaatcccagctactcgggaggctaaggtgggagaatcgcttgaacccaagaggtggaggctgcagtgaaccgagatagcgccactgcactccagcctgggtgacagagcaagactctgtctcaaaaaaaaaaaaagaaaaaaaaattcctggcctcaaatgatcctcctgcctctgcctcccaaagggctgggattgcaggtgtgaaccaccatgccttgtccttgttatgtttccttattttctgtgaccccatgagagcaggtctgggtccacttggtccccgctgtctctgatgccctgagccagatccattcccctgcaggcaggcacccaacagatgtttgctgacccgtgggacccatgcatttcattgtcccttgggtggaaggtgcatggtctggataggatctacctcaatggtgggagttctcatctgctcaatttcacagaattctggactagaatttgggctcctctcccccgacattctggagagaaacactaccatgtgggacagcggagtcctcagctcaaggagggttcctccttccacaaccactgcccctgataggggtccctcaatgaccacatccctgactgagttcaggtccctgaggaaggaactcaatttcagaccaggacacaggctctggctggctctacccagaaccaagttcaagtccagcactgtcccgcctcccacccacttccaagccagacagcctgagagctcagcctcccctgtttgagatccaggcaagctgatcctggaccctctttgagcctcagtttcctcatctgcaaaatgcgagacacagcagtggttgcacctgctgcaaaattgaacaaatatagaatggagggagggaaggagggaggaggagaggaaaggagggaggcagagagacatggagtggtggggagagggaagtggggagggaagctgtccccccagcctgaggccaaaagaggggaagaggctcaaccaggctcacccagcccccagccgggcctccgaggcggtgaggccagtcctcctacctcctggggccaggcccccgcgccagctcggcgcccaggtggccacagagcgcggcgagcagcaagcaggtgaaccccagcacgagcaccagcgcggccagcgcggcggccagcggcagcagcgtcccggccgcgtcctctggcagcccggggccggcgcccagctcctggcccagcccctcggcgcgcagcccccgcagctcggcgcggcccgcctgcagctgaaacagcagctgcgcgcccagcgccgccagcacggccgccgcgatgcccagcagggtcattgcagccagcacccggccgccgtaagaacgggccatggcgggggttcctgcgggccgggggaagagttgaggaattgaagtggttttagagggcaggggagttggggggaatccgagggtcctcagggggtccccgagggggcggggccgcagggagtgtctgaaagttcggggactgggctgggggtcgccagacggacgggggctccggggtgctggtcgcagccgggacgccgaatctccgcgaaaacttgggacaaagtcttttctcctccctcccggggccccgcgggcgccccctcttggtccgctgggcctggcggggcggggcctggcaccgggcgcagggcggggaggccccactagggactggatcgcgggaaccccacagctcgctaagttcagaaaagggcaccaccccgccccctgccgccctaagcatcgattgtattgtggtttaaaacaagaaaaaggaggccgggggcggtggctctcgcctgtaatcccagcaccttgggaggccgaggcgggcggatcacaaggtcaagagttccagaccagcctggccaatatggtgaaaccccgtctctactaaaaatacaaaaattagccgggcgtggtggccggagcctgtaatcccagctactcgggaggctgatgcaggagaattgcttgaacccaggaggcggaggtttcagtgagctgagattacgccattgcactgcagcctgggcgacagagcgagactccgtctcaaaattaattaattaattaattaaaaaataaaaaataaagagaaaggaggccgggcgcggtggctctcgcttgtaatctcagcactttaggagtccgaggtgggcggatcacttgaggtcaggagttcaagaccagcctggccaacatggtgaaacccccgtctctactaaaaaaaaaaaaaaaaaaaaaaattagcccggcgtagtggtgcatggcctgtaatcctagctactcgggaggctgaggttggaggaatgcttgaatcagggaggcggaggttgcagtgagccgagattgcaccactgcacactccagcctggctgacagagtaagactccatcaaaaaaaaaaaaaaaaaaaaagagagagagagagaaagggctgggtgaggtggttcacaactgtaatcccagcactttgggaggctgaggcaggaggatggcttaagcccaggagtttgagaccagcctgggcaacatagccagaccccatctctacaaaaaataaggaagtcagcctggtgtggtggtgcacgcctgtggacccagctactttcgggactgagacaggaggatcgcttgagcccaggaggtcgaggctgcagtgaactgagatcacgccactgcactccagcctgagtgacagagcgaggctgtgtctcaaaaaagaaataacaaaatttaaaaattcacttttcatttgatctcaacccagggactctgtcattggctgtgatttcccctctgcttacttccttcaagcctttgggtaaccgttgcttcctctaggaggctagggagaatcctggatcccttccccaactggtcccccaaattattcgcacagcactttaaaaaaatcgagatgaaacttacataacataaaattaatcattttattcagtggcatttagtgttgtacaatcattacctctgtctagctccagaagattttcatccccccaaaaggagaccccatccccattaccagccactccccattccccctcctcaagtggctcacaaccattaatctacttcttgtctctgtcgatttgcctgttctggacacttcatatcaatggagtcatacaagaggtggcattctggcttctctcactctgcatgatgtactcaaggttcatcgaggttgtagcatggatcagtgcctcattcctttttatggctgcgtaatattccatagcgtgtctggaacacattgtgttcatccgttcatccattgatgggtatttgtgttgttggttccttttggtgaaggtgactaatgctgctataaacatgtgtgcacaggtatcttcttgagtcactgctgtcaattcttgtggggcgtggactcctaggagtggagttgctgagtcacatagtt

SEQ ID NO: 1561189 - DNA, 4001 bp, Homo sapiens
atccagccatccgttcttccatccatccttccacttccctacccaaccatcaacctttcctgatttcacactttttgctgggcaatgctaggaacaaggacgctagggacctaggtcttaccctcaaggcactccctgtcaggtgggagagacagtaacaacatagacacagcacatggccatataagcagcaagaggggtcgctcagacaatatgaagacccagagaagacccagagaaattaagttaaatcttaaacatgtgagaagttttctgggtggagtggagacagccaagggcactcctggtgtagagaagagcaggaacagggaccaactggctatctgtggactaagagacaccattagtgcagagaggcaggagaaatggggccaaaatatggggggtccacaggccagtgagtgcttcagtttaaccaaaggtgaagagggagccacagcaggtctttgagcagaggcaggctagctggaaaggtgtgtttaggaaagagatagaaggtagaggggaaaggggagtgaatgtgtggtggcttcatttctcctgctgttggtccttcttactcctccttttctaggcctacaggtcaggaaaatcccagctcctcctttcctaggcctacaggtcaggagaatcccagctcctcttttcctaggcctacaggtcaggagaatcccagctcctccacctacgtgttgtgtggccttgggcaaatgtggcgcctttctgcgcttcagtttcctccactgcagaatggggatggtaatagtagtgaccttggagaccagttacatggagaggattaaatggggcctggtctgggctcagtggctcacgcctgtaatcccagcactttgggaggctgaggagagcaaatcgcatgagctcaggaggtggggaccaacctggcccacatggcaaaaccccgtctctactaaatatacaaaaattagcccggcaaggtggggcgcacatgtattctcagctacttgggaggctcaggtgggaggactgcttgagcctaggaggtcgaggctgctgtgagctgagatcacgccactgcactccagcctgggtgacagtgagagatcctgtctcaaaacaaccccaaacgacaacaaaacaaaacaaaacaaaaaatggggcctggtgtacctggaagctggggctctccccgtgcggggggcctaactgtgtgactcgacccccacacttcccatctccaggggcagggtctcacagcctcccccacgtatgcacctgtgcttgctgtgtctgcggttctccgccagagccttcccgtccctgtctccaccccgccctgggactctacctccccatggccgctctctgtctccatctgtccatcgctcccccgtctgtctccattcccgtccctccctcggtccctccgtctccccgccctgccccgcccgcccctcacctgggcctcactcgctgcccgcgcccgccgccccgggcccggcctcgagcgtggcgagctgcaggcgcacgcggcgggagccggcggcgggcggcgggggcgcgcgggcggctcggcgcgctctccgggagccgggcgcggggcgctggcccgcggcggcgggcgccgaccagcggcgggagagcttgcgcgccaggcgggcgagcgccgagggccgcaggccgtagtcgcgctccagctcctggcgcgagatctcgatgttgccggtgtaccagaggatccagcccagcaggctcaggaacaccagcagcgcgcccgagtagatgagcaggtccccgaagtcgcggccgcgcacctgcagctgcgcgaacacgccggtcagcagcgccgccatgcccgccacatccagcgccacggccagcagcagcgccatccggcagcggcccaggccggccgcgggtgctggcgcggccgccggcgcggacggtgcacccggcgggctcccctgcgaggcgcacaccgctggcgccgccgccatggccctgcaccgccgccgctggcgcccagagagagcgttccggggtgcggcccggtccggggcggggtcaggggacggcgccaggtgtgccaagctcccgcctggtcacctgaaccgggctgggcgcgaaccggcgcggccggggttaccctggtcgtggtttccgtgcaggggctattgctcagaggcctgagctggtggtagccaggcgcacagccacgggtgcctagggcccgtgccacccagggaggtcacatatggccaaaaatcagggcattttagtggtggcagcatgggacactcggagccgggcgtggcgttgtttctgctcagtgtccgcctcccgaagcctgtgcagatcagacagtgcagatcagacaaggcctttagacaccaaggagctctgggacgcgagaaccagtagtcggggtgatctaagaggggaagctccgggttccgcggaagctgagtttccttcactcagcgcgtgtcttctggggtctcctgtgttcagcgaatgaagccacgggcacaaggacggacgagacccatcaggtccagagcgcacccgtggaggaagctgggcgaaccccgactgtcctatggaggatagtcctatggaccagacgaagcccctgccccaaggagtgcccgggtgtaaccgcaagttaaggagccctggggaggtgacacaggcaccctcattccttttgttcagtaggagtctctgaggcctccccagcaccatgccgcgtgggtgaggccgaggacacagagaaatatcaggcaaggctcctgcccccttagggtggccctgacaacggatcataacctcccagggagctgatggggtgtgacaggcacaccataggctggaggcacaggtggagggcagggaagaggaccggcaaatctatagaatcctaaagggagccaagagaagccacatgcaaatctccctccctccaaacaattctcccttagagggcatccgcgctcccctggggtggcagtcagcgagaagtttccgtgtaggttctccccaggcttaaacagtttaagagttttatttcaagaaaaccctggggagggcgaactgcaagagggctgccaggattagccgagggattccgaatgaagacggagtatttccgaacatacacacctctcccaagagcgtttccggagggttccgaaaatacccgagcgggcctcggcgccctcattggccatcaccgcgagggcttacgaagaccggaaatatccaaaggtgccggggctaggcttatatagttcacgcattcaccagttcattcataaaacaaatgtttgttgagcgcccatcatatgccaatcacagtgacaagtgctgggtgagcaatactggagagataacgctgaggtatgggtcccaggacctctcgaattggagccactcggaaatccagcggtagagtttcgaaaacttccgaacggttcccggaatacgctctcggccctctaaccgaagagttccgaatattcccgagcgttgagcgaattttcggcggaagcagccgaacatcatcgagccgcctcggaggtggggaccgacaactcctgtcgtgcccgcccggagaggaagcggaaatgcgtgtacggtattaaaggcgtcgcctcgcccctcgccttcctctttccgtctcaggtcgccgctgcgaagggaggtgagcgttcgtcttcctcgcgtggtcgccatctccggcccgccgcgcactccctctcagtcctctgcctgccttctccccttgcgcctcaagggtcattggcggaccccaacccctccccgtgaagtcgttgtgaattttcaagttattttcccctcactctcattcgccgcagctagtctcggctgcctgaattcggtcccgccgccttaggtcactcagtcccgcctgacaagagttctaggtcgctgtctgccctcaggggtctcccattcacccaagttcccagtcgctc

SEQ ID NO: 1561190 - DNA, 4001 bp, Homo sapiens
cctgtgagtggtattggcctggagatggagccgggtaggcttgatccctttccaaaccgggacatggtgggaccagggcccaggcgacagggatgcacctcccaaggaggctgagctccgtcgggggaacctggcctggcacccagcacacaccctccacaagcctaaggacacagtggctccatcctgttcccaggctactccatggaaggaaaacccacgtccacagaccagcctccgtccacagtttcaggccccgtctgtggaccccagagccgggaaaggccgcctgcctgcgtaacccttcacagccctgctcaggtgcctactgaggcgaccatgccactctggggggctgcagggaggaaggtgggaaggatgatgggctgagctctggcctggggaggcacggatctggaggctggggggccttccgtgaagtggcagcaggctgggacccacacccaggtccgcaggacggccaaggtccagctccacttgccgagcccaaaaaagcagccagctcctgaccaacctgtgtcaggctgggaacttgcccacgatcgcagcctggcccgccagcatcggacccctctttgcaggctagatccaaaaagctcacggcgcaacttcagcagcccccaagccccggcgcggcggtgttctgatgcagaacgaaaacggccacgtccccatttcgccaggtggcccaggaccccggccagcttgttttctgaggggctgcagctgctactgagcccctcttgtcacccaagcaagactccttctcagagggagtcaggccgatgcctgtcctgcacggctgagacctctgccatctgaggagggcgggagggggacagagcccaagacgcggaggccggtgcctcataggggaggcacgggcgacagacccacaacctgagctcctgaagcaggaagggagtggggacccagcggaggaagaggccggggatggggtggtacgctgctgccggtgactttgccgctaaccctagcgaggtgacctcagctaagtcacattcccctgaggctcaggagcggggaacgcagctgaaaggctacaaggagggagagaggggagtggggagtcgacttccaggacaggggttggtccgagggagacctgcgtcaggctgggttctgggccagcacattgggaggggagagaggcctcggaactgagggtctcaggcggcacagtcaggggtcaaagggcgggaggtgctacctcgcaggccaggaccggactccaagcctgggtaggtggggacctgggaaaggcggtcgccggggacaggatgggccctggagggagctgacagtgaggtttccagagtagagaacagcggcttctagtgcagcgggatccggccttcccgggtggacgtccccgggcgggatggggtcacgagacggtgtccctggccaatcccagggtcagaggtcgcgagggagagccctaatcggtagggccgggtataggcctcagggtgcagggtggcgctcgctgtccccagcggggccaggggtcgcggtcggaggtagcagacttgggggtcgggacagccgctggggtcaagggtcgggggtcggggccgcggtcaccttgagcagcacgaagaactcgaagagacggcggaaggcgggcgggaagagccgcgaataggtgacagccatcttgaagaacagcgcgtggaagagccggtcgcgcacgttgatgagggggttggggttgagattgggggtgcgaggcccgcgcgcgggggccgggccgccgccgccgccgttgggcccgggccccggagctgcgggctccacgtgctccgacatgcctcccagcgtcgcgccctaacgacccgcaagtgtccgagggcgcctcccggccgccatcggccgccctcgcagccgccgctctcctcacggcctcccggccgccgccgccatcttccgctttctcgtccggctgcggcgctgctgacgctagcgagtcgccacgccgggcaagagcggcccccctgcgcccgcagagaacgctgggatgccagcggcgcccgcggaggcctcaccccctacctcggccgctccagggggcgggcctgcatctgggccacctcttttgcatattggcacccacaatccaccgcggctatgaggccagtataaggcggtaaaattacgataagatatgggattttacgtgatcgaagacatcaaagtaagcgtaagcacgaaagttgttctgcaacataccactgtaggaaattatgctaaatatgaaaccgaccataagttatcctaaccaaaagatgatttgattgaagggcttaaaataggtgtgacagtaacccttgagtcgtgctcgcttcggcagcacatatactaaaattggaacgatacagagaagattagcatggcccctgcgcaaggatgacacgcaaattcgtgaagcgttccatatttttgctgtagtctacagctcgtcacctcgtttggcttctcttgcccggatcctgccatgacgtcacagggccagtaacgtcatagtcttcccgtgtccatctcctgtggcgccactaaggttggcggtagaacaatctggcagtctctactcctgcgtggcgctgtgccacctgcccccgtagcttcgcgcagcaatgaataaataagtgctcttcaggggcacttactgagtgccggctgcgtacacaagaggatactatggtttttgggttttttggttgtttgtttgagatggattctcgctctgtcgcccaggctggagcgcagaagcgcgatctcggctctctgcaacccccgcctcccgggttcaagccattctcctgcctcagcctcccaagtagctgggattacaggcatgcgccaccactccaggctaattttatatttttagtagagacggtttctccatgttggtcaggctggtctcgaactcctaactttaggtgatttgcccgcctaggcctcccaaagtgctgggattacaggtgtgacccaccaagcccgccaaaaaaaagttttgtgttgttttttttttttgagacgcagtctcactctgtcgcccaggctggagtgcagtggcgtgatctcggctcactgcaacctccgcctcttgggttcaagcaattctctgcctcagcctcctgaatagctgggattgcaggcttccgccaccacacccggctattttttttgtatttttagtggagaccaggtttgatcatcttggccaggttggtattgaactcctgacctcgtgatccacccgcgtcagcctcccaaagtgctggagttacaggcatgagccaccgcgcccggcccccccaaaaaaatgtttttaaaagttaactgaggacgttggtgcatgcctgtaattccagctacttgggaggctgaggtgggaggactgcttgagcccaggagttggaggctgcagtgagccatgatcgtatccctgcgctccaggttggatgactaagtgagaccctgtctctaaaaaataaagtgtaaaaaagccaacagtcagtatttttagcttttttgggtagagtaactactccactctgctgttgtacagaaaacgcagccgtaaatgatacataaatggatgggcacagctgtgtgccaataaagctttgtctgcagacactggaatttgaatgttatgtaatttccacgtttgatagaatggttttcatattttgggtttttttttcaaccacttaaaaatgtaagagccattcttagctcacaagccatacaaaaataggctgcagctggatttggcccacaggtcaagaacacagctttccaagagaaagataagcaaataacaaacataactttaagtgttctggtagccacagtaaaacaactaaaaaagagcaagtgaaattaattttaataatatattttacacatctcaagttatccaaacaaggtcaggcgcggtggctcat

SEQ ID NO: 1561191 - DNA, 4001 bp, Homo sapiens
tttattttcagtagagacggggtttctccatgttggccaggctggtctcgaactcctgacctcaggcgatctgcccgtcttggcctcccaaagtgctgggattacaggcgtgagccactgtgcccagccagtttcagattttctaaggttctgcaactgcccaaggaactggcctgaaccaccaagaattcttccccagaaaggaaagatagccccatgttcatgctaggacaacacaaaagcctattttgttttgcaaagtaatgttctccaggatagcttttaagaaaataggctctggcatgtggataggcaaaaatagaataaaaattcctagcaaatagagtgtaatcctgttagcataagagcgtgcattggctgggtgcagtggctcacgtctgtaatcccagcactttgggaggcctaggtgggtggatcacaaggtcaggagatcgagactatcctggccaacatggtgaaggcttgtctctactaaaaatacaaaaattagccaagtgtagtggcgggtgcctgtagtcccagctactcagaaggctgaggcaggagaatcgcttgaacctggaaggtggaggttgcagtgagccgagatcacgccactgcactccagcctgggcgacagagcgaaactccatctaaaaaaaaaaccgcaaaaaaaaaaaaaaaaaaaaaagcgtgcatttacgtttataactatatagccgtaaatgaatagaagagacatcaagaaaggtggctggccaccagtatgttgacagtaattctctttttttcctttgcccttttcagtttgagtttttagtaaacaggggcgcttatttttatcctctgagaataaagctatttcctttctgagctatagtggtaatttacatctaagtgggagaaaggcttatgaagtttggggttcctttatttttctaagcctaaaatctattatctagtaagttgctggtgttctagaataacggtgaacaagaaacatttaaacatttgttcacggtgaaccttttataaaaatagaacacgttctaaggaagccattcatcctcattttaaaaattaagaagcaggctgtaccctcctgtgacctccccagcgtggagtctggagctgagatggaggacactgaccccaagtcacccagccttggggccggttctgctccgtaagtggaaaggatctggagccagggctggaagaattcccgtgggggctcggagattcagcaccgtgggggaagggaggggagtggagggtgctgggcagttgcagtggggaggagaaccggtgtcactttcgctgaacctgaccgcagcccccagcgcagtggcccttatagacactccgctggcgctctcaatccgcgtgccaaggtcaaggagggaggtcacacctgcgcgcggccagaacagatgcaccgacccccacctgcaccctcgccacagccggcgccccttgcccaagttcctgcagctctgacccaaccaggagccccgaccccaagcacctgttccccctcctctaaacccgcgcacgcctctccttcccctcccccagcttcatcgtcctgggggcttctcccccgggctcaccccggcgtgagagaaccccacgattctagcgcctgcctactcccacgatgcaatccttgaacctgtccctcgctccctccaccacgcacgggcttcccctctctgcgacccccgagctgccccggcccgcgccacccgctgccggtcccctccagccccccgccccggctcacctggctcatacttgaggtagaggatggagacgatgaagtaactgaggtcgaagacggggaagagcggcacccgcgagaagctgagcgccagttcgcccaggctcagcgccgagagcagctccatggcgcccgcctgcccgcctgccgggtgccacccggggccccggcctcgtccgtcccgccgcccgcggcccggcgactgcgcccccgcagctgggcccgcccccgcccgccaggcgccaccccaggcccggcccccgcgggagaggaggggcgacggcccaccccgggacaggtggtggggacgcccagcaccacggacgcagctggacggtcgggcgtcccaggcgttgaccctcctgccatcgctaccccgttccgcccagcgaggcggggtgcggggcacccgtgcaaggcgagggaggctggggagctgcctgttctgggggcccgtccctcacggagcccacccacgcgggacgcccgttcccagggggccggatcggccaggactttgtccccgtgggctcaattaggaccccgatcttcggtggagcccagtgaggacccctacgccatggtgggaccccatgaatcagaacccctgttccccgtggagataggttaggacctcggtcctctgtggagccccgtcaagacttttctgccccatagggtccgttcgatcaggaaccccgtctccggtggggctctgcaaatcaggacgtcttgtggggggcagctcagtgggaacccccgttccccatggggcccaggaggatctcattttagagcccagttggttggggcacccgtttctagggaccccactgcgtcaggaccccgcaccctgtgcagctcaggagtcaaaggattccttttgtccagaagcccaatttgggaccccagaaagtgagtaggaattgctgcccagctaaccctacggcatcgagacctcacgcatgcgcggcacgcttcgaacgcgtgacccaatcccgcccccaggagaccccgctcctcccattctggctctcggggcctccccagcgaggtggggcgctcgcgctcccctaagggggtctggcctgcagagggcgggaccctcccagccttgaccttcgattggcccagccctcgccactgttgctttaggattggtcggcttgtgctcctctcccctccctccctggggcttccgcttccggttctgacggacgcttcggccgtaacgatgatcggagacatcctgctgttcgggtaattagggggaccagaggctgggaagagagagccaggcaggacgcgggggcgcccctagtaactgtaattctccctctgcaggacgttgctgatgaatgccggggcggtgctgaactttaagctgtgagtaggtcgcggccggactgcggctccatccggggaacccgtagccccgccctcataagcgtgatctcggcgcacttctcaggccccgcccccaagccgcaggccccgccctatccgccctctgggcacgcctccagcctggtttatcttcctcgccccccaccccccgagagaccttaaacccatactctccgttccttggttgtccctctgttcaccttcctggagagcttaagccccatcccccaagaaatagccccaccgcggaccttccgccctgcacccgcactgtcgggccactttgtaaacggtcggtggctgctgacctggctgtgattgtccgggcagtgggggcccagagaagggtattgaacgtcagaggtcacacagcaagtttgcggcagggccagggctgaaacttagtgtttgtggccttctgagctgggggtcagggggctgaggactctatgtcccattgaaagtggacactgtctgctcctctttgtaggaaaaagaaggacacgcagggctttggggaggagtccagggagcccagcacaggtaaggtctaattggatcctggaattgcatggtccacttcagaggacagttctgtttcgccaagccctaccttcgttttctttctttctcttttttttttttttttttttttgacacaaggtcttgctctgttgtccaggttggagtgcagtggtgcgatcatggctcactgcagactcgacctcctgagctaaagtgatccttccacctcagcccccttagtagctgggattacaggtgtgtgccaccatgccaggctaaattttgt

SEQ ID NO: 1561192 - DNA, 4001 bp, Homo sapiens
tggggagtcccagcccctaggtctctggctatgctacatgattttctgtgcctcagtttccccatgatgcagcattgcttggactacaatagatgaaccgttattatttctcccataaggcagtgtgtgcgtgcttgcgaggcaagcctgctctaccctgagccgcagttctgagcccctccaggtgacagtgaccaccagctcatcacaggggaagggcttagaccagcacctggcagctctgggggcgcctaagaggagtgaggtgaggagtggccacagctctggtggcttcaaatctcgccccttgcacagccctgtgtatgacctgggaggttgccccctgggcactaaatgggggtgacattgtcctttgtgcctccaagtgacacaaaaacatttgggacaggttgaagtcaggcccgaaccaggacagatgtttgataaatgatggctgttttctgccacttattcctgaaaaggtggtggggcatggggggcgttgttgcatgtaactaaggctggagacatgacggggctggatggaggttgccctgcaggcctggtatagaacgcagagtctggcagagcctctgcacgtgaatgaagatttcccacggggtgaagagggtgggggtattgggaaaagggaccccaggccgcagtgggaggcccaccttctgctccggctcaggctccgcgggctggctccagcagccgtggctacaggcctgctgctctgcctccttcacataggcttccacgcaggctgtgggaggtgggagcgggtgactggggacggcccttcccaggccacctctccccacgctggcccaccctgccggcgggccctcacctgcttcacactcagtttgggtggcattgggcttggagcttctggccacaaatcggcagatggagaagaggcggcagccacgctcgcaagcgctgatcagaacggctctgtcatagggagactcggaggcgccctccagccccgcctgggggaggggaggacagggggctcaggccatggggaggggcaggaggagggtggggggaccggagcattcagcagaggcagggaaaggcttccccgctccccacgacatctagccagatggagatgaagttgggagaggctacaaatattagtgggggctcttagctctgaggagggagatggggagggagcttgagaagagaaatggacagtgaaggtggagagaaatgagccttccccccactaggttccagggaggaggggagacatggagaaggattctcagacctggaggaggagggggaggctcagaggagggggttttggtcacacgcagatcaggcttgaatcctggggagtggtggtatgagtaggggctggtagctctgagtggggagggaacacgatgtggaggaggaggaatgaggtggggggaccatcaggcctgagggagctgggggttgggtgctagagggtccttacccagcagagtgcggaaggagcccgggaggtggtatcggccccttatcgcaaggacctgcatccccaagcactcccccatcagagggaaccccagcccgtcaactactggagagatctccccattcccgacccccacctccccacggacacccccaccaaagtctcctgctgtcatccaagagaagcccatcccaacgcctcctccttcggagagatcccgcgtcccccgctggcacctggcaccgcacgcgcctcacctgcgagggctgcgggccgaggtcgcggtcgcggcaccgcagctggcagttctgcgtgtccccgagctggggggcgaagggatcgcgggcggacggcgcggaggcggcgggcggcgacgccaacagcagcagcagcagcagcggcggtggcatcagcgccaccgcagccatggccgggcggaacgcggggggcgcgggggactccagctcaggccgggcacggaggatgcagcggctgcggcggggaccggggcgctgacgtcacccgagcgaggcagcctgggaagcggggggtgggagatgcggagagcgggcggggtagctgcgctgcggcacccgaggcgtgcgggtcgggcggggcaggtgcatcgcggcccccaccgtctatcccatcgcgggggtcccaggacacctccctggtgcccacgggcgggggatctctgctggcgcttggggccaaaaggaaatatatagggggatgggatggaggggactattccccaggggtgtcgaggagagcggagagcttggcggaggaggcgacgtgtgagccgaccacgcgggagagaggagaaaggggtgtccaggctacaaggatcagcgaggatcctgagagaaagagcttgttgcaggaggagggagggcgatggggctggagtccaaccagggaacggagagggaggaaggtgagagccgcaggacccggcagctgagtcctggcatcttctcttttgacacccaggttagaaaggagacaacttgcgcgcagtttgcctcctccgggaagccctctgagcccctcccttgctccttcagcctcgcctccctctggcccagccctgatccactgacctagggaatctggccctgtctccccaaggctggagacccctgggctggggcttagtgggaggggacacagaggtatgctcaggagcaaggggagggggtgatgctgacatgtctaattctcatgggaaaacggggcaaatagcgacacttctgacttccataaccatcacaccccagggcgatggactgtagccccaggagccgaatctcggttagagggtacccccagcttcctctccgccagataagggagtggggacgcccctctaaacccggatcctctgcaaagatgcccccgctttcgctggcatgcctggcgcaggtgcctgcagcgccgcgcagcagcccgcaggtcccccacctacgctccgcccccgcagacggggcggcagcctcgcagggtctgcgggttagagggcggctcaggtttcggcctgggaagagggtgtcccgggtgggggcccggcgcaccccctactctggcctgcggccgcgctttcatctcagcggcccccggccggcccccacgtggcttaatcaggcgcggctgtgcctggcggaccccgaacatctggatcccggtgcggcccctcccccgccccgccccgcccctcccctcccctcccatgctaggccgctgcgacccggcggcgagggcctccagcccgcagtttgcgccagaatccagcaggagaattccgcttctaacccacccgcgcgccaggcccgcaccttgggaaacagccctgtgcgttatgaccaatactgtcccccatttcacaggtgggaaacttaggctccgggacgcgttggcaaagtcaggattcaagcccacacatgctaattccagaggcccgcgcgcgcctaacccctccacaattactgtctttcattcattccaacgaaacactttttcttgcaacaaccgtataagacaggtaccggtagcgttgcccttttatatgggtgaggaaactgatgctcagactgcaaagtggttctgtccaggtgacagggagagaagcaaagaaaagccggcagagccctgccaatgatgggaggtgacctttgggcattgcttaaaacgcatcagggaggagggacaccccgcgcccttttgcagaaggagaaactgaggctggaggagtgggtcgatcacccaggtcgcctgaggggagaagggaaagaggctgattgccgcacacccagccccctttccgctgcactaggccgctgggggggtgagcggaaagaggacttgaccccggcccccaaggtgagcccccgcgcccctcctgctgttcccgggggagccggtccaggtgaggggcgggagggccggcgggcggccagggtcgggtttcaggaaatccgccgacattccttcggggcttaagagggaaagt

SEQ ID NO: 1561193 - DNA, 4001 bp, Homo sapiens
gtgggcatggggcaggggctgggcgaaggtgtcccaggccagcacgccatcagagagcgtgaagagcagcgcgccccagccggcactcccgccctgggccaggccgcgccacagcatggccatcaggatcagcccataggctgccaccggcaggaccatatccggctcgaggtgctggagcacaaggctgaggtaggggccaggggccaggatgatgagcagcagcaggccgggctgcaggggagagaagccgaaggcccagacgtagaggaggtgggcggtggcaaaggcggccatgcctggcgggagaggggtggggtaccagtgaggaaggcccatcctgggaatggccccgaggtcacccctcagggcctaagagaaggaccatcccagagcaccaggccccaccctggccgagcctccttgcaggtctccccacatgcagtgtccatccttgctctgctcagaactgccaggaggccccaccttcccttggcctccaaagccccatggcctccagctctccagccactctgcgccagccaccctggcctgctgggctacaagcacctgacacgtccctgccccggagcctttacactcgcccttcctccacacaggcatacagcccttcagctctgcccaaatgtgacttcctcagtgaggccttcctcagcaaccctgcttcaaactgcagtacctccagcaggtcctcactgccctctgcgccacctcagctactgccctaacaccgcctgcccccacccctcgctggagcgtgagctgcctcggtcacggctgcgccccccactgtgcctttgaccactggagctctcacaggagccctctgcacccaggctcccatccaagtgctggggcctctctcacacgggcatctggaaagcgtcacagcaccttccactcaccagggacgaaggctgccggccagatgaggcaagcgtcccccacagccgagcacacaagggctccctggaggagctgggtgtagcccccgcttggggacatgacccacaggaacccagccaggcagaggacgggcaggcacttgaccagggcagcgaaccaggacagctggtcctcgggaatccagaggcagaagtacacgcagcaggagaggatgaaggggctcagccacctgcagacatctgggcgctttggggagtggggagctactgagccgaaacccagcccagcccccattcttgggactcagatctcatggctcctgtcccacccccacctgggaccccagctgtacaggctggacccattcagggaccaggctgccagaacccagcttcccagggcccaaccaactcaaggacagcagctcccagacccgccggctgctggggttccagggccctgtccccccagccccaggcacagctcagaaggctctcacctgggctgagcagtgagtcttcagggtctgccccgctttgccagcgtccatgctggcctgatagccccagagcgacctaatctgggagcgagtggcttcagggggtggaggggagggctcatggttacacgttaacccaaggagcgtcctgtggactctgtgactgataacagggcccagggagatgttgtcctcaccctggggatggccctgcctggcgcccgctgataaagcactgttggcactgggggtccctctgccctagcctgctgggacatggcttcctcctcctatctgcctggggaggttaggcccacaaatgcctgtccccttgtcctgggccccaacaatcagaagagatggggtgcagaattccaacagccaccccatcatgggaagcgggagaggggctggctggcaggagtgcccctggagggatgggaaggcgagtctgtccttcacttgctgccctagccgtctccctccctgctccatgaaacctttcctcattctgctcaaccccaccaagccctcaggggctccaccacaaacactgcttcaatgggtgaccaggagggaccaccacgaatgcggggaacaagcaccctctcctgttagctgagcgagcccccaggtgacctccaagccaactgccaccccagtgaggacgctgtcctcatggcccggtccacacgctccggtttcccagcgccgctcaccggtgccactcgctgcacacgcagcctacacttctaccttctacctgaaagactcagacctactgggcgccagtacccagcctcaatgctgggcttggttactgggggtaagcaggggcaggagcagggatttgagcctgtcggtggcttctatcctctgcccaaggccctgcccacaggtggggtagacctggcaggagccctcacagccagtgcctggcccagcctggggcctctgcagccacagggctccctctggcaggacagtgtgggggcagactgggtcaggagcacccccagcctctggggtgcagggataatacaggctccccaccccgcatcccagaacgtaaggtctgaccagcagaatcgtaaactgccttcctttatttatatttgcaatatgaaatagaagctcggcacaaacgcacgcacactcacaccagcctgggaggagggagctggggacaaggtcacttggcaacagggctgggacctcagaccctcaaggcccctggggctgttgccggggaggcccctgctccccagagccggactggcctggttgaaagtgcagggtctgggcaaaggcacggcccccactcgggaccctctggcacccccacccacgctgggccgtcccccatggtggacctgagctaaaaggccgggtgtgggcgtggccgtctgcgctgcagcgtgggacagctgggcacgtgggtggcaaccttgggacccctaacaccagctcccgctgggacggaacagggaaggctgtgctttggagccgccagcccagttcggtgtcctcactctctctcgctctcctccctctctctatataatatataatatatgtttctctctctccattctctctatttgactctctgtatctttattctaggaggcaacgctccaaaacttctcttctcagtgcaaatgggggtgggttgggcctgtctccctggcaccagcctcctgggggtccagaggagagaatgtgggggtgtcagggtgatgagggcaatgggggccatcgtgggacccgccctgcccccaccccgggagatccacgggaggacggaagatttggccgccgctgccgcaccaggcagctatctggaaacagagggagatgtcgtgtgagggtctagcaggcccagccccacctacccagcccgaggctgcagccacactcactgggagcctggggatgcaggcccttccggggcagagccattgggtatcggaggaggcgtgagggcctgggcactgtcaggggagagaggggatgtgcagaggtcacttcctgccccaccagccccacccccacccccccgccctgctgccctggtgctcacctctggctttggggaagccccaagggctctgggctcttctccccttctgtggtctgggggggctggtgggccccggaggctgggacagaggtagaggggtctctggttgcactgtgggtgagaggcaggtgcggctgtcagcgtggcccccaccgtcacctgctgacaccctcacatcccacccgactgaagtcggctcactgggtgtgtgtctgccacctgccccacggggaggggcctcccgaggacgcagctggctcagcgtggagggacagcacagccctggacaggaagacaagcacccctcttcccgcctcctgtccctgtggaggaggtactcgaggccggctgagacagccccaaagggtcttctgcatgctctcaccctcccaatccttcacaccctccaacgagcccttcccaaccctggggctcaagggccccaagcatcccaggctactaagagaagaaccagcctacagagtgcaaggg

SEQ ID NO: 1561194 - DNA, 4001 bp, Homo sapiens
aggcagtcctcctgcctcgccttctcaaagtgctgggattaccagtgtgagccactgtgcctggcctggaatgagaaattataaaaagtgacaacagtaacttaaaaaaaaaaaaaaaaaaaaaaaaggaaggctgggcatggtggctcacacctttaatcctagcactttgggaggccaagacaggcagattgcttgagctcaggagtttgagaccagcctgggcaacatgacaaaacctcttctctacaaaaaacaccaaaaaattagccaggcatggtggcacatgcctgtggtcccagctactcaggaggctgaggtgggaggattgcttaagcccgggaggtcaaggttgcagtaaactatgatcgctccactgcactccagcctgggcaacagagcgagaccctgtctctctctctctctctctctctctctctcacacacacacacaaagagggagacagcagggtggacaaaagccagaggtgcatgcactctgaagacaccaaccagcggagtctgagatcagagggaagacagagccaaaagccaggcaacaaagatgagagacataaaacaagaagaaccgtaactggaaatctcagaagcccacacacagctgggaagtgagactccaggcctaaggcagatcggcacagctgtcaacctgccagatgctggccttagtggggctcaccccagccccctcccgtgccttccactaaggcctgctgtttcctacctcaacatcagggggccttggttcccccaggccagcgctcacggagggaagaggcggtgacaggaactgcaaacccctcagggactcggcaaaggctatctctcttaagggggaccccagctcatgcctgccaggcttctgggcaggggtctcacattctgtgccctccagcagaggctgttgaagctcacgaagactagggctgtccatggctttggggaaactccaggaggggtttcctaggggtagggggaagaaaaagacaagttgtaaaagtctcacttcactcaacctctgaccccttgctttagagagactcaggcagagactagttagtgcagtggtcctcagacccattttacagatacagaagctgaggcccagagagaaaaaaagattggcctcaggttatgaagagaactcaggggtctggacattcaattttgggcatttctctctctctctcttttttttttttttttttgagacaaagtctccatctgttgcccaggcagatccaccactgcagatccgctagagtgcagtggcatgatctcagcacactgcagcctccacctcccgggttcaaaccattctgcctcagcctcccgagtagctgggattacaggcgcccaccaccatgcccggctaatttttttttttgtatttttagtaaagatagggtttcactgtgttaaccaggctggtcccgaactcctgaccttaggggatccaccagccttggcctcccaaagtgctgggattacaggcgtgagccaccgcacccagccaaattctgggcatttctctcaggcaaaagccacatacccatcacacttaccccaataagttgcagcacctgttgcaccatgccttacacacttacctgccccacaaacacccccaatatccatcccaggttcataccgcgtgaccacctatccaggcccaggcacccctcccagtcacacacacacccatcccctacccccagtgctgcctggaactgcactctagtctacattccccatcctctgtcccctagacctgccccccgaagtcccctgccacacagccccatctaggcaagcccagcctccacctccacacattcatctcccaaaggactccttgaatatttgccccaaaacatcagctcccagaaaacacccctttcaggtccccaaccttcttacacatttatcccaattgactccgtgcacaaccctactccccactgcatcacaaaccacagacacctgtgcacacacgcacacatgcaccccggcactctctcctattctcatgacctctggcatgcctgccccactcatcaggcccaggcacccctgccctactccacccacacacctatgactccacacaactcccacacatgcaccagctctccagaatcctttgcacacctcgcccccataaacaccctcaaccccagcacacacatacacgtacacacgcaacacaaccagaaagaatattcttcttctcgtcctacgatccccctggaaggtccccaagcctcctgcctgctcattccaaaccttgactgagccgatttcctcgccaaagctttgccctctcatccccaactccaggacccagggaagggactgtgacccccacccacctacgtccctcactcaccgctcacgatcacaggccggggcttcctgaaccctcgcaatgacacttgcccggaccctgccaccgaggatccaaggggcgctgggaccttgcgctttgctctacgcgggtctcagcgccccgggcccgctgcgcgcgggggcggggacggggcggggcgacggcttcccaggctctgtccctccgcggcgtccggcgagggatccctgaaagccgacgtcagcgtccaggaacgggttcctacgactcccgggggtctgggagcaggcgggaatccttggagaactgcagccccttcctcgtgagcccaggcccaagctctgccggaggagggggcaccccggattctccagggccttcctggcttggccccgcctcccttcccctttgcgcaataatagccaataataataacagcaacaaggaccgtgcgccctgttctaagtgctttgcaaataaacttacatacacatgtattcctcagcacaaccctaagaggcataatcgtttattgtcctgtttcacgcgggaggaaactggcaagccgaggttaggtaaattgcctaggggtacatcattggttcattgagggcagactgtacccaagccctgtgttaaacgctttacattcatcatcgcattcattcttcctctcagctccgggtttttcttgttgttgttgttgttgtcgctgctattttactttggtttttttgtttgttttgttttgtttttgagacggagtcttgctctgtcgcccaggctagagtgcagtggagtgatctcggctcaccgcaacctccgcttcccgggttcaagcgattctcctgcctcagcctcccgagtagctgggattacaggggcaagccaccacgcccagctaatttttgtatttttagtagatgagatttcgctgtgttggtcaggttggtcttgaactcctgacctcaggtgatctgcccgcctcagcctcccaaagtgttaggattacaggcgtgagccaccgcgcccggcagattttttttttattattattttttaaaagacggggtcttgctctgatcgcccaggctggaaggcagtggcgcaatcattgctcgcttcagcctcagactcctgggttcactgcagcctcggcctcccaaagcggtgggattacaggtgtgagtcaccgcgcctggcctattttgttttggggtgtttttttgcggaggagtgctgaaggggtgttggcttgtttttaatccctgttttgcagataaagaaacgggctcacgggccgggcgcagtggctcacgcctgtaatcccaacactttgggaggccgaggcgggcggatcacgaggtcaggagatccagaccatcctggctgacacggtgaaaccctgtctctactaaaaatacaaaaaattagccgggcttggtggcgggcgcttgtagtcccagctacttgggaggctgaggcaggagaatggcgtggacccgggaggcggagcttgcagtgagccgagatcgcgccactgcactccagcctgggaaacagcaagactccgtctcaaaaaaaaaaaaaaaaaaaaaaaaagaaaagaaaa

SEQ ID NO: 1561195 - DNA, 4001 bp, Homo sapiens
ctgctgtttcctacctcaacatcagggggccttggttcccccaggccagcgctcacggagggaagaggcggtgacaggaactgcaaacccctcagggactcggcaaaggctatctctcttaagggggaccccagctcatgcctgccaggcttctgggcaggggtctcacattctgtgccctccagcagaggctgttgaagctcacgaagactagggctgtccatggctttggggaaactccaggaggggtttcctaggggtagggggaagaaaaagacaagttgtaaaagtctcacttcactcaacctctgaccccttgctttagagagactcaggcagagactagttagtgcagtggtcctcagacccattttacagatacagaagctgaggcccagagagaaaaaaagattggcctcaggttatgaagagaactcaggggtctggacattcaattttgggcatttctctctctctctcttttttttttttttttttgagacaaagtctccatctgttgcccaggcagatccaccactgcagatccgctagagtgcagtggcatgatctcagcacactgcagcctccacctcccgggttcaaaccattctgcctcagcctcccgagtagctgggattacaggcgcccaccaccatgcccggctaatttttttttttgtatttttagtaaagatagggtttcactgtgttaaccaggctggtcccgaactcctgaccttaggggatccaccagccttggcctcccaaagtgctgggattacaggcgtgagccaccgcacccagccaaattctgggcatttctctcaggcaaaagccacatacccatcacacttaccccaataagttgcagcacctgttgcaccatgccttacacacttacctgccccacaaacacccccaatatccatcccaggttcataccgcgtgaccacctatccaggcccaggcacccctcccagtcacacacacacccatcccctacccccagtgctgcctggaactgcactctagtctacattccccatcctctgtcccctagacctgccccccgaagtcccctgccacacagccccatctaggcaagcccagcctccacctccacacattcatctcccaaaggactccttgaatatttgccccaaaacatcagctcccagaaaacacccctttcaggtccccaaccttcttacacatttatcccaattgactccgtgcacaaccctactccccactgcatcacaaaccacagacacctgtgcacacacgcacacatgcaccccggcactctctcctattctcatgacctctggcatgcctgccccactcatcaggcccaggcacccctgccctactccacccacacacctatgactccacacaactcccacacatgcaccagctctccagaatcctttgcacacctcgcccccataaacaccctcaaccccagcacacacatacacgtacacacgcaacacaaccagaaagaatattcttcttctcgtcctacgatccccctggaaggtccccaagcctcctgcctgctcattccaaaccttgactgagccgatttcctcgccaaagctttgccctctcatccccaactccaggacccagggaagggactgtgacccccacccacctacgtccctcactcaccgctcacgatcacaggccggggcttcctgaaccctcgcaatgacacttgcccggaccctgccaccgaggatccaaggggcgctgggaccttgcgctttgctctacgcgggtctcagcgccccgggcccgctgcgcgcgggggcggggacggggcggggcgacggcttcccaggctctgtccctccgcggcgtccggcgagggatccctgaaagccgacgtcagcgtccaggaacgggttcctacgactcccgggggtctgggagcaggcgggaatccttggagaactgcagccccttcctcgtgagcccaggcccaagctctgccggaggagggggcaccccggattctccagggccttcctggcttggccccgcctcccttcccctttgcgcaataatagccaataataataacagcaacaaggaccgtgcgccctgttctaagtgctttgcaaataaacttacatacacatgtattcctcagcacaaccctaagaggcataatcgtttattgtcctgtttcacgcgggaggaaactggcaagccgaggttaggtaaattgcctaggggtacatcattggttcattgagggcagactgtacccaagccctgtgttaaacgctttacattcatcatcgcattcattcttcctctcagctccgggtttttcttgttgttgttgttgttgtcgctgctattttactttggtttttttgtttgttttgttttgtttttgagacggagtcttgctctgtcgcccaggctagagtgcagtggagtgatctcggctcaccgcaacctccgcttcccgggttcaagcgattctcctgcctcagcctcccgagtagctgggattacaggggcaagccaccacgcccagctaatttttgtatttttagtagatgagatttcgctgtgttggtcaggttggtcttgaactcctgacctcaggtgatctgcccgcctcagcctcccaaagtgttaggattacaggcgtgagccaccgcgcccggcagattttttttttattattattttttaaaagacggggtcttgctctgatcgcccaggctggaaggcagtggcgcaatcattgctcgcttcagcctcagactcctgggttcactgcagcctcggcctcccaaagcggtgggattacaggtgtgagtcaccgcgcctggcctattttgttttggggtgtttttttgcggaggagtgctgaaggggtgttggcttgtttttaatccctgttttgcagataaagaaacgggctcacgggccgggcgcagtggctcacgcctgtaatcccaacactttgggaggccgaggcgggcggatcacgaggtcaggagatccagaccatcctggctgacacggtgaaaccctgtctctactaaaaatacaaaaaattagccgggcttggtggcgggcgcttgtagtcccagctacttgggaggctgaggcaggagaatggcgtggacccgggaggcggagcttgcagtgagccgagatcgcgccactgcactccagcctgggaaacagcaagactccgtctcaaaaaaaaaaaaaaaaaaaaaaaaagaaaagaaaataaacgggctcacttgcatgctcacttggccacagtaaacagctggtaccaagcccagcatattgtaaccccgggctgtgttcctgtggcccttgctaagccaatgggtgaggaggaagcagaggcaggtgggttaggagtttctagggaaagaaggctgaggagtggggtccagtagggggtgatgctctgattgtcacgtggtacagtgatgttcatgagtcagcatttggacccacatagacctggtttcctttccaggctctttgtttgtttgtttgagatggagtttcactcttgttgcccaggctggagggcaatggcgtgatctcggctcaccgcaacctccgcctcccaggttcaagcgattctcctgcctcagcctcccgagtagttaggattacaggaatgcgccatcacacctggctaattttgtatttttggtagagatggggtttctccatatgagtcaggctggtcttgaactcccgacctcaggtgacccacccgcctcagcctcccaaagtgctgggattacaggtgtgagccaccattcctggcccctttccaggctctttaagtcactgagtgtgtggcctctagacaatgccttcacctctctgaacccctatttcttcacctacaaaatggggataatgctccttgcctcttatgtgataacatatgtagagtacttagagttgctgcaacaacaaatgtccaacattggg

SEQ ID NO: 1561196 - DNA, 4001 bp, Homo sapiens
ggctgaggcagaaggatcacatgaggccaggagttcgagaccagcctgaccaacatggtggaactccatctctactaaaagcacaaacattagctagatatagtggtgggtgcctgcaatcccagctactaaggaggctgagacagaagaattgcttgaacctgggaggcggaggttgtggtgagcagagatcatgccactgcactccagcctgggcgacagagggagactctgtcaaaaaaaaaaaaaaaaaaaaaaacccggccggtcacggtggctaacgcctgtaatcccagcactttgggaggctgaggcgggtggaccacctgaggtcaggagtttgagaccggtctggccaatatggtgaaaacccgtctctactaaaaatacaaaaattagctgggtgtggtggtgcacgcctgtagtcccagctactcgggaggctgaggcaggagaatctcttgaacccgggaggcagagattgcagtgagctgggatcgcaccactgcactccagcctggatgacagggggagacgccatctcaaaaagtaaaaaaccaaaattataacgagggtacaacatttcaataggataacatttatattaaacaattcaatggaatacttcactagttgatatatgcattattaatggggtctccctatattcgaacttctggcctcaagagctcttcccgcctcagccttccaaagggctgggattacagttatgagccaccgcgcctagccaatggtagcttgtaaatactttgtatctattggcctggctgggtggctcacgcctgtaatcccggcagtttgggagggagaactgggaggatagctagagcccaggaggtcaagacaagactgggcaacatagcaacatagcaggactccatctcttaaaaaaaaaaaaaagaattagccagccgtggtggtgcatgtctgtgataccagctacatgggaggctgaggtaggaggatcccttgaacccaggagttaagaggctgcaatgagctgtgatcgagccaccgtactccagcctgggtgacagagtgagacccttttaaggagccttgatgggacctgatgactggcttgatgtgggaaatgatggcatctaggatggcatccagggacaacatctccatttcttgattgataaatcaatcaataggaaagaggattttctgcaaataagggaatcttagttcctcatttctcttcgctaccccaaccgctccttgctcagaatcaagcagtaacagtgaacttggtagtagctccgagaaggaagttggacttatccaacttccttccttccttgtccttgagaaacctaggggaactctaaaacggaagcagaacccactccccaacttctccactctctgaatgaggagtgatttttttgctttgttttccagttacaaggccggggatgtacacgaggtcctggaaggaattcccccttggtcctggttcaatctctgatttgtgatcccggaccacagagagctcttcggtggggtaggcgcagcacggagcagttagggatttgcttttttggtaaagaaggtatctgggagaaactgcactcaaacttcctcagccacactcaacatggcagcttcctagccacgcccaaaatggcggaaccctttgccgtagctggagagacgctattttcccaaaatggagcggaggaggaaaatgtccatcacagcttcaccccgccccccgcagacggctagcaccaattagtagcgcgcagagcgagtacaaagctaggggaggagcctgctgttgccccagcaacaaccacggaaaccaagacgagcgcggtcgcggaagtatcgcggcttacatatctcgcagccaggcgggtcctgggagaggcgcgagccaggcctggtcggcgcccgcggagaaaagaagcagtcaagcccatgaactacaaccccggttgccgctttctcctctcctaaccgttaagtgcgctaaggtaggaatgacgcatgcgctgcgcttagaggcggggttaagtcggacctgaactcataacgcatgcgccttatggagcttgctgggggagggaagcggggtggctggcgtgacgcggaaggcgggtcttttgcgctcgtgggcggagccatagccccttcgggcggggctttccgccgacctgaacccgaaaaggttattttggacttcccagagttaaatgctggttccccagacaagggtccccccattttttccaggctttcatgggttggcaattaggatctgtggtcaagacctcagcctcaggggtgtgacgaagctagcttggaatcctagtactaccctttacttgctgggcctcagtttcccccccgtcaaatggagataatacacttacctcacagggttgtgattatatttttcccctcccagggccatggctgaggtgcacgtgatcgggcagatcataggggccagcggtttctcggaaagtagcctcttctgcaagtggggcattcacacaggtattcccccaagcctggttcatttccacaccaagacccctagcctagaggctacatgctccttcctccaccccttaacgcagactcttaacctcatttccatcagttctcagtactccaggcccagcccacaccctgtccacatgagtctcaagctcccatctttgtgtgtgtgaggggtgggatacagacagggtctctctctgcgcccgggctggagtaaggtggtgtgatcatagctcagtgcagcctcgaactctcgggctctagtgatcctcccgcctcagcctcctgagaagctgggactacagacacgcaccaccaaatctggctaattttttttattttttgtagagacagggtctcgctatgttgcccaggctggtctcgaactcctgcgctcaaacaggccacccacttcagcctctcaaagtgctaggattaaaaacgtgagccgccacgtcccaggaaagtaattttgttcatgcttccccaactgaggccctatagagtcatggtatagtgtaatggttagggtcatgggctgccagatctgcatttaaatattaactcccccacctattaattggagacctttggactcgaccactttgagcctcagtttccttgtttcaaagtgaagctaatagtagctaagaagcagcacaggtttgaggttaagagcacagactgcctgggttcaaaaccagttattgcttgttaaggcacccttgggctgattatgtgaacttgggcacttctcttcacctcgacttccttgtttgtacaatgagagtcatagaaatatttacctgttgaagttgtcatgagtactaaacgagtatcaacagcacttagaataggaatagggctggaataggaagtgctcattcagtgtttgcctggcttatacaagactttgatggggtcttgtttgtaaagcctggggtatgttgttgcgtggcacagatgaatgtctatgaaacagatgtggccatttggcattatcatgtcttcaggcctgagtcctagtcccttttttttttttttttttttttttgagactcgttctgtttcccaggctgtagtgcagtggtgcaatctagctcagccttccaggttcatgccattctcctgcctcagcctcctgcatagctgggactacaggcgctcgccaccatgcccggctattttttttttttttgtatttttagtagagatggggtttcactgtgttagccaggatggtctcgatctcctgaccttgtgatctgcccatctcggcctcccaaagtgctgggattacaggcgtgagccactgcgcctggcccttttttttttttttttttttttgagacagagtctcactctgtagccaagctagagtgcagtggcacgatctcggctcactgcaatctctgcctcctgggttcaagcgattctcctatgtcagcctcccgagtggc

SEQ ID NO: 1561197 - DNA, 4001 bp, Homo sapiens
ccgtagtcccagctactcgggaggctgaggcgggagaatcacttgaacccgggaggcggaggttgcagtgagctgagatcgcgccactgcactccagcctggcgacagagcgagactgtgtctcaaaataaaaaacaaaacaaaacattcctgggctcatgtgatcctcccacctcagcctcccaaattactggtgttacaagtacatgccactgtgctcagcctgaccagggatcttaatggaaaggtataaccagtgtgagaaggaaggtattggggggtaagagcattccaggcagtgcacagcccatgcaaaggccctggggcaggactgtgcctggcgtgttggaggaacagcgaggaggcccgtgtggctggagcagagtgaggacagggagagagggaggaagggttgggcagggcctgtgagccttggggtggtgtggggaggtgaaggaagttaagcagtttatgttttaatgtaagtgtgatggaaaatcagaaagcagggaagaaatagtccaattgaagtttttgtttttgtttttgtttttgttttgagatggggtctcactctgttgcccaggtgggagtgcagtggtgtgatctcggctcattgcaacctctgcctcccaggttcaagtgattcttgtggctcagcctcttgagtagctgggactacaggcactcgctaccacgcccagctaatttttgtatttttggtagagatggggtttcaccaacatggccaggctggtctggaactcctgacctcaagtgatccacctgcctcagtctccaatttaagttttaataaaaagaccttggttgggtgtggtggctcatgcctgttatcccagccctttgggtggccaagactgggtgattgcttgaggccaggagttcaagaccagcctgggcaacatagtgagacccatctctaaaaaacaaaaatgactgggcacggtggctcacgcctgtaatcccagcactttgggaggccaaggtgggtggatcatgaggtcaggagttcgagacccacctggccgagatggcgaaaccccgtctctactaaaaatacaaaaaaaattagccaggcgcagtggcgcgcgcctgcagtcccagctactcgggagcctgaggcaggagaatctcttgaacctgggaggcagaggttgcagtcaaccgagatcgcgtcactgcactctagcctgggtgacagagcaagactccttctcaaaacaaaacaaaacaaacaaacaaaaaaacacaaatgaacaacaaaaaagtgcaagcggctggaatcagaggagagggaaagaggaatggaggttttcgccccaggaaatgtgtgaagggcagcagcctttgtccttaattggaaacacagagggagctgctgccggagtagaaagtctgcttttagctgtgagaagtctgacgtgtctgttagacccccggagaagttgaggttatgtgaagttcctggcatttgagatgcaattgcagaggagggtagagacatgagatctggagaagggtattaggcagctggaacagcaggtgcaaaggctcgaaggccagatccagccttcccattgcggaaacagagaaagaaaagtccccaggctagagcaagagggagggagcaaaggcactgcggagggtggagatgagagaggccaggccaggctggtatgtagggcaaggtttagattgtatcctaggggccctcagaggatccttccttaatcctccagcccccatcacgttctgagtctcggagggagatgggccttatctgacagtagagagactgaagtttagaggggccctgagctggggggcaggcagctggggatgacagcaagagtggggttcagaggggagggaggcccagatactcaccccagatctgcaccaggaggcccagcaccatgcccggggaccccattcctggcccatcacccccctctccccctcccagttgacagacttcctgccacaatctccgcctcccgctgcagaagcagatgcaacacccagggccagacaacagacgtccggtgttccagcctgctgggggctccacttcctgccacctcgtgcctcagtttccccaatgcattttctatctgaaaggcagtgtacggaccaggcaacatggctcatgtctgtaatcccagcactttgggaggccgaggcaggtggatcacctgaggtcaggagttcgagaccagcttggccaacatgatgaaacccctactaatttctactaaaaatacagaaattagctggacatggtgatgggcgcctataatcccagctacttgggaggctgaggcaggagaatggcttaaacccgggaggcggaggttgcagtgagccaagatcacgccactgcactccagcctgggcgacaagagtgaaactccgtctcagaaaaaaagaaaagaaaggcagtgtatgcaagtgagtgggaggaatccacccctgtgagctttctggaaggctctacataaacacatctaggtacaggaagacacagtgcgagagcaggtggctccgtgggggaggggcaggcgacataggcctgagcagtgagttaaatgacagggtccctgcctcaattattttgctcccaaaatgtctttcttttgctgggcgctgtagctcacacctgtaatcccagcactttgtgaggctgaggtgggaggatcacttgagccgagtttaagatcaacctggggtaacacagcgagatccaatctctattaaaaaaaaaaaaaaaaaaaaaaagatacaggctgggcatggtggcccaggcctgtaatcccagcactttgggaggccaaggcgggtggatcacctgaggtcaggagttcaagaccagcctagccaacatggcaaaacccggtctctactaaaaatacaaaaattagctgggcctagtggtgggcgcctgtagtcccagctactcagtggggttgaggcaggagaatcgccagaactggggagatggagattacagggagccgagatcctgccactgcactccagcctgggcgacagagtgagactgtgtctcaaaaaaaaaaaaaaagatacaaaaccaacccagggtgatggtgcatgcctatagtcccagccactcgggaggctgaggcaggagaaccgcttgagcccaggagttggaggctgcagtaagccatgattgcgccccgttactccagcctgggcaacagagtgagtccgtctctaaaaaaaaataataataataatttaaaaaatcttcctttgaggttcagagaaatagatttctgttgataactttgggtcctattacatgacctgcttgggggtcccgtggaggaggttcatgggctctcgagttcctcccagccctgcatccctcacccctgattctgtagtgcattctgggaggaggtggcgaacccacagacctcaatgtctcagacccaactgcagagtgacctcctttctcactcggacctagaaggcctgcatcgtacacagcgttcccctccaccacagggaggttctgcggtggctatgcctgcacctcccctgcagacacgtacacccgcccagcctcccctacccactccttcccctccccagaacattctgaagctccacccttccccccaccgtctgctgagggaccctggatagattagcccccaggtccttccaaagctggacccagacattcttagcttccgcacctgggctggcacggagacttctggaggagctgttggagcctggggctttgtggggtgtataggagttcagttgtgacatagggacaaatggaaagaaggcactggaggctaaacaccctcttgggcaaaagccttagattttcagtaaatgccaggcgggctagacaatttgagtagcaacggataacctgtgtgagtgaacaagtggggaaactgaggcacgggagcattagagatgattctgaggtccca

SEQ ID NO: 1561198 - DNA, 4001 bp, Homo sapiens
gcgcctgggagacagagtgagactccatctcaaaaaaaaaaaaaaagacttcctttcctttcaggggggtcctgatgggaattatatttatctgtttttcccaaaatgtatttgttacaatgcagatgagaaactctgccccgcccctgcctctcactaggtgatggacacacacacacacacacgcatgcacacatagatacacacgcagacacacacatgcatgcacaaacgcatgcaaatgaacacgtgtgcaccatgcacacactcatgaacacacaaatacactcacacgaggaacccaaattgtattgtacttggtacctacagccactagagggcctcagtcaaacatgtctggctctgggagtttccagaagttccacaaatattttttaaaaaaaagaaaaaagaaaaaaaaaaacctaggaggattctcataggatcgcgaacttactattttgccacacgagagcatttctccccaaattgctgtttattatcatcatttaaatgttaaaattaacttttttttttttttttttttttgagatggaattgctctgttgcccaggctggactgcaagggcatgatctcggctcactgcaatctctgcctcctcctgggctcaagcaattctcctgcctcagcctcccaagtagctgggataacaggcgtgcaccaccatgctcagctatcttccttccttcctgcctacctgcctgcctgcctccctccctccctccctccctttctttctttctttctttcttgtatttttagtagagatggggtttcaccatgttggtcagggtggtctcgaactcctgacctcatgatctgctcacttcagcctcccaaaaagttgagattacaggtatgagccactgcacccggccttattttaaatttattattatgtttttattttttgagatagagtctcactctgtcacccaggctggagtgcagtggtgcgatctcagctcactgcaacctctgcctcccaggttcaagcgattctcctgcctcagcctcctgagtagctgggactgcaggtgccaccacgcctgggtaattttttgtattttctgtagaggcagggctttatcatgttgcctaggctgttctcaaactcctgggctccgatggtcctcccgcctcagcctcccaaagtgctgggattacaggcgggagccaccacgcccaacccagttgctcggttttataaaaatacttttggggccgggcgcggtggctcatgcctgtaatcccagcactttgggaggctgaggcgggcggatcatgaggtcaggagatcgagaccatcctggctaacacggtgaaaccccgtctctactaaaaatacaaaaaattagccgggggtggtggcgggcgcctgtagtcccagctactcggggaggctgacacaggagaacggtgtgaacccgggaggtggagcttgcagtgagccgagatatcacaccactgcactccagcctgggcgacagagagagactccgtctcaaaaaaaaaaaaaaacaaaaaaaaaaactactttgggtattttgctgatttgccaaaatttaaaacaaggtcatttccctgtctctgtttctctgtcaccccagctgtgaaaacttccttcgggagcttctttagtcgggaaaactgacacacgtaggaactcatctgctccactccccgcccacccgcctggcctagggcagccttcatctccacgcctagacactgccctttgattccagatggccaaggagacaccatcaagtcacttcccggtgactttgcacatgtcccttgtattgcgaacccagccaatcccatagccacttacccaaaaggactcccagggtgaggacgacaaggctggtggccaccacgccaatgctggccgctcgacagcacgcggcatccagagcggggacttccttggttgtcctgggcacgaggtgtacgtcagccacagtgggctccatggctcagagacacgcagacagcgagctggatgccacacagcaagacagaaacacggggtcagaggctgaaggtgcttctcttcccataagcaagggttgcaactatacccttaaaaacggcggggcgcggtggctcacgcctgtcatcccagcactttgggaggctgaggcaggaggacgatttgaggtcgggaattccagatcagcccggccaacatggagaaaccccatctctactaaaaatccaaaattagccaggcatgttggtgcacacctgtaatccagctacccaggaggctgaggcaggagaatcgcttgaacccgggaggcggaggctgcagtgaaccgagatcacgctactgcactccagcccgggtgacagagcgagactccaaaaaaaaaaaaaaaaaagaccagatgcggtggcttatgcctgtaatcccagcactttgggaggccaaggtgggtgaatcacttgaggtcaagagtttgagaccagcctggccaacatggtgaaaccccatctctactaaaaatacaaaaaattagtcaggcgtggtggtgggcgcctgtaatcccagctactcgggaggctgaggcaggagaatcgcttgaacccgggaggcggaggttgcagggagctgagatcacgccactgcactccagcctggcgacagagcaagacgccatctcaaaaaaaaaaaaaaaaggtggaacgtgactgctggctgggcggctgtgtgaggatgaggactcccgtgggtcgctgcggtccattgctagaaagagtaagtctgaagttcccacagctgctgtaacaaaggaccccacgcttgggggcttagagggacaccgagttttcggccaggcgtggtggctcacacctgtaatcccagcattgtgggaggctgaggtgagaggattgctcgagcccaggagtttgagaccagcctgggcaatatagtgagacccccatctccacaaaaaatgaacaaaaattagccagatgtggtggctcatgcctgtaatcctagccactcaggaggctgaggcaggaggatcacttgagcccaggaggtggaagctgcagtgagctgtgattgtgccactgtactccagcctgggtgacagagccagaccctgtctcaaagaatttaaaaatggaatactgattgattatctcacagttctgaaagtcagaagtctgagatccatcttgcagggctcaccatcgagctgtgggcaggcctgggcccttctgggggctccaggggagaatacgtttcccatctttaccagcgtcttaagcctcagggccccttcttctcccttcacagccacagtgcagcctcttccagtctctctttctcaccctcccgcctccttttttgtttgtttttgagacagggtctttctctgttgcccaggctggagtgcaatggtgtgatcacagctcactgcagcctccacctcctgggctcaagcgatcctcccacctccgcctcctagtagctagggccacgtgtgtgccactatgcccagctaattaagttttttgtagagagggagtcttcctatgctgcccaagctggtctcaaactcctgacctcacgcgatcctcccacctgggcctcccaaagtgctgggattaccggcgtgagccaccgcgcccagcctgagtgccagctttcgaagggaggtgcatcaaagaatttgtgaccacagactctttttctgtcacactcatcaacaactcctgttggctagtgttcaaaagagattcctaatccagtcattcctcaccatctgtgcagctacggctctggacagcccaccagcatcccgtctggagggactggcctctttcctccctcccctgcccctctgtgagctggtcacagccgttaagggtgcctttgaagtgtccatcagattacatcatccctgcgacacacacactaaaatccctccagcagcctaaaacccaaagtgctcctgac

SEQ ID NO: 1561199 - DNA, 4001 bp, Homo sapiens
ttgttttaagtagagacagggtttcaccatgttgcccaggctgggaaattctctagatggacctgcaagtttttggttataaggaaactgagtcacagagggtcaggagcttgcctgtttataaagcagtgatgtggcagaatcagaatttgaacccagcctttaacctagtgcaatcctttcctcatcctagtcaatggcacatttggggttcaagtctcgtctctcccagagcccaccccagaggggaaggatcgaagccttaggaagcttctagaagtactgtgtcctgtaatcccctcctcgggcttttaacaatatcttgttgaatctcccccacccctcaaagcaccctccctccccacagttatctcagccccacaagaaaaaggagatgaccagccccattggacagatggggaaactgaggcctagaagctggggatttacaagatcccaagaactctgccagaggtccctgcgtcaaagctcgagcgggtgtgattccagggaggtcatctgctgaggggtgtcgggagatgctgggaaggggcaggcatgctgtggaactgggccgttcctgcctctcgctctgcctccttgccctgctccccgtctgtaacacctgagctgtacctgggcaagtgtgagtcattttttagcgttgacgtctctctgggaggagtgttcccctgtcaacggctggagttttgtcctcaaggcaccctttcgtggccccattggacagacagggacactgaggcctccggaacccaccatactgaattgtcaagcaatcaaaagacccctcacccacctgggctgacccctgggggaacggggatgaggaaactgaggctctgggggcacctgaccgtcggtccaaggccacacagtgggaggggccgtaccgcggggcctcagacctgcacccgtctgcagagccaccccaccattggagcagggttcaagtcccccccccggccccatattccctgcaggggtccaggcactcacccaccacctgtatcccaggctgctccagcctctggccagtgcccgattcacccaggtgtttgtgtggctggagacagccctttgttcacggtttccataggtacagcgtccctgagcggcccctcctctgcccctcccagcccttgcctgtgcaggtcctgggtccggcccatccagggagcttgttatgtttcaaagttggcgccctcggacctgccgtagtggcagagggcacagcccatgcaaaggccctgagagaggacctcgcctggggtgttggagaaacaggaggaggccagtgtgactggggcagagccacagcgagagtcaggcaggttatgagcagggcctgtattcctgcatctgatcccccagcagccctcaacttggggagttacgacccactcctgttttacagatgaggaaactgaggctccgcagaattgaaaaactggttcaagatatcatgcgggtggcagagctcaaacctagattggtccaagctccgccaccactgggctggcccccctggggcctcccaaggcgttcatcgcctccagctgagctgggactggctcaggaaataaactctggcggcctgtttacacctggggctgctcctccaccagcccttcccccctccatagagaaggtgctgggaaatgtgaggatgcagagaaaacagattctgtcctgcctctgtccccacttccctggacaaacattggaagcattggcctctttctaggccttagtttcccatcccaggaaatgggcctagttcgacttcacagaaaaggccaggaggcggcaggtgtccttcagatcacctgccaattaccttagcagcgacggtcccagttcacagctggcaaaactgaggccaagtccccacaggccacttgggagctcattaggggccagtctgggtgggcccgggctggcctaggcctggctccccgccaccgatgcctggaccgatgcctggtttagctagaagctacagtcatgcccacctccgcacggctggcccagctgcccaccgcctggaatgccctcagggttctggaatctggcctgagcacctgcggccctacagttaaagggggcagagtccactagagtccacatgggggatgggggtgctggtcccagagcagagccccacgccaaggggggcaattgagactcaatctgtctccccctaacctatacagcgagagtgacagagagacagacggaaactgaggcaggaatgtagacggacaggcggtggggtgcagaagcattaaggggcgggagagacagagggcggccaggtggcccccgagatgcgctgaaatggggggcgccccggcactgctcgctcacctactctcgaagcagagtccgtacgtccaaccgtcgggggtccgtccagccgcctccgtgggccggggccgttgccgcggcggtgggagcagcgccggagccggggccggggccggggcggggcgggcagcgcggccccgccctccactcgcctcgcccctcggcaggccacgccctccactcgccccgcccgcgcggaagggaccggagagttgccaggcctggggggcgggccgagcgctccggattagccaatgacagggcgggcaatgtacgaaaaggccaatgggagcagggcactgcgacgggggggaagtggggggaaggggcggagcctgggggcggggtcaggcggctctgggggattcctccggaatcgcgaaggggcccggatgcgggggcgaggccgtcgtgggggtgccggccacagaaaagggaagagataagagtacgagacagacagagaacctggggagggaggcacagagacaccaacaggaagagaccagagagccaaaaggcaaaacagaccaaccacgtggttctgcacgggccccttcctccttctggggctagtttacccgcctgggtaataggaatttcggcagaagcgtgtttctcaaagtacggcctcggggaacccttcgcgtcagaaagatctgagagtccattttaaaatgcagattccaactaggtgtggtgcctcacgcctggaatcccagcactttgggaggccaaggcaggaggatcccttgagcccaggagtttgaaaccagcctgggcaacctagggagaccctgtctctacaaaaaaaaaaaaaaaaagaaagaaagaaaaagaagaagatcaaaataagttaaaattttaaaaatacagagttctgtgccacaagaagggatgaatctaacccagggttgtggggctatagatgaatctttggggtgaggtggagggctcctggagacctcatcagaggatccccaggtccagcctcgatttccgtaggaatgagcctgcaggacacacaggagcctcccggctgcgcagcgccagctggggtcccccggggaggatgcagctgtgagtcctgggaaccaggccctggagctgctcccaggtcccctgcagcaccatttccgccctgcagcccaactctgggtcccggttgcagctagggcctagggagcccatagcaacctcgctgcttcttcctccaggaagccagacaacaaattgttgagggcctgttgtgtgtcctgacctgcacacgggattcaggaagaccgaggcacaggcctcaggaggcaaaagtaagttaaatatctcattggctgggcccggtggctcacccctgtaatcccagcactttgggaggccgaggtgggcggatcacctgaggtcaggagtttgagaccagcctggacaacatcgtggaaccccgtctctactaaaaatacaaaaattagccgggtgtggtggcacatgcctgtaatcccagctactcaggaggctgaggcaggggaatcgcttgaactctggaggcagaggttgcagtgagccaagatcgggccactgcactccagccggggcgacagagcaaaattccatctcaa

SEQ ID NO: 1561200 - DNA, 4001 bp, Homo sapiens
gattccagggaggtcatctgctgaggggtgtcgggagatgctgggaaggggcaggcatgctgtggaactgggccgttcctgcctctcgctctgcctccttgccctgctccccgtctgtaacacctgagctgtacctgggcaagtgtgagtcattttttagcgttgacgtctctctgggaggagtgttcccctgtcaacggctggagttttgtcctcaaggcaccctttcgtggccccattggacagacagggacactgaggcctccggaacccaccatactgaattgtcaagcaatcaaaagacccctcacccacctgggctgacccctgggggaacggggatgaggaaactgaggctctgggggcacctgaccgtcggtccaaggccacacagtgggaggggccgtaccgcggggcctcagacctgcacccgtctgcagagccaccccaccattggagcagggttcaagtcccccccccggccccatattccctgcaggggtccaggcactcacccaccacctgtatcccaggctgctccagcctctggccagtgcccgattcacccaggtgtttgtgtggctggagacagccctttgttcacggtttccataggtacagcgtccctgagcggcccctcctctgcccctcccagcccttgcctgtgcaggtcctgggtccggcccatccagggagcttgttatgtttcaaagttggcgccctcggacctgccgtagtggcagagggcacagcccatgcaaaggccctgagagaggacctcgcctggggtgttggagaaacaggaggaggccagtgtgactggggcagagccacagcgagagtcaggcaggttatgagcagggcctgtattcctgcatctgatcccccagcagccctcaacttggggagttacgacccactcctgttttacagatgaggaaactgaggctccgcagaattgaaaaactggttcaagatatcatgcgggtggcagagctcaaacctagattggtccaagctccgccaccactgggctggcccccctggggcctcccaaggcgttcatcgcctccagctgagctgggactggctcaggaaataaactctggcggcctgtttacacctggggctgctcctccaccagcccttcccccctccatagagaaggtgctgggaaatgtgaggatgcagagaaaacagattctgtcctgcctctgtccccacttccctggacaaacattggaagcattggcctctttctaggccttagtttcccatcccaggaaatgggcctagttcgacttcacagaaaaggccaggaggcggcaggtgtccttcagatcacctgccaattaccttagcagcgacggtcccagttcacagctggcaaaactgaggccaagtccccacaggccacttgggagctcattaggggccagtctgggtgggcccgggctggcctaggcctggctccccgccaccgatgcctggaccgatgcctggtttagctagaagctacagtcatgcccacctccgcacggctggcccagctgcccaccgcctggaatgccctcagggttctggaatctggcctgagcacctgcggccctacagttaaagggggcagagtccactagagtccacatgggggatgggggtgctggtcccagagcagagccccacgccaaggggggcaattgagactcaatctgtctccccctaacctatacagcgagagtgacagagagacagacggaaactgaggcaggaatgtagacggacaggcggtggggtgcagaagcattaaggggcgggagagacagagggcggccaggtggcccccgagatgcgctgaaatggggggcgccccggcactgctcgctcacctactctcgaagcagagtccgtacgtccaaccgtcgggggtccgtccagccgcctccgtgggccggggccgttgccgcggcggtgggagcagcgccggagccggggccggggccggggcggggcgggcagcgcggccccgccctccactcgcctcgcccctcggcaggccacgccctccactcgccccgcccgcgcggaagggaccggagagttgccaggcctggggggcgggccgagcgctccggattagccaatgacagggcgggcaatgtacgaaaaggccaatgggagcagggcactgcgacgggggggaagtggggggaaggggcggagcctgggggcggggtcaggcggctctgggggattcctccggaatcgcgaaggggcccggatgcgggggcgaggccgtcgtgggggtgccggccacagaaaagggaagagataagagtacgagacagacagagaacctggggagggaggcacagagacaccaacaggaagagaccagagagccaaaaggcaaaacagaccaaccacgtggttctgcacgggccccttcctccttctggggctagtttacccgcctgggtaataggaatttcggcagaagcgtgtttctcaaagtacggcctcggggaacccttcgcgtcagaaagatctgagagtccattttaaaatgcagattccaactaggtgtggtgcctcacgcctggaatcccagcactttgggaggccaaggcaggaggatcccttgagcccaggagtttgaaaccagcctgggcaacctagggagaccctgtctctacaaaaaaaaaaaaaaaaagaaagaaagaaaaagaagaagatcaaaataagttaaaattttaaaaatacagagttctgtgccacaagaagggatgaatctaacccagggttgtggggctatagatgaatctttggggtgaggtggagggctcctggagacctcatcagaggatccccaggtccagcctcgatttccgtaggaatgagcctgcaggacacacaggagcctcccggctgcgcagcgccagctggggtcccccggggaggatgcagctgtgagtcctgggaaccaggccctggagctgctcccaggtcccctgcagcaccatttccgccctgcagcccaactctgggtcccggttgcagctagggcctagggagcccatagcaacctcgctgcttcttcctccaggaagccagacaacaaattgttgagggcctgttgtgtgtcctgacctgcacacgggattcaggaagaccgaggcacaggcctcaggaggcaaaagtaagttaaatatctcattggctgggcccggtggctcacccctgtaatcccagcactttgggaggccgaggtgggcggatcacctgaggtcaggagtttgagaccagcctggacaacatcgtggaaccccgtctctactaaaaatacaaaaattagccgggtgtggtggcacatgcctgtaatcccagctactcaggaggctgaggcaggggaatcgcttgaactctggaggcagaggttgcagtgagccaagatcgggccactgcactccagccggggcgacagagcaaaattccatctcaaaaaataaaacatacaaaaaaaaaaaattagctggtcgtggtggtgcacgcctgtagtcccagctactcgggaggctgaggtgctagaattgcttgaaccccagaggcagagattgcagtgagccgagatcgcggcactgcactccagcctgggctacaaagcaagagtccatctcaaaaaataaaaaataaagcaaaaatatgaaaaaattagccaggagtggtggtgcacgcctgtagtcccagctacttgggagactaaggcacgagaatcacttgaacccaggaggcagaggttgcagtgagccgagatcgcgccactgcactccagcctggacgacagagcgagactctgtttcaagaaacaaaacaaaacaccttcttatttcattttggaggaggagactgaggcccagagagaggaagtaacttgcctgaggtcacacaggcacaaggtggtagagtcaggagtgactgtcccatttcacagatgacgaaatgga

SEQ ID NO: 1561201 - DNA, 4001 bp, Homo sapiens
ccagctactgctcaggaggctgagacaagggaatcacttgaacctgggaggtggggttgtagtgagccaagactgcaccactacactacagcctgggctatgggagagaaaccttgtctcaaaaaaaaaaaaatgcagacagcgagatggctggacacatggacaccacccttgggatatagcacctgccacagggcacagacctcaacatcatcatgacgctgagaagacacatgtgggctcagatgcgtggacatgtggtttgtggtttatggatccatgtgcgtctacagacacagagacccagagacaaagacagacaacgtgaatacaccggctgcagctaggcgggtgtgtggacatgtgggtacacgcacatacgtccacatgggtatatggacacgaatgtgtggccaccggatccagacccaggacacaaaaggggccaagcccacaggggtatggtgttgggcacacatagacccccaggtgaggcacacagacaggcggacacatccacagccagctggaagcagaccgagaaatttccacagatggaaatggtcagagaattaatgacaatcgcagtaacagtaataagagtaccagagaaggccaggcgcagtggctcacacctgtaatcccagcactttgggaggctgaggcgggtggatctcctgaggtcgggagtttgagaccagcctgacaaacatagagaagccccatctctactaaaaatacaaaattggccaggcgtggtggcgcatgcctgtaatcccagctactcgggaggctgaggcaggagaatcacttgaacccgggaggcagaggttgcggtgagcagagatcatgccattgcactccagcctgggcaacgagagtgaaactccgtctcaaaaataaaaaagtacagagaaaatgcatgcgtgtgtgcacaggggtgtgcatggcagtgttggggtgtcagttccgacgggtggagctggcatcgtctggtactacacatgccatagcatacttcgtcccctatgaagagactgcccttattttgtagatgaagacactgaggttcagagaggtgaattcacttgcccaaggctgggagcagcaaccagtcaagccagctgctctcagcctgtgccctgtcctacacacacacacacacacacacacacacacacacacagacacacagtgacccacaatgacacaggggagcccccctcacctccacctgctctcagccccccggtcccactcacaggcaggcgggtgaccatctctcctagacgccagtgcagctgcaggaggaaccagccttggacggccagcccggcccccatcagcaacagcaagagacccagacccacccgggccacactgcacgactgtctccggtggcttcgtcccagcctcgtgaatgggatgtcggtctgtccatccaccacaaacactgagggccgtacgacactctcctccatgcccaaggtgtctggagcagggctgacacgcctgggtccttcaacctcagaggaaaccgaaattgctcaacactcctgggctgtgcacgctgcggacaggcacccgtgggccgcctttagagctggggttcagccccaccccttcccccactcaccctcctcttcttccggtacccgccgcccccggtcttggccctgtctcactctcactcatacagactctcacactttccagaggcttctgaaaatgtgactcaggtggcaagtgcagtggggagcccccagctttcccttcttggatgcttcattcgcttggggccaccaaatatcgactgaggactttctgcccatgccaggctctgctctcggtgtgggggatgcagcaatgaacaacagcaagaagggtccctgctcctcttctggtggagccagagagacaagaaacctcgtaaacaagaaaataatacgttgtgggtttttttgttcgtttatttgttttgtttttgagatggagtctcgctctgttgcccaggctggagtgcagtggcgcgatctcagcttactacaacctccacctcctgggttcaagcaattctcctgcctcagcctcccaagtagcggggattacaggcgcgtgccaccacgcctggctgctttttgtatttttagtagagatgggttttcaccatgtcggtcaggctggtctcgaactcctgacctcaagcgatccacccacctcagcctcccaaagtgctgggattacaaacgtgagccgcaccatgcccggccttctgttgtgttttgatgtgacaagtgcagtgaaaaacacaagagtggaataaaggagtggatgtgtgctctgtgtgtgtgcttgtctgcatgcatatatgtgtgcagtgtgtgcatgtgaatgtgtgtattcagttgtgtgcatgcaagtgtgtatcatgtacacatgtgcaggcgcatgcctgtgtatcatacatgtgctggcatgtaaatgtgcgtgcatatgtgggcaggtgcatgcatatgtgtatggtcatctgtgtgcatgtgcatgtggtccatgtacatgcatgcatgtgcacgtgtgtgtatgtgtgaacatgcatcacatgtgcaagtgggtgtgcatatatgtgctgtgtgcaggtgtgtgcatgtgtgtgtgcctgtgcattggtgcgtgtatgtgtgtgtgcgcacttgcacgggtgtgttcatgtgtgtggggaggtccatgtatgagtgtgcatgcattcaagcgtggatttttttttttttcgagacggagtctcgctctgtcgcccaggctggagtgcagtggtgcgatctcggctcactgcaagctccgcctcccaggttcacgccattctcctgcctcagcctcctgagtagctgggactacaggcgcccaccaccgcacccagctaattttttgtatttttagtagagacggggtttcaccgtgttagccaggatggtctcaatctcctgacctcgtgatccgcctgccttggcctcccaaagtgctgggattacaggcataagccaccgcacccagcctttttctttctttttttttttgaggcagagtctcactttgtcacccaggctggagtgcagtggtgccattttggctcactgcaacctctgcctcccggattcaagcaattttcctgcctcagcctcctgagtagctgggattacaggcgcccaccaccatgcatagctaatttttgtattatatgttggccattatatatgttgtaacatatatgttgtctatatgttggccaggctggtctcgaactcctgacctcaggtgatctgcccacctcagcctcccaaaatgctagaattacaggcgtgagccactgcacttggcttctgtcttgtttcataagtatctttgtaatatccttgattttacctcttggccctgaaagccaaaaacacttatgtggccctttatagatacagtttgctgccagcttgcccctgagcttaggctaagacacgaagtgcccttcactggggcctctgtggttggaccctcgtgcttttgctcactctgccccagacagatatcctgggtctttgcacttcctcttcctgctgctgggaaccatcttccctagatctccaaagcaggctccccctgctcatctgcgtcttgactcaagaaacttctcacaggagccctccctgaattggtcaggtgtctcccgagagacagaaccaatagaagatacacagagagatagagatgggatctataggctgggtgcggtggctcacgcctgtaatcccagcactttgggaggctgaggcatgtggatcacctgaggtcgcgagttcgaggccagcctggccaatatggggaaaccctgtctctatcaaaaatacaaaaataaaaaataaaaaattagctaggtgtggtggcacacttctgtaatcccagctacttgggaggctgaggctcaagaatcacttgaacccgggaggcacaagttg

SEQ ID NO: 1561202 - DNA, 4001 bp, Homo sapiens
gagcaagtcagaaagagggatcggtggcgttcaaagaggggaagtagcagctttcagagacagcagcggtcaagggtcaaagccagtgtgcggcagagcctcactctccaggttcccccttcttcgtatcccggggtggggatggtggggggccagggaccggaagtggcggaggatacttaccattttgggccaccagctgcgcaaacatgccctgttaaaagtagaaaggaggaaagtggatgggggttcccctagaaaatggaggttctgtccccactcacttcagctgtcagggtccccagagtctgtgccgacctgaagcctacgcttcccttccctcccaactaaagaacagagaccgcacacacacacacacaaacacacaaacacacgaacacaaacacaaacgaacacacacacgaacacccacattaacacacagacacacgaacaaacacgaacacacacacgaacgcaaacacaaacacacacaaacacccacacgaacacacacagacacacacgaacacaaatatccaaacacacccacatgaacacaaacacccacacgaacgaacaaacacaaacacccacacgaacacacacccacacgaacacaaacacacccacgaacacacacacatacgcacccccacacgaacacacacacacgaacacaaacacccacacaaacacgaacacacacacacacacacacacacacacacacgaagctggtggctcaacctgccccaaggacagatctccaagaattcaggagggaaaagcgatccctcttctttccagcccccttgggggtattcccctgggggtcttgaaagggagaggggtacctcagatgttggggataaggctctttgggagttagcaaaggaactgggggtctccttggcggtcccagataaagaggaagtgcccccctcggatcggggatggaaaaaaggttccccccagagatgcagagcttgtgggggtgcggggtaaaaagaggtgccctcaatgtcctaagtcctacatagagaaaggaagccgtcgagggttggagaaccgcggagggtcccccgtccagggtgcagatggggtgccttgggaatgcggaatgaagaggggtgcccccacccactgccacatggagggaagccagcctttctccgacccggggtgcagaagacgtatccctgaggggttgaggactgtgggggtctcctcctcctggcctggggtgctgatggggtctcgggatgcggaatgaaaggggtgccctcccgtgcaagacggagaaggagagcccttggaggtccaaaaagaacttgtgggggtctcctctccccctcccgggatacagatagggtctcgtagcgggcgcaggatgaaaggggtgccccccggactagaagaaggagacccttggggggtccaaaaagaactgttgggcggtctcctccccgcccccggcctggggtacagatgaggtgtcgtaggggtgcgggatgaaaggtgtgcccccccggcctcggtgctagatggagaatgggagccccggtgggtctcctctccccggccgggagtgtagaacaggtgtccctgggggtgcgggagggagaagggagtcccagaggggcggtaggggtctcccgcgagaccagctaccgagggtcggggcacgtctcacctgccgcaggtccaagaggccggcgggatcgtcgggcgaaagctcgggaccctcgcggagtctcgggctggccgcggagccgggcgaggcgcgagccccggacacggcccaggggcaggcgaggaagacggcgcaggcggcagcgagcagcagcagcagcagcagccccgcgaccagggcccaaggcagtacgcggcaggcgcgagcgcggggcgcgggaggccacggggcttcggggtccagtgaagcgtcagaggcgtattccatgacgagagactgcgggaagacacagcgcgccgctttttatagctgcttggctacaaaaggaggccacgcccctccgcccgcggccacgcccctccgcccgcggccacgccccttcccagcccagagcctttcccctcgtccccgtgactctgcggaattttctccactcggatctctctccgcttttcgctctcctttccgtttccggccttccaagctcggctccaggttcctttctccctgctgtctctccatcgccctggttctccctctctgccgctctttcccggtatctctgtgggtctcttgctgactcagtctcctttgctctctgtgtctccccgttaacgtctttctctgtctctgttgattgcctctgcagtgggtggaaagagatctttctctctctctgccaatttatgtctatgcgtgcctctgtgcctgtattatctctgtctctgtctctctctatctctgtctctaattctctctccctgtctctggctctgttatctctgtctctgtatctctctgtctaactctgtctctggctgttatctctgtctctcattgtatctctctctgactctctctccctgtctctggctctgttatcactggctctgtctctctatctgtcttctctctctctgcctctgactctctctccccatgtctggctctgttatctctgtctatatatctctctctgtctctgactctctctccctatctctggctccgttatctctgtctctgtatctgtctctggctctgttatctctgtctctctatctctgtctctgactgtctctggctctgttatctttctccctctctctgcttctgttatctctgtcgctgtctctggctgtgactctctctctctgtctctgtgtctggctctctctgtctctgtctctgactctgtctctggctctgttatctctgtctctatgtctctgtctctgtgtctctctccctgtctctggctcttttatctatgtctgtctgtctctttctctctgtctctgactctccctatctctggctctgttatctctgtgtctgtctctctgtctctgacactctctccctgtctctggctctgctatctctgtctctgtatctctctttgtctctgcctctccctgtctctggctcttttatctatgtctgtcttgtgtctctttctctctgtctctgactctccctatctctggctctgttatctctgtgtctgtctctgtctctgacactctctccctgtctctggctctgttatctctgtctctgtctctctgtctctggctctgttatctctgtctctgtatctctctttgtctctgcctctccctgtctctggctcttttatctgtgtcagtctgtgtgtttctttctctctgtctctgactctccctatctctggctccgttatctctgtctctctccatctctgactccctctctttatgcatctctgtgtctctccctgtctctgtatgtctctggctctcactctttctgtctctctccctgtttctctctgtctctgattccctctgtctctctctgactctctgtctctccctgtctctctccttttccttctttagtctctctttgtctccttcccctcctctcagcaccccctagccccccatcactaggactcccccgggttcccccacatccagcacttcctaagaagggtcaggcttcagccaagcctcaaccaccctcactcctggagcatctgccccctgatccccaaccccccagtggaaccctgagtgtcatgctcagccctcctggccaccttccccgggacccctgggccttccctggcctgcccccacccacccactggatggttcccggcaggagcccctcgggaccctacaagcagaagctcggagagtccaggtggagaaattccccttgcaagaaagggacagtgttgagcgagttggaggaaacacatttcccatctgctctggcctgctggaggcggccaatccggggctgggaggatggg

SEQ ID NO: 1561203 - DNA, 4001 bp, Homo sapiens
ctgagggaggaggggctgggggcctggactccagggtctgagggaggaggggctggggcctggactccagggtctgagggaggaggggctggggcctggactccagggtctgagggaggaggggctggggcctggacttcagggtctcagggaggaggggctggggactggactcctgggtctgagggaggaggggctggggcctggactccagggtctgagggaggaggggctggggcttgggcttctgtctgggataggagggccacatggtcctgaaggagtaggttggagccaagactccacagacctgcacacaaagggtgttaggggccaggagtcccacgaaccatatataattgggtaaggacagccatattggacgcctgggtcccgagcagaagaggggatagaggctgtactgctgaattccgggactagaaacctcgcatccttgggagccggtacctgcagctccgcgaagcccagcccggccaactccagcggctggcagcgggtgctcagagcgcgccccttctctccgcgccgctcctccgcctctcgctccagctcttgctttgcaatctgcagcagcagagtctgcagaggggtgggagggaagcgcagcccacccggggcttcaggataaagaccaggcgtggggaaccgcctctgcccttctaaaccctccagtttggtctccactgttccaaggccccgtcccaccccgagcagtactccccgctaaagccacgccccgagcggccaaaccccgcccacttccgcccacctaccccgaaagccccacccattctcaagctccgccccctgagcacctgcctgctctttcccagtcccgcccgtcctcaccttcagctgcaattttctcgaggcggagatcttagattttttctgccagggtgagatggagcaaggaaggatcatggagggggattcggagacgacggtggaggggacctcaagacacccccagcaaacccagccggtccagatttgggcccacgtccaacttgagccctgagtctacgggaggccacgcccctcattcccatccaccaatctgggtctcttcctttggataggcacttcccatctatccctaagcaagtccgagggcaacggagttccgcccgcaggctgctgtcaccaatccgagcatgaccctctgcaaaactccgcccctgaagcccctccgcgtagtccccgcccccttcgcagccctggctcctccccccactcccagggtcttggatccctccggcgcctgtactctgcccccaggaagccccgtcccaccttggcgtgcggctccgtggcataagcgcggtagttggaggagcggcgtctgattggggctggtgcagggcgaggttccctagcctgggttaggaggagtggggaccccatcaccaccaagaccccacccagcccttaccgtaccgcaccctctgctagggctgcagcctcccgccccagacccctcactgcagcgcccaccctggccctgggggtcccagccacgccttagcccgctgctctcaccgcatcgctgctcctggaaggagagaaaccaaggaggggggttagtggtgggctgtgtcctgtctcctaagggacccctggagtcccctctgaacaagaggtcgggggaccgcgcttccccttccttgggttccaggagtctgactcgcaaacccacttcctctcttcacccaagagtccctacgcctacctcgcaggccaagggtccagcctctcagctgcgacccctcttgggaacccgggaggtcgcccccaactcccactgccttggggcatcactcacccatccgccatgctgagactcaggccgggaatggcaggaggcagggcgaggacaggggcgtttggagggtcagtgagggggccgcccgggtgaccttcagggtcccagggaccgtcagtctcctccgggctgcttgagactccccgaggacactgagataaagggcgaggacacagactaaatatactgtcacctcctcctccccctgcccactatgccagataacgggggcgcgtgaggggcggggtgggccctgctccagctggatcaccagccacctccgggcacaggaatccggaccctcctccctctgatcctggagtcctagacccctcctccctcagacccagagaatgcccgacctcccaacctcctcctccctcagtcccaggaccctgggagaccctggccactccctcacacaaggagtccaggcccccagcccccttttccctcagactcaagtgtctgggcccccagctcctcttccctcagacccaagagtccaggcccccagcccctcctccctcagacccaagagtccaggcccccagctcctcttccctcagacccaagagtccaggccccagcccctcctccctcagacccaagagtccaggccccagcccctcctccctcagacccaggagtccaggcccccagcccctcctccctcagacccaggggtccaggcccccagcccctccctcagacaagggagtccaggcaggcccccagcacacttcctctctcagactcaagagtctgcaccctcagctcctcctccctcagaccaggagtccaggaccccaatccctctcccctcagaccgaggagtccaggaccccaatccctctcccctcagacccaggagtccaggccactcaataaatgttgttgattaatttgaggatgcagctgtgctcggggctagctctcagtcaatagcactgggaaatccatccctcgtccacttggaaacccaggaatctggtttctggcttcctctgtccagcactcctgggcctttctctcccagccctggagacggacataggacaggaaagacgcttggacacacagaagggtggacacaacttgctttacttgaaccatctgggtgctgaccaggccctggtgaggagacaccccagcccctagtcagccacagggtgcctgggaacaagggggccaaagtcaagggcctgagactcagtgtcagatcctaggctgggcttagagcctcagaagtggaatttggaattctgagagaacaatctagaattctaggaatagaccatagaatctcagaaatggaatttgaaagtctaccaacactcccggggtgggggtggcgggtactgagtgggaatgattagaataaaattgaggactctagcagcggacttagaatggtatcagcgggttctcatcctacaacctgactttggaagttggagataaggggtgtctaggggttgggtcagactccagttttggagtctgactcacagttgggcggagccaaggccccctgaggctgagccagaacctctgagagtgaacctggagactcagagggcagctggcagggctcacagtgtggggtcccaccctgcagaggctgggtcaggccctcaagggctgggttgctggcttcaagaggctgggccaggatgtcaaggggcggagttccgggttccacagctgggacagtgttgcccagagctgattcctgggacttgcagaaacgtgcgaaggtctctgaaggcctggccccggtctgtggagcaaatccagctgcctgagctagctccctgacccgggtgttgaatccctgcagctgctcctgccgcacgtccaccaggtacctgcagatgggaagcgccctgtcagggacccagattttgatccccagccaggatgttccccaccctccaccccactgactcaccgggctaattccacaatcaagttccctccgggtgccacacaggccccaagctcagggatgagaagatggaccatactgcagagaggacggaggacaggctgagattcagctccaaatccggagggaggatggggctctgggatcccagacaatgagggaggaggggtggcaaaactggagtctgggtcctggggaaagaag

SEQ ID NO: 1561204 - DNA, 4001 bp, Homo sapiens
tgggtctgaggaaggaggggctgggggcctggactcctgggtctgagggaggaggggctggggtctggactcctgggtctgagggaggaggagctggggcctggactcctgggtctgaggaaggaggggctggggcctggacttctgggtctgagggaggagggactggggtcctgaactcctggatctgagggaggaggggctgggggccggattcctgggtctgagggaggaggggctggggggtgtgtgggagggtgggtgtggactcctgagactgagatgggttgtcctggacacctgggtctgagggaggaggggctggggtctggactcctggatctgagggaggaggggccaggggcctggacgcctgggtctgagggaggaggggccgcgggcctggacgcctgggtctgagggaggagggtctgggggcctggcctcctgggtctgagggaggaggagctggggcctggactcctggatctaagggaggagaggctgggagtctagactcctgagtctgagggaggagcgggctgggggcctgtactcctgcgtctgagggaggagggctcaggtctggactcttgggtctgagggagggggccggctgtcctaaagcatgcatgaggacagaccttggtaggtgtggtcctggcacagccaggaggctgcagaccctgccccctcagcacagctgtcctcttttgtcttatgacaagtccatgggaacctgatccagttgggattaggaagaggcatttgagaagggacagtggcctgaagacaatagctgccccacccccaggagctattttggggggatgtcatagatggtgaaaccgaggacatttcctaagaagggatttgaggaaggggggcttctgggagaattagtcacccgcatcccctctcccactcgccccaccccactggctggtttcctccccacctgtctcccctttcaccttcccatacatcacgtagggggcaggggcataaagggcaccttctgtccgtagacctcaccctgacccctacattcttagacctcaaagtctttgagacaccctaggccacagggtgcctagccccaaatcccaatacccacagattctgagaccccgatttatgatgcccgtgtttctgaggccagcaagtcctcacagctctggattctgaaatcccagttcttgatagtccagatatgggccgggacatcctaagaccacccccaggtcttgagacctcctaaaatctgaaacctcaagaatatgagacccccaaaatcttgatacccaaactcggaggcccagttcatgataccccagataatggcactctaagttttcatgctttctatcataatgtctcagattccgagccctccactaccaaaaccccaatttcttctgagacccccccaattcctgataccctcagagtctgaggccccaaatcctgacacccagattgtttgacctccaagtccagatatccctgactgctgagatttcccccagattcccagaaccccaagatcctaggaggttttattctgggacatccaagtcctggcagccccgggttaggatttgtgtaacccacaaatcctagtattttcccctctatcctgagtccccctaaagtctgagcctctcaagttcccagacctccagttgtatgccccacctacctctgcaccatttctccacacccgacatcttccccacctgcctcctgccccctcccccaaggacatggtttttgaagaccacagggctccgcagagccccttacctaggctgtgtctgagatgctgtgaatcttgaggctgagccttgctgagggcactgaagctccggggagtttatagctggaggctcgggcccgccccgaggggagagggagggggagagaattcctttgctcaaacacaagcctgggagttcagagacagccctgctgcccctggctccacactcagagtccagaagcctccgtgggcccctccccaaccccatgccaaccccatctgcatggcccaggagccccgcccctgctcccaccccacaccccaggctcccgtggtgctccaactacctcccttatagctccctgtgctttgacgtccccatgcccggcacacagtaggtccttggaggacctactaatgacacatgggctataaggaatgtttcctgttttcttctctctgttccctctttctatctaggtctctttctggacccccatttctgttgtctctgtggctctccatctgtgtgtctctgtgtgtctgtctctacttcttagtctcctcctctgtctctgtccatctttttgtctcctcctcccacccccacccctttgtctgccgccaggattccatcctggtgacaacaggcactaaagccgggaagcaggtgtggggagggggagggggagggtggggtgtcaattagggtgaaacctaccctccctccccacctccatctaacgctgatcttttttggtatccccctcccgcttcccagccaagccatgaccttgagttctaggttcaagccagccctggagagcaggcttcctcaccctccccgcctctccgtacctctgtctctggtggtctcggtctttgtgtttctgtgcatttctcggggccccttgctgggtctgtcttgggctctctctgcatctgtcgctttctgagcccctcagtgtgtttctcggcatgtgtctccgggtggttttgtctctgcatttctgtgggtgtctctgcatgtctgcccctctcagcgtttgtgtctgtgggggctcacagtctctctgtgcatttctgtccacctatgaccccatttctgtctctttttggctctgggtctctgtgtctgtgttcacgtctctatctttctagttctctccatgtctctcttagtgcccgcagttccccctctgtggctctccatttccatctcttatagggtctccatgtctctgcaccttgctgtgagtatatctctgtctctcttttctcctttctttgcacttccttctatgcatcttgtggtattttctccctctctctttgggtctttgcctggctcctactctctctactcccaactcagtctctctgttgtcggtcatgtctctctgcctgtctgtttctctgtgtctctctctctttgacctttagtcttggcatctctgtgcactccacatgggccagaggagctgtgacaatagagatcagaagactgatggaatgaactgtttgtggcaataagataccaaattataaacaagacctaaggccatgccaggcaagggttaagccacgcatccctacacttatataatcgactatgttccaactgccacaaggcttttcctttttctagcagctaaacaagcaccggcctcaagataagcaatattacaaccattgcagccatccattgccagatgctgactagctgaaccccctgttccacaaggcataactacagcattagttgaacaagagactgatttcagtaactttctcctgataagatgccgcagaccacggactggttctggctgttgacagaggctgtgcactgagtgtcttcatatccctgcttcgtgtttcgatacgaatgcattcaatggaatgcacttaaatgttaagcctccaccaccaagtgaaggtgggatgcatgtaaaatgtgtttgcggccagtcgcggtggctcacgcctgtaatcccagcactttgggaggccaaggagggcggatcacgaggtcaggaaatcgagaccagcctggccaacatggtgaaaccccgtctctacgaaaaacacaaaaattagctgggcgtggtggtgcatgcctgtaatcccagctactggagaggctgaggcaggagaatggcttgaacccaggacgcagaggttgcagtgagctgagatcgtgccactgcactccagcctgggtgacagagcaagactc

SEQ ID NO: 1561205 - DNA, 4001 bp, Homo sapiens
ccctctaggccgaagtctgacgcccctccctgtcaggacccaacgagctcccctccccccaccccgctcaacttttcagtgcggcctcccccaatcagacccaaccaagccccaccgaaacaggcccctacacacacccgatcctcgcgacgtcccccaatcaggccccaagcagtccccagacgcttcccccaatcagatcccctccagcccgaccccagcagtcccactggccctcttcttgaggagccccgacatggcctggctccgaggccccaccccctaagctctgctcggttcccccctcccccgcccggcccgttctagctgccaggaggatcgggcccaaccggcttcccggcctttcccggtcgggcgcggccccgacgcccgggccgcgcgcggcgcaggctcggtgcccggcgggggtcgacgcaagccggggccaagagggtcgggctctgagtgaggcccacttacccggccccgggcagcagcggcggcaactcgcgctgcggcttctccagagactcgcgcggaaggagggagccaaagagagagaattaaaaaaaaaaaaaaaaaaaaaaaagaaagaaagaaaaaaaaaaaagaaaaacgcggccgtaggtgagccgccgcggctcccgtactccgttcaaactggtcccgccgagccaatcggaaggttcaaccttcacacgtgccctggcacttgggaaacccgggctgagacaaggtccggtcacgtgaccaaagagttgccgtttctttggcctctctagccagccggtcctcccagtgtctcgttttcccagcatctttcactgacctgaccgcaagctctttagctggagccaggagtttggtagcgcgtggggactttgtgtgtgatggatccaggaacccctcggccagagccagcaccctccttgtcaccttcctccactaaaaattgaaatgtgcctcccttcccccatccagaggtacttgggaggagtacgctgtgtgtgcgcaaggaaagagctgagcgtgctctttataccccagagacaaaggaaagaaagcaggacaaagtaagtgcctgagacaagccgggttcctacagaagcctctgccactttttgcattattttccagtactgtttgatagtttttacaaggagatgaaaaagccacaaggatataaatttttgaataaaacgaaatgaactaataaaataaactttgaaccacgcctaatccctttccctacctgaagttgaatgaggtggaacagcgcaggaaattctggcaagggcagggtcatgaagaaagaaatcttcttgatccttgcgacgtctgaagacagtagggcaccgtttttccttctcttgagagaggagcagatggtaaaaagctggagaccctgtagcgtcttggtttcccctccctgccctgccgataacaaagtgggagacctcctgccacttgaagcctcagtttccccacttgtcaaatgggtataagagcagttcgcgcgattagagatcatccaagttaagcatgacctggccagctctgaattgttccttaaaaacgtggctttaccctccaaggctcaaggctgttcttttactgtattcagcccctccctaagccgatatttaatgaattcaccagctctaatcccaaagaacaacccaccctgccctgaggaactttttgaccctcgagagaggcagaggtcaatttttgcccctgcctgaaggaggggaacagctatctcaacccacttgccgtaggcaaagtcagtcccggctccgttcattcatgaaaatcaagtcccgggcctccaaggttagggaagtgtcggcaggcgcctaactccactcggagaatcgcggaagacaccctaaaggagcagttgggattccgaggtagccagttccgctggactgaaacctgggctgagaaacacgtgcagaaagccgccaccaaggcatgcgtaaaggcctccctctcccccaccctccgataagccctggaactacaaatcccgtcctgccatgcgccagggtcgccgcgctttggggttttggctgagactcaaattggcaggagggtctctagaccaaccgaggtgcatggggagcagaagagtgagactggggagctggggctggatttgggggttcctggagcgagtgtgaacgataagagctttctggtcaaatttgggggctgccccagataaagatcagatggggagcgagtttgggatgcaggagacaatttgttaaggttcacccccttcatataatatggcaaattttcagcggccctccgcaagccttggggcagaacaaagtagcccctgctgcatgtgtggtccacattgttggcccttgtgtggtcacggaattttttcttcctctccagctggtgaatttgagtgttgaatcaggacaaggttttgggtttttgttgttttgttgtttttgtttttctatttctttgttttgttttgttttgtttttgagacggagtctcgctctgttacaaggctgaagtgcagtggcgcgatctcagctcattgtaacctccgcctcccgggttcaagcgattctcctgcctcagcctcccgagtagctgggattacaggcatgcgccaccacgcccggctaattttttttaatagagatggggtttcacaatgttgaccaggatggtcttgatttcttgacctcatgatctgcctgccttggcctcccaaagtgttgggattacaggcgtgagccaccgcgcctggctttttttgtttttttgttttttgagatggtgtcttgctctcattgtcccggctgaagtgcaatggctcaatctcggctcactgcaacctccgcccccggattcaagcgattctcctgcctcagccttccgagtagctggaattacaggcgcctgccaccacgccaggctaattttttgcatttttaatagagatggggttttgccatgttggccaggctggtcttgaactcctgacctcaggtgatccacctgcctcgacctcccaaagtgctgggattactgtgcccggcccagttttcctatttctttctttctttctttttttttttttttttttttttttttttttttttttgagacactgtcttgccctgtcgcccaggctggagtgcaatggtgggatctcagctcattgcaacctccgcctccgggattcaagctattctgcctcagcctcccgagtacctgggactacaggcacccgccaccacacccagctaatttttgtatttttagtagaaacagggtttcaccatattggcgaggctgatcttgaactcctgaccttgtgatctgcccgccttggcctcccaaaaagtgctgggattacaggtgtgagccaccgtgcctggccttttttccttttttttttttttttttattttgaggtggagttttgctcttgttgcccaggctggagtgcaatggtgcaatttcggctcaccacaacctctgcctcccgggttcaagtgattctcctgcctcagcctcgcgagtagctgggattacaggcatgtgctaccacgccctgctaattttgtatttttagtagagaccgggtttctccatgttggtcaggctggtctcgaattcccgacctcaggtgatccacctgccttggcctccccaagtgctggtattacaggcatgagccaccatgcctggccttttttcctatttcttaagcacctactgcatgtcaagtggtttccaaatgttatctcattaataccggatgtggtggctcatgcctgtaatctcagcactttgggaggccgagggcagatcacgaggtcaggagattgagaccatcttctggctaacacagtgaaaccctgtctctactaaaaatacaaaaaaattagccaggagtggtggcctgcgcttataatcccagctactcaggaggctgaggcaggagaatcgcttga

SEQ ID NO: 1561206 - DNA, 4001 bp, Homo sapiens
gatgctagcgttcgatgaacattaggaattttcatcattttctataacaatccccgcagctctggaaatgggacccaggaattgtaatccttctctgtccagggcagatcctccgcacagcagaaaaaatctggggactaggggagtcagtccctctctttctctctctggcctttggaaactgcacgcatctacccggctcccccagccccggaaggaaggaaggatacatcctgcacgatgcgctgagtggctgtgttgggcgactgtgagtctttgagcagctgcaggacctgctgcaggccctgctcgtctggctgccagtccatggcgcaaggcaagctgcggaggtaggggccggggtcagcgctgggtctctggggctccgtgtgagacccaggtggagcccctgaggccgcggtggccgcatgacgacgggaacgccctcggcggacaggcggaggcctccgatccacgcccgcccaagtgcggggtccccgccagctgcgccatcctcggccgcgcagtcgcgggctcgggagcgcgggaggggggatgtggaaacgggccacaggcggcggcggcggggcccggcggatcctcatgggacccagcgaagagccctcgtcccagggtggcccatgccgctgaccccggctccgagcccgaaggcttccacctccctcgcagcggctgggcgagggcccagccgcctccacatccaggggccccgccccagaccgtgatagcgccccggcccccgtggtctcttctatgcaggcacagtccctgaagagtccccttcccccgacactctgcccttaacttctgccagatcccagaggcctcctgccctagtccaatttctgagcttccccagatgcgccctcccaagacgatcgtcctgatctctcctgtcccctgttcctgcccttcaagctcagtggatgccagatatccccctctgtggcctagccaaattctaaggattccccttaatcaggcccaaagcagtccccaggtaggtctctgctgcctcttcgaatgagagccagccaagcccggccaacccactataggagccccctggaccgatcccagtcgccttccccaatcaggtctggccaagcctctccctgaaattccctccgaccctgtcagcagtaacccctgctgacggatctctgttgcctctcccagtcaagttcggccgagccccccaccacctcgtgtcagtaaccccctggtccgatccttgcagcctcccccagttcggcctgggtaaacaccccccggggcattcccctcaacggatcccagcaacgcctcgaagtcagatccaagaaaaccctctaggccgaagtctgacgcccctccctgtcaggacccaacgagctcccctccccccaccccgctcaacttttcagtgcggcctcccccaatcagacccaaccaagccccaccgaaacaggcccctacacacacccgatcctcgcgacgtcccccaatcaggccccaagcagtccccagacgcttcccccaatcagatcccctccagcccgaccccagcagtcccactggccctcttcttgaggagccccgacatggcctggctccgaggccccaccccctaagctctgctcggttcccccctcccccgcccggcccgttctagctgccaggaggatcgggcccaaccggcttcccggcctttcccggtcgggcgcggccccgacgcccgggccgcgcgcggcgcaggctcggtgcccggcgggggtcgacgcaagccggggccaagagggtcgggctctgagtgaggcccacttacccggccccgggcagcagcggcggcaactcgcgctgcggcttctccagagactcgcgcggaaggagggagccaaagagagagaattaaaaaaaaaaaaaaaaaaaaaaaagaaagaaagaaaaaaaaaaaagaaaaacgcggccgtaggtgagccgccgcggctcccgtactccgttcaaactggtcccgccgagccaatcggaaggttcaaccttcacacgtgccctggcacttgggaaacccgggctgagacaaggtccggtcacgtgaccaaagagttgccgtttctttggcctctctagccagccggtcctcccagtgtctcgttttcccagcatctttcactgacctgaccgcaagctctttagctggagccaggagtttggtagcgcgtggggactttgtgtgtgatggatccaggaacccctcggccagagccagcaccctccttgtcaccttcctccactaaaaattgaaatgtgcctcccttcccccatccagaggtacttgggaggagtacgctgtgtgtgcgcaaggaaagagctgagcgtgctctttataccccagagacaaaggaaagaaagcaggacaaagtaagtgcctgagacaagccgggttcctacagaagcctctgccactttttgcattattttccagtactgtttgatagtttttacaaggagatgaaaaagccacaaggatataaatttttgaataaaacgaaatgaactaataaaataaactttgaaccacgcctaatccctttccctacctgaagttgaatgaggtggaacagcgcaggaaattctggcaagggcagggtcatgaagaaagaaatcttcttgatccttgcgacgtctgaagacagtagggcaccgtttttccttctcttgagagaggagcagatggtaaaaagctggagaccctgtagcgtcttggtttcccctccctgccctgccgataacaaagtgggagacctcctgccacttgaagcctcagtttccccacttgtcaaatgggtataagagcagttcgcgcgattagagatcatccaagttaagcatgacctggccagctctgaattgttccttaaaaacgtggctttaccctccaaggctcaaggctgttcttttactgtattcagcccctccctaagccgatatttaatgaattcaccagctctaatcccaaagaacaacccaccctgccctgaggaactttttgaccctcgagagaggcagaggtcaatttttgcccctgcctgaaggaggggaacagctatctcaacccacttgccgtaggcaaagtcagtcccggctccgttcattcatgaaaatcaagtcccgggcctccaaggttagggaagtgtcggcaggcgcctaactccactcggagaatcgcggaagacaccctaaaggagcagttgggattccgaggtagccagttccgctggactgaaacctgggctgagaaacacgtgcagaaagccgccaccaaggcatgcgtaaaggcctccctctcccccaccctccgataagccctggaactacaaatcccgtcctgccatgcgccagggtcgccgcgctttggggttttggctgagactcaaattggcaggagggtctctagaccaaccgaggtgcatggggagcagaagagtgagactggggagctggggctggatttgggggttcctggagcgagtgtgaacgataagagctttctggtcaaatttgggggctgccccagataaagatcagatggggagcgagtttgggatgcaggagacaatttgttaaggttcacccccttcatataatatggcaaattttcagcggccctccgcaagccttggggcagaacaaagtagcccctgctgcatgtgtggtccacattgttggcccttgtgtggtcacggaattttttcttcctctccagctggtgaatttgagtgttgaatcaggacaaggttttgggtttttgttgttttgttgtttttgtttttctatttctttgttttgttttgttttgtttttgagacggagtctcgctctgttacaaggctgaagtgcagtggcgcgatctcagctcattgtaacctccgcctcccgggttcaagcgattctcctgcctcagcctcccgagtagctgggattacaggcatgcgccacca

SEQ ID NO: 1561207 - DNA, 4001 bp, Homo sapiens
tgcaggcgtgaaccaccgcgcctggcctatatatcttttctttgagacagggtctggctctgtcgcccagggtggctggagtacagtggcacaatctcagctcaccacaacctctacctcctgggctctagccatcctcccacctcatcctcccaagtagctgggactacatgtgcatgccaccacacctagctattttttgtattttttgtagagatggggtctccctatgttgcccaggctggtctcaaactcctgggcccaagcgatctacctgcttcggcctaccaaagtgctccgattacaggcatgagccaccccgttgggccagggcctactttaatagttaatggagtagatgctagcgttcgatgaacattaggaattttcatcattttctataacaatccccgcagctctggaaatgggacccaggaattgtaatccttctctgtccagggcagatcctccgcacagcagaaaaaatctggggactaggggagtcagtccctctctttctctctctggcctttggaaactgcacgcatctacccggctcccccagccccggaaggaaggaaggatacatcctgcacgatgcgctgagtggctgtgttgggcgactgtgagtctttgagcagctgcaggacctgctgcaggccctgctcgtctggctgccagtccatggcgcaaggcaagctgcggaggtaggggccggggtcagcgctgggtctctggggctccgtgtgagacccaggtggagcccctgaggccgcggtggccgcatgacgacgggaacgccctcggcggacaggcggaggcctccgatccacgcccgcccaagtgcggggtccccgccagctgcgccatcctcggccgcgcagtcgcgggctcgggagcgcgggaggggggatgtggaaacgggccacaggcggcggcggcggggcccggcggatcctcatgggacccagcgaagagccctcgtcccagggtggcccatgccgctgaccccggctccgagcccgaaggcttccacctccctcgcagcggctgggcgagggcccagccgcctccacatccaggggccccgccccagaccgtgatagcgccccggcccccgtggtctcttctatgcaggcacagtccctgaagagtccccttcccccgacactctgcccttaacttctgccagatcccagaggcctcctgccctagtccaatttctgagcttccccagatgcgccctcccaagacgatcgtcctgatctctcctgtcccctgttcctgcccttcaagctcagtggatgccagatatccccctctgtggcctagccaaattctaaggattccccttaatcaggcccaaagcagtccccaggtaggtctctgctgcctcttcgaatgagagccagccaagcccggccaacccactataggagccccctggaccgatcccagtcgccttccccaatcaggtctggccaagcctctccctgaaattccctccgaccctgtcagcagtaacccctgctgacggatctctgttgcctctcccagtcaagttcggccgagccccccaccacctcgtgtcagtaaccccctggtccgatccttgcagcctcccccagttcggcctgggtaaacaccccccggggcattcccctcaacggatcccagcaacgcctcgaagtcagatccaagaaaaccctctaggccgaagtctgacgcccctccctgtcaggacccaacgagctcccctccccccaccccgctcaacttttcagtgcggcctcccccaatcagacccaaccaagccccaccgaaacaggcccctacacacacccgatcctcgcgacgtcccccaatcaggccccaagcagtccccagacgcttcccccaatcagatcccctccagcccgaccccagcagtcccactggccctcttcttgaggagccccgacatggcctggctccgaggccccaccccctaagctctgctcggttcccccctcccccgcccggcccgttctagctgccaggaggatcgggcccaaccggcttcccggcctttcccggtcgggcgcggccccgacgcccgggccgcgcgcggcgcaggctcggtgcccggcgggggtcgacgcaagccggggccaagagggtcgggctctgagtgaggcccacttacccggccccgggcagcagcggcggcaactcgcgctgcggcttctccagagactcgcgcggaaggagggagccaaagagagagaattaaaaaaaaaaaaaaaaaaaaaaaagaaagaaagaaaaaaaaaaaagaaaaacgcggccgtaggtgagccgccgcggctcccgtactccgttcaaactggtcccgccgagccaatcggaaggttcaaccttcacacgtgccctggcacttgggaaacccgggctgagacaaggtccggtcacgtgaccaaagagttgccgtttctttggcctctctagccagccggtcctcccagtgtctcgttttcccagcatctttcactgacctgaccgcaagctctttagctggagccaggagtttggtagcgcgtggggactttgtgtgtgatggatccaggaacccctcggccagagccagcaccctccttgtcaccttcctccactaaaaattgaaatgtgcctcccttcccccatccagaggtacttgggaggagtacgctgtgtgtgcgcaaggaaagagctgagcgtgctctttataccccagagacaaaggaaagaaagcaggacaaagtaagtgcctgagacaagccgggttcctacagaagcctctgccactttttgcattattttccagtactgtttgatagtttttacaaggagatgaaaaagccacaaggatataaatttttgaataaaacgaaatgaactaataaaataaactttgaaccacgcctaatccctttccctacctgaagttgaatgaggtggaacagcgcaggaaattctggcaagggcagggtcatgaagaaagaaatcttcttgatccttgcgacgtctgaagacagtagggcaccgtttttccttctcttgagagaggagcagatggtaaaaagctggagaccctgtagcgtcttggtttcccctccctgccctgccgataacaaagtgggagacctcctgccacttgaagcctcagtttccccacttgtcaaatgggtataagagcagttcgcgcgattagagatcatccaagttaagcatgacctggccagctctgaattgttccttaaaaacgtggctttaccctccaaggctcaaggctgttcttttactgtattcagcccctccctaagccgatatttaatgaattcaccagctctaatcccaaagaacaacccaccctgccctgaggaactttttgaccctcgagagaggcagaggtcaatttttgcccctgcctgaaggaggggaacagctatctcaacccacttgccgtaggcaaagtcagtcccggctccgttcattcatgaaaatcaagtcccgggcctccaaggttagggaagtgtcggcaggcgcctaactccactcggagaatcgcggaagacaccctaaaggagcagttgggattccgaggtagccagttccgctggactgaaacctgggctgagaaacacgtgcagaaagccgccaccaaggcatgcgtaaaggcctccctctcccccaccctccgataagccctggaactacaaatcccgtcctgccatgcgccagggtcgccgcgctttggggttttggctgagactcaaattggcaggagggtctctagaccaaccgaggtgcatggggagcagaagagtgagactggggagctggggctggatttgggggttcctggagcgagtgtgaacgataagagctttctggtcaaatttgggggctgccccagataaagatcagatggggagcgagtttgggatgcaggagacaatttgttaaggttcacccccttcata

SEQ ID NO: 1561208 - DNA, 4001 bp, Homo sapiens
gatctacagtccagccctttccaccctgggtcatcgctgtctggtgacagggtggctgtggccacatccccagcactgctcagcatggggccaggcagagagcaggggtttggcggatgtttgctggatgaaggaattatttgtgtcccagtgcacctcggagagatgcaatccccatctccaggctctcggtagctgtgaccttttcctgatgaggccgtcttagcttgacatttggctacaaatttgttattagaaggatacaatgaatggatgaaaaaggaagctcacctctgtgggactcagctgctttgtccccacatatgtgaccccgaagtggtagttggactccccgattgtgctgagggctactgtgtggttgacctggaaggaaagcgagagctgtgacgatactggacagataggcttgcccactgaagagggcaaggacaaggtctctgggctgggcaggggatgaagactgggaggcacggcctgactaagagactcagagaaaggaggtgctgccggtaggcccacagacctgttccttcactccagcctagctgctatggggagacagtacctctggattctaggtccccaaactgagtagtcagtctggcactatatctccgagtcttttcaagtatcagggagcccagctcttgagggaggagtaattgggccgagtgtgcagatgcagggagggggacggcggggacgatctctggtgggtaaggacaccaggaaggctcacctgaaaatggttactcaaccctttgttgactgtgagcttgacaccctccatctgaatgggaaacagctctggagaagagaaacgctgtcacactccactccaaccccacaccaactctcatctcttccttccctaccacccccagctctctccagagacccacagcagaacatctcacaaaggattccacctgtaaagaggcagtacagcctagttagacagggccagggcctttgcttgctcaaatctcactgccaccaagctgagcaactttaggtcaaactcatcatctgaaagatgggaccctcaccacacagaattgtcccaaggatctaatgagttaacgtataatgaacaccagaacagaactccataaatctccaccactactactactctaattgctccaggctgggatccggaggctttgggtcccatacccaaggaacctcgctgacaccttgctgacaccgtgaccttgggcctcagttgccttcccgatcacaagagaagtctggcttggctgatcccggggctcctcaggtccctaaaggcttttctctactgctatgacattccatcccgtttccagcatttgattccatcattctaagccccaagtccaacgttccaccattcgatcccaacatcacctcctagtgctgttaaataattccaatggtgcgcgccaaatcccagagtccccagtgtcctcccccttcccccgagatccaggccatcgcagcccagcgggggcccctcgcccctcacccttgcacttccggtggcactcctcgaatgtgcccgggttgggcaggcagccgcaggccccatcctcggcggcccctgaggcgctggcggttgcagccccgggggtccgttccgaacttcgactcgtactggtgccggcgcccaggctgcctcccagcggcggcagcgtgaagcccggcggcgagggcggaggtggcggcagccccacgagggccggcgcaggcggcggtggcggccctgcgggcggcgagctggcagccaacacgttccccatggtcgcctgctaggggagaggtcagagggcagaggtcagggcccgcgcgcccccgactcagccccagcaaatccgcacccggctccggccccggttctcactggcggcggcgcctgctcccggcctgggctccgctcccaccccgtgcgccacgcgcaaccgaacccgctgccgccgccgccaccaccgtcgccccgccccacctagcccattggtttagtgtgccctgaggcccgcccaccagcgtcaagactcggtcttcccattggacttgtgcataaagtcccgcccactttccctgaaatgtccttttgtattggttctcactcgcagggtagccacggcgcccctcccacccttcccattggctcgcagcgcctgcgcctattggctcgcgtcgccgcgggttccggtgctaacccgccattggtctgtgctgagcattttgccacgcccgctgaggcatcgccccgcctctctcctggaggaggccctcttttgattccgccccgcggcgaggttgctgtgataattggtcggctttgacccttgcagcattttgattggctccagcgtgtacggggtcgaccttggtggcgtatcagcttggtactctcattggctaacgttccagggtcgaaggacaggtaaaggtgggttgcgcggcagaggcggctaggcagcaaggtcaggcctcgcgtcccaccaggcaccgcggcagccgggcccccaccccacctctggttcggagtagccgacctaaaaccggaagtgctggcccttcccagagtgcctcgggagaattctaatctgttctgcgaaccctgcgctgctcctcgttacccacaatgccctcatcacctcttagcgaaacagttgccttagacccacccctttcgttacccatcatgcctcttgttcctcgcgtcactgcggcttctatctttggcccattcattcctctcccattacccatcatgcctctgccccattcatttgagcttcattgcccagactacttttagctccagcctgcctgctcactttcgtcgttcttccggcccttctctaattagccatcatgttttggatccatgaactcctgtccgttacctcccttgcccccggtccctatttttccattattcatcactctgcctctggcccattcattcaggtttattatccgtcatgccttgggctcctattacaacattattcatgattttgcctttagtctacttttacttgccgtttattcattaaacttgagcctcttatactttcgttactgcttttttaatttttatttttttaaagacaaggttggactctgtcactcaggctggagtgcagtggcgccatcatagcttactgcagccttgaacttctggcctcaatcgatcctcctacctcagcctccagagtagctgaactacaggtgcgtgccaccacgcccggctaactttcgtagaggcggggtctcactgtgtttcccaggctggtctcttaactcctggactcagtcgagcttcccgcctcagtttcccgaagtgctggaattacaggaatgagccactgcatctggccaattgctatttttatctttgtcccattcatcatactgctgttgcaattatgaatgttcattaaacagcatgccctggacccctccccattccattactcaacattctgtttttagggctgggcgcagtggctcacgcctgtaatcccagcactttgggaggccgagacgggtggatcacgaggtcaggagatcgagaccatcttggctaacgcggtgaaaccccgtctctactaaaaatacaaaaaataagccgggcgtggtggtgggcgcctgtagtcccagctactcgggaggctgaggcagaggaatggcgttaactcagaaggtggagcttgcagtgagccgagatcatgccactgcactccagcctgggcgacagagcgagactccgcctcaaaaaaaaaaaaaattttgtttttgattgatacatttttgctcattactctctcaattcttattttgtatctttggtccctttgtttttgtctttaactctcttgaccccagttcactgattctctcaagcccttagactccttcctcattccccttcatgtctcaccccatccccttcacatcccacagaaaaggcaagacctggtcaa

SEQ ID NO: 1561209 - DNA, 4001 bp, Homo sapiens
cagacttctgccctccagaactgtgagagaataaatttctgttgttttaagccactaagttggaggtaatttgttccagcagccctcggaaattaatataaatataaatatcctcatctgcagtgtctacggggtgagtggcttgtgcagtgctcaacctgaacaaccatacgtggtgggcctgctgttgaccccttttcctccttgggagattctcttccggatgtcctgggaggccatcttcctcctgctccccgttcacctctggtctcacgttctcaccctctctggtgggctctctgggctaggtgccctcagagtggggtcctgagctcttctcatctctcctgaagacttcaggacccctccagttcagtcttctgtcctggccccacgtcagttgcagacgcttctttctaccttcctgtctccaggctcctcccagcctccaacttaatccgcaagtggctctggcagcttcttcaaaccaggggccttccatcgcagtaaacggctccactgaccctctgggcctgcccttgcccgctcccctcccacctggctccagcaaatcatcgggcggggccttcagagccactgggccaccggagcaagtctgctccttgtccaggtacccaacaccctgccacccttatctgagtatgatcttggacacctgtgcaccctgaacgtggtaggggggacactccccatctctcttctccccccgaacttctctgggactctggcgagggctgccatggtgggcgcttatgccctggttatgaggctgaaagggcacctttgcttggcatccttccctgcctgctcttcccacccccttcctgggttctcttgggcgcacccccttgtaaaatcacctgcacacacaatgcctacctcaggctccgcttctggggaccccccccccaacaaaagacatcagcccatccatccccaacgccaacagatagtccccaaccaccttccctgggctcagaactggccccagccaggggacaccgcgcgtaggcacctgcagcctcgcatgcttcagccaaattccgtggctttcccgcctcccgtgtgccccacactcggggtctaaatttgcacctgctgggcctcttccctgcaacccgcccgcacatcgccaggctcttccaggaatccccacctgcccgctgggagcctgtcccctaagatgggggccctgggtgactgcgctgctctctgtaaatattcacgttctggctgaatggacggggataacatgaggctgctaaggaggcgactaggaggacctggctcgggggctggctctgcgacctcgggccaagtcctcttgagctgcacgattttgaaaatcatgaactgcaaggggaaactcagcacctgcaaaaaggcatcacagaaggcgaagccggccagaaggactcgcgccgcatgcagcgcgctgcctagcgccggaccgaagcccggaccctccagcccaccttgtccgatccatcccacccaagaaggcatcgcgcactacaactcccagcaagccccgggcccctgcgccggcgctgcgggtagggagccgcgcgcggcatgctgggagttgaagtccatcgctgccccacccgcccaagccggcccactgcgcacctctgggagtggtgggccaggcgaaggtgccatagcgcgcggcccaggcgctgctgctgcagcaggagctggcccgggggctccccggcgccgccgtttacaggcgagcgcaggcccatgttctcgaagtagtgagccaggaaggcgatcggctcctcgggccgcgcctccagcaccttcagcagggccgcacgtagcatttccgtcacgccgacctgccgcaggaagtcctcctcgctctcggccgcccccgccgcccgggataccgactggcggccgctgtccgtgaaaccggccggcggtggtaccgcttgccgccgcttctccactgccgccatcttcgctgagggcagcgggaccggaagcaccgccatattccactgtgcgctagagcccccccaaggcggccatcttgattaagggcagagggcaccggtatcccgctgggagactttgggaagtgacaagggtacgctaccactttccttgtgtccttattggcactctctcttctcctccctctttgtgtatattgattggctctcctggctttggcctcggtcctgaattttgccagactccaaaatggctgcctcggaagtgcttcgtttctggcacaaagccggattgcttgccatttgggtagtgagcgagtccttcattagcatggtctcctagcaaccagtctccctggttagcagagaagcctgacggagcatgcgcggggctggacctgcccaggactgctggacccagccccgcgcccggcccccagacccttttctcatgttcatctctgagccttggtgctgggggtcgagctcagcctggccttccgcctaactcagtcaacgtctgagtgcgtagctcacctcgtgggagaagccccctccccagctccgctgcagctgcgctgagcccctattggcggccacacgggcgagcatcccgcgctgttaccccctgaccgccagagggagctttctgacaccgcagcctccagagctgtaaactctgccatggctctccagggcccccgggctggcacctccaggccttcatcgcctgacctcgcttccggccgccctcccggccctcccaaccctccgcagcccgcagccacctcaaaacacaagcagtctcctccataagccgcctctgggtgtgtttccccaggcgacctctgtggatcttccctcactgctttcggggactcctggttaagcttctcaccgaggaaaccactaagccctcgcgtttccccgccccgggcagagcttgctgggtgccgtccccgtccctcaggggcgttgccccgggcagggggcaatgagagctgtttgccgggggaccgttccaccatcctcccagcacaggaatctctggcgggcagaccaaatgccctttgtaaaacgtgaagtagaggttcctcttcaaatgagactttcctccccatctaattaggaataaatagtaacttctcttagaagcaaaatgtattcaaaggcctgtggtaggccgggcgcggtggctcacgcctgtcatcccagcactttgggaggccgaggcgggcggatcacgaggtcaggagatcgagaccatcccggctaacacggtgaaaccccgtctctactaaaaatacaaaaaattagccaggcgtggtggcgggcgcctgtagtcccagctactcgggaggctgaggcaggagaatggcgtgaacccgggaggcggagcttgcaagtgagccgagatcgcgccactgcactccagcctgggcgacagagcgagactctgtctcaaaaaacaaacaaacaaaagacctgtgctaacattctttgttaattaattgttaatgttatattgaatatatataatgtaataaggaaatcaacatactttatgttcttagtgcccacaatgtaggctaaatatctgccctggcatgcttatactggtccaagcaagcattaggtcataacctgttcctcttccttatttgaaggtgtttttacctttcttagcattccacaagctacttcttccttcctttgttctcctctgcctttgcctctttttaaaagttccaagctgctagccgatcgggataaatacagaatgtgaggtcccgttccagccaatggaaaccgtcccgttccagccaatggaaaccggacagagcagtagggtggacgcgtcaggttataaatgaccctgtctcctttgttctggatactctcgtggcaaaactgctggccagtgtaccctttctgcagaaagtaaaacagtggccttgctgaggaaatgacatttatattcaagtgctatttctttacggcaccggggaacaa

SEQ ID NO: 1561210 - DNA, 4001 bp, Homo sapiens
catacacacaccccatcagaaacacacactcatccatacacattcacacaccaatagaaacacacactcattcacacacatacacaccaacagaaacacacactcatacacacacaccaatagaaacacacactcatccacacacatacacaccaatagaaacacacaaccatacacacaccccatcagaaacacacactcatccatacacattcacacacaccaacagaaacacactcatacacataaacacaccaacagaaacacacactcatctaaacatgcacacacaccccaacagaagcacagtcaccaatacacacaacagaaacacacatccaaacatgtgcgtgggtgcacacacacacgccatcagaaacccatcaccctgatacacagatgccaacacaaacatagccacatcaacatgtactttcaatcactgtcataccagcgtttgctcaagcacacacacagtcagcctgtcccgctaccctcacagacccccaccatctacacacaggctcacaaacacacccacactctttcacacctactttccaacagccgcacgcagcgtcccacacacagctctcctagtacacactcattctcacagtcacctttacccctccgcactcttttcagctgaaacatatgtgcatgtacagatagacacgtaaaacagacacatacaacacatgtgcacacacagaaaggctcaaacacacacagatacactcacacacacacagaactgctctcacacacacaaatatgtgtacacacacacgcagaaatgcttaaacacatacagatacacgcacagagaattgctcaaacacacaaatatgtgtacacacacagacatgtgcagaaatgcttaaacacatagatacacacagacacacgctcaaacatacacaatacatgtacacacagacacaaatgctcaaacatgcagatacacacacagacacacacagaaatgctcacgcacacacacagagaattgctcaaacacacacaaatggccgggcgcagtggctcatgcctgtaatcccagcactttgggaggcagacgcgggcggatcacttgaggtcaggagtttgagaccagtccggccaacatggcgaaatccggtctctactaaaaatacaaaattagccgggtgtgatggtgggtgcctgtaatcccagctactcggaggctgaggcaggagaatcgcctgaacgcaggaggcggaggttgcagtgatccgagattgggccactgcactccagcctgggccacagagcgagactctgtctcaaacacacacacacacacacacacacgcacacatgcacacacacaccagaggcaaacacgcacacacgtacacacacacgtacacacacatacgctcaaacacacgcaaatacacacacacagcatgtccccaaccgccctatctagtacacaacctcccagcgcaaacgacacctcgctcacgaacgttctcactctccctcccccgccaactctctctctgtcaaactcactttgttcgcactggccctgctgggggtgggtccgatcgtcacccctcttccagcccaggaccccatccaaggaaggcaatggtcccctcgctcttcctccgccaaagcatcagcctcctatcctcccgcaggtgtctgcgacccccaactgggctccagaccccggccttccgcacagagaggactcccagcagcccggagcggcccagcggagggcacctcacctgcttgcacttgtcctcagcggctttcttatccgcctccgcctgctccgcgcggtcgatggcattctccttgtccaacttcagcatctgcattttcttcttgatggcctccatggctgggcgctggcgtgggggacgtggggtgcgcggcgggctctgtgggggctgcggcagtcaggggctgtggctgtggggcagagtgagcctggcagggtggaggagagggccttatagcctcccggggtgcctccgccctcctgccaggcgagtcttggaggaggcccaagcccaggccggccgggccagccgccactcgcttgctcaggaggacttggccagctcaccgtgctcccggcagccctcgccttatttggacctaggattttcttaaaggaagaaaaaaaaaaggtcctagctgtttccatttttaacctggtgacacaggtcccgcgtgggcgtgtcccgggcaggacctagggtgggggctgctctgggctgcctcagtttccccatccatcgttgggaggaatgaagagggctgtgggtgggctcggggtcccggtgctgcaatgtggggaggcgcctgtcttttctgccttggtcttgtctgtggcccactgagtacctggtcccctaaaaatgggaaagtacttgttaagtaaaatgagcaattccccgtttcccccctcccccaccgcccacacacacacttttctctgcctaggaaatgtaggaaacgtctatttatctttcaaggcccagatccaatggcccctccttcaggaagccgtcctggattcctagacagacttttggacttcctgcctagcatcaagctttctcctcccctctaggtcctgcctctctagtatcagggattaggcctccaccctatttccggccaccacccccagggagccttcctggatttctcccacctctttctgccatgcccctgtctctcttctggtgactgtcgctgtgtctctctccatctctccatctcttctgcccccctgtggcttctactgcttgtggctcatgacagggagaaggccactcaatcaactgatctgggccatctctgaaactcttggagcccagggcaggctcctgctgtcctctctagatctcaggtcttcctttcctccctcttgtgctgggaatcaaggtgtggctccccagttcccaaagaacaggagacggccttagtgccttagctccccgcttaagactctgcccccaactctctccacactggacccctgtactccagttttcccacccccaggcctttgtgccgtccatctccttgaccctactatgcctccgttctcccctccagcaatcaagggcaggatttgctgactccagaaagctttttccttccttagatagtagagctaaaagaataaaacaaaaagaatttttttttttaaagagaaagtttaatttattggctcattcattcaggcactgaattcctgtcacatgctgtgtcctagcagcgcacactcagcatgtgggagctgttactattattgttattattcaagcatcatttatgagatgtgaactctttggggcaggccatggggctgggtcttgtctgtggtcttctgagtacctggcccctagaagataggaaagtgtttgttaaaatgaaacacacacacacacacacacacacacacacacacacttcgctgcctaggaaacttctattcatccttcaaggcccagatgcaatggctcctcctctaggaagccttcctggattcctagacagactcctggactcccacccagcatcaagactcctgtgtgggatgaagtggaggtagggaggcctccttgttttctgcccaaggctgtagaggaaacaggatcgtggaagagatgggtagtggtcagtgccactggggactgtaggttcgggccaagagtgtccagcttccctctgccccctcccagctgcctcactgttcattaagccagcttccttctctttgtcatggtgaaaacttcacccctgttggtgcaggggctgaaaaggtagcaaatagaacattctagaacttctttcatgcgctaaagacattgacttctccctgtgttccggagttaagggggccaagcccagacccctccccaactccgttcttcatcctcctcccttatcccacccctcccccatgctacacagacagtttcgtcctgtgacaaaagcag

SEQ ID NO: 1561211 - DNA, 4001 bp, Homo sapiens
tctatccgcacacccccccaccctcatcatacaactttcttgcctctgagtctgtgcacacccatgtctctggtcccagcaaacttatttattctataagacccagctcaacctccattttggagcctcccctgtcatgctcccataactgcacagaaaacccgtggaatgcagacctcgctccatcagtgagtcagctcccctgcctccatttgtctatgagctcttcccagggcagagaaaacacaattgaggctgggcgccgtggctcacgcttgtaatcccagaactttgggaggccaaggtgggcagatcacgaggtcaggagttcgagaccagcctggccagcatggtgagacactgtctctactaaaaatccaaaataaaaaaaaaaaaattagctgggcgtggtggcgggcacctgtaatcccagctactcgggaggctgaagcaggagaatctcttgaactcggggggtggaggttgcagcgagccgagatcgcaccactgcactccagcctgggcgacagagtgagactgcctcaaaaacaaaacaacaaaaaacaacaacacaattgattatttacaaagcgccaggctccacgcctgagatttactcctgggaccctccctgctactctggggggtcgggattcttatcagtcctactcgcagatgggaaaaaagctcctagagagcaaataccaagtcatgaagcctgtgggtggcatgatatgggaccagaatccaaatctgtccccagaccctggcggtgccaccatctgtcccgagggacagccaggaggatgatgcagagaggatggtgaaactccctcctttttcagacccattgtttatctcgggccctgcgactcgcggcggaggcgcacagcaggcgctcaaacgatcgtgggttcagggccccgcgccagcgttcccggggccttctggagagaggcagggtcccgccgccccggttcccgcaggaatcagctggagaaaggcgggcggcttggggctgaacttcctccaccccccatcccccccgccgcctggagcagacacgtcgccgccgcgcccctgggaacggtcagggaagcaagcagaagccgggaagccgcgaaagaggcgagaaagtgcgaccccctccccagatccccggtcccccgtcgaaatccctgtcggccggtcaaaccctagacaatggaagctccacgttttcatcctcattctcccccacaagtccggtcgcgggttcccctcggcccgggaccccggcgccagccccggagtcggagcctgcacgatacgccccctcccgccgctccacttctccacccggagatcgctcaccccctccgccccatccccccatttcccgcttggccggccccgcccgacccggaggcggcgccccctcccctgtcccaggcccaggaaggaggacggcggaggaagtagggggtcctggctgcgggcgcagggatgtgggtcggcgatcggcgtccgagggcgtaaaaaggcggcccgaggactgcgcgcgggcgggcagcgcgggaagccgggaagaaaggagggcgcgcgggggaggaggctgcgggtgcggggcccgaggccggggcgctcactttctcgcgccgctcgcgctcgccgtccagctcccgctgcaggccctgcgcgcggtcttccgcctcgtccgcctgctgctgcagggcctggatcttgcgtttcaccgcctccagggagttgaggccggccatggcgcggaggcgcagaggcgcacgggcagcggcggacgctcggctgggctcggctccggcgagagctgcacagccgcgccccggccccccaagcctttgcctgcgcgggggccgcccccgcctctccccgccccccgggccggctgccgtcggggcgatgaggtcacccggccggaccgccgacgtcagcaccgctgggggagggcctgacgtcggcaccgctggccacagctgctggaaagtgccccttttcgggacttatttggagaaagcgctgggaggcgccgccttctcctcctcctcttcctcctccccctgcggctctccccgccttcccggccccggggctccggcctggccccgccgcgggctcccgcatccctgcacacgtacgtcggaggccttcttctccgtgagctccagcttctcctgcgcgtccttcaggtcctcggaatatttatccagctcgtcctctgtcccttttagtttcttctggaggtgcgtcagctcctcctccacctggggacgacagagcgaggaacgggtcagcctggggggggggtcacgtccccgaggtgcaggggcggtcccccccaatattcacaagagtcctccgtctctctctgggcatcagtttccttatctgtagaacaggggttgcgatagcatgcaccacgccatccatgctacctgatagtgggattttcacatctttccctcgtcctgaggaccagctgttttgggcttattggggtccccagtactctagggagatcaatggcagcttttgggaaactgaagactccaaatgttttccagaaatacacacattccagtttcagaggtgcagcctcaccatgatctggagttaagcaatctcattctctgcgcgtggatccctccgcccatccctgtccccagcctttctccctctggttctgaccccaacacggggtcagagaaactttctaacaaatacgcctgccctctttctgcctagaacctgctatggctccctatggcccaaggcagtggttcttagactgtcttaccaaaatactctgaagggctgaagggctcagacctagtccctcatttctgggctttggggagcttggctagaagagactcgcccctacaggatcactttctttgaaggctcgggttaaatctttaaaatttttgcatataggccatgttcattttaataaaaatgtcccctactttccctaaattttcagtcctctgtttatcccaagagtcctatcctcccatcactcctagtttgagaagctcaggcctatggattacaaaccacagaccccatcacctctctttgtcaccccccaccacaccggtctagagttggctcaagaagacttttctgtcacctccaggctgaaactccctccctgggcccccaactctggattagggtgatcatatccagctcatgcctggatctgacttttttttttgagagtctcgctctgtcaccaaggctggagtgcagtggcacgatctcagctcactgcaacctccgcctcctgggttcaagtgattctcctgcctcaacctccccggtagctggtactacaggtgcacaccaccacgactgactaatttttgtattttcagtagagacagggttttgcaatattggccaggcaggtctcaaactcctgacctcaagtgatctgcccgcctcggcctcccaaattgctgggattgcaggcgtgagtcgccacacctggcttggatctgacttttgccttagatggtttgacactgatcttgttcctgctcccagggtgggcagacagcccccactgagcccagcttcattctcctgcttcctccccacagcaggaggctcagagaggtgggatgactttccccaggtcacacagcacagggtttgagcccaggtcttctggaatataagcctataatgaactgaatgcttgcttttgccccctctccaattcatgtgttgaagccctcatctccatgtgatggtaattggtgatggggcctttggaagatgatgaggtttgggtgaggtcatgagggttgacccaccatgatgggattaaggcccttatgagaagaggccagaacttggttatcctcttccaatgtgaggacacagcaagaaggtggctgtctgcaagctagctagagagcgctcaccagacatttaatctgccagcatcttgatcttggacatctagcctccag

SEQ ID NO: 1561212 - DNA, 4001 bp, Homo sapiens
ggcacattcacagcagagccacctgtgatagctgcacagtgaagacagcaaatgtccacctgcagcagggtgggtaaagggtgatgcattcactgcagaaagtcaccagcagtgtagatcagccactccaggccctctgggatctgaagaactttgcaggcacaggccccctataaatccagtaataacctggggcctgagtgattttcattcacagagccaccctcctcttggggctgagaccctgagtgttttttgcccatagagtcatccccttcttggtactgagaggtcatggtggagactgaggatccctccaaggggtctaggggtaggagcagctctgtgaagtgagggaataactgggtgtctggcaagaagtcggaggcatcggggctctgaggccataagggggctggggctgggagtgatcctgggcctgggattggagctgggactgagcctgagcctgggcctgagcctgggcctaaaatcggggctaggcctggaagtgagccagggcttcgcatccggccaggacttaagatgggacctgggccttggagtctgcctgggcctgggatctgggctgggctgggaatcgggcctataattgggcctgggcctgagattgggcctgggattgggcctgggatcaggcctgggttcgggcctgagattgggcctgggatcgggcctgggttcgggcctgagattgggcctgggattgggcctgggatcgggcctgggtttgggcctgagattgggcctgagattgggcctgggatcgggcctgggatcgggactgagattgggcctgggatcgggcctgagattgggcctgggatcgggcctgggtttgggcctgggatcgggcctgggtttgggcctgagaatgggcctgagattgggcctgggatcggggctgggcctgaaattgggcctgggattgggccacggaatgggcctgggatctggactgggcctgaaattgggcctgggattggggctgggatcgggcttgggatctgagctgggcctggaattgggcctggaattgagccagggagtgggcctgggatctgggctgggcctgggattggggcagggatcgggccagggcctggactcagggcagctgggatgcccttctgggctctgcacccagggccaccccaggcctggtggaggctgcagatcgtgggttccgccgctggaaggattcccgaggggccccgctgaggtgcggaggcagaggctgcagggactaggggcgcagcgcgggctcctcggcctctctgcccagggacgcgctggggctgctgctggagccgccgctcccgagctagtttggcgcggcgattcttgaaccacacctggggggcagaggggacagggagaaggtgtgaaggaggggctcgcgcggcccagtgagccttttggggtcggggccagcctgaagcctctccctgtgctcaacagccccccatcccccaccccaccaaaagagggccccggctccaaggcctggagaatggagggaagagggagggaaaagtagggggaggagggtggggtgggatgggaggagcggggtctgccgcccaggtgcccggggggccagggagggttcgaggggagggaccgcgggttctcacgggtgcctgaggtccgggcaccgggagaccccgtgggggacagcctgggccgatcatgtgggcgagtttgggctagcatagagttggaacaggactcaggatgcagccctggtctacactggcgggaccccttgcgtggcagggcgggaggtggtcgggcgggccaggccccggtgagtgacagcggtggggaggctccttggggtgactggggcgggcagggtgggggtgggggtcagacctgcagctgttgctccctgaggctgagcatctccgccagattcagtcgctggtcgtagttcgggtactggtccttctgaaagtaaaattctagcactttctgctggctttcagtgtagaccgtgcgctcctgccgctgtctccttggagggtccagggccaggggagggcctgggggtgggagggaaacaggtcacagaaacccccaggcagcccccagcccccctagggaccccgtcccctgcaccaggccaggagcccaggcagtgtgggctggggcggcaccgcggatagcagcctggtatccagaccagaccttgcacctctctgggcctcagggtccacatctaggaaataggcgcgataacagctcctgggaaggcaggcagcgtaggcgcctcacctcggagcagacggggctgcctcaggcctgctcaaccctccccagctgccccgtcccctcccatccaagggttatagggaccctgacacttgcaggggagccgccacctgcccagtcctctgctccactcaactgcatggtttaatttctttccttctttctttttcttggaggggatctcgctctgtcacccaggctggagtgcagtgatgtgatcacggctcaagtcagcctccacttcctgggctcaaggaaccccccgccttagtctcccgagtagctgggaccacaggtgtgcaccacgacccctgggtaatttttgtatttttgctaaagacgggtctccactatgttggctcggctggtttcagagtcccgggctcaagtgatcctcccaccttggcttcccaaagagctgggatcacaggcgtgagacgctacacccagctgcatgatttttcatttcccagacaccactaagttctcccccgtctgcaggacaggaagccgcccgcacaggcccagcccttctctggctgcccagatttgcactctgcagcctcagccacaggatcagcccagacccctcacacctctgtccccgctcaccttggagatgaccagggtcttgcatcctgagtcctgatctgttcccaaacacaagtgtgtactgacaagggcttggctcttaaatcacttctctgctgtgcccaccctggcccaccctgccgggaccctccctttcccaccctgccctgcagtcccgccccctggaggagttgaatgatggattaatccttcatcactgatcaggtactgcctgctgagctgtgctaggagctggagaacctcagtggacaacacagccttggtttcaccctcatgggccctagcccaggtgaggtggcattccatgcgggtttggttgggggagtcaacatcgtgacctgtggttggggtccccatctcaggagaggcaccgccagccagcccccaggagtcatccttgttccttcccagggctggggccccgagtgaccaatgccggtgagtctacccactcctcctggctcctgggctgcctgccttgtccagccactatccctccttcctggatgaccttgcaacctcctctttggtacctcaaggccactctggcccctactatccattccaaaaattgctccctaggtgcctataggtgtaagcagagcttagtacacattggccctgctgataatggtttggtttctgtagtggatttgcctatggggtgaagttctgataggcattcacatagacctctgttggtttctcctggagagtaaatgacctcagtgctggtttattccagtttatatacggggctcgtgtgctgggttcacatgagcccagcctctccaagctgcatagacctgtatcaggagggggcacaggtctgatggacgtgcccatggaccgctgctggtctgcccttgtgagtgaatgaacctactgctgatgatacaggggacccatgaccttggtctacagagatcggatccctcagagatgcgtcttctctgtcagacacctggctgtcctcatttccccatggcaggacccacgtgggttcagggattagagagattgacaaggctcatggtgcagggaactagaaatgactcatgcaatcaatttcaaaattcaataaaacgtag

SEQ ID NO: 1561213 - DNA, 4001 bp, Homo sapiens
gtcagcggccctccagggcccggtctcgagcgatgactgcctcctcgaacttgatcatgagcgtggtgcccttgtgccagtgcgccgtgaccttggcagggaagccgctgtgtgtgagcaccgcctccacgatgcccgccgtgaagctggcgcagttgagcgtgctgttctccttgggcacggagatgtaggtgttgatgagcggctcgcgctcgatgatgtagaaggtgcgcgcgtcatcgttggcctgctccagcttgtccgcctccttgccgaagagcgccttccacacggcgcccttgacgaagagcaacgcgcctagcaccttggtctcacgccgggcacccttttcgcgcgccaccagcgcatccagcacgcgcgcgcccacctggcggcccagcgcggccaggcgcgactgcagctcggccacggagaagacgcggctctggcagtgctgtaccagctcggagaacagcagtgcgaaggcgctcaggctcacctcggtgcgcggccgcgccagcgcgcgctccagcagcgccgacttcccgcgcgtgaagcgcgcctccatgccgccgccaccctgcggggagaccaggaagtgcaggtgtcaggggcaatgggaaggggagcaggccgggaggaaaggagggagaaccgcgaggggccctgggacaccctcgacccatgccactgttgtgtgctccagtgccgacttcccacttgcaaagagatgcgcgtaaaacacgcctcgattacacgtaaccagataaatcaagggaggggggagtcttataccctcggcaggcagcgggctagcgggagtggggacaaggtgggaggagagacacgagggggaacagaagaggaggccgaaaccacccaaccctcgggcatgcagacggttcaattgcgaaagcgccttcctgcccgctccgccacctacaggagtaactagaaaactagtgtatggggggaggggcgtcagatctagggcagggaggtgacaaagatgaggcaccacgaggggatatgggcagtcgctcctgccccgccctgcgctccagcacagacgaccctcgggaactttcctgccggccccctgcggaaagccagagtaaagggggtggagggtgggagtggggtaggagcgtgtcaagaccaaaagccaggagggttgggggctttaacaggggggatccgtggggccaggcaggaggggcgggtaacccccaaccccaagccctcaggcaggcagctccgatgtgtcacgcaggaacccttcgtcctttgagacgcggatgggcctgggttctgaaggctgggaggaggggcccagaggtgttgggagcctcccacccccgtgctctccagaaaggaagctggatgctgagcaactgtggtcctcccatcagctgtcggtgcggggagagggagatggggtagggggctcctgaagagaaatggggtggggagcgggcgccgagacgggatcggaggggcagctgagaacccgcccccaccatgcatggggaggtgtgtggatgctaagccgaccccaacgaggtctgcgtgggaggtgggagaaccagcggggaggggtgtcccaggggctccgggccgcccccgccccagcatgcagatccgtccgtggcgagggccctgggcgcgcgagatgggagagggatcgttaagaccccaccaccgggctgcgatgggggctgaagtgagctgaactgccgtagggtcagggccccgcgaccctcgccccgtacctctacactggggagaaacccaccctcctcgcagcctcctgaggggggccgaagcgagcgggctcgggatcgcggacgccgagaccccagcccgggacccacacgcccgcggggaaggggccggggagcggacgaggcccggcgcgggcaggggggtgggtagggtctcaccaggaaccgcagcagtctgctcggccgagctgctttacggcgccgtaaaaggcgctgcgtgcgcaggcgctcgacgggccaggcgtgtgggcggggcgcgcgcagcggtgcctgagagcggccgcaggggggcgcgcgagtccgcggagccggacccagggacgtggcccacggccgtgatggctgctccgcgcgtggccagggtctcgctggctctgggtggcccacgctggaggggacgcttgcaggcctagtcacctgctcagggcgcacgtatgacaatgggccaatgtatacccttgcacatggacacacctgttggcttttccaggcactcctatgtccttggggatgggttcaattgtctcaagtgcatccatgtggcccgcggtggctcccgcctgtaaccccagcattttcggaggcggaggtgggagaatcacttgaggccaggagtttgagaccagcctggacaacatagctagactcccacttctttaaaaaaaattagccaggtgtggtggtgtgaacctgtaatcccatctactcgggaggcggaggcaagaggatcgcctgagcccaggaggtcgaggctgcaatgagtcatgatcgtaccactgccctccagcctgggtgatagagcgagaccctgtctcaaaaaaacaaaaacaaacaacaacaacaacaaatcaagtgcatgcatgagcggtggacatagtaccttagggtcatgtacactcatggatacatgctcaatggcatagatacactcacgggcacaattacacacgtgggtacacgcttagggcttgtatatatccgtggtcccaggtacactcagggagatgttgtatgctcaggggcacccactctgggacacagggaagacacagggaatgagttactcattcacagatgcacaggtactcacgcagggcactcagtctcgcccaccctggtgccccggggtcattgtcacgtgcagactctccctctccccaggtcccaaaacccctccccttgccccagtaacaggtcccatagcgacgctgttttcccttgactttatttatcttcataagtcacaaaatgtgagtgcagagataaatgtctgtgtgcatgtgccctgagcacacagggtggcataactcggcacactcataatgacacagccgttcacccagccacagatagtgacagggcacacatggcgacacccacatgtacggagataaatctcccccaccatgacatgggtagacagaaaacacgccgcagtatactctagtatgtttacacaaacagggagacaggcccgtgcaatgcatgtcaccaacacccacactcagagtgacatctgctggaggtgctcagacacagccacccaccgtgacatgccgagactcacatatgtcacatgacacaggcatgcatgccacattcactgtgactctcagtcctattcattcatcacctttctgggagatacactgaaatgtccaccctttgcaaaatgcacacacacgcgcacgcacacacgcacatacacgaacacacgcgcacacacgcacacacacgcacgcaggtgtacacacacacgagcaactccgagacactcattcaccatgactcgaggtttttctatacgtgggacgaggggcaggttcacactaggctggggggggggggtcatttcccgtcttcgttggcaggtgcagccccatcttccaagttgtggctttggctgccacaatgtcctctcatttattgaggtgaggactctggggatggggagagacccacagtgaggcagatcccgcccctgggagaggagctggggctaaatctgaagccccacccaccctcctccacctcctgtcggggcgccaacttacgtggcattttctgcagcacctccaagattttctgtacctttgtgtcaatgttttttatgcctagggggcggggagggttgggtgggaacagataagtcaagctgcggtggagcctcaaacaaagcccccaccttccttggaagcaccccccctgccccacacc

SEQ ID NO: 1561214 - DNA, 4001 bp, Homo sapiens
cagatcaaaaccatcctggctaacatggtgaaaccccatctctactaaaaatacaaaaaaaaaaaacaaaattagccgggtgtggtggcaggcacctgtagtcccaactactcaggaggctgcggcgggagaattgcgtgaacccaggaggcggagcttgcagtgagccaagattgcgccactgcactccagcctgggcgacagagcaagactctgtctcaaaaataaataaataaataaaaataaaaatttcttttagaggtgaggtcttgctatgttgcccaggctagtcttgaacggtgggcctcaagtgatcctcccacctctgcttcctgagtacctgggattacaggtgcaagtcgccacatctggctaaatgcatttttgatttatgatgttttaaacttatgacaggtttgtatctgtatatcgagatggtaacaagcaacatcctccctggggcttctaaccctggaaggaaaccagagccaataaaaatgtcttacatggccaggtgcggtggctcacgcctgtaatcccagcactttgggaggccgaggcgggtggatcacaaggtcaggagttcgacaccagcctggccaaaatggtgaaaccccgtatctactaaaaaaaaaaaaaaattggccgggtgcagtggctcacgcctgtaatcctagcactttgggaggccaagatgggcagatcacgaggtcagaagatggagaccatcctggctaacagtgaaaacccgtctctactaaaaaaaataataataatacaaaaaattagccaggtgtggtggcgccagcagcgcttgtggtcccagctacttgggaggctgagaagtgggatgatcgcttgagcccaggaggtcgaggcagcagtgagccatgactgcatcactgcactccagccagcctgggcgaccgagcaggatgcgcgtgcgcgcacacacacacacacacacacacacacagtcccgggccagtcacggtagttcacgcctgtaatcctagcactttgggaggcccaggcgggagaatcacttgagcctaggggttcaagaccagcctaggcaacatggcaaaaccccattatctcttttttttttttcctgagacaagtctcgctctgtcgcctaggctggagtgcaatggcacaatcttggctcactgcaacctccgcctcccaggttcaagccattctcctgtctcagcctcccgagtagctgggattacaggtacccgccatcatgctcggctaatttttgtagacacggggtttcaccatggccaggctggtcttgaactcctgacctcaggtgatccgacggcctcggcctcccaaagtgctgggagctacagcgcccagccggcatatttcattttattatttgactcccctagtgaaatgtaagcttcacaaggaagggattctgtcttagaacggtgcctggaatacaacagacgctcaataagtgggtgtcgaataaataaatgtcccacgctgaggcttaggtacgttatgatactcattttacaaaagagaaaactaggacacacaaagattaagtcattgggtcgcacacctagtaagtgggggaggcgagtcctcagcacacgcccaataacagcattattatgattactagccgcttactcaggccttgagctaagtgctttaccctgaatcatcgcgctcaatttagcaataaccccgagccggcaccgtcgcgaacgccactttccaaaggaggaagccagggccagacgttgccctgcaaggccggggctgggccgggttcgaacccggacgcctgacgcgccctccgctctcccagaggcgttaccttggtggcccccgcttcctccccacggagcccggcgctcacccccgggccggggtcggggtcgtgagcccacagctcagccaccatctccgtgtgaagaaactcaaacaacacagtatccgccatgccccctcctcgcacgcctaaagatgcgcccagcgcttccagctctcattggccaggcttggtaagccacgcctcttgcgtcatggcgcgagccctcctactccggcttccattggtgttttagactagccccgcctccccgccccggactcaggtggtgtgcgcgtgagcctgggacactagggggcgggcctacgccttctctggccacatgtggcaacatcttctgctcttactgccgtcccttccctatttccgggttctcgagcattcctattggccaaattactggttacacgtgacatactcggcttttaaaatccctattggtccactccagactttcctcgtcgcacaacctggaagagccggcccagctgtttctctattggcggttcctccattcatgtgactcttctgcacgctcactcaaagctgatgctgagaacttgcttcctgattggtagccgggcgaatccacgtgacttggccgctaatgcccgcccaacccgctcccctattggttgaaatcacagcccttcagctgccacggtgagaacgcagcactcgggttaggaagcggatctcgcaagctccgagcgtcagctgccgggtacggtctttggcgttagcgcttctcccatcccatgagtgcccccagcagagtccagtcggactgtcatcctttctgcgactctggcgctggtcccgagcagctcacgggcccgtgtgcttccgggtctgagattggcatggtggaccaggtggagggtgtggcctctactaggaggcaaattcgtaaagacctcggcttgggactccgggaactcgggccccagatccttgttcgagctggtcttcagtttccccatctgtacgctgaagagcctggggtccagtaacccccatcatcacccagtttacagaagaggaaactgaggcccagacggggagcagctgacaccaagtcgttaagagaatcagcgaaggggctgggaatccaggacctgcgccttttacccaccgcggcgccggtctcacgtgcagtcccttcgctcttctcccctagttcggtgccatggcgtcccagggtcgtcggcggaggcccctgcggaggccggagacggtggtgccgggggaggcgaccgagacggattccgagcgctctgcgtcctcgtcggaggaggaggagctgtacctgggtccttcgggcccgacgcgcggccgccccacggggctgcgggtggctggggaagccgcggagaccgactcggagccggagccggagccggaaccgacggccgcgccgagggacctgcctccactcgtggtgcagcgggaatcggcggaggaggcctggggcacggaggaggccccggcgcccgcccccgcgcgctcgctcctgcaacttcggctggcggagagccaggcgcggctggaccacgacgtggcggccgccgtgagcggtgtctaccgccgtgcaggccgcgacgtggccgccctggctagtaggctggcggcagcccaggcggcggggctggcggcggcccacagcgtgcgcctggcgcgcggggacctttgtgcgctggccgagcgtctggacatcgtggctggctgccgcctgctgccggacatccgcggcgtgccagggaccgagcctgagaaagacccggggccgcgggcctagccatgattctacttcccaacctgactgcaatttgggggtaggccttgctgcctctgggacctgactctgtctcctgtgtctcttatcaccccccacccccgctcccatcttggtgtcacccatgggggctaatccggtccccttggataatgctttatattggatatagttcaacccctactgcggagaccagggccccactatccttagatctggttcctctcccgatcctgaccctgccgcctggttctgagccttcccctggggcttggctccagcctttgttacatagttgctccttaatctgtttccaccctgggggctcaccaattttttttt

SEQ ID NO: 1561215 - DNA, 4001 bp, Homo sapiens
aggattctggccccaaaacttggctagactcaaaagactctcaagctccttccaaaccaaagctagctgtgtctgtgaaaagctggaaatgccaaaccaaactttgggtaagtctctgccaactcaaaagctaaaacacttccaaaaatcatcatcacttataatccatggacccacagtctactttccctagcagcatcttataccagatgtgtgccagggaaccacaaacccagaaagcccttcacaccatgcctttccctgtttgcatatgctgagcccttcaccaccaggtctgacaactccctgataagccttctcaaaccctttgtacctccctgcagcacattaaggtctcccttatttccccttcccaccctctcccacctaggccctagagactacacaccacaaccccagtttttctgcttctggagttctgccctcgggcccttcgggcggcaccccctagagaactctaggacccatccaccagatgcaaccaacatcataaaagcaactgagggcacacatgggagaacaactccaacagcccccctcagcctcatgtaccagtagagcgcacagtatggtccttggtgtacttcacccgctggtgcgcctctacacaggtctcacacagaggctccgagcactccacacagtagctggtggctggggcattatcctcacagctagtgcagcactgccagacaaaggcagggtcagagaaggcaagacaacttgatagatccacgtttacatcccagaaaatacaaccggagatttaagattggtcccttgacccaacctaggcagcccacccagagccttgggaaagtggagtaacagcctggagctggtgccaagctcctcctgcgcagatgccccctccccagaaacctccttgtggttgctgagataggacgcacctggttcgcatcctgggcgtcggtggcagccttgctgccactatcacgcatgaaataattctccacgatgtctttggagaagcactgttgcttgcacacgggacagtccaccacttcgagaagcagggatgtgggagactgttacaagttcccacccaggttatggcccccaccattcccctgctgggtgggcccccgaccattatcccgcagcgaaccagcccctcccctccccgagccttcttttctccaactttagtcagatgtcccatctcagcggccagcacaaacccacgttcgtatgcaggacccagaaagtatttcccgtgccctgtccgggcccccatcctctcgcccaggtggcatcctcatctctgcacccagtcggaatcaaaggcagagagtagggggaggggtggcaccgatcacttcgtacttaccggtgccgtcgcccgccgccccgccgtcccccgagctgttggcggcggcgggggccgcgggccctaagcaggcactacaggccgagtgcaaacagggcagcaggcggggctccctctcgggtcgcaggcgctctctgcacacgccgcagtgctccagcagctccagcgcctcggcgccgccccccgcgggcgacgacgccgcggctgaggcagaggccgaggctgcggccgaaggggcggtggagcgcttttcgccgccagcggagccctcgcccgggcccgggctgccagaggcggccgaggccgctgctgccgaggctgccgccgcggaggccgccattcacacgccgccgggggcgcccagggggggaggaggggcgcggggcccgccgcgcaggcgcagacgcgctcgccgccaactgctgggccgctgccgccgccgccgccgcgaggccgagcgccgccacgcgcctcctgggccgctgcccgccgcgcgcgggacgctgctacggcacggccaactgctgcctgctcgcctcccgaaggcgccgcccgcgcttcttcctcagccgccgccgaaacccgcaccacgcgccacaagcacaagcacaaccgctcgcccgcgcgcccgctcgcagaaagagccgaggccggggggcgggacagaaataactggcgccgacgccgccgcgcacgcgcattgggcgcctcacgcccgggggcggggcccaggccggtcggtgcgggagaggccgccagtacgcacgcgccaactcctagtccttccaccaccgccaaccccacgtcggtggggctcttgtgggggcggggcggggcctctgtgacgtcactgccgcaattgaatccgccagtggggtatgcgaacctttatagagtgtgattcccctctcagctccacctccagaccacacagaagcgggccgctgtgcgcccaagcgcatgggcaatccgtccctcttcctcaacccgcgtctcttcgccgccgtagagtcgtctccagcctctgcgtcactaagagttcgggatagggggcagggccgatggagaagtaggcggggccaagaccgagtgaagggctgtgtccagggagaggggaggagagtctccatcccaagagggaggaagctcctgtgtgagctcgggtgctgacttttggattttaaccacgctatagttaaacttgagaaacacagaaacttgactgaatcaaatgtagatcacagccgggcgccgtggctcatacctgtaatcccaccactttcttaggcgagtcgggaagctccgtttagcccaggaggccgaggcagcagtgaggcgggattgtgccactgcacgccagcctagaccacagatggagaaaaatgtggccgggcgcggcggctcacgcctgtaattccagcactttgggaggtcgaggcggttggatcttaagtcaggagttcgagagcagcctggccaacgtggtgaaaccccgtctctactaaaagtacaaaaagtagccgggcgtggtggcaggcgcctgtaatcccagctactcgggaggctgaggcaggagaatcgcttgaacccgggaggcggaggttgcagtgagccgagatcgtgccattgcactacagcctgggagaaaagagtgaaactccatctcaaaagaggagagaaaggtttttgtgtttgttttgagacggagttttgctctgttgcccaggctggagtgcagtggcacgatctcggctcgctgcaacctccgcctcccgggttcaagcgattcttctgcctcagcctcccgagtagctgggattacaggggcctgccatcacgcctggctaatttttgtatttttaatagagacggggtttcaccacgttggccaggctggtctcgaactcccgacgtcagatgatagacccactttggcctcccaaagtgctggaattacaggtgtgagccaccacgccgggccccccaaccccccatcaagaaaaaaaatatatatatatatatacacatatatataaatcacaagaggctaaagagcaatgagtctgtgaaatcccacccagccccccaaggcatcccctccccatgttttcgtcagcagctaccctgactttgatgcttttccagatggggaaactgaacctcaacagtggggaatcccaaggagggaaggaagcaggtccatgtggggagaatcctgtctgaggtggaaagtagggtttgtgtggggaaaatcctgtctgagggaaagagggtgtgtgtgcggaggggaaccctgtctgaggagggaagcagggtctgtgtggggagaatcctgtctgaggagggaagcagcgtctgtgtggggagaatcctgtctgaggagggaagcagggtgtgtgtggggagaatcctgtctgaggagggaagcagggtgtgtgtggggagaatcctgtctgaggagggaagcaggttctgtgtggggagaatcctgcctgaggagggaagcagggtctgagtggggagaatcctgtctgagggaagcagggtctgtgtggggagaatcctgtctgaggaggaaagtagggtgtgtgtggggaaaatcctgtctgagggaaagagggtctgtgtg

SEQ ID NO: 1561216 - DNA, 4001 bp, Homo sapiens
actgcacactgtttaaacacattcactcagctcgtgttcatgaaagccctacaaagctggaggaatcgtcatcattccatttcacagatgaggaaaacagaggcgcaaaactttaagtcatctgcccaaagttactggttttgtaactgctggggcctctgtatttaacagttaaggaaaatagtggcagaaaacctgagtcacaagcccaagtcaatttctctacatagtagtggactcaggattccaagccagataatcccgcatcttgcatccatgctctcacctctagaaggggaagtgagaggagcggtggggtgtcccagctgagggaggggaagtgagacccaagcaccgcctttccccacaaatctagccctgcagcccctctccaaccttacttggactcaggatcatccttggcaggtctcttgggcagatattttttcaccaggctcctaaggggagacagaggtaggagggctgagcccgcagccctcccaccgctccccgtcgccccaggcgcgtcctccgtagcgtccaccccagggtctcaccgcagttgtttggcgtaagcctgttccacttcggtgcgttctttcacgaactttacatatctgtccaacaggtccagcccccactgcgtgtggcgctcgagcacctcgaactgatcctgacatgggacatggtgggggaggaggggagaggggccggggtcacgattttgggaccccacagcccgccgaccagactcccagggagggccaaggctctgcgctcctagaaggagtggcttcccggcgccgccccggcgtggcgcggggggaggcaggaaactggcgggaaccccctccccttcccgggaagggccggagaacagcgcccaggccccagccaccccggccgggagatggaggtctccgacataggaccgccaagaggggcgtggaaggggacagggccactcccccagctcgggctcccctaatccccccggattccggaaaatccggccggcccggcgtgagtcaaggccagaggggcagggttcctggcagactgggggcccctgagtggccagggggcaggcaccaggttccctgaatctccctgcttccagggatcccccgatgggtgactcaatttaccccactgaccccactacacatccaaaagaaatcgcagaattggaggagggggtggcagtctggttacccccgctgcactaagaactcagggattccaccgcccccagcaaggggaggggtcagaggtccggctaggatagggggaaatttctggggcttccagggctgaggttataggcgaccagggggcggtcccgccctgggcctggggtgagcagggggaagccagggagggggatcaggccgagcttagcatcccccttcccctccatgagcgtccccagcccctaggtgttgattaaaggcgagggaaagggcggtcaggacttctaggtcccacgtgggtggggatgagggtgaccagagggtcccctcccccctcctagccggacaggcggacgacgggcagggacccaggggccgtaagataagccgcctgcccggccagggcgcccaaaataggtgacctctctcagccgccccggcctggccccaggattccttctgcccgcctcattcgcaaccctgtgcctcagtttccccactccggtccggcaaagtcgcccttcgcccctgagcgtgctgagactcccagataaacttcgagagagagcggagggtggagggcggggacccaggggtcggtggaagggaaaggcgcggagccccctctaagatacattggggacaaaaggggggtgcctggaccccagcaaaggggaacttagaggcgggccgattggacttacccacagctcagtgccccaatccatgctgctcccgccgccgccgccgcagccaccaccgcacccggtccccgccgcccgccgcccgccgccctccccggggagactcagccgagggcggtgcgcctggccccgccccgccccgcccggccccgcccaccccagactcttccccgcccccctgcacgctctgccacgcccccacccgcgcggagcccaagcactgcgattcgggggcggggcccaacggacgctccgcccccttttaaagcaacgttgccactcgacgccgctggaccgaccccttaaagaacccccacccattttttccaaatccccggggtccctctcgtcctctcatcttccttccccgctccaaacggttcttcccatctccttttcccctttccccgcaattattccttaaagggccaagacactaaaaccccaaactcaagaagtccttcctcaaccccattgcaggggcaacctgaggtcaccccgttcttgcgagccggcccggctccaggcgtctaggttcgtcccactaatggtctggtccctccggccacagggcggatgagagggtttcgatccaacccaggacgcgccttcgccaaggccaggtccattaactcccgcaccgcatcctgccttccctcccccagagtctccgctgggaaactgaagacaggccgtccttggggcgccaggcccaggcctttccccagctgccttccagttcgcgcctgcatctgcccattttccagtttaacctggtttcattctcagtactgcccctgagattccgactccgcccctcccccagacatctgggccatctgggccctggagaagggaagtctgtcacctctcccataaaagtctgttcacaccttgtaaatccctttgaggtgctggaatgaaagaggagaggaggcactggggattcccactcccattctctccgggctttggcgctttctctgcagcctcagacaaggctgggcgtcttgcaggggggcccttgggtatacgttccccttacacagagcacccaggctcccagaacagagagatacagctgagcccaggaggagagccttgggagcccacactgggactgatgtctctgctgagacctggccccacctgctggtggcttctgagctagaaaatgtctgattgcagttgggcaattgaacccagtgagttctgtggctagtctcaaatgggggctcagcctagcaaagttctgagttcacctctgctcagagactcaaactggaattggggttcagtccaggtcagcaccaccgtggggataggggatagaggccagaggcttaaccagaaggattagcaacccggtaaggggtcaggtccaatctggagtcagggctagtccagatcggtggcctaaaccagagattaagcctcagtgtgtggtgtgggggacgagggggtgtcagagtttcaggctgaagttaggactcaacttgcagagagggagttcacctggggtcagagttcagcccggagtccggtctagcctggaatctgggggtggggctccaattgcctcactctggaataaaaggcttagcctaaggctggggtctcagcctggggtcataggtcatcctagggtcaaactttaacctgaggccagctttaggcctctctgtggaccaggaagattaggaaaacaggtcaggcctgaacagatgcgtgtgtttaccaaaagcctcagctctggctgggagccacatccctggctcaagaagaggaagtccgtccttggggatactgggaaaggtagtttatttaatgctttgtggcccttgtctgctcccgctgcattctgggtaatgtagtcccggacagttaagagtgggtggagaaattccgctttaagggccggatatcagatccatgacaattggttagataaactgctcattaaatcacatccggacaatctttatagcgattggtgagagtgagctgggggttaagcgttatcggctctcccattcggaaccggtgctgtccgtcggtgacgcaagcaggcgggcttgcggagaggcaattgctgattggttgg

SEQ ID NO: 1561217 - DNA, 4001 bp, Homo sapiens
ggaatggcttgaacccgggaggcggaggttgcaatgagctgagatcgtgccactgcactccagcctgggcaacaagggcgagactacatctcaaaaaacaaacaaacaagcaaacaaacaaaaaaaggctgtgagccccacaggctatagtttgccaactcttgcgaaggtcaccaattttgcatgttttgtttcctgatgcatttccagttcttgaaaacggtgcctgacacatagcagacactggatatactatggctcatttgaatgaataaaaggagtgtaagaagttaaaacagagaccaggatgctacttatttctggcacagagtatggatcataccataattatctattactcatcacagcaacccctgtaaaactaattttctcagttgacagacaaggaaactggggctcaaagaggctaagtcactcactcaaggtcacagagtgagaatgtgacagagccagaatttgaccccaggcaggcttgtcccagagctaggctgtgatgcccagaacctaccgggcatctgcttggctcggctgtaccaggtgggccacgtcattgagctggacattccggcgtatgagatccacagcccgggtggaggcatcgtttgcaaccacagatctgagcccaggcacctctagggcaaatcgaatggaacgtaggcctgaagctgccaggccttccagcacatgcaggccttcctgttggagtaagcagaaaacctccctcacatctccacctccatcctcttctgggccccaaggagcccccaccacccacctcctatagctctccccctccaggagccctctgtctcccgctaaattccagggctgccagctcctatgctcaggccccacctcacagatctcccccacggccgctgtgcgaggttggtctcctgaggccaggttttcactctctttcagttcaaccttttcctcctcttgctctgacaagtccacgaccactttttgcgtgtccttctctcctggaaccttgactgcagccacccagaggcacaagtcagagaataacaaggtcccctctgagaaacctccccttaatctccaaaatatcgtccctgaaatccctgcggaaaggctgaaggagcagaacccagggcctgctatgtggctgaagcccctctggatttgggcggcagaagagcccaggcagggagataaacttgtgtgacccccgcccaccagaagcctggacctccactcactctggattcctttggccccaagctgaatgcgagcaaactcggtgatcacagcacatctggtgggagacagaggactagctcataccccgcccccgccatccacactgacccactagccgatgccaggctaacgtctgacccctgctcacgtcaggtcccgattgaattcctgcaccgggttataaaagacctcgttggcactgggaaaggcgattttggcagccccctcggtgactgtcgtctcctggacttcacgtggacgttcttctccgtagggcccggtgccgttctccatcgctgctgtattcggcagccctggagactgccactcgaaaaaccgggctctagagagcacccgggcggagcggaaagtgaggcttagccacagagacgatccttgcatgagacatccgctggcgcctccgcccgccaagcctggttcggggggcgggggagggcacagagagggtcagagagccgcattccgggcccggggatgtcctacatatctatgaggtagggactaggaaaacctgcggcctcggtaagctgatatcccctcgttttggggatgactggtccctgtggagccgatgccctcgtgcaggcccgccccgagtccgaatccctccccgcgctgcctagcccgtcctcacctgctctcgtagccacagaaaaccgaattagtcaaggtgcacgtttcccgaattaggacctgggcgccgccatgttggcacagtgggtgggcgaatcacatgatagtggttggccagtcaatgaggaaacgtacggtgggcggccgggatcaaaatgaaagccataaaggaagcgcgctgatcgtgctgttccgggggtgttaatcacagtggatcccctgggagaggacacgtccctagtcccatttcacagatgaggaagttgtggctcagaaaaggggcggtaagcggagaaacccaacacttattggtcctcttctgtgttctgggtgctatatacacattatttcagagcaccctgcaggaatgactcaggctctggagttggatttaccgggtttgaatctcagtcccatcacatgctctgggcaggttactcccgcggcttcacttttcttacctattaaatgagaatcgtggtttctcagatagagcaaagattaaatgacagattcctggaaagtgtgcaaagaaccactctaacattgtaagcgctcggtaaagttctaaccagtgtatgaaggcaggacagcgaagtggtcccggctacctgggttccagtctcagctcgccctgcgacttgttaactctgaacttaagttaccgcttttgcaaaatgggcagaacttttttttaccatttgttactgggttgtagtgagaagtaaacgagttagtgcaggtaaaatgctaacagaacctagcatccggtaagcatcataaaagtcttaggtcttattgtcgcttttgagcctgtgtttaaatcctggcacctaccatcacttccttgctgtgtgatgatcttgaccagctttcttcatttctctgtgcctccttttctttctttctttcttttttttttttttttgagacggagtctcgcccaggctggagtgcagtggcatgatctcggctcactgcaaccaccgcctcccgggtgcaagcgattcttctgcctcagtctcccgagtagctgggattacaagcgcatgccatcacgcccggctaatttttgtatttttagtagagacagagtttcaccatattggccaggctggtttcgaactcctgacctcaggcgatccacccacctcggtctcccaaagtgctgggattacaggcgtgagacaccgcgcccagctgcctttattttctatagtgtgtctgtagcagttctcactaaaaaatgttactgtgtagtttaaacgagctaattcccataaagaatgtaacgcagtgcctgccacaataaacagcagtcattattgtttttgttttacaggaaactaaagttcggaaaggtagagcgacttgcccaaggtcgcgggactagaaggtggcggggccaggattcgaaccatcgagctgagccgacgtactggcgaggatcccccaggggcatagagaggagacggagccggttagaaggggcgcgctcggagctcggctggcctcgcctggagggcggggcccgagggcggtgcgcgggcggggccggggccgctcctccctggcctggctgcggcggcagcgcggcttgcgctcgctcggcgctcggctggggcggcctggcccacaatgaatggccgccgcggctgccgctgctgctgaggcggaggccgcggaggccgcggaggcggaggccgaggccccggcgcagcggggcgcgccccgggcccaggcccggccccagccgccgctgcggagcccgccgggaccccccggagcgcggccacggcgcaggtgaggcggcccgcctcaggcccggttccggcctcctccagccggggcggcccgagggctgagtggggagggcctgggtgctttctcggaccgaggaggagccgggcccgcagcctgcactgtgcccgggcaggcgagtgtgtggaggcccagctaccgcgggcggccttgagcgtccagcccgagcttcagggcttgggggcggcaggatcgtacctggaccgctcccccgtctcccagcgagggagggggccaggtcgggccggggcaggtaccggggatccggggaagttgga

SEQ ID NO: 1561218 - DNA, 4001 bp, Homo sapiens
agactccgtgtcaaaaaataaataaataaataaaaataaaaattagccaggcgtggtggcacgtgcctgtaatcccagctactcgggaggctgaggcaggggaatggcttgaacccgggaggcggaggttgcaatgagctgagatcgtgccactgcactccagcctgggcaacaagggcgagactacatctcaaaaaacaaacaaacaagcaaacaaacaaaaaaaggctgtgagccccacaggctatagtttgccaactcttgcgaaggtcaccaattttgcatgttttgtttcctgatgcatttccagttcttgaaaacggtgcctgacacatagcagacactggatatactatggctcatttgaatgaataaaaggagtgtaagaagttaaaacagagaccaggatgctacttatttctggcacagagtatggatcataccataattatctattactcatcacagcaacccctgtaaaactaattttctcagttgacagacaaggaaactggggctcaaagaggctaagtcactcactcaaggtcacagagtgagaatgtgacagagccagaatttgaccccaggcaggcttgtcccagagctaggctgtgatgcccagaacctaccgggcatctgcttggctcggctgtaccaggtgggccacgtcattgagctggacattccggcgtatgagatccacagcccgggtggaggcatcgtttgcaaccacagatctgagcccaggcacctctagggcaaatcgaatggaacgtaggcctgaagctgccaggccttccagcacatgcaggccttcctgttggagtaagcagaaaacctccctcacatctccacctccatcctcttctgggccccaaggagcccccaccacccacctcctatagctctccccctccaggagccctctgtctcccgctaaattccagggctgccagctcctatgctcaggccccacctcacagatctcccccacggccgctgtgcgaggttggtctcctgaggccaggttttcactctctttcagttcaaccttttcctcctcttgctctgacaagtccacgaccactttttgcgtgtccttctctcctggaaccttgactgcagccacccagaggcacaagtcagagaataacaaggtcccctctgagaaacctccccttaatctccaaaatatcgtccctgaaatccctgcggaaaggctgaaggagcagaacccagggcctgctatgtggctgaagcccctctggatttgggcggcagaagagcccaggcagggagataaacttgtgtgacccccgcccaccagaagcctggacctccactcactctggattcctttggccccaagctgaatgcgagcaaactcggtgatcacagcacatctggtgggagacagaggactagctcataccccgcccccgccatccacactgacccactagccgatgccaggctaacgtctgacccctgctcacgtcaggtcccgattgaattcctgcaccgggttataaaagacctcgttggcactgggaaaggcgattttggcagccccctcggtgactgtcgtctcctggacttcacgtggacgttcttctccgtagggcccggtgccgttctccatcgctgctgtattcggcagccctggagactgccactcgaaaaaccgggctctagagagcacccgggcggagcggaaagtgaggcttagccacagagacgatccttgcatgagacatccgctggcgcctccgcccgccaagcctggttcggggggcgggggagggcacagagagggtcagagagccgcattccgggcccggggatgtcctacatatctatgaggtagggactaggaaaacctgcggcctcggtaagctgatatcccctcgttttggggatgactggtccctgtggagccgatgccctcgtgcaggcccgccccgagtccgaatccctccccgcgctgcctagcccgtcctcacctgctctcgtagccacagaaaaccgaattagtcaaggtgcacgtttcccgaattaggacctgggcgccgccatgttggcacagtgggtgggcgaatcacatgatagtggttggccagtcaatgaggaaacgtacggtgggcggccgggatcaaaatgaaagccataaaggaagcgcgctgatcgtgctgttccgggggtgttaatcacagtggatcccctgggagaggacacgtccctagtcccatttcacagatgaggaagttgtggctcagaaaaggggcggtaagcggagaaacccaacacttattggtcctcttctgtgttctgggtgctatatacacattatttcagagcaccctgcaggaatgactcaggctctggagttggatttaccgggtttgaatctcagtcccatcacatgctctgggcaggttactcccgcggcttcacttttcttacctattaaatgagaatcgtggtttctcagatagagcaaagattaaatgacagattcctggaaagtgtgcaaagaaccactctaacattgtaagcgctcggtaaagttctaaccagtgtatgaaggcaggacagcgaagtggtcccggctacctgggttccagtctcagctcgccctgcgacttgttaactctgaacttaagttaccgcttttgcaaaatgggcagaacttttttttaccatttgttactgggttgtagtgagaagtaaacgagttagtgcaggtaaaatgctaacagaacctagcatccggtaagcatcataaaagtcttaggtcttattgtcgcttttgagcctgtgtttaaatcctggcacctaccatcacttccttgctgtgtgatgatcttgaccagctttcttcatttctctgtgcctccttttctttctttctttcttttttttttttttttgagacggagtctcgcccaggctggagtgcagtggcatgatctcggctcactgcaaccaccgcctcccgggtgcaagcgattcttctgcctcagtctcccgagtagctgggattacaagcgcatgccatcacgcccggctaatttttgtatttttagtagagacagagtttcaccatattggccaggctggtttcgaactcctgacctcaggcgatccacccacctcggtctcccaaagtgctgggattacaggcgtgagacaccgcgcccagctgcctttattttctatagtgtgtctgtagcagttctcactaaaaaatgttactgtgtagtttaaacgagctaattcccataaagaatgtaacgcagtgcctgccacaataaacagcagtcattattgtttttgttttacaggaaactaaagttcggaaaggtagagcgacttgcccaaggtcgcgggactagaaggtggcggggccaggattcgaaccatcgagctgagccgacgtactggcgaggatcccccaggggcatagagaggagacggagccggttagaaggggcgcgctcggagctcggctggcctcgcctggagggcggggcccgagggcggtgcgcgggcggggccggggccgctcctccctggcctggctgcggcggcagcgcggcttgcgctcgctcggcgctcggctggggcggcctggcccacaatgaatggccgccgcggctgccgctgctgctgaggcggaggccgcggaggccgcggaggcggaggccgaggccccggcgcagcggggcgcgccccgggcccaggcccggccccagccgccgctgcggagcccgccgggaccccccggagcgcggccacggcgcaggtgaggcggcccgcctcaggcccggttccggcctcctccagccggggcggcccgagggctgagtggggagggcctgggtgctttctcggaccgaggaggagccgggcccgcagcctgcactgtgcccgggcaggcgagtgtgtggaggcccagctaccgcgggcggccttgagcgtccagcccgagcttcagggct

SEQ ID NO: 1561219 - DNA, 4001 bp, Homo sapiens
tgtaatcccagtactttggaaagccaaggcaggtgcattgcctgagatcaagagttcaagaccaacctgggcaacagggtgaaatcccgtctctactaaaatacaaaaaattagctgggcatggtggtaggcacctgtaatcccagctactagggaggctgaggcatgagaactgcttgaacccaggaggtggatgttgcagtgagctgatatcgcaacactgcactccagcctgggcgacagagccagactctgtctcaaaaaaacaaaaaacaaaaaactagaaagcctgggccaggtgcggtggctcacacctgtaatcctagcgctttgggaggccgaggccggcggatcatgaggtcaggagatcgagaccatctggctaacacggtgcaaccccgtctctactaaaaaaaaaatacaaaaaattggcccagcgcgatggctcacgcctgtaatcccagtactttgaggggctgaggcgggcggatcacaaggtcaggagatcgagatcatcctggccaacacggtgaaaccccgtctctactaaaatacaaaaaattagccgggcgtggtggcgggcgcctgtagtcccagctactcgggaggctgaggcaggaaaacggcgtgaacccgggaggcggagcttgcagtgagccgagatcgcgccactgcactccagcctgggggacagagcgagacaccgtctcaaaaaaaaaaaaaaaaaaaaaaaaactagaaagcctggatccgcttgagaggccgtcactgaagggcgggagctcctcgcggacgcacacaccctatctagctcaattggtgtccccggccaccaagacagggcccgcccgcggtaataattgccacctcccagtgggagctgcagatatttcccagcgtcctgtgctgggcgctgtgccaggaatatcacaagcattaacttgtttaattctcataataaccccaggagatcaagcctcttttgatgcccagatgagaaacgggacccagagaggtgaaatgatttgcccgaagccacacagcacgtgtcccaggggaaattggaaccctggcagggccgttgaattaggctaaagggaccttgggagcgctgagtgagggtttcttgcatggatggatgaatgaatgaatgaatgaatgaatgaatgaatgaaacagaaatacccaaaagggaaagacagagacacagaaagtgacacgaagagacagaagcacatagaagagacatcggggaggaaagaagcagaaccgagccctggagcgtctacactgaccctgagcgggagaatggcgaatggggaatgaggggtgtctacacagacccaaacgctcctagagggagagcgtcggcaaggaacgcccttgggaaggtccccgagtccaggaatggggaaggagcagggctggggcgtgaccatccgcgggcggggtcagcgggccgcggaccctctggggtcagtccaggggcgaactcctcaccccggatctgtggagtcaactatgaacgtcgtgcaggtcttcttcttgaagatcttggggatccagctctggggacaggaacaaatgtaggggtggaagtggggtgagagggcacccagttctgtcctatgggacacagagccacccaccccgtgcgctccccacggacacaggagtccgggcccccagcgccctcccgctccagactcaggagtctcgacccccatgccctggaccctggaacctggaccctcccatccccctcctccgtctgacccaggaatctgggtgtccagcgccctcctctctgggagcctggaggcgaggtccccagctccgcgctcccgcagaccctggtccggcgctcacctgctccttctccggcaccaccatgctgccgcggccgccgcaacctcctgcagcccagggccccggcgctccctccgccggctctgcttccagacccgcccagagcaaaccggatcctccactttccagcctagcctggggcggggcgaggtctggggggcggggagtcttggagacgccaaagcgggaggcggggagagggcgggtcccaggccgcgataaggggacagagggacagcgacctggggggtgcagaggtccgggccggggggagagagacacacaggggagactccaagggcaagcgcgagatgggaacagaaggagttgggggccagtggcggagagggaacagactcagaaaggaggatgccagacagggaggggacaatttaacccaaagagggggagacaaagacttaggggacagagaatcagaaggtggggcagcagggacccagggatagacagagagagagggggacagagacccacagagagagggggacagagacccagggagaggggacagagacccagagagagtgggacagagacccagagagagtgggacagagacccacagagagagggggacagagacccagggagaggaggacagagacccagagagggggggacagagacccagagagggggggacagagacccagggagggggggacagagacccagggagaggggacagagacccacggagagggggacagagacccagggagaggggacagagacccagagagagggggacagagacccagagagagggggacagagacccagagagacggggacagagacccagagagagggggacagagacccagagagaggggaacagagacccagagagagaggaggacagagacccagagagagggggacagagacccagagagacggggacagagacccagagagagggggacagagacccagagagaggggaacagagacccagagagagaggaggacagagacccagagagagggggacagagacccagagagggggggacagagacccagggatggggggacagagacccagggagaggggacagagacccacggagaggggtacagagacccagggagaggggacagagacccagagagagggggacagagactctgagacagagggggacagagaccctgagagagggggacagagacccagagagaggggaacagagacccagagagagagggggacagagacccacagagagaggggaacagagacccagagagagggggacagagatccacagagagagggggacagagacccacagagagaggggaacagagacccagagagagggggacagagatccacagagagagggggacagagacccagggagagggggacagagacccagagagagggggacagagacccagggagaggtggacagagactctgagacagagggggacagagactctgagagagagtggggacagagacccagagaggtggatgccagagatggggaggagacaccttgactgaggcaaggggcagagggggatgcaaaaaccaaagaattgggggaagggcaggaactcagaaaggaggggccagagatttaggggagagagagggacacagacttgggggaggactgacactaagataagagtgggacagaagcccagagtgagagggagaggcaatcccatggaggagggacagggaccctgagagagcagatgacagaattgaagagagaggaggacccgtgaacaggaaaggagaccctagtgggggcagtcatgaagggtgaggagtaggaaatactgacacacagagacgggcaaggccacttgtctcctgccagccctctgtgatggggacagctgtggcctccgtaacctgagtccccctacccctcccagctgtatttatagccctggcctagcccagtccctgcccccagatctgagttccagggacaggaggtcatgggcacgtgtgttgggggccatgttcctttccccccattctagggcctcaatactgacatcactctctcaccagcacgtatcattccagctggaaacaccccgcaatcgaacccccagtccttccgtcccag

SEQ ID NO: 1561220 - DNA, 4001 bp, Homo sapiens
cactgagcgatataatgggcgtggaagcggagggggtcacctgggggaaggagagaggcactgaagcagtgaccaatggcagacggctggacgccacgggaacgaccactgggaggagatctgagatcatttcagccatcactatagatactctaaaacagatgctcttggacacaactattccacttctaggctttttttttttttttgagacaaagtctcgctcttgtcccccaggctggagtgcaatggcacgatcttggctcactacaacctctgccccctgggttcacatgattctcctgcttcagcctcccgagtagctggaaatacaggcacccaccaccacgcccagttagttttagtatttttagtagagatggggtttcaccatgttggccagactggtatcaaactcctgacctcaggtgatccacctgtcttggcctcccaaagtgttgggattacaggcgtgagccattgcgcccagcctgatgtctaactacttctaagtgaatcttctggatcacagtaatcatttaataaaagtcgttaaactgcttgcccaatgagttcgggagctcccaaatgtttcctgtctgtctatgaatttcagaggctaagagaaagtgagacaaaaaagaaaaatgcagctgggcctataattccagcactttggggggccgaggtggaaggattgcttgagcccaggaatagggaccagcctaagcaacaagagaccccacctctattaagacaaaaaaaaaaaaaaagaaaaacgcagaatacattgggatcgtatggaaaggcacagcaaccagaggccccaacccatactcaccaggatagaccaggaagtcacctccgaacttgccagccgcactgaggaagaagcctcgctcccacaggtctctgtagatactgtagcgcagctcgtgggcagggcggccggcgtggggccagtctttagactggacacgccagtccaggggcctggccttgaccggtcgaggcctggcagtggccagctggacaaggagagcagatctgggcaagggggctaccccatttgagggtcctgcttgggaagacgaggggcctggtggggagtacagagaagagtttggtaaattcaaggggtaaagtcttctcaccctcagggagacccaggcactggattcccagctaaaattcctaaaagatctctcctctccttcccgtggtccctggactccacctcccatgctcaccagcttcctcctgctctcccgaagcctggccatcactggtctcatcctctttggcagcctggctcgagccggcctcctggcttgagctggcccctgaagcctgttctagtttctgcttcttagcagcctggccctccgtaatcttctccaggagctcctgacgacgggtctcccgggcctcagctgccaaggcgctctgctcctggaagctctcctcttgctggcgcttgaaggatgtcagggcctgagaagcacacttcgctggaacctccaagcttatggtcccttcagaagccaggaaacttgactcccaggtcccgctcccaccgaacccgagttcgagccccgcccccttaccaggctgtggtgccgagagtctggacgcggggcgctgaccagagtcacggcgccgatctcggccaagagccgcgcctcttcgggcatcagcagcagcgggaggcccaggcgcgagttctggcggggcccgcggggcagggcgcctaccgtgcggccccccacacccaggcgctcccggagggcctgcaccgcctcggctccccacaccagggagcggccgttcgccacctccaccaccagcatcctcctgcgggagccgggaggcaaagcagttaccgaaacagctgcgcgccgcggaccgctgcagcgcacccaaagcctccggggtctcggcgaagccccgcccctaggcctcagggggcggggcctcgctcagccgccgttcaccacctgctgggcccgagcgccaggccccgcccccgggcgatcccaccaggcctcgcggccgccggagacgagacgccggagacaagcccccgaccctctcccctcgccaagcccccagggtcccgctctacccttgtgaccctgcggtcggcacccgctctgtgcccgcactgccgtacctaccattgcgccttggagcgtgaaaaacaaacctccgcaagcgcggcgacacgcccccttacaaaggtccattttggcaccaccctcttgcaaagtgggcgtcccccttcgggtgttcccgtcagcggtcagaagctctggaggctaaggcaccgccgaggccacaccctcttccggacgctcgagccttcgctcctcctctttccgaacgactgtgattcggctttcggacctcctcgctctcagactcccacagtacaaaaccctgccccctcccgagcacaggaagttcggcgttcgggcgtcctcggctccaccgaatccgcagccccgcccccttctcgaacgccagcaatttgacgttcgggtgttctcggctcggccgaatccgtagccccgcctcctcccggacgcaataggttcggcgttcgggcgtcatcggctcccggcagcctcgcggcctgtggccccgccccctccgagcgccagcgcaccccagttggggagttcccgccctacgaccgaaccccacagccgaaagccccgccccctggacacccgccgtccactctccgctcgggcgggctcaccccaattgggagcgctcagtccgcctccttgcctcccttcagaatgtcccactgtccaccgatagaaccagcgagtcacctcataaacagtaattcgcagtcgaggtggagccacccactgcgcaccgcgccacgcgctccttgctccaccccctcatgccgacaccctcgtcaacttcgtcatcccgccccatcagcgccgcgggaagtcaggtcccgcccctcgcaggaccgaagccccgccctcctcccgcgggggccaccttggctccgccccactgagcgcacctccctctgccgcttcctctcctctacttgggaacttgaggatcgtcatcctggcccggtcccgtaggcgcacgccggccctcggggttccgcccctttgagggcaagtcgctttcgccccgcccccttgtaaatactcatgggtgtctggcgaacctgttgactccgcctatcatcctagcgtcacttgtacccaactatctacgaagtaaaccgaagcttgtggccccacccacatccggccgagtctgtggccccgcccacatcggaacagtgaccctaaggactcgactacctccgaagaaagccgaaacatgtggctccgcccacagtggcctcagctctccgttctcgactattgccgaagtgagccgaagtttgtggccccgcttccggagaactcaagctcccgattgtgcccgaaggaacccgaagggagaccccgcctcattcctcacgccgagctccagaccccgcctcctttccagagcccgtctgttccccttcgggtccaaagcttttggctcctccttgttccgagcccgaaggcccgccccttcacgtactcggagctcggatcccagtgtggacctggactcgaatcccgttgccgactcgcgctctcggcttctgctccggggcttcttccctgcccgcccggggccctgaccgtggcttcttccccggcctgatctgcgcagcccggcgggcgcccagaaggagcaggcggcgcgggggcgcgctgggcgggggaggcgtggccggagctgcggcggcaagcgggctgggactgctcggccgcctcctgcccggcgagcagctcaggtgggccagggtggcggcgcccagtggcgaggcgaggttacacggcggcagggtctctgcgggctggcgggtgcggggcggccccggaggcgcgttggaactcggggctggcgcaaccgcctgt

SEQ ID NO: 1561221 - DNA, 4001 bp, Homo sapiens
cgcccagcctgatgtctaactacttctaagtgaatcttctggatcacagtaatcatttaataaaagtcgttaaactgcttgcccaatgagttcgggagctcccaaatgtttcctgtctgtctatgaatttcagaggctaagagaaagtgagacaaaaaagaaaaatgcagctgggcctataattccagcactttggggggccgaggtggaaggattgcttgagcccaggaatagggaccagcctaagcaacaagagaccccacctctattaagacaaaaaaaaaaaaaaagaaaaacgcagaatacattgggatcgtatggaaaggcacagcaaccagaggccccaacccatactcaccaggatagaccaggaagtcacctccgaacttgccagccgcactgaggaagaagcctcgctcccacaggtctctgtagatactgtagcgcagctcgtgggcagggcggccggcgtggggccagtctttagactggacacgccagtccaggggcctggccttgaccggtcgaggcctggcagtggccagctggacaaggagagcagatctgggcaagggggctaccccatttgagggtcctgcttgggaagacgaggggcctggtggggagtacagagaagagtttggtaaattcaaggggtaaagtcttctcaccctcagggagacccaggcactggattcccagctaaaattcctaaaagatctctcctctccttcccgtggtccctggactccacctcccatgctcaccagcttcctcctgctctcccgaagcctggccatcactggtctcatcctctttggcagcctggctcgagccggcctcctggcttgagctggcccctgaagcctgttctagtttctgcttcttagcagcctggccctccgtaatcttctccaggagctcctgacgacgggtctcccgggcctcagctgccaaggcgctctgctcctggaagctctcctcttgctggcgcttgaaggatgtcagggcctgagaagcacacttcgctggaacctccaagcttatggtcccttcagaagccaggaaacttgactcccaggtcccgctcccaccgaacccgagttcgagccccgcccccttaccaggctgtggtgccgagagtctggacgcggggcgctgaccagagtcacggcgccgatctcggccaagagccgcgcctcttcgggcatcagcagcagcgggaggcccaggcgcgagttctggcggggcccgcggggcagggcgcctaccgtgcggccccccacacccaggcgctcccggagggcctgcaccgcctcggctccccacaccagggagcggccgttcgccacctccaccaccagcatcctcctgcgggagccgggaggcaaagcagttaccgaaacagctgcgcgccgcggaccgctgcagcgcacccaaagcctccggggtctcggcgaagccccgcccctaggcctcagggggcggggcctcgctcagccgccgttcaccacctgctgggcccgagcgccaggccccgcccccgggcgatcccaccaggcctcgcggccgccggagacgagacgccggagacaagcccccgaccctctcccctcgccaagcccccagggtcccgctctacccttgtgaccctgcggtcggcacccgctctgtgcccgcactgccgtacctaccattgcgccttggagcgtgaaaaacaaacctccgcaagcgcggcgacacgcccccttacaaaggtccattttggcaccaccctcttgcaaagtgggcgtcccccttcgggtgttcccgtcagcggtcagaagctctggaggctaaggcaccgccgaggccacaccctcttccggacgctcgagccttcgctcctcctctttccgaacgactgtgattcggctttcggacctcctcgctctcagactcccacagtacaaaaccctgccccctcccgagcacaggaagttcggcgttcgggcgtcctcggctccaccgaatccgcagccccgcccccttctcgaacgccagcaatttgacgttcgggtgttctcggctcggccgaatccgtagccccgcctcctcccggacgcaataggttcggcgttcgggcgtcatcggctcccggcagcctcgcggcctgtggccccgccccctccgagcgccagcgcaccccagttggggagttcccgccctacgaccgaaccccacagccgaaagccccgccccctggacacccgccgtccactctccgctcgggcgggctcaccccaattgggagcgctcagtccgcctccttgcctcccttcagaatgtcccactgtccaccgatagaaccagcgagtcacctcataaacagtaattcgcagtcgaggtggagccacccactgcgcaccgcgccacgcgctccttgctccaccccctcatgccgacaccctcgtcaacttcgtcatcccgccccatcagcgccgcgggaagtcaggtcccgcccctcgcaggaccgaagccccgccctcctcccgcgggggccaccttggctccgccccactgagcgcacctccctctgccgcttcctctcctctacttgggaacttgaggatcgtcatcctggcccggtcccgtaggcgcacgccggccctcggggttccgcccctttgagggcaagtcgctttcgccccgcccccttgtaaatactcatgggtgtctggcgaacctgttgactccgcctatcatcctagcgtcacttgtacccaactatctacgaagtaaaccgaagcttgtggccccacccacatccggccgagtctgtggccccgcccacatcggaacagtgaccctaaggactcgactacctccgaagaaagccgaaacatgtggctccgcccacagtggcctcagctctccgttctcgactattgccgaagtgagccgaagtttgtggccccgcttccggagaactcaagctcccgattgtgcccgaaggaacccgaagggagaccccgcctcattcctcacgccgagctccagaccccgcctcctttccagagcccgtctgttccccttcgggtccaaagcttttggctcctccttgttccgagcccgaaggcccgccccttcacgtactcggagctcggatcccagtgtggacctggactcgaatcccgttgccgactcgcgctctcggcttctgctccggggcttcttccctgcccgcccggggccctgaccgtggcttcttccccggcctgatctgcgcagcccggcgggcgcccagaaggagcaggcggcgcgggggcgcgctgggcgggggaggcgtggccggagctgcggcggcaagcgggctgggactgctcggccgcctcctgcccggcgagcagctcaggtgggccagggtggcggcgcccagtggcgaggcgaggttacacggcggcagggtctctgcgggctggcgggtgcggggcggccccggaggcgcgttggaactcggggctggcgcaaccgcctgtggctctgccggggatgcgctggggtgcgcgggacgggttggggctgggcctgggcctgggcctggggaggggagggtgttcgatccccgggttctcagtaggagaggggtgtggagctccgaaggaggtgcaggttggagacccgggctcctctgggtggtctcgaaggagaagggctggggggtccggatatctggtttcacaagggccgggggatgggggatccaaagagggggtctgggttcctggatcctcgctggaagagggggctcggaggtctagattcctgggctgtcgaagaggaagggtccgggaggggtgccgtttctgggtttttaaaagaggggcgtcttcaaatctgggtccccagtatgggtgcggggagtagctttgatttctgcgttcgcaaaggaggggcttgggtgctgggagatccccacactttcctgggttctccaaggacaggagagctggaggcctgtg

SEQ ID NO: 1561222 - DNA, 4001 bp, Homo sapiens
ggccggcgtggggccagtctttagactggacacgccagtccaggggcctggccttgaccggtcgaggcctggcagtggccagctggacaaggagagcagatctgggcaagggggctaccccatttgagggtcctgcttgggaagacgaggggcctggtggggagtacagagaagagtttggtaaattcaaggggtaaagtcttctcaccctcagggagacccaggcactggattcccagctaaaattcctaaaagatctctcctctccttcccgtggtccctggactccacctcccatgctcaccagcttcctcctgctctcccgaagcctggccatcactggtctcatcctctttggcagcctggctcgagccggcctcctggcttgagctggcccctgaagcctgttctagtttctgcttcttagcagcctggccctccgtaatcttctccaggagctcctgacgacgggtctcccgggcctcagctgccaaggcgctctgctcctggaagctctcctcttgctggcgcttgaaggatgtcagggcctgagaagcacacttcgctggaacctccaagcttatggtcccttcagaagccaggaaacttgactcccaggtcccgctcccaccgaacccgagttcgagccccgcccccttaccaggctgtggtgccgagagtctggacgcggggcgctgaccagagtcacggcgccgatctcggccaagagccgcgcctcttcgggcatcagcagcagcgggaggcccaggcgcgagttctggcggggcccgcggggcagggcgcctaccgtgcggccccccacacccaggcgctcccggagggcctgcaccgcctcggctccccacaccagggagcggccgttcgccacctccaccaccagcatcctcctgcgggagccgggaggcaaagcagttaccgaaacagctgcgcgccgcggaccgctgcagcgcacccaaagcctccggggtctcggcgaagccccgcccctaggcctcagggggcggggcctcgctcagccgccgttcaccacctgctgggcccgagcgccaggccccgcccccgggcgatcccaccaggcctcgcggccgccggagacgagacgccggagacaagcccccgaccctctcccctcgccaagcccccagggtcccgctctacccttgtgaccctgcggtcggcacccgctctgtgcccgcactgccgtacctaccattgcgccttggagcgtgaaaaacaaacctccgcaagcgcggcgacacgcccccttacaaaggtccattttggcaccaccctcttgcaaagtgggcgtcccccttcgggtgttcccgtcagcggtcagaagctctggaggctaaggcaccgccgaggccacaccctcttccggacgctcgagccttcgctcctcctctttccgaacgactgtgattcggctttcggacctcctcgctctcagactcccacagtacaaaaccctgccccctcccgagcacaggaagttcggcgttcgggcgtcctcggctccaccgaatccgcagccccgcccccttctcgaacgccagcaatttgacgttcgggtgttctcggctcggccgaatccgtagccccgcctcctcccggacgcaataggttcggcgttcgggcgtcatcggctcccggcagcctcgcggcctgtggccccgccccctccgagcgccagcgcaccccagttggggagttcccgccctacgaccgaaccccacagccgaaagccccgccccctggacacccgccgtccactctccgctcgggcgggctcaccccaattgggagcgctcagtccgcctccttgcctcccttcagaatgtcccactgtccaccgatagaaccagcgagtcacctcataaacagtaattcgcagtcgaggtggagccacccactgcgcaccgcgccacgcgctccttgctccaccccctcatgccgacaccctcgtcaacttcgtcatcccgccccatcagcgccgcgggaagtcaggtcccgcccctcgcaggaccgaagccccgccctcctcccgcgggggccaccttggctccgccccactgagcgcacctccctctgccgcttcctctcctctacttgggaacttgaggatcgtcatcctggcccggtcccgtaggcgcacgccggccctcggggttccgcccctttgagggcaagtcgctttcgccccgcccccttgtaaatactcatgggtgtctggcgaacctgttgactccgcctatcatcctagcgtcacttgtacccaactatctacgaagtaaaccgaagcttgtggccccacccacatccggccgagtctgtggccccgcccacatcggaacagtgaccctaaggactcgactacctccgaagaaagccgaaacatgtggctccgcccacagtggcctcagctctccgttctcgactattgccgaagtgagccgaagtttgtggccccgcttccggagaactcaagctcccgattgtgcccgaaggaacccgaagggagaccccgcctcattcctcacgccgagctccagaccccgcctcctttccagagcccgtctgttccccttcgggtccaaagcttttggctcctccttgttccgagcccgaaggcccgccccttcacgtactcggagctcggatcccagtgtggacctggactcgaatcccgttgccgactcgcgctctcggcttctgctccggggcttcttccctgcccgcccggggccctgaccgtggcttcttccccggcctgatctgcgcagcccggcgggcgcccagaaggagcaggcggcgcgggggcgcgctgggcgggggaggcgtggccggagctgcggcggcaagcgggctgggactgctcggccgcctcctgcccggcgagcagctcaggtgggccagggtggcggcgcccagtggcgaggcgaggttacacggcggcagggtctctgcgggctggcgggtgcggggcggccccggaggcgcgttggaactcggggctggcgcaaccgcctgtggctctgccggggatgcgctggggtgcgcgggacgggttggggctgggcctgggcctgggcctggggaggggagggtgttcgatccccgggttctcagtaggagaggggtgtggagctccgaaggaggtgcaggttggagacccgggctcctctgggtggtctcgaaggagaagggctggggggtccggatatctggtttcacaagggccgggggatgggggatccaaagagggggtctgggttcctggatcctcgctggaagagggggctcggaggtctagattcctgggctgtcgaagaggaagggtccgggaggggtgccgtttctgggtttttaaaagaggggcgtcttcaaatctgggtccccagtatgggtgcggggagtagctttgatttctgcgttcgcaaaggaggggcttgggtgctgggagatccccacactttcctgggttctccaaggacaggagagctggaggcctgtgcgctcaaaggaggggctgggggtggattcctgtctcctccaaggaggaaggggctggagtctgggttgctaggttctcaaaggagaggagctgaggctcatactccatcatcctcaaaaactggggtctagaaggctgggttcctggatcctcgaagagggaggaggcagggggcctggattcctgggttctcactgtgaatctctgcccctcccccagaccatgtcgcctgaagaatggacgtatctagtggttcttcttatctccatccccatcggcttcctctttaagaaagccggtgagtcaggctccctccccagtggaaaataaaggggggggaccctctggaaggttccaggcttatgctgtcccttccccctgcaggtcctgggctgaagagatggggagcagccgctgtgggcctggggctcaccctgttcacctgtggcccccacactttgca

SEQ ID NO: 1561223 - DNA, 4001 bp, Homo sapiens
ctcctctgatatttttctggaggaagctatcaaatacgagtctcagattggcagggtgcaaccgaagagatgaactagagagagagttctgaaccaaatgtaaagatgtaatcacatatggttcattggatggaggcacacacataccttaaaatgtgtatccaaaaaggaaagaaaaaaaaaatttcaaagactggaagaagcccaagacattcctactactcaactttgtgaaggattcctccaaagtttcagagtttattttgggtagataagctcattgcttgagcctggaatttaaagtagaaggtgggacgggcaagaagcaagctccaggaggttaactagggaggcggcaagctccctacaatcactcctggaattttcaaactttctaaatttgggcaacaccgaggacagagagcaaaacctgcatcctaagccccaaaccaaccctgttttcttctgagattttctgaagacactggcaggcaagtacatttctgggagaagagagaattatcattccttctctgtgaccccgtgtaaggggtctggagtgcagagtgcagccaacgtgtgaggtcccctggcagtgccggctggcatgatggaaattatgggcactcagggcaccatggctacaacgccttcctccaagatgggcaccagccaatgccctgaccctactctctgcccttccctcttaacatcaaaagagaagtaaaagaaaggaagagaaaagaaaagaaaggaagccccacttaaccctccccttcagggagcatctgaacctctgcacatctgagtgttactcatatcaaaatacatcacgtccatatgtggtcctctcggcaatccgccccaaatcccaaagttgcactgacagggccctcctgacgtcacagagcttggcctcactattgcaagtgatttattgatgtttattgggaatgaatagatcaaaggcagcagcatgacgggcgatcaatcagtcatcaaatcaaggatggcaacgggccagaaacccttcttccaggcaacatgcccccaaccgacattattgcaaaataatgttatgtgtgtggtttttgttttgttttcaatgatgcgttttccagaaaagaaaagaaaaaaatcggctcagtcttaacaggagttgacactcccggttaaagaagaagaaaaaaaaaaaaaaaggaggaacaaaaaagtactcagacacgtcccagaactaagtgctatgcggagatgagggtgggagcagcagtacaaggagggggtgggggcgaggaaacacaaacaggggagaaggaaacgccagcatctaacatggacttgacagtcatctgacaatacccagaccctgtgcgctccgggttccaccgctgtgcccagtttgggcccaagaaatgaggaatcaatcgtgttagtactaaggtggccgaggggaccggctcgctcactcgttcgcgctccctggctcggcggacaccaggcagtcccccggcggtcggccgctcggaggacgcggaagatgtcccggggaactcaggtgaccccgcccgccacccacagaaagagccaggccggggttgcttcccattccctctgcagccggagagctgaggaggtagggacctggcgcggctcagcgcgctccgcgagcggctccccaaatgggtgcgagagggaagagggcagagcgcggcggggcgtccggggggcgcccggtacccgaggcgggcgcacgcacccaaacaggagagcggcgcccggagttactcagtgcgggcagaagagcggggcgaggagcggggtcgcgcccgctggaggcgcggggcgagcggaggaagaggaggaggagagcagaaggaaggggaagcggctcgtacctgctgcgcgccggggcgcctgctgcttcctcctcggcatgatgcttctccggcgactgccactgccgccgccgccgccgctgccgggctgaggacagggagggagggggcggcgggcccgcgggggggcgaggcgggcctgctctcagcctcccccccggagagcggccgcccgcaggatgctgctgcgcccaggctctccgcgtcccccccgcgccgcgctccgccgcgaaccccgaacgtgcggagggaagaaggagggcgggcgagggaggctcggggagggaggagcacgggggggaggaggaggcagaggaggaggaggtggaggaggaggaggaggaccgcgctgccggcggaatgggaagtttgacaaatcgctccagaggccagaggaggagggggcggggaggagcggcggccctgcccccccccgccccgtccccagacgaggtgcgcggggttcggggctggggggcggggagagggcgggcagagcggtgggaggaggagcgcgggagcggcccggaccggtactgccccggcccccgcccctaggccgggggtcacggcatccggggggacgcgcagccgccgccgcggcccggggctcggcggtccagtcttctgcccgtggcgcggctggagcggcggcgtcggcaacaggcaagcttaaaggaaaaggagatgatcgtgtcaatcgcccgcccgcgggggcgccgcgcccccgcccccggccccaggcccgcgtgggacccccgccccgccagcgaaaggggtgccgcccctccgcctccgccccgtgcgcacacgcgggggcgcggcgccagccccgccgagcccgtcccggggcgctcgttaccccccacccctattcccacccagcgttcgtccccagccaccccccagctgccccacccggctcgcactcctctccacccgccgactccggagcccccagcgtggtccccgggccggggctggcgtcccccggggaagccagagcccacgggcaggccccctccagggaggaggcgggcgcgggccggggcgggtgggggcagccctcagaccccgcgccacccagctcctcccccaggacccgccgtagccacttcccccaattttttttccccggacaaactttcctgggcccgtcccgggggtcggtgtgggagggggttccttcaagtttcctctcctgactttgggatgatcagggtccctccaccccgcccctcgcccccgggagccgggccgcgccccccatccacggcgcgggccgatcctagggcgggacgggggcgggagaaggaaaccgggctcccctgcccatcccccgccaggggctccccccgagagcctagggggccgccgcgccgtgtcccgcgcccggcctgccggggctgctggactagagggattgattattgattggtgatcggggtcgctgaggctccgggccggcccggccgactggccgcggcaagaaggagctggctgggcggcgtgggcggcggggcgacgcgggctcacttacgggcggcggtgagggcgcgggtgggccggagctcatgcgggcgacccccgggcggcggcggctgagcgggagccggagcccgagcggcgcgggcggcggcgcatcgatgcgctgcgggctcgattgcgtctccctgggccagctctcaggccgggaatggggcggccgcgccggggccggctccgggcgctgccgggcggcggctgctggagcgcgggggcggcctccgggcccactatccccgaggcggccctgcgcccgggcgcgccggctggggctctggcgctctcgcaggccccgaggccgacagtcccggcgagggcgggcgccccgcgctccagcaccggctgcctgagcgctcctggagcagcaaaccccagacttcttcctccttctctccttccttccttccccctccccttatctttttctttttttagtctctttctccctctttttctgccctgtgtcctttttattttttctctacgactgtttttgcaagtttgtttcaaaagttcacagcatgctttcttttcttttagaccgggagacagtgatctcac

SEQ ID NO: 1561224 - DNA, 4001 bp, Homo sapiens
agcctgttttaggcctggcccaggggaagccaggtggggggtgaggatcagaggtgcagtgagttaaaggacccatttgtaaccctctatacttttgccagaaattccctaagtccccctaaatcttgctcatctctcagttttgccccagattcttagctgactcccctcagagaactcctactcactcactaaggtccagttgcaagacatcctcctccaggaagctttccctggtaccccccagcctggcttgaggggcctttctctgggatctcctccgttagggaatttctcaccctagtctgtgtcttttgcccccaccagactgggagctccccaagcacagggatctggcctgtttcctgagcccagcctcactggggacatttgggagtgactgtgtgaactgaagaccacccaggccaggcacgggggctctcgcctgtaatcccagcactgtgggaggccgaggtgggaggatcacttgagcccaggagtttgagaccatcttgggcaacacagtgagactgtctctaaaggaagaaaaaaaaaagaccaactcccagattcatggctggctgtcagagaaggaggaggcagttcccagttagttcctctgggtctcgaatgaccagaacattctaactccaagtcaaaaacaccccacccccgtcctaagtatttgctaccaccttgtggaggacctcggtcctccccagcgggtggtgtggagggccctcaccaggatttccgtgatgtctgcgtcatccggatcccagggtagggtaggggaggcagggggcccagccagtgtgagttggccgctgaggtcttccactgtggagtctgtccccgtggagtcagtgggctccatggcggccaggttgagcagtgacacgttggtgcaggccgaggaccgtttgaggttcaggcaccagtgcatgggctgatgggacatctggggctccaccctgcagagaagaaacaggcagaaaagtggagaagcagccccagggtgtctgggccctcctgccttcctttctccatacctcaccccctgtgactccaccctcactgtatataagtttctcccttctctgtccccgctgcctactttattctccttccctgtgctgcctactttctttcttttttctttctttcttttttttttttttttgagacagagtctcactctgttgcccaggctggagtgcagtggcgcgatctcagctcactgcaacctccgactgcgggtcccagttcaagcaattctcctgcctcagcctcctgagtagctggggttataggcatgtgccatcacgcccagctaattttagtatttttagtagagatggcttttcaccatgttggccaagctggttttgaactcctgacctcatgatccacctgcctcggcctcccaaagtgctgggattacaggcgtgagccaccgtgcccgaccaccactgtctactttcttcttctccttccccgctgcctactttctcctcccttctctgccacctactttcttcttcattcactagcctcccttctccttcttccctccccactggctttttcctctctccatccatccccattaccttcttcctccctccatccatccccattaccttcttcctctctacctccctgtgacttgatgtctcttcactgctgccctctttcctgcccccgacctgctggcttttccccctccccttcctctagcacccacagtcggactcctgctctgttggaggtagtgctgggcattagaaccatccctgacagtgtgcaacaaacccacccgtggaacgacacggccttctttttcttcgggatccccttggcccggctggtcaccctccggggagcctctgggactagctgggagcagctctccacccccgtgggggtgtccccggcctcatggatctctttggactgccagatcgtcttcaccaccacgctcgccatggtgtgggggtctggctcccagggaggggctccttcctctgagacttcctacctactgtgaccacagaccctcaggatccactgtcccctcagcctgcctcacaaaggacccaaccactgggccccagtgagtggggggcacagggtagggagagatgctggcccaggtcattcccctagggttctcagtggactcctcctgttcaggattctagttacatgcccaatgtgccccccgtcttcagagctccagtggatggattcatgctagcctgtaacttaacaatgggtcggcccacggattcttgggagaggtccaacttccctctccctgagactaagcgtggggtcacacagccctgtgcacttgttcttgattcttcatgtagcttcctggatttgacaattggctggggtttgagagactgtggtcgaagagggctgagatccagaccctgacctggagggtctcatattctatggggcgtcggggtcgggggaaaggcaatatacaggtagatcaacaaaagaaagctaggtgcggtgggcctcggggtcagggtagaaggtgagggaggagaggaaggtagagagttggggcaggacagagggtggtatccccctcccccgtttatttatttattattttctttaatactttttattttttttgagacagagtctctctctgtcatggaggctggagttcagtggcgcgatctcagctcattgcaacctccacctcccggggttcaaccgattctcctgcctcagcctccccagtagctgggactacaggcgctggccacaatgtccggctaatttttgtatttttagtagagacgggtttcaccatgttggccaagttggtctcaaactcccgacctcaaatggtccacccgccttagcctcccaaagtgtgggattacagacatgagccaccatgctccgctataattttttttttttttttttagatggagtctcgctctgacacccaggctggagtgcagtggcgtgatcttggctcattgcaacctctacctcccagtttcaagcgattctcctgcctcagcctcctgagtagctgggactacaggtacctgccaccacacccatctaattttttttttgtatttttagtagagacagggtttcactgtgttggctaggctagtctccaactcctgacctcgtgatctgcccacttcagcctcccaaagcattggaattacaggtgtgagccactgcgccccgcccgcccaaagtatttaaaaaatatatggaacatgtcacaaatttgcatgtggtctttgcgcagggcccatgctaatcttctctgtatcgttccaatgttaatacatgtgctgtcgaagcgagcactgccctgctatttagggacagacttttcctgttctcttcacacttctcaaaaagactagttcaaacatcactgctaatagacattttaaatgctgttatccccagggagaaagtacttcttcctggtcatgaatggactccagttcttggaacacttaatctttctataataaagaactcctggctgggcgcggtgtctcacacctgtaatcccagcactttgggaggccgaggcgggcggatcacctgaggttaggagttcaagaccagcctggccaacatagtgaaacactgtctctacaaaaatacaaaaattaggcgagcatgatgacgggtgcctgtaatcccagctacttaggaggctgaggcaggaaaatcgctttaactcgggaggaagaggttacagtgagccgagattgagtcactgaactccagcctgggggacagagagagactctgtctcaaaaaaaagaaaaaaaaaaaaggccgggcgcagtggctcacgcctgtaattccagcactttgggaggccgaggtgggcggatcacaaggtcaggagatcgagaccatcctggctaacacggtgaaaccccgtctctactaaaaacacaaaaaattagccaggcatg

SEQ ID NO: 1561225 - DNA, 4001 bp, Homo sapiens
ttagaacagaaaccagaaaggaagaaaagtaatctgttagttgtatacaaatagaactgggtgagtgcggtggctcatgcctgtaatcccagcactttgggaggccaaggccaagacttgagcccaggagttcaagaccagcttggtaagacctcatctgtaccctctccccaacaaaaaaaaaatagccagtagtagtgcgtgcctgtagtctcagctactcaggtgtctgcagtgggaggatcactttagctcatgaggttgagactgcagtgagctatgactgtgccactgtactccagcctggatgacagatcaagaccttgtctcaaaaaataaaataggccagccacagtggctcacacctgtaatcccagcactttgggaggccgaagcaggtggatcacctgaggtcaggagttcgagaccagcctggccaacatggcgaaaccctgtctctactaaaaatacaaaaattggccgggcgtggtggtgggcacctgtaatcccagctactcaggaggctgaggcagaagaatcgcttaaacctgggaggtggaggttgcagtgagctgagatcatgccactgcactccagcctgggtgacagagcaagactccgtctcaaaataaaataaaataaaataaaataaaataatgtcataggacagggattagcaattttttttttctgaaaaacccagatgttgtggcctctgcaggacttaaggtgtctgttgaaactacgcagttctattggtgtagcccaaaagcagctgttcacaatctccaaataagtgagcacggccatgttccaataacactttattttgtattattattttttaaatagagatggggatctcactatagctggtctcgagctcctggctcaatggatctgcccacctcggcctcccaaagtgctgggattacaggcatgagtcaccacagccggccttaattctctttaaaatgttacaagtgaagaggaggagtgatatttcatttccttctctttcctggcagcttttccttagactatgctacaatgaagacaattacttctttttatgtttttattcttttatttttttattgagacagagtctcgctatgttgcccaggctggagtgcagtgacacaatctcggctcactgccaacctctgccgcccaggttcaagcaattcacatgcctcagcctcctgagtagctgggattataggcacgtgccaccacgcccatctaatttttttgtatttttagtagagatggggtttccccatattgaccaaggctggtcttgaactcctgacctcgtgatccacccgccttggcctcccaaagcgttgggattacaggcatgagccagcgcccccggcctgacaattccttagcaatgtacatttcgggttacttttacggtaaggaaaaaaatgtgacaaatttaaaagatcaagaaaataaccctttctcctggccttcccaaacaacttggtcggctacaggatttgacttagagccaagctcttccatcacccacctgggctcccccagatcacactcatctgtgctggatttcaccagctctcggttgatggaggtccccacgctccctgctcctcctcctccgtctgccctacatccctcctgcttctccagggaaccacagatctcgatgccaatttggatcaacttatttctgtctttcagggagctgactgtggaggaagggctgcaacaaaccaggggcctggattgtgacatacttacagccacgaagccattgagtaaagataacagtttcttcaaggaagaatacggagtgtggatttcagccatgctgaacagactggggcaccctgaacatttaagttaacatcttcctgaacctctgggctactgtttcccaagatgatagggatctgaggaaggggcgccaatgctgacttgctctgcccctctgtgtcctggctgcctgatggttgtccaaggcggcccagcagctgccccctgccctggtcataagccttttatcacatcacaattgggttctggagcaaggctcatggtccagggaaatcaggtgccccaaactgccccctgttggctcctcatccttcaaacaggtcacagcagggaaagagaacaggcatggtatgctaccctggtaccctccagatgccaccaggaccctgtgggcatagtgcccagagctaaccacttgcacagttgacatctcctagtagactgggggatccaagcgggggaggggggaacttgggctgtcctattaacagctgtgacccctgccaggcgcagtggctcacacctgtagtcaaagcatgttgggaggcggagacgggcgaatcacctgaggtcaggagtttgagacctactaacaatacaaacaatacaaaaattacctgggtgtggtggcacacgcctataatcccagctacttgggaggctggggcaggagaatcacttgaacccaggaggtggaggttgcagtgatctgaggtcgtgccattccactccagcctggttgacggagtgagactctgtctcaaacaaaacaaaacaaaaacaaaaacagctgtgtccccaaagcctggcactgcagtacttaagaaacccgcggagaatgaatgaatggatccagaggctctgtgatgcagaaatctagctacaagccaccgggcctcccaagcccaagcccatacttggcccatccttcatacagggctcagagaggccaagggaactgcctgaggccacacaggaagcaagaccaggctttgaagccccaagagtaacatgagggcaggaacctgtaaggcagagagtcctggaactgtgagccattggtcactgggtttttttcttttgagacaggatcttgctccattgcccaggctggagtgcagtggtgtgatcatggcttactgcagccacgacctccctggctcaagtgatcctcccaccttagcctcccaagtagcaggtcattgggcttttctccatggtgatagatgtagttagcatttcaggaccaaaaaccttctgtatgtcagcactgaagacctccaggcctagatcctgcagtctgtagcccactttgcccccatacctccccaccctaaccatagcagcttcacattgccccaccccgatcccctctctgtccagccctgggctggggtgtgtctgggtccaggtcctgcatggattgggggaaggcggatggttcaaatgggagaaaataccttacactttaattaatttaatgaatgtctgtcaaatcgcctgcttcttggaacatgtagaactaagcaagatgttcacagaggagtgctgtctcctcctggaccacgggtgctgttcacagccaggagtgtgtccttccacacctttatttaagaggtcatttgaagccaggcgcggtggctcacgccagtaatcccagcactttgggaggccgaggtgggtagatcacgaggtcaggagatcgagaccatcctggctaatgcagtgaaaccctgtctctactaaaaatacaaaaaattagccggttgtggtggcgggtgcctgcagtcccagctactcgggaggctgaggcaggagaatctcttgaacccgggaggcggaggttgcagtgagccgagaccacatcactgcactccagcccgggagacagagggagactcctccgtttcaggaaaaaaaaaaaaaaaaaaaaaaggtcatttgaagtaaggaacctcagaaccaggggctgagggcctggaaatgggggcacaaaagagggtgataaatgggcatgcaagagagcattggaaaatgtagggggcaaaggaggtctgggaaatgtggactcaagggaaagcaggaaaatgggggtgcaaaggagggtgcagagaagggggacgcaaagatgcgagatggaaacttggctgcaaatgagcagtgggaaaacgggcttaaaggacggtgggaaa

SEQ ID NO: 1561226 - DNA, 4001 bp, Homo sapiens
gacagagcgagactctgtctcaaaaaacaaacaaacaaacaaacaaacaaacaagagatgaggtctcggctgtgatgcccaggctgttttcgaactcctgacctcaagatatctgcccgcttcggactcgcagtgttggggttacaggcgtgagccaccgcgcctggcccttggctctgccttttggcaagtgacatccatgtgggcctcagtttccttatctataaactcctactttacgtggagacaggccaccctcgccccacccctggctgttccattcttaaaagatgtggacggcgaggcgctggggtccacttgcttcccagcccatcatcacagcgacatcacgacccggggacaacaaagctcctttgagtttgcccatactggggagctcaaaaggtccaggctcgaatcctcccgactcccttttgagtcttggagcaataacctcaacatgcgtgactctaaaatagggtacccgcgcctgccttccccggatggagcgatcgcttctccactagtccgcaaatgggggccaccgttagagccaggtgcgaggaacagcgagtttattgcaggttccaaccgggaacctggcacccacggctggttgggaagggacgccctccgcgcagaggctgagagttccgcgcaggcgcaatgcttccgtcccctctggtctcgccctctcggggcctggtcgcagggaatcgcggatgcgcatgcgcctccagctcccgggatcgcggggaacgtggattccgaacaagggcaactgcggactcccccgtgggaagaaagggagggaagcggaagggaaaaagcgcatgtgcagcagcacgcggcagcttcgcatattccctcgaagcgcgcctcttgcgcgtgcgccgccctggcccagtgcccttggctgcaggaatggctggaaccacccggcttctagccggagtccccggcgcgcagccagcagttgcgcgctacctggcccgcggagggcctggcggacgggctgaactgcagcagctcggcgatcagggccttgcagcgctcggacagctcgaggccttcgggatagagcacgccgcgtttctggcgccggggcaggccggcgatgtccgagtcgtcgaagggcatgcacccggtgaccatgacgtagagcacgacgcccatgctccacacatcgtacttcttggggtcgtaggggatgcccaggagcacctcgggtgacgcgtaggcggctgagccgcagtaggtggtgctcaggtctgggtagccatgggcctggcggccgaagccgaagtcggtgagcttgacgcggcgctcgtccgggctcagcagcacgttttcgcacttgaggtcgcggtgcaccaggtgatgatcgtgcaggtagcgcacggcgccggcgatctgcgcaaagaggtcgcgcgcctgaactccggggatgcgcccgttgcgctgcacggcttgcagcaggtcggtggcggccgcttccatcacgatgtacagtttcccgttgcacacctcgatgaactcgaagacgtgcacgatgtgcgggtgtcgcacgccccgcaggatggacagctctcgcggcaggaacttgttgacgaagtccgggggcgctcgccgccggtccaccaccttgatggccacggtacccttgtacttcttggatgtggccaccttcaccttggagtagctgccctctccaattgtgcggcccagcttataaccgagttcgctcagaagtttgtctcccgacatggtggcgcctagggcgcacggggggcaggaggcggctgctgtcggggggcggccggactccaatctcgggtctaagccatggcgcttggcacctacacccccgcacccccatgtgcccactgccagacattggccgctgttgtgccttttattgccccgtaacaatttttgccttgtgaagtgactgcgggcgtcactccgccttagggtgggggtccgggaccccgccccggggccaccctagcctccctgctttgtgactcataatcatcctgaatggtcagtttccgatgagaggccactagcaagggatacccatcaccaccagggagcagaatccgttccagggattggggtgagtccgacttcgagcagcagctgccccccaacatcatgtacccagcccgtgactacgtggagccctgggcttcgcgtagagtccctagacggggcgaaaacgggaaaaggggccttaactggggcacctggctcctttgagagctcggagtttctgactggcctgcgcaacaccccagaggcaaggtgaacgcgagggcctataatgcaagaaccaaggcgagtcacgccctgtctgggcaaaagaggagtaaagacccctcagctgcagcccggcagcgcattcctacccagggtccgccgccagagctttcccgcgcggtcggatagttacactactgtccgggacttcctagccgtgccgcggaccatctcaagtgcttccgccacactcatcatggcggtggcagtaagtcacttccgcccgggaccggaagtgtgggatactgcgagtatggcggcgtcaaaggtgaagcaggacatgcctccgccggggggctatgggcccatcgactacaaacggaacttgccgcgtcgaggactgtcgggtcagtatcactctgcgccggggtctcagagtctgggcactcggggctcgggggcggggttccggggacacaggcgggcctcagttttcccggcggtgtgaccggaggcggagcccggggatccatcatagcttctgtaataacgctaagtgctgcagtttgttgaggtctttcccagctcctcttccttctcgtaacagcccaggaaatcggtccctctagttatttacgttttacagtgggttaaactgagtcatagcctgtgctctggccctcagccacccttggatttctaagatggggaaactgaggcccaaagaaggccgcggctccccaaggcaaagctgaggccgcaacccggaacctggagggaatttacaagatgttctatgcagtggttccctgctggcagcccccgcctgcatggtgtcacaggaatccatattctttaaattttcaattttttttttttgagacggagttttgctcttgttgcccaggctggagtgcaatggcgccatctcggctcaccgcaacctccgcctcctgggttcaagcgattctcttgcctcagcctcctgagtagctgggattacaggcatgtgccacaacgcctggctaactttgtgtttttagtagagacggggtttctccatgttggtcagggtggtctcgaactcccaacctcggatgatccgcccacctcggcctcccaaagtgctgggattacaggcgtgagccaccatgcccggcgtaaagttttcaaatgtttaagtaacacgttaaattttgttatcgggctcagcacagaaaattgaaaaagagaacttaaaaggcgcccatactcagtccccaggttaacagacaaatagaaacttttaaacgtaatctaagagtgaatacatacatttctttttttttttttaagacggtatggttctgttgcctgggctggagtgatttcttggcaacctccgcctcctgggctcaagccatcctcccaccccagcctcctgagaagctgggattacaagcatgcgcccagctttctgtattttctatagagatgggatctcgccatcttgcccaggctggtctcgaagtcctgggctcaagtgatccacccacctcggcttcccaaagtgatgggactatcggcatgagctaccgtgctcggcagaatgcatgtctcttaacaaatcaaactttacatttaaattacatgttatgcacattattcctcaattttaacacacacacaaaaatgagcatggtaattaaaaacgtaataattcagacagtagaaaaatcagtgtgaggtgaaaagtc

SEQ ID NO: 1561227 - DNA, 4001 bp, Homo sapiens
gcccttccccaaagccccagtcacagtcggcagtccccagtcacagcggagccatcgcacacctctgtgcgcctgtatttgcggcaccctctgccaggaatgcctcttcgcagaggctcccgtcacacttctcatcctccagcgacatctgcaagaagtctgttctctccgagccacttaacaggaaaactaatctcgtctcggctcccacaaccctgcacctgttgtaatccctcttccttcttcattggctcttaatacaaaactgagtgttgtgtctgccctcctgcactcatgtgtgtaagtgcacacatgcacgcacacacacacacaccccaatttcctggcatcgtccacccgagtggatgagtggatggtgcaggaagtgaatgaataggtgtgcgtgaatgggtgagtggaggaatgagtgtgtgcggtaggcaggggtgggacggggtaatggagatgacagtgggtggatagggaagtgactgagcaggtgaataggagatatcagatgtggcaatgacggtagatgagaaatggccggggagatgtcagaggagcgataggtggacggatgtttgaatggcgggtgaagggcggggtggatgaatggatgagtgggcgtgtagggagtaggtgggtggcgcagccctacctagaagcagctccgcgggaggagggctctgctattctgccctgatcttcctgcctgttccctccgctgcagcccctttccccgccctgggcccagccctcacctctgccccgccccgccactcacctgtgggttcccggctgcgggcctcctgcaggtagcgcagcgcgcgtgcgtagtcgcccaggtggtagaaggcaatgccggcacggtaggtggccttgaagttgccctgctgcttctccagtaccttgagacagtactcgcgcacgcgctcgtagtttaccagctccgactgcagcaggcaagctgcgagggccccgcggccggcactctcagagcctgctggcacccccagaacccacctgactgcgaggagccgaggctccaggcggcagggaaccaggcctaagggattgctccggcaaccaggggcgccaatccgctcgcctatcgaaacaggcgcaactgcgccgctgctagggggcgccaaaacacggacaggcgccactgggcgatccacccagagctgtcggtgggcaagagcactaaggccccgcgcgggggcgagggccgggacctcgagagcctggctcagggcagacttcctcaccttgggtccacgtgcggccagggggtggaaagaatgactcaggggaagcgaggccctgaatacccgacccaaagaccatttcctgcatcccagctccctccagccacagacccctgtcatcccctacccctaatccctttccttgatcaagctctgaaggctcccccagaagcccacagccctggacccttcagccccagggcccctggcccccaagtcgccaagctctcccgattgccccctcccctcgtgccccatccccccaccccccgacggcgtacccgtgagggagtcgtaacactccacctccgtgctctccaccaggcgccgctgctcctcgctgaggcgcgccggcccggggctgctggtgggcccgggggcgggggcgggcaggccgctagggcgggccccctgcgccgccttcagctgcagcagcgctcggtggtacttgccgatggcctcccggaacttcttctctcgatagcagcgctggccctctgccttgaacgccacggcggcacgcaggctgctgtcgagcgccgcgcccaggctccccgacggctctggggtaggaccgggacgagccgagccatggcgggagcccgagcctgggcccgagcccggtggggagagggcgggaggcgggcgcggcggaggctccggggcagcgctgagcatcagcaccggggacagcgcgccgcgctgcattgtgggaaactcctgccgccgccgctgcagctaccgcatcgccccccgcggggctggtccccaccctttctccgccccctcacctccggcagccgactccggctgccccctatgggtctagggaaacccctcgagacttcccccatgctcactctcaaattaaccaagtcctagttctccagcccgccccccgaattgttcccattccccttaccctccccaacctcctgcctgctctcctccccggtgcccaaagctcccgaagatttctagaaggaaaggacgagcctgggggaaagagcaggaagacatcagcctcacggaaagctggctctcagcccactggccatttggcatatcgaatgagaacacaggatttggacccaagcttcccaaattcaaatccctgcttactttctcactagtggtatgacttagacagctcgcttaaactacctggaactctgtatcctcatcagtaacatggcacaataatatcacctttagggccagtcgaggtggctcacgcctgtaatcccagcactttgggaggtcgaggtggatggatcgcttgaggtcagaagtttgagaccagcctggccaatatggcaaaactccgtctctactaatatacaatatatacaaaatttttgtatatatacacaaaaattagcctggtgtggtggcgtgcacctgtagtcccagctactcgggagactgaggcaggagaatcacttgaacctgggaggcagaggttgcagtgagccgagattgtgccactgcactccagcctgggtgacagagggagatgccgtctcaaaaaaggaaaggaaaggaaaggaaaggaaaggaaaggaaaggaaaggaaaggaaaggaaaggaaaggaaaggggaaaggggaaagaggaaagagaaaaaaggaaaggaaaggaattaaaaataataccacctttgggattcatctgttaatttatgaaacaaatattcactgacatcctttctgtgcccagctctgtgctggatgatgctgggacatagcagacactgcgtgagcttcagaccctactctcactgggccccagttcagtgggaagacagaccagtgaccagacagtgacagccctgagcaggctagcctgggaagcacaggcagaggggtcggggccgaggtggaagaggcacaggcagaggggtcggggctgggatgtgggaggtacctgccctgggctgaggtggtgataaagtcttcctggaggagggaataactctaaaaacaagagagatctccttcttgccctcatccagctcggctgtctatgggggaaaacaagtgagagggcaaacaagtccccaggaaaggaagcatgcaggaggctttcaagaaaaaaatcgaggatgaatgagtcaactgcccttcagtcctcctttgccgcctccttagctgtgggacctgggccaagttcctcgatcctcctccttcggcttcgtctgtgcgacatgaggatagaaggcaagttaacctcagagcggttgcagagactgaattatcttatgcaggtaaggcacttagcacagggcttcatacattaatgggcaattaacaactggtgtttcttatcgtccattagactctgagtcatgtgatcatgagtgcctggctctgagtcagcatccatatatagttgttgaatgaatgagtgtgtgagtgaatggcattatgcattactactcctccccctcctctgagactctagcttgggtctcagccccaggcctccccactctccccaactccacccccacagcacatcctctagctggaggtcccatggcaggtcacatgtgacagacagaaaccagaactcagcaccttccatctcaaccagagcatctgcctctatctcttattgtactttgctgtaaaacgcttttgctgagtgagtttctcccttatccctggggtccagccttgaacacctcaggggtgcaaacattttcctctctgcatctccaaaccca

SEQ ID NO: 1561228 - DNA, 4001 bp, Homo sapiens
tatgtgtgtgtgcatatgtgagtgtgtaatgagagtaggtgggcgtgtgtgtgtacctgtgcatatgtgtgtgtgcatgtgtgtaatgaaagtaagtgggcgtgtctgagtgtgtgcatgtgagtgtgcatgtgagtgtgtaatgggagtaagtgggtgtgtctgagtgtgcctgtgcatatgtgtgtgcatgtgagtgtgttggaataagtgggcgtgtctgggtgtgcctgtgcatatgtgtgtgcatgtgagtgtgtaatgggagtaagtggacgtgtgtgtgtgctgtgcatatgccagtgagtgtgtgcgtgtggctgtgtgcctcccccgggccagtgtccctgaggccctggctgtgtctgcagctgtacccacggtggtcgcgtccctgcaggggtcccccttgccctcctcggctgtggggctctgcccgcgcatccctgccaccctgaccctgacccccgaccgtgggggcggagtgaggctcccccaaacccgtgcctctggcggtgactggggccgcggatccccgcgtgcggcttcgggaggtctccgggccagagcgggcgtgagtctgggccgaggccggagccggtggagcggcgttgttggaggtggccgttgtgtaaccgcgaggctgtgggcgaggggacggcggtccccgtgtgtggggagagggggcggcgaggagcaggcggggaagagctgctcagggctgtgccagccgtgacccaaatagctcagaacacagcactcatcccctccgcgcttttctgggaccccctccacgccccctgagctctccaatcccagcccccttctcccaggagcaacccaagacggagcccaggggctcaggccccatcagcagggccaggacccgtcctggggccacatcgggactcccagcacccccacccgtccccagctcagccaagcctttctcctcattaatctcgaagtcaaggacttgaattaaactgggtcaggggacagctctttcgcccattggagctgccccgagccgggccccttccccagggacaccggcttctgtgaggttcccacaccggccccaccctcgggacccgggtctgtcatcccgaggctccccaaacccagcctcatctcggccctcacccctgcagcgccctgaccaccccttctttcttgggacgggcaagaagcttcctctcccagagccccttcattttccagccctggtcctcagcccctgaagcccccttccccatttcagactctcaatcccatcccagcaccgcagcagccagcgttttccccgccaccgttatcaggtccgctgtctcctgggtcccaccttatctgggacatattcacctgctctgatcctgtggggcagggtcatcttttagggcaggaagagtagacctaccctcccgatgaccctggaggccggcttcccaggcaggtatcagacacccgggaatccgggcccccctcccctcctctccatgaactcaggggtgcaggtccccagccttcccttatttagagagctcgaggtctggacccccagcgcgcgtcccaggagaacctccaggcatgggcgcccccaggctcctcctccctccgaaaccccaaagtccgggccggcccccagcctccggcggagctcaggaaatctgtgacccagcccccttctccctcgggacccaggagctccggcccccagccctggcccccaggccctggcgcccggtcccacctgctggtattcctgctcttggggcgcgaaaacgctgggcaccgggcggagctggaagtcggcgcggggcagctggtggaggagatgcacccaagctgagggccggtagcccgggggcgcccccatggcccccgggggagggggcagcggggcggacgccggggctgcgggagcctccggagtcgagcggggcgcgggcggcgcggggtctggctgggctcaggggagcgggagcgggggggaggcagggggtggggggcggagattggggggagggaggcgcgggccgggcggggacggtgctgcccctggtggtcgcggcggggactgcgggagtcgggaggcccccagcgctccgcgccccaccccggtcgcggctcccacctgctgcccgcgcaggtaccgcgctgctggcgtcggcggcatccggacagctggcttgcatcgcgattgaaatcagccctccttgtccatacgaggccactcatactgttatttcacctaaaacataatgatccctttatccttatggagaaacttcatgtctgtgtaaaggttgctagtaagtacagagcgttttacaaagaacggccaattccatggataagaagtcctctgtgtacgaaagtgctcccacctgtaaaagatgcccgtatttgtgtaaaatctccgtcccacttttattcctagcctgcataaggacacagcttctaagcacaaacactcctatgtgtagaggctactccagaatgtatggaaaaatccacacgcctgtgtagcaagccttcatgctgcataaggaccccttctacctgcataaggaccctggtcatctatataggggcccttcccatcctgtaaactgactcgggattacttcggtgtatacaaggacccctgccccttggcattcgccatacagttacagagtatttttccagccactccccatgttacatctcactggaatcctccgatgccacaccgatagatggggaagtgccaaccctgggaggggacctggccaccctgacatcatcacccagactgtcactattgcagccaaaactaggtgctcaggaatctggccccaggggtcccctcttgctgtagggcagggtgagactttgccatctggaaaccacacacgtggcctctcttgtgggaattgggatgagtggaagaaagggagattagttctccacttaacccatttccatattttgctccagattggcaagaaagggctagggaaaagaggaatgctggtggtagcggaggtggtggtgatgacgatgatggtggtgattatgttggtgatatgatgtcatgatgatggtgatggtggtgatggtgatgatgatggtggtggtggtgttgatgatggtgatggtgatgatgatgatgatggtgaagacatgattatgttgacatgtcatgatgataattatgatgatgatggtggtggtgatggtggtgacggtggtgatgatggtgatggtggtgatgatgttggtgatggtgatggtggtggcgatggtggtggtggtgatggtggtgatggtggtggtgatgatggtggtgatggtgatgatgttggtgatggtggtggtggtggtgatggtggtggtgatgttggtgatggtggtgatgatgttggtgatggtggtggtggtgatggtggtgatgatgttggtgatggtgatggtggtgatggtggtgatgatgctggtgatggtggtgatgatgttggtgatggtgatggtggtgatggtggtgatgatgttggtgatggtggtgatggtggtgatgatgttggtgatggtggtggtgatggtggtgatgatgttggtgatggtggtggtgatggtggtgatggtgatgtggtgatggtggtggtggtgatggtggtgatggtggtgatgatgctggtgatggtggtgatggtggtgatgatgttggtgatggtgatggtggtgacggtggtgatggtggtggtggtggtgatggtggtggtggtggtgatggtgatggtgaagatgaggatatgatgatgatgatagtgatgatgatgatggtggtgaagacaagattatgttgacatgtcatgatgataatgatgatgatgatggtggtgatgatggtgatgaggacgatgatgatgacggtgaggaggaggatagtgatattggtgaaggtattgatgatgaaatgggagagtgagaataggcgccttatctctgtctct

SEQ ID NO: 1561229 - DNA, 4001 bp, Homo sapiens
tcctttgtggcctatcaccttctaccagaatgggagctgcactggggcagagagggagctccggctgtttgattcttacctggatctccagcttctagaacagggcctggtatgcagtgagtgctcactgtttgttgaatgcatgaagtggcagaattgggatgtgcacccaggcagtctggttccggttcagaccgttgaattaaaatgccacctcctccaggaagacttccctgaatccttctctgtatccgccctcctcagggctctcacagtggcctgagcatcccctcatcacagccctggatgcagggctggtgcctggtgccctgtccaccccatctctggtctgtgggccccggtggtggctgttgactctgtggtgttagcaggaataaggaggttttccagcctctggctccctgctgggggactcaccaaacacgaagttgtccggccgaaagatctgaccgaaggggccagaacggacagagtccatggtgccgggttccaggtccaccagcaccgctctggggacataatttcctcctgcagggaaacagatggagggcagttcgatgcgtgccaggaaccacaggcgcccggtagcatcctgttccctcccagctgccccttcccacctggaaggtgcctccttcgccctacctgtggcctcgttgtagtacacgttgatcctctccagttgcaggtcactgtccccatggtatgtgcctgtggggtcgatgccatgttcgtcactgataacctcccaaaactagagagagaggtggtcggaagagttgagagaggggaagccggtggccaagccgaggactgcccccagcccccaactagctccctagctgccacctctcccccagcaaggtgaacgggggacctagaggcatggtgtcggggcgaggatgaggcagcaagaaggagcggtgggggcggggtgcagccgagtcagcacccagcggggccggctggtgccagcgcacccaggctgcagcccgggggaggcaccggggctctttgtgcgtgaggaggggacagtggcccagctgtgggcccagctgtgacaggcggacagaaggctggctcccactctccgcagcctctttgttcccagtctggccctgccacccccaccccgcgacccttcccccaaggcccctggggcgcgctggcctcctggggacctcattcctttccaaagactcccaggttgcggggtgctccggggaccgaccccgcggtgctccccggggccgccactgcctccccgggccccgttccccgagcaccttggccccgatctggttgccgcactggccggcctgcaggtgcacgatctcccgcatggcggtggcgctgagggtggacgcggcggcggtggcacgagcgcggggagctgcggcggcggcgagggtggaagatgcggcggagacggcggagcacggtccctgcgcccccgggagccgctatatgagcgggcggggcacgcgtcacggccggtcaccctcccgctccgccccttggtcccgccccgggatgatggagggggctggggtggggggaggtggtgcagggacctccctccccagggggcctcccagagaagtccgggacgccacgtgctccgacccctgccttgggggtgaggccccttagggagccaccagtgcagtctcccccgtcccagcccccagccaggcttggccacccgcagaaattgggcggaggaagggaggggagcgcctggtaaacaggcatctgagaagtcctgcccctcccccttagcctccaccctcccgccccaggccttgcctcagtttctcggtccgcagccccccttctcattctatttagacctcattcgccagaatccttgcagtaaccgcgagccctcccagtgggctgggggctccggagcggcgatctggtttgcgggtggggggcggtaggttcctggagggcttgtcctgaagctgcatagtaaaaccacgattttcctcccatgattgggtgcagatgctggtgggctcccctggtacacctctactgggcattgagctcgtcccaggtggggtcacccccagcctggcctaaggaggagagtggaggagtaagacagctgggttcatattgggagggggacagtgagtccccagggctgcctcgctttcccaaaataacacccctcctctccagtattgtaatttatctttatctatatctatacccttttttttttttttttgagacagagtttcgctcttggcgcccaggctggagtgcaatggcccaatctcggctcactacaacctcagcctcccaggtccaagcgattctcctgcctcagcctcccgagtagctgggattacaggcatgtgccaccacgcccggctaatttttttgtatttttagtagagacaaagtttctccatgttgttcaggctggtctcagactcctgacctcaggccatctgcccacctctgcctcccaaagtgctgggattacaggcgtgagccaacgcgcccggcctatatatatatattttcggacagggtcttgctctgtccctcaggctgtagtgcagtggcatgctcatagctcactgcagcctcaatgtcctgggctcaagcaatcctctcacctcagcctcccaagtagctgggactgcaggtgcatgccatcacgcctggctaattttcaagattttttgtagagatggggtctcgctatgttgtccaggctgctctccaactcctgagctcaagagatcctcctgcctcagcctcccaaagtgctgggattccaggcatgagccactgcgcccagctcagtattataatttattacccaccatctcccttgcctctgcatttcctgtagcattaggtgtatgaccttgccctggtgctcctctctgtgtctgaatttcacatttgcaagttggggtggtgaggaaggcccaccctccagggtctgattatgcgatgacccagttaacaaggtggcgatagtctcccctcctgcagagtcaacaataaattgtatctttctcgagtctaagtattatcagaggctggactggacttcctgtgctgcccctcatgtgaaggtcaagcctcctggggctgcttccttggacagcctccagtcccgccctcccaggaagtctcctcctcgcctcccatccttgactttcccactcaaggactttggtgtattgctggtgggaggtggggtaagccatcttggccatgtggttgggacctcacatttgccatggccactaattttttttttttttttttttttttgacagagtcttgctctgtcacccaggctggagtgcagtggtgccatctcggctcactgcaacctctgcctcctgggttcaagccattctcctggctcagccgccccagtagctgagattacaggtacgtaccaccatgaccagctaatttttgtatttttagtagagacgggctttcaccatgttagccaggctggtctcgaactcctgacctcgtgacctgcccaccttggcctcccaaagtgctgggattacaggcgcgagccaccgcgcccagcaaattctttttttttaatttcttgccctgtcatccaggctggggtgcagtggcatggccatggctcactgcagcctcgaactcctgggctcaagtgattctcccacctcagcctcccgagtagctgggactacaggcatgcaccaatatgcctgggtaatttttgtatttttttgtggagatgggggtcttgctatgttgcccaggctggtctccaacgcctgagctcaagcaatcctcccacctcagcctcccaaagtgctgggtttacacatgtgagccatcgtgccctgcccaatgaccactaaatttgaccagtggctctcaacagcgtgtgtgtgagagtgtgtgtgtgtgtgtgtgtgtgtgtgtgtgtgtgtcgggggggcggggga

SEQ ID NO: 1561230 - DNA, 4001 bp, Homo sapiens
taaaaaattagctgggtgtggtggtgcatgcctgtaggtccagctacttgggagactgaggcaagaggatcacgtgtgcccagaggtggaggtgacagtgagccgtgatcatgccactgcactctagcctgggtgacagcaggacagacagaccctgtctgaaaaaaaaaaaaaaaagaggatttttgaggcccagaaaggctgaggagcccatcctaagttatccatctgaatcaacccctggcagagctttacttatttatctcctttgtggcctatcaccttctaccagaatgggagctgcactggggcagagagggagctccggctgtttgattcttacctggatctccagcttctagaacagggcctggtatgcagtgagtgctcactgtttgttgaatgcatgaagtggcagaattgggatgtgcacccaggcagtctggttccggttcagaccgttgaattaaaatgccacctcctccaggaagacttccctgaatccttctctgtatccgccctcctcagggctctcacagtggcctgagcatcccctcatcacagccctggatgcagggctggtgcctggtgccctgtccaccccatctctggtctgtgggccccggtggtggctgttgactctgtggtgttagcaggaataaggaggttttccagcctctggctccctgctgggggactcaccaaacacgaagttgtccggccgaaagatctgaccgaaggggccagaacggacagagtccatggtgccgggttccaggtccaccagcaccgctctggggacataatttcctcctgcagggaaacagatggagggcagttcgatgcgtgccaggaaccacaggcgcccggtagcatcctgttccctcccagctgccccttcccacctggaaggtgcctccttcgccctacctgtggcctcgttgtagtacacgttgatcctctccagttgcaggtcactgtccccatggtatgtgcctgtggggtcgatgccatgttcgtcactgataacctcccaaaactagagagagaggtggtcggaagagttgagagaggggaagccggtggccaagccgaggactgcccccagcccccaactagctccctagctgccacctctcccccagcaaggtgaacgggggacctagaggcatggtgtcggggcgaggatgaggcagcaagaaggagcggtgggggcggggtgcagccgagtcagcacccagcggggccggctggtgccagcgcacccaggctgcagcccgggggaggcaccggggctctttgtgcgtgaggaggggacagtggcccagctgtgggcccagctgtgacaggcggacagaaggctggctcccactctccgcagcctctttgttcccagtctggccctgccacccccaccccgcgacccttcccccaaggcccctggggcgcgctggcctcctggggacctcattcctttccaaagactcccaggttgcggggtgctccggggaccgaccccgcggtgctccccggggccgccactgcctccccgggccccgttccccgagcaccttggccccgatctggttgccgcactggccggcctgcaggtgcacgatctcccgcatggcggtggcgctgagggtggacgcggcggcggtggcacgagcgcggggagctgcggcggcggcgagggtggaagatgcggcggagacggcggagcacggtccctgcgcccccgggagccgctatatgagcgggcggggcacgcgtcacggccggtcaccctcccgctccgccccttggtcccgccccgggatgatggagggggctggggtggggggaggtggtgcagggacctccctccccagggggcctcccagagaagtccgggacgccacgtgctccgacccctgccttgggggtgaggccccttagggagccaccagtgcagtctcccccgtcccagcccccagccaggcttggccacccgcagaaattgggcggaggaagggaggggagcgcctggtaaacaggcatctgagaagtcctgcccctcccccttagcctccaccctcccgccccaggccttgcctcagtttctcggtccgcagccccccttctcattctatttagacctcattcgccagaatccttgcagtaaccgcgagccctcccagtgggctgggggctccggagcggcgatctggtttgcgggtggggggcggtaggttcctggagggcttgtcctgaagctgcatagtaaaaccacgattttcctcccatgattgggtgcagatgctggtgggctcccctggtacacctctactgggcattgagctcgtcccaggtggggtcacccccagcctggcctaaggaggagagtggaggagtaagacagctgggttcatattgggagggggacagtgagtccccagggctgcctcgctttcccaaaataacacccctcctctccagtattgtaatttatctttatctatatctatacccttttttttttttttttgagacagagtttcgctcttggcgcccaggctggagtgcaatggcccaatctcggctcactacaacctcagcctcccaggtccaagcgattctcctgcctcagcctcccgagtagctgggattacaggcatgtgccaccacgcccggctaatttttttgtatttttagtagagacaaagtttctccatgttgttcaggctggtctcagactcctgacctcaggccatctgcccacctctgcctcccaaagtgctgggattacaggcgtgagccaacgcgcccggcctatatatatatattttcggacagggtcttgctctgtccctcaggctgtagtgcagtggcatgctcatagctcactgcagcctcaatgtcctgggctcaagcaatcctctcacctcagcctcccaagtagctgggactgcaggtgcatgccatcacgcctggctaattttcaagattttttgtagagatggggtctcgctatgttgtccaggctgctctccaactcctgagctcaagagatcctcctgcctcagcctcccaaagtgctgggattccaggcatgagccactgcgcccagctcagtattataatttattacccaccatctcccttgcctctgcatttcctgtagcattaggtgtatgaccttgccctggtgctcctctctgtgtctgaatttcacatttgcaagttggggtggtgaggaaggcccaccctccagggtctgattatgcgatgacccagttaacaaggtggcgatagtctcccctcctgcagagtcaacaataaattgtatctttctcgagtctaagtattatcagaggctggactggacttcctgtgctgcccctcatgtgaaggtcaagcctcctggggctgcttccttggacagcctccagtcccgccctcccaggaagtctcctcctcgcctcccatccttgactttcccactcaaggactttggtgtattgctggtgggaggtggggtaagccatcttggccatgtggttgggacctcacatttgccatggccactaattttttttttttttttttttttttgacagagtcttgctctgtcacccaggctggagtgcagtggtgccatctcggctcactgcaacctctgcctcctgggttcaagccattctcctggctcagccgccccagtagctgagattacaggtacgtaccaccatgaccagctaatttttgtatttttagtagagacgggctttcaccatgttagccaggctggtctcgaactcctgacctcgtgacctgcccaccttggcctcccaaagtgctgggattacaggcgcgagccaccgcgcccagcaaattctttttttttaatttcttgccctgtcatccaggctggggtgcagtggcatggccatggctcactgcagcctcgaactcctgggctcaagtgattctcccacctcagcctcccgagtagctgggac

SEQ ID NO: 1561231 - DNA, 4001 bp, Homo sapiens
gatccaagagtcctgacaccctgtcctctcatcccccaggacccaggagtcctgccttctagaagccttgttccttagaaattcatcacaagggtttgtttgcttctttagaacccccaattcctattttcttttctttttcctttcttactttttttttttctttttgagacagagtctggctctatcgcccaggctggagtgcagtaccacgatctccgctcactgcagcctccgcctcccggattcaaacgattctcctgcctcagcctcccgagtagctgggattacaggcgcctgccaccacacctggctaattttttgtgtgttagtagagacggggtttcgccgtgttggccaggcttgtcttgaactcctgacctcaagtgatccgcccacctcagcatcccaaagtgctgtgattacagccgtgagctgccctgcccggccccaaattcctattttctcatttctcagtgggaaaactcaaggatgagagacagccaacacgggctgggagtcctagagcaagacctggtggagaggcccctggggaggcacagaaggcggaagagttggagtggtgagattcctgggcacaatacctgctgttccagcttctgcagcctcatagcagcgagctcatgccccaggatgctgagagagacacaggcccatggtgacagtgcacagggaacctcggttgcccaagagagtccctccttcccccatcctgcccctatctcagcttgggttctgggcacctgtgaggtcacaggaggtgcagaacctgagcctgctccaccagttatagggccctttctcctggcactggcccacagaagccgggacccagagatcccaggtccctcctgtctcaggattcaggagtctggggcccccaaccccttctctttcagacccagaagtctgcaccctagccccatcccttcaggacacaggagtccaggtccccagccccttcctgcaaggccgatggtgctgaacctgcaaacatggttatgaagccagagccgagtgcacggggtccccagccctttccacctccacccctacccatctgtttccctactcactctctcatcaatgtgtcattatcctgagacattctgcagaagcaagaatgaggagtcaggatcagaaccaacatcccaatggatcctgcccaccagcacctaatctttagccttatttatttatttatttatttatttatttatgtatttagagacagctgagcctcgctctgtcgcccaggctgcagtgcagtggcgccatctcggccactgcaacctccacctcctgggttcaagcgattctcctgcctcagcctcccgagtagctgggactacaggcgtccgctattctgcctaatttttttgtattttagtagataccggttttcactatgttggccaggctggtgccggactcctgacctcaggtgatctgcccgccttggccttccaaagtgctaggattacaggcatgagccacagtgcccggcctgatccttacctttaaatttgcttccggacccaggcagcccgaatcccagcacccactcctgtcgggatctagtagcctgtttccagcttcccacgggggtccgcaagtccgcttctctctcccccaaatatctaattctccagcacccaggcatcagaactcaggactgtgcacttcaaacacccagcccccagcggcctagaactccactgcccacctgcctgggatccgggagacttgttctcctcaccaggtgcctggagaggctgctcacattgatgcctcggtaccttgcctctctggccaatctctaaacatacctgatcctctctttggaagctggggacctaatctcgggatatctgcgaaatagggaggagaagaaagacggctcagagggagggaggattccctctgggacctgaactggtccactcccttctgaccctccactctccacttccaacaaagtaacgaactcggtcactgatgcagccaggcaaccctgctccgggggttctgaacacgaatgccgtgtgggggttccttaaagagaccagagaccggcccggcgcggtggctcacgcctgtaatcccagcactttgggaggccgaggcgggcggatcacggggtcaggagatctagaccatcctggctaacatggtgaatccccgtctctactaaaaaaaaatatatatatatacacaaaaaaattagccgggcgttgtggcgggcgggcgcctgtagtcccagctactcgggaggctgaggcaggagaatggcgtgaacccgggaggcggagctcgcagtgagctgagatcgcgccactgcactccagcctgtgtgacagaggtagacaccgtctcaaaaaaaaaaaaaaaaagagagagagagagcgggagaccagagacctcgcggcctcactgtacacatctcgcttacaagaaacttaaaagaggcggggcgcagtggctcacgcctgtaatcccagcactttgggaggcggagacggggaggcaagattgcttgagtccaggagatccagatccagaccagcaacacagagatttttttttttttttgagacgtagtctcactctgtcgcccaggctggagtgcagtggcgcgatctcggctcactgcaacctccgcctcccgggtttaagagattgtcctgcctcagcttcctgagtagctgggattacaggcatgcgcaaccacgcctggctaatttgtatttttagtggaggcgaggtttctccatgttggccaggctggtctcaaacccttgacctcaggtgatctgcctgcctcagcctcccaaagtgctgggattacaggagtgaacccccaagcccggcttgacatccgtctctttaaaaaacaacaacaacaaagtgtgagaagtgtgaaagacagaacgttaaaaaaaaaaaaaggctaaaaaagaattaaagatttaaatatttgtattaaaaatttaaaaaatatacattagccaggcatggtagtgtggcctgtggtcccatctacttgggaggctgacgcgggaggattgcttgggcctgggaggtagaggctgcagtgagaagtgattgcgccactgcactccaacctgggtgacagagcaaaccctgtctcgaataataagaagaagaagaaagaaactcataagaaaggctatgcaattgctaccgcgctataacttccaggcacttcgtggggcgaaaataaatgggaaaactacagctcccatgaggcgaaggggccacgatgcccgcggaagttatttttcccccggccggcagggagttgtagttatctttgaaagccttctctctcttttggcataggcgggaaatgtggcgtcaagaggctgggattccgagaaagaagcgaggctttcacgaaaatgcgagcggcttcggcaaggggcggggccgctggacgtggatgaaagctacagagccagcgtggaccaatcagacctctttggggcggggcctctgtggataagtgggcgtggtctaggggggaagtcaccaagaacgcaccggaggtccttgcccgccctggaaaacgccctctgcggtgaaggagaggtgagaggccagggttcccatactcttgggtcctagggaggatgggggccagagggctggaaaactgggtcccggaggaggatgcactgggtgccagtactttaggtcctgggaaaagaggaggctgggaccctggactcttgggtctgggggaggaggcggccgagatcccggattcctgagtgtgagagaggagcgtgttgggagccaggacccctgggtctgagggcccagactcctgtgtcggaggaagggaaggccggaggcctggaatcctggggcctgggtaacaaaatgcttgtgtcttgattcttggaagtgggggcggcgctgggggcccgaactcctggttccaggggaggaagagg

SEQ ID NO: 1561232 - DNA, 4001 bp, Homo sapiens
tgagtctcgttttccacatttattggacagggttggggtatgcatccccacctagatctctcatcaacaataacactgaaccctcctctctttccacaaattgacacagatataaaaatctgctctggccaggtacagtggctcacgcctctaatcccaggactttgggatgttgaggcaagaggattgcttgagcccaggagctcgagaccagcctaggccatatagcaagaccctgtttctacaagacgttttattttatatcttatcttatcttatcttatcttatcttatcttatcttatcttatttttgagacagagtttcactcttgttgcccaggctggagtgcaatggtacaatcttgctcaccacaacctctgcctcctgggtttaagtgattctcctgcctcagcctcctgagtagctggcgcctgccaccacaccgggctaatttttgtatttttagtagagacagggttttgccatgttggccaggctggtcttgaacctctgacctcaggtgatccacccgcctcggcctcccaaagtgctgggattacaggcgtgagccactgtgcccggcctctacaagaaatttttaaaatttagccaggcgtgggggtgcacatctgtactccaagctactcgggaggctgaagtgggaggatctcctgagcccaggagttggaggctgcagtgagcagtgatcgcaccactgcattccagcctgggtgacagagtgagaccctgactctaaaaatataaataaataaataaataaataagtaataaaaatatataaaaagggccaggcgcggtggctcatgactgtaatcccagcactttgggaggccaaggcggacagatcacgaggtctggagattgagaccatcttgaccaacatggtgaaaccccatctctactaaaatacaataaataaataaataaataaataaataaataaataaaaagtaaaataaaaatctgctcttaacacacctccccaaaataaccagacaggcagatgtggtcaaacatacctgagggtgagtcctggagctccctgtgtcaactcaagcaagccacttagcaattctgggcctcagtttccccatctggaaaagggaggtcctcagggtgttgccatcaaaagatggttgtaatgtttcaatatagttccgcatattacacattcagcacagaccctgattcaggcacacacaaaaagaacaaatatgaccaaaacaagaataacataattgttattagtttcatcgtggtgatggcctctttcaggccacaattctcctctcccacatttacccccatgagtgacctcagtccctgttgactccccaaagcctaggagagtttatgtccagctccatccccccaatccagggcctgagcctcctgagggcgccagtatggaagtggaggggctgtcacttccacccatgttgctggtttcctcatctggaaaatgggcatgtaacagtgtctacctcaaaaggctgctgggaggatttaacgcgaggaggcagagaaagtgcctggtatacagtaagcgcttaattagcctttgccattaatacctattcatgttatagatgagatcccggggatggggctttcgcggagcctacttcctccttcctcctttctcgtccccactggacccagacccagctttgaagacagggtcggagtgaagtttgcaactgggaaggctgcacgcccccatgtcctccccccaaaacctctaaacccggccggcaacggcgggaactgggatgtgcacccaccgggcatcggagcagtcccgaggcaccaggtgctcccatccaagtgcagcctgtcaagcgcagccagtccccgcggcttcttcctgaggacctccggccgcgctccttccgcgcccgcgtccagactcacccttccgggggaacacaagctcgaacccggacccctccccgctcccgcgggtagctactgcttgtcccccgccgagacgcctcctcccattggccgcctgaaacgcacacgcccattggcagctgctctgttctccctgctcgtcaccattggatttttttttttttgccatggtggcggcactctcattggtcctggggctcattcgtcactcagccgcgattggctgagtcggcacccagatgcgctgtcgcttctgctattggctggcactcggtggacggagacgggggaggggcttgcgagaggcgggagggagagcgaagtgtgtgggcaacgcggccggatcctggagttcccctccgtgctgtggaattgggtcaggcgtgtacggtcctgaccctaggacacagctgcatgtcctcacctcggtgttcaaagctgcaccggccaccattcaaccctccgacgccctgccctttggcttccccgttccatccggtcctgtctcctttccctcgtttctacctggccgactccatcctgctgactagaattccccctccttcactcctgggaggcattcctcgcccacctgccccagtcctcttcctgatcacctgcagccctgtcctctgaagctccctagcggtcagggtagcagcttggacatcccgccagacgtgaattcaaatccccactccgcaagtcgtgcccatttgctgagaagcctacagccagagcgtttcacatacattatctcatttgatcctagcagcaattccctgtatggcggctcttattatccccatttcacagaggaagaaactcaggcatgaagaggtaacaaagaccgtcctctgacccttcttctgtgccacaccataaccactcctcgactttgtctttcacctgcccagccaagtcttagcaaagaagcctattaagtcatccgctcatccttgatgtctgatcaacttcctcatcttccacttttttttttttttttttttaagatggagtttcgctcttgtcgcccaggctggagtgcaatgctgcgatctcggctcactgcaacctcagactcccggattcaagcgattctcctgcctcagcctcctgggtagctgggacaacaggcgcccgccaccacgcccggctaatttttgtatttttagtagagatgggatttcaccatcttggccaggctggtctcgaactcctgacctcgtgatccaccctcccaaagcgctgggattacaggcgtgagccaccgcacccggcccttttgttgttaatttttaaattttgtggctaatttttaaatttttgtagagatggggtctggctatgttgcccaggctggtcttgaacttctggcctcaagcaatcatcctgccttggctttccaaagtgctgggattacagatgtgagctaagacacccagctccatggagttggtcttaactgccatggccaagggacatgtggctgcttctctctgagtcagaaaatatgggtaaaaagcctcctcacagggcagctgtggacattcagtatgaaaatgctgaaagagatcgggaatggtctctttcacacctgtaatcccagcactttgggaggtggaggcgggcggatcacctgaggtcaggagttcaagaccagactggccaacatggtgaaaccctgtctctactaaaaatgcaaaaattagctgggcatggtggtgggcacctgtaatcccagctattcaggaggctgaggcaggagaatcgcttgaacttgggaggcagaagttgcagtgagccgagatcacaccattgcccttcagcctgggcaacaagagctaaactctgtctcaaaaaaaaaaaaagaaaaagaaaaagaaagaaaatgctgatagaggccgggcacagtggctcacgcctgtaatcccagcactttgggaggccgaggtgggcggatcatgaggtcaggaaatcgagaccatcctggctaaggcggtgaaaccccgtctctactaaaaatacaaacaattagctgggcgtagtggcagcctgagg

SEQ ID NO: 1561233 - DNA, 4001 bp, Homo sapiens
tgaactcctgacctcgtgatccacccaccttggcctcccaaagtgctgggattacaggtgtgtgccaccatgcctggccaaaaaaaaattttttttaattataaagaacatttacactgctctcagattatatgcacaattttgtattttttgtgtagatttttctgggagtctagattttcttagtttctcaaagggatgaagggtcctcaaacccaaaaaagagattctaggactcctctctttagagttaccaaggtagggctgaatgacattctctgccctactgagagcgtctcccagaaatcagtcgtcctagggctgggtttcttccagaaaattcctggcctgacttctggcaaggcctgtgtttacacttacaaaggcaaagccacccttttttttttctttttaactcttcacgcttttttttttttgacagagttttcctcttgttgcccaggctggagtgcaattgcgtgatcttggctcactgcaacctccgcctcctgggtcaaaggattctcctgcctcagcctcccaagtagctgggattacaggcatgcgttaccacgcccagctaattttgtatttttagtagagacagggtttcaccatgttggtctcgaactcctgacctcaagtgatccacccgcctctgtctcccaaagtgctgggattacaggtttgagtcaccgtgcccagcccctcttcacacattttaagctgaccataagcttgtggttgatcattcggcccagttttggacagatgtcccatgtgccttcaaggtttgggggtgctttaggcagagtggctttgaggtccctctgatggcatgaaggagtatctggggcagatatccctggcaggagtgaaatgtgaggaggacagtctggttttctcacctgataaggcgactcggtctcagtgatacgctgtttccgggtcgctgctggaggtgaggggtgttgtggggtgcagagacaggcagagtggtgagttgagggtgttttgtcattccaaatcagcacctccattaccatccctttggatgtttgagatctgggagtttacccagccccccacccccatctaggcaagtcctcaggatgtcccctgctagccccactcaccctccgcagcccctcgcccccgagggaccagccggcccaggaagtacacggccagggcaatgagcactgtcagcaccaggtctcccatcacgatccctgccagcacgcccgggctcaccgtagagcaactgcaatctgcagcacaggggtcaggggaggtcagtgtgtgctgggaactgtggggaggggggtcagcggcagggaggtttggaaagggtgtgggagagacggagacagggaggtctctgggaggtagagagagggactgctgggtctaggcctaccgctctgggcctgggcctggacaggacggagacctgaggaggaaaaagaaggtaaactgaggcacagagttatgacgggggtgggggaggcaagtttagaagccagggaaggtggatcctgacagccaagaggttagcaagggggagagcgtgtctggcgggactcagggggctggcgtctgggccaccggactatgtgcgttacttctgcacaacttgtcctgtggcaacacacttagatgtctcttctcccctgcttgtagcggacgacaaaacttgggggcttgggctctgggagaaacccacaggctttgggaggttggggacctgctcccatcccaacacccacttttggttctctcgttccaccccactccctgccctgccccaagctgagcccagggacccgggaggcagccacggaagcccctaactcaccacttacagccagcaggagaggcaggagcaggagcctgctgcagggttcaagtccccccatgaagccggatgctgctggacaccacagtgtaagggccggtgggatgtggcgcagcgtccaggcaagtgaaggaggaagtctgaggcgggtggtggcagaagggaggaggagacaggggaggagagacagaaacaaaacccaagaaagaatcaggcccagacacccaggggccatgccacaggcccccagcaactagacgtgaagggcaaagggtacgtgaagcacaaacttcacctccgtccccagtcaggggtcagacatcgttttaacaggagggtcagtgtcatgaccttcctctggctgattgaaaccagctctgcctcttcctggctggtcaaccttgagtgcaatggcacggtctcggctcactgcaacctctgcctcccgggttcaagtgattctcctgcctcagcctcccaagtagctgggattataggcgcctgccaccatgcccggctaattttttgtatttttttttcttttttttttagtagagacagggtttcaccatgttggccagctggtctcaaactcctgacctcaggtgatccacccaccttggcctcccgaagtgctaggattgcaagtgtgagccaccgcacccagctccaacctcagtttcttcatctgtaaaattgggagtaaaatgggacctactttttagagttgtggggattaaatgaattaaagttcctagaccagggtctgacccttgtcagctttttaaaagcatcagctatgatgatgattatttaatcatcagaaacttgtgctgtttaaaggatattaaaagagccagcagcatgtgggcactaatgacatgcaggcactctgtcccaagcgttaaatcattcagtccccgcaatgcccttctagggcacatgctcttatcatccccattgttcagagaggtagagacgcttgcctaaggctgcacagcaaatcaaggtggaaatggaacccaagacccaaaatcaggtttttgactagggaagagtcagggggaaaaacaaagatgaaagatggggaaggagaaaacagcggcaaagctgagaaaggtgagagtaaggcagtggcacagacacagaggcacggctggcggcttggggagaggcaggtggctggctctcctgctgaatgaggaagtggctgggagcaaggcccaagggaggccaccccaaggagacggggacttctagcccccagctggagcctggggctggggaaggaggaacctgaggttagggtgctggaggatgagacagctgcaggaagcccccctcccccatccacacgtcacacccaccgctccttgggcctgggcttaggagaaaaaaggggaaactggattctggtcacagggcagatgcccagtggcctgtgggggaagggaggagaggagatttggagcctggaggagggtcaggtcccagctcagcccacggtcaccactgttcaggcctggctgagtcccctcccttaaaaacccaagcctctcccattgtgtctagagcgagcatggagggaacagaccctgtaggtcctcccgggcacaccaggccacccaatgtgttggagcagagtgggcgagggggcagtcagagaccagagcagggctctgagccaggagggccctgacctgactcaggggttcacaggttccctccggccgcaggtggggagcagactgtggaggcagggactggagcagggaggccaggctgctgggatatttgtgaggatattgtgaggtctattagaataatgcctggttgagttcaagaccagcccggccagcatggtgaaaccccatctctactaaaaattaggctgggcacggtggcttatgcctgtaatcccagcactttgggaggctgaggcgggcggatcacgaggtcaggagatcgagaccatcctggccaacatggtgaaacccggtctctactaaaaatacaaaaaattacctgggcatggtggtgggcacctgtagtcccagctactcagaaggctgaggcaagacaataccttgaacctggaaggtggaggttacagtgagctgagatcgcgccactgcactccagc

SEQ ID NO: 1561234 - DNA, 4001 bp, Homo sapiens
cactttgggagggtgaggcaggtggatcacgaggttaggagttcagaccagcctggccaagatggtgaaaccccatctctactaaaaacacaaaaattagccgggcatggtggcaggtgcctgtaatcccagctatttgggaggctgaggcagagaattgcttgaacccgggaggcggaagttgccatgaaccaagatggtgccaatgcactccagcctgggcaacagagtgaggctccatctcaaaaaaaaaaaaaaaaaaaaaagattcttgggaacgtggttactggggcttagggttaggctcatctgaggatataggggccttaggacatgaggagacatagcaggctggtcctgaggtacctgcgcctgggtccccgcccatagagctgcctctggaggttctgggaaatgggccgcagatgcatgaagttgcagaagccacctcgggtacattccctgcatagagggtagagagatggaggaagccattgtcactgacagcccctaccacgcattcaaagtctgggattccaagtgcccatcccacccttgaactaccataccccatctcatactggcgacagcatgactcccggaagtcagtgacaggagacagctcaccgtgcacagcctgcccgttgaaccagcggttactgagttcagccacggcccgctctccatcctcctccctccggaactgcaggaaatgtcagtcagggtcagcaggagaactcagagatcttcaggggactcactacccgctctggggctggactggatttagtgatgaaattcaagctgagagcctacagtggccaccatcaggcattgaaacgcctccacttctgggccctaagtggggggcagcaagcaccttgacatagacgttgcccacgaggtggtccccaaggttgtcgcacacattcatctcttcaatctccccatacttctcctgcagttctgtgaacacctcctgtggaagacggggaggaactcagctgagctcccacaagaaaccccatctgcccctaccaaccctcacctcgaagaagctatcatagtgctcctgcacctccacgtcactcacatgacctggggtgggggcgggcagggtggaatcagagtgtagcctactgggggctgttcaccttgcccccaggcctggtcccttactcacagtgtgatccgtctgcagtttgggctgtgttctgtggattccggtacaggttgagcagcactatggtctgcacagaatttaaaaggggcggggcctgagctcagagggcagggctgcatgaacagagagtgaggcatgaaggttgggggtggaaccttacaccccagcctaagcatcatgagtgcatcggcgatcctttgcccctaagaaaccagaaaagggatggaggggactggcaaggatgaacagcgggatggaagggactggcaaagatgaacagccgccgtgtgtagcctgtacgcatgggggcgcgaccaagttcccgggaaaacggcacgaagaccggtgggaggagcctgcagaaaggtccaatgagaaaaaaagccgggcggtggggagggactcaggaacccggaataggcgggacatggtgacgacggccccagaaggggaagggccagggagccgttaacccccgaggctccgtgccgggtctcacctggctgaatgtcggcttgttgtgaagccgggagcaccggtccccgtgccggcagaccccgatcttaaagtaaaaagagcagttaaccctggaaaaggtgcaaagacaaaggtgaaccgagggccggggaagctgggcaccccagaaacaccgccccaccacccaggaccccagtaccccggccccgaccccccgagagtccactcccagcgcccgttctcacttgtccttctcagtcccgaatatcgaagctaaatattcagccatttttacccaagccctccaggtctggctgctcttacgtcacttccgttgcttaggagcactgggaagtgtagttcgttgccctctccaggcgcttaccaagcgctcggaaacgccccagggcgcttgcgcgtgggaggcgcgcgccctccccatagactccccggtaggagttcttttaacagcgcatgcgtgcagtgttgcctcgcccaaagaagactacaatctccagggaaacctggggcgtctcgcgcaaacgtccataactgaaagtagctaaggcaccccagccggaggaagtgagctctcctggtgagttgggggtcgtttcgcccaccctagtaaatataaagagctctttaatccagccagcttactagtgggggtggggatgccctgctttcagcaaaccgacctttacatttatctctgatttgttctaataggggcgtggttgttcgtgatccttgcatctgttacttagggtcaaggcttgggtcttgccccgcagacccttgggacgacccggccccagcgcagctatgaacctggagcgagtgtccaatgaggagaaattgaacctgtgccggaagtactacctgggtaaggcagatcgctagggtcccaggagaagagaggggactggactagagcacccgagggaagagggcctcggggcctggattcttaagtctaagagatgaaggacctgcgaacgccgactcctggatttgagtggggagggcctgggtcctgaggaatgaggaagctggggcctcaatttctggatcccaagagaggagggggattgagggcctggactcttgggtcctgtgaaagagatggttgaggaatcagattcctggatcccaaagaggagccagattcctgagtccctgacaacagaaatctccatttgaacttgggtgtgggagagtttcttccaaatagatctcggtgggagttggagaagatcttcattgccttatgaggttttggggtttgtttgtttgtttttctttctccctaggggggtttgctttcctgccttttctctggttggtcaacatcttctggttcttccgagaggccttccttgtcccagcctacacagaacagagccaaatcaaaggctgtgagtctagagcacagaggagggaggccagtggcaggggagagggggaagcggggaatcttggtgggaagggacaatggaggatccaaaatgttggggctctgggtgagaagggaaggctggtctagggaagtctggagagcagccggaggccaacccttccagcttctgtttcccatgacagatgtctggcgctcagctgtgggcttcctcttctgggtgatagtgctcacctcctggatcaccatcttccagatctaccggccccgctggggtgcccttggggactacctctccttcaccatacccctgggcaccccctgacaacttctgcacatactggggccctgcttattctcccaggacaggctccttaaagcagaggagcctgtcctgggagccccttctcaaactcctaagacttgttttcatgtcccacgttctctgctgacatcccccaataaaggaccctaactttcgatactgacttcctgggatcttttagaggttgaggcataaatgattattaatatttaaaaacatctgttgagagctttgtacgaggcttagtatttagacatgatgtacattttttacagtgcatactactcataatcttctgaactaggaactttcctgctcaggaaactattagatgagaaactaagaaaggaatagtgcttccatttctttttcttttttcttttttttttttttttttgagacagagtcttgctctgtcagccaggctggagtgcagtggtaggatcggcctagtgcttccatttctaggggctgttatcctgtactggtagtcgtgaattcaaaaatataactttcctactgtgggctgcagtattctcatcagaagtgtagatcacgatgctacttcctgggatttatctggaccaagacgtgtg

SEQ ID NO: 1561235 - DNA, 4001 bp, Homo sapiens
ttccccgtaagtgaagagtttagcgcagtgggccagatccctcttcctccctcagaacctgttttcttatctctatattgagatctgagactgagtattatcaggtgccctgagattgggattgtaaatgatttgaggtttgtctcaaacactccatatcgcgattctcgggaccgccaaaagccccgcatatgcaggatgtgtgcgtgcggacactcaaagaatgcagatgcttttaggcaacatgtgccaaacacgttaatatgaggcgccccactaccaacagacggggcagaaaccacctggcgggagagatcagagcaaatcagcaaaaaggaaaaggggtacgcgaggggcccgtggcctccaagcatccgccgaaacggctctgccctcatccacgtgaaggaaggaaaggggcccccccaccaagttctcacaaccgccattttggaaacaaagggggcgtggagacgctgccgtgggcccgaccggaagcggaagtgccaaggcagcgggagaaaagagattacggggactaacataatctccttttcagagaaaccaaaaagattttaaaaaacaaaagttcacgtcgaggcatctggcgcgctcgtgccgcgtcccccgcgccacctccgccaggaccacgtggggcgcagggacagccgccgtgcgcatgcgtcacgggcccgcgccccgccgcccccttcccctcgcctagcgcgcggcggaacgctggggacgtcacgtgaacgaggcgcgcgccacggaaccagggttggggggcgccgcgcggccgtgaagtggggggaagcgagggagaaaatggcgggggggcaaagagcgacgcgaggagccgcccacacctccgccccgcgaccccggtgccctcaccttgtttattctcgttgagctgccgctcgaactcgtcgaagtccgacatgctgaggcggccgcgtagggccctgtgcagctttcgcctcgccttgccgcccgctccagccgcttcggctacttccgccgctggcttcggctacttccggccgccgccggcgcttcgccacctcctacctaatcaagcctccggcagccctccccgccccgcccgggctccgccccctcacccgcccgcccgcccgcgagcttgcccctccccccgagcctggctccgaagcgcctcggctatctccggatactggacgaaggcgaagcaggcggccgcttcggctgcttccgaaaacacccgaacgtagggtttcgccgacttcccaggtttccgtaacttttccgagattatctcctcaacgttcggaggtttccgtgtgtcctcgtgtgccactgcgcccagtcccctctgcgagttcgggttcttccaacaattcaatccgtcccagtctttggcttcttccacggacttgctccgatcttctccgccggccctgtccaagcaatcggccacttccgacaatcctaaccgtcccggccttcggctctttccggagatttccggatctcgccctcgggcccctcctgggattaagctcgagtccgtgtttcggctctttccggagatgccacttgctcacgcctccgatcagagaacttcggctccttccgccaccgcttcgtgaaggcctcactctccggggacagcttcgactttttccgtgggtacctcggctccttccggcttcgggaacggaaaagggaaggagaacagagacgagatggatcaggggaagggatagagaaggggacgaggtcctagttctcggcacctggctctccgggtggggaaagtgaaagaaaaaaagggccggcctcgcggagggcctgagaaggttgtgccagacaaaagcagcaagagggatgaagggtgcgcgcgaccgctgcggaggttgccagcgcggctttttgcgcctgcgcagggtggaagccgcgggtgaggggaaacaggcttctgcgcctgcgtaaaagtcgttctgtggcgcgctctcccactgctcccgtgaagggggttgcggggaccaggtttcagtccccattgcgcgtgcgcgagatttcccttacaacggtgaaagtgcttaatccccagccgttaaatccggccaccctcttggttgtctcggcaaccacatcaacgcgctccggctcttcccgccgcgcaggcgcggcagacggatcatctggcattacttccgggagacagatgatctggcgttactgccccctggcggcccaacggaagtatcctccagacttggcctggccgctaggtggcctccctcgctagaggtcatcgactcacgcctctcgcgccgcgctccggtctgggtagcccagcgggtagtgtccacgcttctttttacttttttttttttttttttgagacggagtctctgtcgcccaggctggagtgcagtggcgcgatctcggctcactggaaccttcgcctgccgggttcaagcgattctcctgcctcagccttccaagtagctgggactacaggcgcccgccaccacacctggctaattttttgtatttttagtagagacggggtttcaccgtgttagccaggatggtctcgatctcctgaactcgtgatccgcctgcctcggcctcccaaagtgctgggattacaggcgtgagccaccgcgcccggctgtgtccgcgcttcttttcccgagctctgcctccgagttttctggggcgcagctgcttcactctccatctctgcctccggggggctaattacaccgtatcctacccgtcctcccgcctgaccacccacccccttggaagcccccgcaaccccgtcaccgtcttcggggcgacggccgccccctcccaggcacgtccccctcctaggaagaggctgaggccaagtttattccaaattttcacgtcgttttttaatttaaattatctgaataattctctgtctcacgcggagttggggaggtctgtccgggaatcaggtgggcagctcctccgcggggccagggcggagacggggtctgtacagtcccccactcgaggggggggcacccgcctgcctggttttccaggaggaaggggcccggcgaggacagggctgggcagcccaagcggaagggggtgccggcgttcgggaaggggccgcggccggtccggggccgtcgcgcttgggggcccggctaagggagcccccaacccagggagcgaggaggaggggcaggggcgcggcggggagaggggcaggtcatccaccggggtccacgggggaggaaggcccgggtggaggcgcggaggcgtggtgcgatcaccgcttgaagcggtaggtgatgggcagcagcagcttgctcttcttgagcgcctgcaccttcttgagcgtctcgtcgtccagggccagaaagcagcggcgggagtactcgagcaggcgctccttggaggggtcgaactcgcccacctcggccagcttctcgggggccacaatgagcagctcggcgatgggcgtggtcagcgccacggtgttcctgtccacgcggtggtgctcgaaggcccgcgacatgctcttgagcttctggaaggtgcccaggatcttcttgtaccggcagaggaccccgtcggcgtccttcactgaggggtggaggcggggacacgaaagtgaggggcagggcacaagactgagggggcggacacgggaagggaaacggccatgggaagaaaggatctcggcgagcagaggcacgggccggtgcaggtggagacggagaacaacaggcaaggaaggggcagagaggaggggaagaatcgcagccagatcttggaccagtgggaaatgggaagaggcaggcccaggaaggagagtgaggagacaaaatgagccaagaggccgggttcaacccacgcggtcccagcaccccccgacaccccgagccatcaccctcgtctccctgcctcaggtgaattcacttattcaagtctcaccctccccgtgaggtaggtcctactgcgca

SEQ ID NO: 1561236 - DNA, 4001 bp, Homo sapiens
aaatactttgaaagaatggtatattttgtttgtttaatcatcctggaaaatatttcaggaaactccctggatgccataaaaatatgtgaattcattaaaactatatgtgctgtcgaggtaaacactaactgaaaatatattaacatatttctctacaccgggagtggtggctcatacctgtaatcccaacactttgggaggacaaagtgagagaatcgcttgagcccagaccttcaagaccagcctaagcaaaatagtgagaccctggtggctacaagaaatagaaaaaataaaattaggtggcacatgcctgtagtcacagctactcgggaggctgaggtggaggatcactggagcctgggaggcggaggttgcagtgagccgagatcgggccactgcactctagccagggtgacagggccagaccctgtctcaaaaaatactaaagtatttctctttcaatcgaattactctttcaagtacaaaatattaaatttaactatgccctgttctttttctttgttttttgagacagggtctccctctgttgcccaggctggagtgcagtggtgcaaacacagctcactgcagcctcgacctcccaggctcaagcgatcctcctgacacagcctcccgggtagctgggaccacaggcgcacaccaccacgccccgctaattttctttttttgtagagacggggtttctctatgttgcccaggttctgttctttttcttaaatgatacatggcaaacgtttattgaatttttgctgcctcccttaattcaagccttcatccatacacaatttcatttactattaacctgagaactgtgaaaggaaacttttacacatggttaaaaaagtatcatgttttaagttttatctaatttttgcttaaatatataatacataaaggaaagaaacaatgactcagtcggccacccgtacttttttgttcattccatgtttccactagcccttaagacactttaaactcacaccgaagggccagtaacatctccaatctctaaaaagtttgcattagtagaaataacgattcaaaatagcactggcttgtcaacgtacaccaatgcaaaaggcacagtcctaacgtctttaatgaaacaagcgagtgtaccgtctactgtgagagcaatgacagtcacgcagcctgcgggagccctgccactcgctccgtgacccagggtaagttactcaaccccattgcgtctccctttcctcatctgttaaaaataaagcagggtggaaatagcgtttgcactcctcgggtggtatgaagatggtgcgcgttccgtgtgtaaacccgctcgtgaccagcgctcgggacgcgttggtcgctatcattgccatcctccgccccgcgtcgttacttcggagttacgacagggacctcaaaattaaagtcacaacatccgcgagggactcaatcctctcccgcatctcctaacagccgggaatttgttttgaagggaggataagaggcggcttcacgcccacgaagcgccacacattggcgctgccggggaggcgggggcccgcggcctcctcggcgtccggagccggcccagcgagcggaggcccgccccgtgcccaaagaacagtctcctcccgcggggggggcacaacccgagcctctcagcctgcccccgctccgcaactccggtcccgggctccgggccctgagcctcagagcccctggagccccggaacccccgaatcccagcccccgcaccacagcccgccattcacgcgcgcgcgcccggccctcaccaggtcgatgtgggagaaaccggtgagcacgagattcttgaggagctcgcagccgatgccgcccgcccccaccaccagcacccggcccccggccaccgcctcagccagctcccggggcagcccccgcgacagtgccatggcgggacaaccacgagccgcggcggaggcggaggcgggagaaccgagccgcggccggaagcgggtgggggaagggcggcctggtttccgctcctgcgcactacagcctccggcagacacaggcagggcacatcgcgccggggtgtgctgcagcccgcggggaccggcaggctcttgcaaagggctggcgacctccagctgagaccggcggtgttattcccacaccagcataggcccgccatcagacctaaaaagtctaagggtcgccttctagcctggggtttcaactcccagccaagacttccttacaggttagaaaactgatgtccctatacgtaaagagctcttacaaattaacaagtgtcacccccaaaaaaatataggcaaaggatgtgaacaggaaactcacaaaaaattggacaatatgatcaataagcgtattaaaatgtaaaccataaaagaatcgcttgaaccctggaggtggaggttgcagtgaaccaagatcgcaccacttcactccaggctgggtaacagagcaagactccgtctcaaaaaagaaaaaaatgtaaaccatgcaaaatggtaagattttcacctgccgggcgcggtggcttacgcctgtaatcccagcactttgggaggccgaggcgggtggatcacgaggtcaggagttctgaaaccagcctgactaacatggtgaaacccccatctctactaaaaatacaaaaattagccgggcgtggtggcgtgcgcctgtaatcccagctactcgggaggctgaggcaggagaatcgtttgaacccaggaggcagaggttgcagtgagccgagatcgcgccactgcactccagcctgggcaacagactccgtctcaaaaaaacaaacaaacaaacaaacaaaaaaaaacaccgaaacagctgggggtggtggcacaagcctgtagccccagctactcaggaggctgaggcaggagaattgcttgaacccaggaggcggaggttgcaccactgcactccagcctgagcaatacagcgagactctgtctcaaaaaaaaaaaaaagtttttcacctactaaactggtagaaagaaaaaataagtaacacttatcaagggattgggaaacaagcactccaacacactccaggtaaagattccaaagcaaagcttctctagagggcgtggtggcttgcacctgtagtcccagctactcaggaggctgaggcaggaggatcacttaagcctgagaggtcgaggctgcagtgagctatgcccttaccactgcactccagcctgagagacagagcaagaccctgtctcgaaaaaaaagaaaaaaaaaccctaaaattgtgcacaacttttgactcattcattccaattctaggaaactgtcctgtagcagttatcattgatttaaaatatatataaatttagttacagggatggccatcatgggaataaaaattggaaaatacaagtggctaaaaattgtataaagcttttgatgtatatttaaaaaatagagcaattataaattatgttgtgggaaaaatattaatgggaaaatgctccaaatataatgttaaatgcaagaaacaagcccaccccatgatcacctaggcctcattatcctcatctacgtaggcagagcatgtctgaacatggctgggagtgtttttatactgctgttatggggctgaagggaaggggttgatcatgttaaaaataaagaaaggggaagactggaaggcagctggataaagggacagtctccagaacggagtaaagaccccttcctgggatactgcaggagcagaagatgggagtgggtgagggcggggacctgggctgatgaacatgggcaggtctaaacagccagggtcacagagcaaaaacctccagcagctagagcaggttcagtggcttgatcaggtgccagaaacagcataggaagcactggagtgcacgtgtcagaggtgtacacaagaggctgaccactgctcttggctctttcgctgctctcctcccccctagaatgcccaccagaacggctgtgcagacaacaccagccct

SEQ ID NO: 1561237 - DNA, 4001 bp, Homo sapiens
cctttcctaggacctggggatcttgggtccctgcccagcaaccccaaccccggtacctttctggatgttgtagtctgagagagtgcggccatcctccagctgtttgccggcaaatatcagacgctgctggtcaggtgggatacctgagggggagggaggctcagttagaggctctgcggaccatattactggcagtgtcctctgcaggggagctccagcactacccccagtttctcaaaaggccaactgaggtagaagataacaaacgttcttcagatcacatggagaagcaagggcaaaacagatctaaagtcagcacaacccacacaggactgagactcccctgggcagagagggactcccagttcacagccagagcccccacacccagccctactcaccctccttgtcttgaattttggctttgacattctcaatggtgtcactgggctcgacctcaagggtgatggttttgccagtgagggtcttcacaaagatctgcatgtttgcgtctgcaggaggaagggaggcaggatagactggtgagcaatgcatgcctgagtagcacaagctcaggtgcctacaccacagttgctatccctttgcctgcaccaagtccaactggtcctgccccagtacctgtcttcctttcactcctccaagcctggccctgctaggcttctcacacaccctggcctgtagtctaaacatgtcctggaactaaagaccacatgtcctccaccctcctgaccgcacgggtgctcttcaggaacacagactgtggttattctccttaggtttagcggcggaaggactcgtcagtatctcctgatggaataagtaccctttggcatcatcttgctagatccatcttccctgaaggcggtcccaccctcttccacggcagccaggtcctgatctgcacaggctgctcctgctgccagcctggatgggaagccatcccctacaacacacatgccttcctgtcgcagcctctctcctctctaactccaagctggagcacccaacactcttagcttccttctcaattacaccaaaactctccagaccccacttcttgccttgaccccaaaccacgaacatcacttagtatctaccaaccacctgccaagcattgttcacatataaaagttgacttaaaaagacaaagaatcgaccgggcgcaggggctcatgcctgtaatcccagcactttggaaggccgaggcagacggatcatttgaggtcaagagttcaagatgagcctggctaacatggtgaaactccgtctctactaaaactacaaaaatcaactgggcgtggtggcaggcgcctataatcccagctactcgggaggctgaggcagaagaatcgctcgagcccgggaggtggagattgcagtgagccgagaccgcaccactgaactccagcttaggcgacagagcaagactccatctgaaaaaaatacaaatagtctaaagaaaagtctaaaaagcagacactaccaccagctcctccttacagacgtagtaatggagccaggtatgaagactcagctcgagaaatttagtatttccaaagcgactgacgcagtgactggcagagttaacgctacacgctcaatacccctctctcattaactcggatctgccccgaggacctcttcccgcccgaggcctcgtggggtcacgctggcaggcagagcaggcaggctcctctccaaaacggcgctcgcctcctgggccccggtctgggctccgagccgtggcctcgcgagccctgcccagccaccctgccgagactggcccgcatgagccagctcagggccgcctcttctgccgcccaggcccctgcagcctcccgcagcccccaacccgctctcggcccggcgcgaacccgcacgaccgccgccaccaaccagctcggccgcctcgctgaagaaaaagaagatagcggaaccggaaaccacctaatcgccgccgaaagcgcttgcgcacggagcacgccggacgcctgcgtcacaattcgcgccgcgccttgggccccgccctgccgccatcttggatgctggcgaacgaagccgcagcgcacgtgggtgaaggtcgcccacccgcttccggttgtgggccccgcccgccgagtcacttgagacgattgcacctctccccgtgtttgcgtccgctgcctctaggccactgacaaccgctggcggttggcgggccctcagcgaatagctgaacggagtagaggagaatgttttctaataaagcaaaggtattaagcagaggactgcgggtccaggacgcaggagtcggggctgggaaagcacctaacacctggaatcggttattataaagctctcggccgctgtgcctgaatggatttcaggacagcagcagggagagcagacggtactaccgcattcgcccagaaaggtggtggtgcctgacaaaaggtgtcaagcgggactcaggattttttttttttttttttttgagacggagtttcgctctcgttgcccaggctgtagtgcaatggcgcgatctcggctcaccgcaacctccgcctcctgggttcaagcaattctcctgcctcagcctcccgagtagctgcgattacaagtgtgcgacaccatgcctggccacttttgtatttttagtagagacggggtttctccatgttggtcaggctggtctcaaactcgcgacctcaggtgatccgcccgccttggcctcccaaagtgctgggattacagacgtgagccactgcagtgtctcttttcagtgtaggatccagatttgtgggtggttaaaaagtgccagggcgggacctgggtccggtgactcacgcctgcactttgggaggccgagatgtgcggatcacctgaggtcgggagttcgagacgagcctgaccaacatggagaaaccgcatctctactaaaaatacaaaattagctgggcgtggtggcgcatgcctgtaatcccagctactcaggaggctgaggcaggagaatcgcttgaacccgggaggcagaggttgcaattagccgagagagtgccattgcactacagcctgggcaacaagagcaaaactccgtctcaaaaaagaaaaaaaaaattacaaaaatttttcaggtgtggtggcgggtgcctgtaatcccagctactcaggaggctgaggcaggagaatcgcttgaatccgggaggtggaggttgcagtgagctgagttcacgccactgcacccagcctgggtgacagagtgagactccatctcaaaaaaaaaaaaaaaaaaaaaaagtgccacggcgggtgcagtggttcacacttgtaatcccagcactttggaaggtcaaagagggaggattacttgaggtcaggaattcacgaccagcctggaagacatagtgagaccctgtctctacaaaaaaaagttttattttgaactatccaggtgtggtggtgcgcacctgcagtcccagctacttcggaggcaggaggattgcctgaacccataggtttgagattgcagtgacccatgattcagccactgcactccagcctgggcaacagagaggtgctgtctcaaaaacaaaacaaaaaaaaaaagtgctgagtacagagaagatggggagcaatgagaagttacctataggcttaacaggggtacctgtttatttccttgaacatttgcaggcactactataccaggcaaaagcagacactctcacgtctgggaagatgcctttaagaacctaatttccttttcttttttgagacaacagttttggtctttttgcccaggctagagtgcagtggtgcgatcttggctcactgcaacctctgcctcctggattcaagcaattctgcctcagcctcccaagtagctgggattacaggtgtacaccaccacacccagctaatttttatatttttggtagagatggggtttcaccatgttggccaggctggtctcgaactcctgacctcaggtgatccaccca

SEQ ID NO: 1561238 - DNA, 4001 bp, Homo sapiens
gggcccgatgggcagaacatgtctccctcctctcagtggggacacccttggtttgctcctgggaattcagccatatgcaccctcacctcatcaggacagatgaccagcttgaagttgaggaggtcgtctggatctgagaagctgatatcacacgtcttgggcaggttcagctcgtttatgtctgggtttgggtagcagagagtcgggaacagaaagagggaggggaagagagagagagagggagccagcaggacacttagggcgggtgtttgttagcagagcccccatcgtctcctcctggacccccaggcgcctctcctgggctgtgctccacacctccagccctctccctgctccccagcttggctcttgtggatacacagcataccccaaacatgcatgttcagctgtgtatgcgtgtcccaactcctggcccagggtgacccccaacttttctgtatccacagctcccaaatgcccccactcccaaacatcctctgaccgccctaaaccccaggctccccatccatgacctccactctacagtatctacctgttcacccaaactcaaagatcctgcccacccccaccaaccctcagtcctcactgtccttcctcttctctgtctctcagacccagctttccatgtgacccccacactctcaagtccccaacccccgccaccctaccccaccccctctgactctgaggttcacagcacaatagcctaaatttcccctcacccctgtctccaatccctggtactcattaaccttccctcctccacctgtcaccccaaaccccaaattgctgtgactcaggcaggcccatgagtccctggtcctccaacctacttcacccgtttgactcagagattcccagagaccccagcataataaactaaatcctcttccactcatatccccaacccctggcctctactatccctctcttctccgcctgtcaccccaaacccaagttcccgtctaacccccagactctcgagtcgtcagttcctccactccactgcctgactctgagattccgagtccctagtagcagacaccaggccttcctaatatcctaaaccaccacataccgggcccctatctctgaccccctccccgtgactgcatgatcccaaccctcaagacttgacctccgaccccccccacgctcggggcccttcacctctgaccctcagcaaccgcattaccccttcctgactcccacatcaccctgcctcaggccctgacctccgacctccggctccaaccccatcccctgaccccctacccttctggatccgcagctgcgccgccgacgccttcttgctgctgcccttggtgccgcccgccgactcctcctccttcttctgctgcttcagcgagaacagcttgatcatcctgccgccgccgccgccgctgccgccgccgcggggcccgggaccccggccacccggccccccgccgccgcccgcgtcgcctccgctcctcggacccgcagctgcggcctcctccgctgctgccgccacccgcccggcctgccgcgccgctccgctcctctccgcgcccaccgcgcggcccgcctcggctcccgtagtccggctccggcctggcccagcgcctcggactcgctcggcagcgctcggccaaattcggctgttctcgggcccgcccggccccgcccccactgcccggggccgctccttccttgccctcgccaactctggtctcaggccccgctgcagctgcggactcggggctcccccgaccgtgccgtttggccgctcagctgatccctccgcgagggggtgcggctaggggtgggaggaggacacggcagctgcggtgacggcgggcgggtactggaggatcgtcttccgcggcagcagcggctttagcgcggaggtcggcaacggcctcgggcgccccgccgcttcggatatttccgccgcctgcccgctttggctcttcccgcccggcctgcgttgtgcgcctgcgcagccgccgcaaacccgcgttgctcagcgatggagtttggggttcggcctccttcggctggactcgggcatttccgttcatggagatgacgcttcggcggccttgcaggtcacttccggcgactttcgcggggccgggcaggaagcggagttagtcgccatctttgagtggggcagacgtgggccgcttttgctcgcggtcacttcatcttaagttgtatatatgtgcagagcgcggcgcgggtggtcacctccgctgctgccgccacccgcccggcctgcctttgaccctatgggtcacagacaaggcagggtgatcgcggcaagaccctgagtgagactagatgcgttacccagagggtgcgaggtcgagtaccttccctgtcccatcgcaaacccaaagatccccgttcctggagattctgattgaggtaaactaacaaaacatgtattgtgccagagagtggtaagcactgtggagggttacagtggtgtaggggaagacctgtcggggtggacacttggggaacgcgacgtgggggcggaatcgggccgctattggcgtgggcctcaagttccagcggacacgcactgcagcctctgcgcttcccccactatctggaaaaggggatggaggcgggggtcagcttcccatccaatcacagctcagcgtgcctcggagggcgggaggaaacggaactctgccggtcagcgacttccggccgtcaccacggaaactgccagccccgtgagcgcatggtgtggcacttgcctgcggaggggcccaggcgccactcctctgattctgcagatgctcccccaggagtggcttctggccaaggccaagccccttctttgaaactgcctttcagcctgtgttacctgcacccaagtcacccactggagggttgggggagaggggctgtgtgaaggacctggacaatgggatggaaggggaagatggctagggcaaaacaggcaatggcactgggtcctggagacgctgccctgaagcctgcagtatgctgaacttatgctctcagcatctgtccactttcacctaagctgcgtttccactggtttgctgctgaatctactcctgactgaaaccttccaatgtgcatggggccagggtgggagaagccttcagctctagcgatgggaatgatcaccacagggcagggaaactggcccagggcctgcagcctttgcttctcagactggctggggttccatctgcagggtcctacaccctcatcacctgctgcttgtgaacacgagaacaggaaagtcttgaaaaatctgaatttccaggtgaaatcttctagttttaaaactaggaaatggtttcctaggtgtaaaggagttttacaaagacatcctgaggcagaatctggatcaccaggtgtcagtttgctcctgctggatcgcataatcttggttggctagggagattctggcctgtctgggtcctttcctggggtttggcttggcccatggcccaggggacagccgtgacagggtgtggaggggagcatgcaggttgcaggcatcaagtttaggcacagtaccacccacaaacctgggggttggcagatccaagtgggatccttggctcccagctgtaagaagtgctgtgaccccactgcttccctttgttcctctagtactaagggtgagatgctgaatgtccccatgagtacaactcttcagcgggtactcctactgataggtagataaaggtagaaagctttggccgctcaggaccactttagggagtagggtgctgttagggtaagggtagctgtacagctgagctggggtgggagaggtagtatcatgggaatgaatcattaacgctgacttggagcaaggaggactggtgctcaggaggctggtaacctccctgaggattgagtgttctcccagcccttggaggccctggtctcagtgtcaagggaaaatcccatgggatttcatcaccagacaaggctgggct

SEQ ID NO: 1561239 - DNA, 4001 bp, Homo sapiens
tctcctcactacagtcaataggaactttggagggatttgtcacacccctgctttaaaccttccaccagcttcctctacaaactccttgaagaggcctagaagccctaaaagagcttggcagcttcatcatcaactttcttcatgtgtttttaccaagcgcccagctccacctgcccaagggcctttctggagccttcctattgtcatgatcccgcgccctctgcagcaaggcatgaaggacctcaactgtcaccgctgccaggtctttcctgaccacctaccaccatcaccaccgtggactagaccattccttcacaggctctgctcaaatcctgactttgtaggaattctggtgataacagaaatgtagcctgcatgaaacagtattctaaatcactccgcaaatcatgtgacccgcaaatcattcatgacccgtctccccacgatctgcatctggcttgtttcctcatccctgacactcacagcaggatggagtttgagatcacctggcccaccctcccaggcccttgctgacaccattcccaccacctggagctctcttcccattcctacttaattcctacccaccctcaggtccagggaagccatgtctgaaagccttgcttcaaatctagagtaccgtcccatgatatactaactcaatgaccagatatttctcaacccttgtgggaaaagagtacataattgtcatttgtggcgtcctgccctgtccaccaatgcatcccaacacctgacacgaggccagcctgtaatgggtacttcccgctagggtgatctagagcagggtgatggaggatctaagcagcagccccttctctttttccttccaaactcaccagggccctcgatggtgacctggaggtcggtgaggtcctcctcgttgggaaagaccttgatgccatcgggtgggtctgcggtcagtgtcgtcacctccttgtacaccaggcggatgatgtgcgggggtaggttctccacgttggagttctgggcacggatgggagagcagggtgagcgagtgttaagagctgggcttcccgcagggcctaaagatgctgagactgcccaagtcttgactcagtggccccaggctgtcaatcacccttgaactcccagaccctcacccaggatgcttcaggccatcagcccaggcagagtttccaacagaaatgggggcgggttcacgggggggcttgcagataactccacccaccccagaaccccccccccaaagcccgctcctaaccctgcttggtccccagtggttccacgtaggccagagatctactctctcccccttctccactaatttttggttagagcatccttgaaaccccggctcaggtctggagatggcggcggggcgtccttgctcctggtaacacccatgggcgggccgcaaagcgcccggagccctcgccgccagggagactgcgggccgcccgagctcctgctccgcctgcgggaaggccctcgggcccatcccgggtcagggacccccaggctggccctcaaacccctcaaggccgcccgtcggaggcccctgagactccacctcctccctcagggacacccccgaccaccttcatgggcctcatcgcccgtgctcaccatggctgcggccggccgggggcgggtccccccggcccccttcctgcgttcttcggtccgccggccggggcggggggcccaactgctgccgctgcggccctggagaggccccggcggccccgctccgctccccgctgcctccgacgtccgccgcgcacagcgtagaccaacccgccgccccggtgcccggcagcactgagccggccgcgcgcgcaccactgcctctttataaccgcccgcaggccacgccctccgcggcccctcagctccgagcctcaaccgtgacgtcagcgcgcacgttccttggttttcgacgcgctcgctcccttccccgcaaactatggtcagaagcgagggaagtggcggagagggctgggtagcgggccggccaatgggggcccgcgggggtcgggagggttctcaaagaacggaggggctgaaaaggggaagaagagaggaagggggacggggaaggcgacgcggccgctgattggaccgtttgaatgagacgccgccacggcccggcatacgcgcgggcgcgccctgacgctgaggaagtcgcgcacgcgactaacggtcttcctgggggccggagcgtggcgaggggaggcgggactcggggttttaaacgcgtgatggaaggcgctcgggccaatagggatgcgctttagtgactggtgggtcacgagactcgcatgggccaatgactgatagagaccggtcagagggcgacccagtttcgtgcagatcaaaccgctgccagccaacgaaatccgttgatttttgtatatgcaaatgaagtgtgcgctgccgcccgcgccccctcctttgagccgtggtggaggtgggcgctggaactccgactacatttttctatgaggcgccattttgtgctggaaatgctcttggacccacgtcctgtattgctaaggctcaaagatcagtcagaatgaccttgaaggcttggacagccttgcactccgtgtgtgacccccactcctgccaggcttcatcgaagacgccagcctcagtttccttatgtgacaaatgggcactgggatccgttgtattgccagggaaagaagtcagagagtgccaagacggttattcacggcatggttatgcctatgactgacccatggcctccagccacacccgccttctctgggactcagtttccctctctaggaaatggacacatagctgcctggaaaagggaccatctccagccctcagtgtcagtaaaaacgtcaggcaattgcttgagaacggtggccagagctccctgagcaggccttttggaggggcttagagaggaggagggaatgctgaagttggccttcctttgctcatctgtgcagtgcggtcgcagtgccctctcggtgtctctgccagtctgtgcgtccacagctcttcttagtttcttggcctttttcagccatggatgagagcattaacatctgggcctaatttggccacaggtacctgaaaagacccctggctaccagcttcccctcatggggcctcagcttctgaagaaggaataaggaaggtgtgaaagaaatctacatggccaaggccaggcgtggtagctcacgcctgtaatcccagcactttgggaggctgaagctggcagatcacctgaggtcaggagtttgagaccagcctggccaacatggtgaaaccccatctgtactaaaaatacaaaaattagccaggtgtgttgatgcagccctgtaatcccagctactcgtgaggctgagatgggagaatcggttaaagccgggatgtggaggttgcagtgaactgagatctcgccactgcaccccagcctgggcaacagagcaagaccctgtctcaaaaaacaaaaaagcaaaaaaaaaaaaaaaaccaaaaaacaaaacctacatggtcgggtacagtgactacgcccataatcccagcactttgggaggccaaggtaggtcgatcacttgagcccaggagttcaagaccagcctgggcaacatagtgagagacccccaccaatatgtacaaaacaaacaaacccaaaacaactgaagaaacagctacagcataaaaagtcatcatcataactagtttgtggagaaatggcttcaggtgatcccttcctgctccctcaccccaggtccaatctataccagttcctgttgacgtcatctactgaatctcatcacgtccccccatccgctatgccaccagtcctgcttagagtcaacgtcatcccattttgccgataagcattttgctgatcttcaattttagcctgctgggtgtggaggattccaacccaattaacagacaaggaagctgaaggagcaggaggtaaagtgacttgctcggggttcccc

SEQ ID NO: 1561240 - DNA, 4001 bp, Homo sapiens
ggtctcagcccagggctaaggaagcccattttggaccaggccatttttatttggagagaaccaaaactttacaaaagaatttctggctgggtgcagtggctcacacctgtaatcccagcactttgagaggacgaagcaggtggctcacttgacgtcaggagtttgagaccagcctggccaacacgatgaaaccctgtctctactaaaaatacaaaaagttagctgggtgtggtggtgggcacctgtaatcccagctacttggaaggctgagacaggaaaatcgcttaaacctgggaggtagaggctgcagtgagccaagattgtaccactgcactccagcctgggcaacaagagcaaaactccatctcaaaaaaaaaaaaaaaagtttctgttccttctaggccaggcacagtggctcacggctataatcccagcactttgggaggccgaggcgggaggatcacttgaggccaggagtttgagactagcctggcatacatggtggaacctcatctctactaaaaatacaaaaactagcagggagtggtggcacacacctgtaatcccagctacttgggaagctgaggcagaattgcttgaacccgggaggtggaggttgcagtgggtcaagatcgtgccactgcactccagcctgggcgacagagccagactgtctcaaaaaaataaataaataaaataaaaattgtaaaaagtttctgctccttttgcacaatagatatgcctgagtctcaccccaccctgacctactgtccagcactcaggtggaggtcagtaataaatattttgaacttgaagtcaaactatttcaccaaccactctcctccccaaccaaataattacctagctcccattttctaagtgctcaccatgtgccacgtattaagttaaacacttaatatgcataagctcatgcagactttagttttgaacagataaccgaggctgggtatgtagatgcttcctcaaaaagtcacacaaaggatacagtcccccagagacacgtggtccttaaaaatcgtgtacctaagaaaaagagacatttcagagataaggctaaggaggctcttcagtctgtaggccaaatgaggtagccaagcctaagcaaagggctgcctgcagcgctcccccaaccaaaaccttccggcctagtccagtccacccagtggctctaccgctgcactcaccacttcttcaggacaatcttgttccaacgggtaccagtttgggctgcaatcagcttcttaaggtccccgatggtatcatccgtgctgggcgcagagcagttaaggcaaatggaagcggtagaacgaggaagaggacattctagggcagaataccatctgccaggaccccatccgccccctctcccgggtttaactaaaaccatccgacaacacagattgagttgcctgcctcacgccaagcacccctgcgggtaccactgcctctcggctgccagtggatacttgcatttaacgcggaccttcttccccagacggtcgttgcaaacaacctcgatcatcctagctggagctacacaaagcggggggtgggtgggaggcagcaaagtcagagcttcaggcgtctcccaggcccagaagccccagcctacaagtctcccagtcccaggccctaaaattccaggttactgagccttccgttctgcccccaaccccccggactcgaatactcccaggccccaagtcccctgtcccagggccgcgaaccccggggagccgcgcctccgccccttctcgccgcctgaaagccctgccacaaaactccctggcctcacctcccaccgaccccagaccctgggtggctgggtcgcgacagctttctccgactccgagcctctccgcttgaccccctcacctcgaatcgcctcgaacctgccgacgccaccagctcctcacccgagcgctgaaccccggtcgcagttaacgctaggaaccggaagcggaagttaaagttcgaggccggaagccctgcccctagccagggggtgtggtcaacactgggacaagttcttccgggtctgcagtctgtggtgtgtttgctgttcccaggtacggtttcggtgtcccaaggcttgacaggtgtcgcgcctgtggtaggcgcgccgggtagagaggggggcctcggcgggtttgtggccagggaaggggcgtggagcgagagtcagaggtcaggcgccggcgcccagctcgtttgaagtcattgtttgttgcagggagactcggtcacatggtggggacgccagagggtcccgggagtaggggtaagctcctgatcctgagcccgaagcctcttgcagcggcaactaggagcaagggcggagggtgggggtgggggacgagttctgcagtcatcccttctgaccccctgggttcattcagggctgggcttggtgagcatttggctcacctcttccctctggccatcgcgttcccccgggatacggactccagtcagtaggcgaagcttgatcctagagtagactctacgctgcccaacagctgctgttaccgcatggtgccggacagttccaggctcttggtgtcctgaagaaagatttggaccagacacacagagatggcaaagctgcaagtttattaagcacagtattccactctcggagtggggagagcggactgacctctgcgagataagatcagccccagcttggtatagtttgggtctttttttttttttttttctgagacgtagtctcgctctgttgcacaggctggagtgcaatggcgcggtgccggctcaccgcaacctccgccttccgggttcaagcgattctcctgcctcagcctcccgagtaagtagctgggattacaggcgcccgccaccacgcccggctaatttttgtacttttagtagagatggggtttcaccttattggccaggctttttttctcttcccaaggctgcctaatatctagccagtgtctacctttttgaatgataggtgtgttgcttactttggcccctgtgtgcttgagagccgcctccattcatgatatgccgtccatatgcatgagcgctaatgagctggttatccttatcatgttaaggatactttttgtctttaatgcgcgtgcttatgcctaaagagctgctccttactggtttggtcctgatttccccggccgtgggatttttactgttttttttttaattttatttatttatttatttatttatttatggagtctcgctctgtcgcccaggctggagtgcagtggcgtgatctgggctcacggcaagctccgcctcccgggttcacgccgttgtcctgcctcagccgcctcccgagtaacagggactacaggcgccccccaccaccctcggctaatttttttgtatttttagtagagacggggtttcactgtgttagccaggatggtctcgatctcctgacctcgtgatccgcctgcctcagcctcccaaagtgttgggtgtgagccactgtgcccggcctttactcagtttttaatcttccttttgttttgtctcctcagcttctgccatttatcttgcttcttgctgggtgagcaagaaggggcgggtgccctttcaccttgcttctgctctctgcttttacgtattttaccctttatccaacttttaattccctttgctattcttctgcctcattttccctattctcctttctcactgccagtcaccaaccttaaatgcctgcgaggtaactggaaacattgcacatttgcacaatctcctgcagctgtatctttggggagcactttgtaccagattccaggtttgtgagggctggtgggacaaggaccgtccttcctcaattcagtcaaacaatttgtaaaccaaaaagtatctgagacaggtctcaataaattgacaggtttatgtagacaaggttaaggacaagcctgggagaaaaggaacacaaaaccccaggaacaatctgtgatccgtgcttttttcca

SEQ ID NO: 1561241 - DNA, 4001 bp, Homo sapiens
caggtggcctgaggtctcagcccagggctaaggaagcccattttggaccaggccatttttatttggagagaaccaaaactttacaaaagaatttctggctgggtgcagtggctcacacctgtaatcccagcactttgagaggacgaagcaggtggctcacttgacgtcaggagtttgagaccagcctggccaacacgatgaaaccctgtctctactaaaaatacaaaaagttagctgggtgtggtggtgggcacctgtaatcccagctacttggaaggctgagacaggaaaatcgcttaaacctgggaggtagaggctgcagtgagccaagattgtaccactgcactccagcctgggcaacaagagcaaaactccatctcaaaaaaaaaaaaaaaagtttctgttccttctaggccaggcacagtggctcacggctataatcccagcactttgggaggccgaggcgggaggatcacttgaggccaggagtttgagactagcctggcatacatggtggaacctcatctctactaaaaatacaaaaactagcagggagtggtggcacacacctgtaatcccagctacttgggaagctgaggcagaattgcttgaacccgggaggtggaggttgcagtgggtcaagatcgtgccactgcactccagcctgggcgacagagccagactgtctcaaaaaaataaataaataaaataaaaattgtaaaaagtttctgctccttttgcacaatagatatgcctgagtctcaccccaccctgacctactgtccagcactcaggtggaggtcagtaataaatattttgaacttgaagtcaaactatttcaccaaccactctcctccccaaccaaataattacctagctcccattttctaagtgctcaccatgtgccacgtattaagttaaacacttaatatgcataagctcatgcagactttagttttgaacagataaccgaggctgggtatgtagatgcttcctcaaaaagtcacacaaaggatacagtcccccagagacacgtggtccttaaaaatcgtgtacctaagaaaaagagacatttcagagataaggctaaggaggctcttcagtctgtaggccaaatgaggtagccaagcctaagcaaagggctgcctgcagcgctcccccaaccaaaaccttccggcctagtccagtccacccagtggctctaccgctgcactcaccacttcttcaggacaatcttgttccaacgggtaccagtttgggctgcaatcagcttcttaaggtccccgatggtatcatccgtgctgggcgcagagcagttaaggcaaatggaagcggtagaacgaggaagaggacattctagggcagaataccatctgccaggaccccatccgccccctctcccgggtttaactaaaaccatccgacaacacagattgagttgcctgcctcacgccaagcacccctgcgggtaccactgcctctcggctgccagtggatacttgcatttaacgcggaccttcttccccagacggtcgttgcaaacaacctcgatcatcctagctggagctacacaaagcggggggtgggtgggaggcagcaaagtcagagcttcaggcgtctcccaggcccagaagccccagcctacaagtctcccagtcccaggccctaaaattccaggttactgagccttccgttctgcccccaaccccccggactcgaatactcccaggccccaagtcccctgtcccagggccgcgaaccccggggagccgcgcctccgccccttctcgccgcctgaaagccctgccacaaaactccctggcctcacctcccaccgaccccagaccctgggtggctgggtcgcgacagctttctccgactccgagcctctccgcttgaccccctcacctcgaatcgcctcgaacctgccgacgccaccagctcctcacccgagcgctgaaccccggtcgcagttaacgctaggaaccggaagcggaagttaaagttcgaggccggaagccctgcccctagccagggggtgtggtcaacactgggacaagttcttccgggtctgcagtctgtggtgtgtttgctgttcccaggtacggtttcggtgtcccaaggcttgacaggtgtcgcgcctgtggtaggcgcgccgggtagagaggggggcctcggcgggtttgtggccagggaaggggcgtggagcgagagtcagaggtcaggcgccggcgcccagctcgtttgaagtcattgtttgttgcagggagactcggtcacatggtggggacgccagagggtcccgggagtaggggtaagctcctgatcctgagcccgaagcctcttgcagcggcaactaggagcaagggcggagggtgggggtgggggacgagttctgcagtcatcccttctgaccccctgggttcattcagggctgggcttggtgagcatttggctcacctcttccctctggccatcgcgttcccccgggatacggactccagtcagtaggcgaagcttgatcctagagtagactctacgctgcccaacagctgctgttaccgcatggtgccggacagttccaggctcttggtgtcctgaagaaagatttggaccagacacacagagatggcaaagctgcaagtttattaagcacagtattccactctcggagtggggagagcggactgacctctgcgagataagatcagccccagcttggtatagtttgggtctttttttttttttttttctgagacgtagtctcgctctgttgcacaggctggagtgcaatggcgcggtgccggctcaccgcaacctccgccttccgggttcaagcgattctcctgcctcagcctcccgagtaagtagctgggattacaggcgcccgccaccacgcccggctaatttttgtacttttagtagagatggggtttcaccttattggccaggctttttttctcttcccaaggctgcctaatatctagccagtgtctacctttttgaatgataggtgtgttgcttactttggcccctgtgtgcttgagagccgcctccattcatgatatgccgtccatatgcatgagcgctaatgagctggttatccttatcatgttaaggatactttttgtctttaatgcgcgtgcttatgcctaaagagctgctccttactggtttggtcctgatttccccggccgtgggatttttactgttttttttttaattttatttatttatttatttatttatttatggagtctcgctctgtcgcccaggctggagtgcagtggcgtgatctgggctcacggcaagctccgcctcccgggttcacgccgttgtcctgcctcagccgcctcccgagtaacagggactacaggcgccccccaccaccctcggctaatttttttgtatttttagtagagacggggtttcactgtgttagccaggatggtctcgatctcctgacctcgtgatccgcctgcctcagcctcccaaagtgttgggtgtgagccactgtgcccggcctttactcagtttttaatcttccttttgttttgtctcctcagcttctgccatttatcttgcttcttgctgggtgagcaagaaggggcgggtgccctttcaccttgcttctgctctctgcttttacgtattttaccctttatccaacttttaattccctttgctattcttctgcctcattttccctattctcctttctcactgccagtcaccaaccttaaatgcctgcgaggtaactggaaacattgcacatttgcacaatctcctgcagctgtatctttggggagcactttgtaccagattccaggtttgtgagggctggtgggacaaggaccgtccttcctcaattcagtcaaacaatttgtaaaccaaaaagtatctgagacaggtctcaataaattgacaggtttatgtagacaaggttaaggacaagcctgggagaaaaggaacacaaaaccccaggaacaatctgtgatccg

SEQ ID NO: 1561242 - DNA, 4001 bp, Homo sapiens
agacaacaccgtgttccaccacaacctgtgtccaccttgcaaggcaaggttttccaacagcccttgagccccaagggcagaggccacatctcccccgtgacacagtcaagctgtccccaccccttggcatgggacagtgccaccagtggctgttcttaccacgttggtccctggggcctcggggctcccgctgacggtggcttcggcttgaagttcctttctcactggaaggcagcccaagaaagagaggcagagacgggatagtgagcacgccgctgtcctggcccaagccccctcattcccggggtgggcctgggggccacgcacaccgccccagcctgcttctgctggaggtcaggctggaggtcccctgcaggacttgctgtgcagccacccctcagcctgagcaagcaccccactgcctgggcagcccgtttctgctccaagtctctgctcccaccccctccccaggaagctgcccttcccccagcacctgcccttgatgagccgctcccaagggtgaccctcacacccccacggttgctcatgtgacttctgcatccagggccaggcaccagggccgagaacctcaaacagccccaacctgggcccgaggagggccatatctcaccctggtttcggatggtgtcctgcgatgtggggccccaggcccgggactgcttctgctccagccgggctagggcggcagcggctgccatctgtgcctcattggtgggtccctggcggggcggcctgggggctggctggttgggcttctctttgtgggccttttccctgggaacagaccgagggagagtgagtgtatcctcccgaggtggccggcaaagctgacgtgcagtcacacagaggagcttctgcccctccccagcaccatcagccagacgtgtccctgcctatgtgggccaggacacctggttcccaggggccacctgcagccaccagatggttctactgcaggcggaagagcccctggaggaaggagatgctggttccactcagctctgcaccatcgggcaagtcctgcccccactggccctcagcgtcctcatctgtaaaatggggtgacagcacccctcctgaggtgaaggcaccttgacatcctcagtgctttttttctttttgagacagggtcttgctctctcaccaaggctggagtatagtggcacgatcatggcttactgcaatcctgagctcccaggctcaaggaatcctcccgcctcagcctcccaagtcgctgggacttagaggcaagcatcatcatgcctggctaatttttctatcgagacagggtctcgctatgtagctcaggctggtctcgaacttttgcctcaaatgatcctcccaccgtggcctcccaaactgctgggattataggcatgagccacagcacccagcccgcatcctcaggaattgaggagactcaaggggtgtcacatcctccctccctccctgccataagactctccaccctcaggtcacagcttcgtttgctgagcacctactgtgtgccaggaccctgctgggagctggtcggctcgcttggtttactcctcctaacaagctgccagggaggcctcaccatcccattcctaaacccaagagggacaggaagtccgggcgatgtgccccatgccacgccaccctcgtggcgggaccctggggagagcggacagcagaaccagcctcgccctggccactccatgccaggcctagggctgtgcaagtacgaagagctcatggactcgtggctccaccctgttgagccctacaccaaggagagttccgtaacccacgtggcacagtgacctggcagagaagcctcgcagagaagccctttctcccaacctgctcggacgcgtctgtctcacccgtctcctctcaggcccctcccatgaacttacgggctgtgtcaatttctgtgccgtaggtctattaaaaccttctgggaggccaggctctcagttcaagccctatactcctctggctctgcttacatacccgggcagccctccctcctcgtcccacccctgcctatctagtcctcccacagctgagcatcttgggtggaagaggagatgactcatgaagacccaccccggcctcatccgatatctgggtctttccaacaaaatgccatttcccagggcacctcaccccaaccagccatggaccctgcccccctgggcagccacagggacccttctggaacctcagccagggagcgtcagcatcactccactgcacaacgccctcccactgcaaaatcctaaagcttcccttggccagagagcccttcccagcctggcccactgccctcccgtggcctgtctcccctgggctccccgcagttcttcccacaccccagctgctccccactgcaggcccctgcactgtctgcaccttctgcccagaatgttctccgggggagtgggaggaggatgggggtctggaaagggctagagctgccgcagggagagaaggaggggcagatttccccacagctgagtctcactgtgtcctgggagaggccttcccaaaccacctgacggcccctgctcaccctccttggaggccctgggcactcatccaagcactcatcgcctgagcgctcatccaaggtctgttggtttatttgtccatcggctccctctagaaggtgagccctgggacagcagaggccttctcctgtccaccactgcagcctaaaacaggacttggtgcccacccaccccacacaccctggatatgcagtctcgctccacaagggacctccgcaccgcttcctttcccaaccttcccctccaaccttcccctctccgcccaggctctgggctgatccagccatcaccccgataccctgcatccttcctatcatgcccagtcccagtggccccagcaccccccacccactattggttgaatcaatgaagggctcccccgatttgcccccttctctccctgacccctctccctccctcactcagcctttgctctcctgctctcccccaggaaccctgacgtcctcactatgcccctacctccatcaccaccccactgccccgtgattcctgacccccacttcctgccacctccctgcctctcccagcccccactccctcacaatcccttccactattgcttacagacccgtgtcctggctgcctggctgacttcctcagtccctctccatcagtccccaccaccctctggccagccagctccctgcagcggccccagctctccagtttcccttttctcaacccaacagccctcagccttgcaccttccctagctccacttcttccccggccctcccagctggctcagccctgctcaggcccttctctccaagtcctccctagacaatccggaagcctgcccggcatctatctcctttcccctcctctcccacttccataatccacttggcacagtgacgtggcagagaagcctcgcagagaagctctttctcccagcctgctaagacgcgtctgtctcacccgtcttctcctctcaggcccctcccgggtaagagtccatctgtcagaatccctcacctccactctcctcacacaccttcctcagcccctccctctcaattcgccaggacatcccaggtcactgacgacgctgcccaccccggcctccctggccttccagactctttctagtctcccatcagcctcccacgtgctccagataccaaatccagaacccctcttcccatggatacctcaaaacaactcttcaccaccccaccccacagctgtgcgtcctcctccaagctcagctcccatccatggtcacctagattgccccaaatcatcccggcctcttcggccagccgggtccccagacagagctctccctcaccacccggctcaggactcatgatcccgtttttccccaaaggtcgttccactgacccccaactgcctacagccccgtcgccctaatcccccgccactgcatcggaccct

SEQ ID NO: 1561243 - DNA, 4001 bp, Homo sapiens
agaaggaggggcagatttccccacagctgagtctcactgtgtcctgggagaggccttcccaaaccacctgacggcccctgctcaccctccttggaggccctgggcactcatccaagcactcatcgcctgagcgctcatccaaggtctgttggtttatttgtccatcggctccctctagaaggtgagccctgggacagcagaggccttctcctgtccaccactgcagcctaaaacaggacttggtgcccacccaccccacacaccctggatatgcagtctcgctccacaagggacctccgcaccgcttcctttcccaaccttcccctccaaccttcccctctccgcccaggctctgggctgatccagccatcaccccgataccctgcatccttcctatcatgcccagtcccagtggccccagcaccccccacccactattggttgaatcaatgaagggctcccccgatttgcccccttctctccctgacccctctccctccctcactcagcctttgctctcctgctctcccccaggaaccctgacgtcctcactatgcccctacctccatcaccaccccactgccccgtgattcctgacccccacttcctgccacctccctgcctctcccagcccccactccctcacaatcccttccactattgcttacagacccgtgtcctggctgcctggctgacttcctcagtccctctccatcagtccccaccaccctctggccagccagctccctgcagcggccccagctctccagtttcccttttctcaacccaacagccctcagccttgcaccttccctagctccacttcttccccggccctcccagctggctcagccctgctcaggcccttctctccaagtcctccctagacaatccggaagcctgcccggcatctatctcctttcccctcctctcccacttccataatccacttggcacagtgacgtggcagagaagcctcgcagagaagctctttctcccagcctgctaagacgcgtctgtctcacccgtcttctcctctcaggcccctcccgggtaagagtccatctgtcagaatccctcacctccactctcctcacacaccttcctcagcccctccctctcaattcgccaggacatcccaggtcactgacgacgctgcccaccccggcctccctggccttccagactctttctagtctcccatcagcctcccacgtgctccagataccaaatccagaacccctcttcccatggatacctcaaaacaactcttcaccaccccaccccacagctgtgcgtcctcctccaagctcagctcccatccatggtcacctagattgccccaaatcatcccggcctcttcggccagccgggtccccagacagagctctccctcaccacccggctcaggactcatgatcccgtttttccccaaaggtcgttccactgacccccaactgcctacagccccgtcgccctaatcccccgccactgcatcggaccctcctgcggccccgcccccgagacctcccctcccgccccgccccctgcgctagttcccctcccctcgcctcccccgccgcgcccccgggtcatacccgccccctcctgccccgcccccagatctctctcccctccccctgacgcccaccctcggcccgacttcgtccgcccccggcgcctctccccctcccctgaccctcgcgtgccgctcccagcccctcatcctctccgatctcccgagccgcccaaggccccagatctctctccccggccgtccccgccccgcagggcctcaagcccctgcgttcctcacgcaccccacggactctttgagcttctgaccgggtcccgcgctcttgaacttgatgtcggccttgaactcctgaaagaatttcttcatggtggcggctggcccggcggcggggggccgcgggggcgggggggcacggggcccagtcggggacggggccgccggagaccagccaccggaagaaaattaaaaaaaaaaaaaaaaaaaaaaaaaaaatttacctcgccgccggaagtcccgccttcccctggcctgccacgtgacaatcgactagacgtgcctctctagcgctcggtgccttgctggcccagggcggccgctctgtacgctggagccgcgtctctgtggttcttccggactccgttgccagggcgacgagtgcacctctcgattggagacagggcattccgtggcgctccccaaacggtgacaaacggtgataggacagggacaggccaactgaacctcgcagagaaagcactgggccctatccctttcgctgctcaacctaaactaggcgcggtggctcacgcctgcaatcacagcactttggaggctcaagcggaaggattgcttgatcccagaagttggagaccagcctggcaacatggcaaaacctcgtctctataaaaaaaaaaaaaataaaataaaataaattagccgagggtggtggcgcgcgcctctcagctacttgggaggcagaggcgggaggatcgcttgaacccaagaggtcgaggctgcagtgagctgtgatcaagccactgcattccagcctgggcgacagagagagaccctgtctcaagcaaaacaaaaaaaattccaaccttctctgtctccccagagcttacgtgataaaatcccaattcaatgttgggtattggaggcccccacgatctggcctgttttggtgcctgaagcacccccccgccaccatcaccacgtaccctaggtaggagctgtttaagaggatgcacctgggccgggcgcggtggctcatgcctgtaatcccagcactttgggaggccgaagcgggcggatcacaaggtcaggagatcgagaccatcctggctaacacggtgataccccgtctctactaaaaatacaaaaaattagccgggcatggtggcaggcgtctgtactcacagctactcgggaggctgaggcaggagaatggcgtgaacccgcgaggcggagcttgcagtgagccgagatctcaccactgcactccagcctgggcgacagagcgagactccgtctcaaaaaaaaaaaaaaaaaaaaaaaaagaggatgcacccaatgcacccaattgggacctggggattggggatccactttggtggacaccagttaatagtggcgtactttggtctgtgcaatccacaaagaagatacacaaagtgacagttaaaacaagcctcaaaaaatgggagttgggggtcagacgtggtggctcatgcctctaatcccagcactttgggaggccgaggccggcggatcacttgaggtcaggagtttgagaccagcctggccaacatggtgaaagcctgtctctatgggcaccggtaatcccagctactcgggaggctgaggcaggagaatcgcttgaacccggcaggtggaggttgcagtgagccgagatctcgccattgcacttcagcctgggcaacagagggagactctgcctcaaaaaagaaggagttggaatgagatacacagagactgatggaggagaagcctccaggtgaggaaacagcccaccccaagactgaaattgaaatatcatgggttggacgggtggctcaggcctgcagtcccaacattttgggaggccaaggtgggaggattgctttagcccaggaattggaggctgcagtaagctaggatcacgccactgcactccagcctgggcaacagagccagaccctgtcttattaaaaaaagaaaaaaaggccaggcacggtggctcatgcctgtaatcccagccctttggaaggccgaggcgggtggatcacgaggtcaggagattgagaccatcccggctaatacggtgaaaccctgtctttactgaaaataatttttaaaaaaattagccagccttggtggcgggcgcctgtagtcccagctacttgggaggctgaggcaggagaatggcgtgaacccaggaggcagagcttacagtgagccgaga

SEQ ID NO: 1561244 - DNA, 4001 bp, Homo sapiens
taaaaaagaaaacctggtcccctccgtcctagctaccagatggtcctgggccctttctcgaaaattcctcagccttccatcggccacctccaaaacttctttctctagccattattttgaggcggagctttgaaaaaagaagtttaaaagcccagaccctatagattcgagggccagccgccagcccagcgtgtcaatctgtgagtcctccctttgttccttcctctcgcaggcatttgaggtttctgtggacttctccttccgggagagatgaagtgggaccggacgaggttgttggggggggaggtgggagggagaaagtatcggctggtggctgcagaggcgcgaggcctggaccaggcatagaacaaaggtgctggcggcgggtgtacctgtttgcccctgtagaacagcctctgcaggcctggctccacgtggaacagctcctggatcttccgcctcagctcctccaccttggtcagcctggacagcgagtccaccgtgtgggtctgcctcccgtccatggtccgaacctggatccacatggtgtcggcgctgaggggagggacagcaaaaacccccatcagttttaccagcacctctgagccatgccatgctctaaggagtcggggttgcttttgtccggcctgtggacaccaggaaactcccaggatgcccttccagtcctcctgtacagccagaccctggccaggaccagacacaacaaattaagcacttaaggcattaacgactagccaagtgttgaagattgaggaggaaggagaatgaaaagagggaattgaaagaaaagcagaaggtccaacccatccctccttccccacgaccagaggagaaaggaggcccgggccaagtggccgagttggttcgtttattcattcattcattgattcattcattcctcggattcctatttacggaagagggaatcccagaagtccagcgcgggccggaacttcagaagtcccgggggaactcaaccaagtgccactgagagggaaaaaccccacccgagatccgcggaccccgggacccctcggtgcccacgccccccctccttgccggccccccccgcgcgcgtgcgcgaccgggcccgccccgcggtggccatggtaaccggccgccccgtcccggccacccgcgagcgcgcgcgccccgcgactcacctcgacctccaacccccggcagctcgcgcccctccaaaccctggaccctcggcgtccctcccgcactcccactggcccgcgcgggtcgcgccagcgagcccacgcccacccccgccgccgggactacagagggggcccccgctcgtcaagtcccgccccccttcacttgagccgcctcttattggctccgcagcacccggccgccccgccccgctcgctccccattggcccagatgctcccggggaactcagggcgcgcgaaatcgggctcgggcgcgacaattgaatcgcggggcgccccgcgcgcaggcgcggagcctgacatcctccccggcggctcgccaggccctcccccacccggcgcgctcgaccccccgccgggctccggggacgcagcgctggtcccggctccagccggatgtgtgccggggaacgattcccgagggttaggtggaaggggaggccctggatcccgggacagagtgcgggacatgcgtgcgcccgggctggccgcgcgggaaagttttgcaaagttcccgagccccgtgcgcccggcccgggctggcaccccgacccggcccgcccgctcacctctccggtcgccgcgaacagcttgtctgcctgcgcgcgtggcccggctggggatggcgatgaaaccgcgtgcgtggcccggaccccgcgcggacttgcgtgcgacccggagcgcccgctcggcaaacgctgcccgccgcgctgccagctgctctgatttttttcccgcgaaaactcggcatttgggagttgcggggccgcaggaggccgtgccgggggcgggcgcctgcctcctgattggccgacgcagtggcgggaagcgagaaagagggtggggggcgcccccgcctctgtccacggcgcctccgcctagtgggccacggctccgcccagccctgcgcgctctgctgggcgcgcccagcgtgcaaaggggctgcgtggcagggcctggtcaccccccgcacgtggacaccccaggagccttggggacccccagggtacagaccccctgaactcttaagtccaagtccgttcgcagccccccactcgcacgcattgaccagtaggtctaagaaggccggaatcaatgtgtaaatactgcgagggaatgtggggggcccctaggagaccacctgcaccctgatggctcgcccgatcgccccaagccccactgcctggcgtcagggcctgccagggctccccactctacccacccgcagggcttgtttgctgtcttttcccgcctcgttttcccgccttctccaggctgtccaggcgggcagggctgccctgccccctccgccctgtctgttccactctgaccagtcctggcgggcacaggagtgacctgtgctgggcacctacaaagcagccggacaggttgctcagagctgcagaacccagcggtgtacatggcagacccagttggtggtctcagggagggaaaattcctatctgggggagacaggcaagaaatgaataactaaagcagataatttcagatgattccttataggagagtgaccagcagccatgtggtgggaggcggggagagaggatactctctcactggggccactgcggtgggcctctcagagaagatgacatttgagctggaatcggagatgagactccaaggacagatgggtctaggagggaaagtcaaacccagaggccggaaaaggcttagaggtgtccagggagcaggaaggggctggtgtggttggggcccactgagcaaaggggagggggagttgaggtcagaggggtgatatataataccttgaaggccaccggggaggactttggtctttcccttgagagctgtgagcagaaaaatgttgagttcccacttagctttttacagtttcttcgtcactctattaagtctcctctatctggtcagtgggacttctgctatgtccctaatataggagacagatcatggcccccgaagatatgcgtctctagacccccacgtcctcgcccccaggatctgtgaatacagtgccttacacagctaaaaggactttgcaactttgcaggtgtgattcagttaatgattttgagttggggagcgtctcctgggtgatccaggtgggcacaatgtccttaaaaggtcctaataagtgaaaaagggatacaaaaggtcaaagtcaaaggagatgggaaagtggaagcaggctttacaatgatcaggccaagggccgggcgcgttggctcacacctgtaatcccagcactttgggaggccgaggcaggcagatcacctgaggtcaggagttcgagaccagcctgactaacatggagaaaccccgtttctactaaaaacacaaaattagcctggcgtggtggcacatgtctgtaatcccagctactcgggaggctgaggcaggagaatcgcttgaacccaggaggcagaggttgtggtgagccaagatcgcgccattgcactccagcctgggcaacaaaagcaaaactcagtctcaaaaaaaaaaaaaaaaaaaaaaaaagatcaggccaagaggcaaggaagatgggcagcctctggtggctagaaaaagcaagaaagactcctagaacccgccctgcccctaaaatttatttcagacttctgacctcccaaactgtaagatgataaatgtgtgggccgggcgtggtggctcacacgtgtaatcccagtactttgggaggccgaggcaggcagataactggaggtcaggagtcgccagactagcctggtcaacatggtgaaaccccatctctactaaaaatacaaaaattagcc

SEQ ID NO: 1561245 - DNA, 4001 bp, Homo sapiens
attccatcctgggccaaatgtggcccgtgggtcaggggttggatgagcttgacttagggaaataagaggccaatgcccacaaaagctatcacataaaataatgcaagatacagccaagacaagaaataaggcctgccaggctagagaatgggtacttcctagcccctcctatgattcaatgtccctccctctcaggcaccagaccatgtgcaaatcaggtgccaggaataattgttagagtgcaaagggcttcagtttcccttttgcaaaatgatacattctcagaggtcattaagtcattcaacaaacttttattgattccaccccccacacccactcctggctgagccagatcctgcctgggtcacgcagacattgatgggcacaaagttcacttagacaaggtctcaccctggagggacttcccatccaatgggggagatgcaggcataaagagaaatgtcagccaggcgtggtagctcatgcctgtaatcccagcactttgggaggccaagtgaggcgggtggatcatgaggtcaggagttcaagatcagcctggccaagatggtgaaaccctgtctctactaaaaataacaaaaattggctgggtgcggtggctcacgcctgtaatcccagcactttgggaggccaaggtgggcggatcacgaggtcaggagattgagaccatcctggctaacatgatgaaaccccgtctctactaaaaatacaaaaaattagccaggcatttgtggcggacgcctgtagtcccagctactcgggaagctgaggcaggagaatggcatgaacacgggaggcggagcttgcagtgagccgagatcgcaccactgcactccagcctgggtgacaaagtgagactccaatctcaaaaaaaaaacaaaaacaaaaacaaaaagaacaaaaattagccgggcacgggggcaggtgcctgtaacccccatgcccgtaatcccagctacttgggaggctgaggcaggagaatcgcttgaacccagggggcagaggttgcagtgagccgagatcacgccactgcactccagcctgggcaacagagtgagattccacctcaaaaaaaaagagaaatgtcaatcatgcagggagttgctgcttcctgatggtgtcgatgttcagattaagcacacactgccctgatcaacttcagtgcgcaccagatttcaggtcctggccatatctctatgttttttccaatatagaccaatataaatgtagagtctttaagatgaaaatgagtgtgtatgcacctgggcacagtggctcacaactgtaatcccagcactttgggaggccaaggcaggcgaatcatgtgaggccacaagttcgagaccagcctggccaacatggtgaaaccccgtctctactaaaaatacaaaaattagctagttgcagtggcacttgcctgtaatctcaggtacttggggggctgaggtgggagaatcgctggaacccaggaggcagaggttgcagtgagccgagatcacaccattgcactccagtctggctgacagagtgagaccatcacaaaaaataaaaataaaataaataaaaataccaaaaaaaaattagcaaagcatggtgatggtgcatgcctgtaattccagctactcaggaggctgaagcaggagaattgcttgaacccgggaggcagatgtggcagtgagccgagatcgcgccactacactccagcctgggtgacagaatgagactttgtctcaaaaaaagaaaaagcccaggtgcagtggctcacgcctgcaatcccagcactttgggaggctgaggtgggtggatcacgaggtcaggagatcgagaccatcctggccaacacagtgaaactctgtctctaccaaaaaattagctgggcatgctggcatgcacccgtggtcccagctactcaggaggctgaggcaggagaattgcttgaacccatgaggcggaggttgcagtgagccaagatggcacccctgcactccagcctgggctacagggtaagactccatctcaaaaaaaaaaaaaaagaaccagtgaggactacaggtttcccaatcaaccacccaccctaaacaacagttttgcctcccctcctggccactggggtccccacttcccggaactctgagctgagtgatgtcatagatggattacctcactagggccaacgaaccgggaatttcagggacatgggggacagagaggaatgtctctctaccccccaaccccccatgtctgtggtgaagtcgatcgaattagtgctgcccgaggatagaatctacctggctggctccagcataaaagggcaggtgatcttaaccctgaacagcaccctggtggaccccatagtgaaggtggagctcgtgggaaggggttacgtcgaatggagtgaagaagccggggcatcctgtgattatagcagaaatgttatttgcaacaacaaggcagactacgtgcataagacaaagacattcccagtggagggtaaggacgaggccaacagccacccctagccatgacaggaacctgggtctggaaaataaacacatccgagagtcaatcaacaaaactctagggctatcagaaatagggagtggcctgatttctccctaggagggaggccatgaagaacaatgaccatcagatacacaaaacgcaaaaataacaagacataaggagctgatcggaaccccgatattcaaaatgaaggttcaaagtagtctccttggaaaatgctcaatccaacaactgcctttgagaggcctctgagaagtcttattcttttacagataagtttcactctgacagcaaaaccccaggagacaaagtaggcagtcctgcattcatggggagagacagtggaggtgggccaggcacagtggttcatacctgtaattccagcactttgagaggccgaggcaggtggatcacttgaggtcaggagtttgagaccagcctggccaatatagcgaaaccccatctctaccaaaaaataccaaaaaattagctgggcgtgctggcacgtgcctgtaatctcagctacttgggaggctgaagcaagagaatcacttgaactcgtgaaggggaggttccagtaagctgagatcgcaccacagcacgccagcctgggtgacggagcgagattccctctcaaaaaaagaaagatagtggaggtagaagagcaagggagaccttccagagaaggaataactagtccccagttccaccaggtcagatctgaaatctgaacaaatgtcagagagtctgctgagttgtcggggaaattatatgtccattgcaaaatgtgtttgtggggatattcccaggtattaagcagtcaagcagaacacgtggccaacacttggctgaacaaagtgtaatttaatttaatttatttctgtatttatttatttgtatcttatttatttatttatctattttttgagacacagtctcgccctgcttcccaggctggagtgaagtggcaccatctcggctcgctgcaagctccgcctcccgggttcaaacgattctcctgcctcagcctcctgagtggctgggattacaggcacccgccaccatgcccagcaatttttggtatttttagtagaggcagggtttcaccacgttggccaggctggtctcgaactcctgacctcgtgattcgcccacctcggcctcccaaagtactgggattacaggcatgagccaccaggcctggcttatgtatttatttttgagacagggcctcgctctgttgcccaggctagaggccagtggtgtgatcaaaactcactgcagccccagcctctctggcataagcgatcctctcacctcagcctcctgagtagctgagaccacaggcacatggcaccatgcttggctaatttttgtttattttttgttttcgtttttttgagacggagttttgctcttgctgcccaggctggagtgcaatggcgcaatctcggctcacc

SEQ ID NO: 1561246 - DNA, 4001 bp, Homo sapiens
aggtctcctatggcatgcaagccagagaaattaatcatcaggtctcatctggagtgagcaggcatgatcctcccagcccccaaaaacccctggccgggcgcagtgtttattttccaacctagacaccagatggcagcagtacccggttcaaaatccaacaacaacacagtggggtacacgcagctcaactgacgacttttaatccagttccagtagtctacgcccgtccccacggtccaaccaactccagcagatgggacctacaccttcgatcacactgtctcatcctgccgggaaaccccactcccagtaggtcccacagtcccccacaaaaacaccaaccaaagtagcacctccacccccaggtgccaatggagggagcgccccaaacgtggcagctatgaaatcaaagggggacattttaaatgcaacgaggggctggagacagaacagagaaagagacgagggtcggtggacccctcggggaccacacgccccaggtcagcagcagccgcagcacagcaggctcagggtggcggaaattcctgattagcaagcgccatctccagactctgaataagctaatccaaatttttagaaacaaacactcgcagggtctgatgcttaaccggtacaggctgagagcaattggtggtggatgtttaaaaaagaaaacctggtcccctccgtcctagctaccagatggtcctgggccctttctcgaaaattcctcagccttccatcggccacctccaaaacttctttctctagccattattttgaggcggagctttgaaaaaagaagtttaaaagcccagaccctatagattcgagggccagccgccagcccagcgtgtcaatctgtgagtcctccctttgttccttcctctcgcaggcatttgaggtttctgtggacttctccttccgggagagatgaagtgggaccggacgaggttgttggggggggaggtgggagggagaaagtatcggctggtggctgcagaggcgcgaggcctggaccaggcatagaacaaaggtgctggcggcgggtgtacctgtttgcccctgtagaacagcctctgcaggcctggctccacgtggaacagctcctggatcttccgcctcagctcctccaccttggtcagcctggacagcgagtccaccgtgtgggtctgcctcccgtccatggtccgaacctggatccacatggtgtcggcgctgaggggagggacagcaaaaacccccatcagttttaccagcacctctgagccatgccatgctctaaggagtcggggttgcttttgtccggcctgtggacaccaggaaactcccaggatgcccttccagtcctcctgtacagccagaccctggccaggaccagacacaacaaattaagcacttaaggcattaacgactagccaagtgttgaagattgaggaggaaggagaatgaaaagagggaattgaaagaaaagcagaaggtccaacccatccctccttccccacgaccagaggagaaaggaggcccgggccaagtggccgagttggttcgtttattcattcattcattgattcattcattcctcggattcctatttacggaagagggaatcccagaagtccagcgcgggccggaacttcagaagtcccgggggaactcaaccaagtgccactgagagggaaaaaccccacccgagatccgcggaccccgggacccctcggtgcccacgccccccctccttgccggccccccccgcgcgcgtgcgcgaccgggcccgccccgcggtggccatggtaaccggccgccccgtcccggccacccgcgagcgcgcgcgccccgcgactcacctcgacctccaacccccggcagctcgcgcccctccaaaccctggaccctcggcgtccctcccgcactcccactggcccgcgcgggtcgcgccagcgagcccacgcccacccccgccgccgggactacagagggggcccccgctcgtcaagtcccgccccccttcacttgagccgcctcttattggctccgcagcacccggccgccccgccccgctcgctccccattggcccagatgctcccggggaactcagggcgcgcgaaatcgggctcgggcgcgacaattgaatcgcggggcgccccgcgcgcaggcgcggagcctgacatcctccccggcggctcgccaggccctcccccacccggcgcgctcgaccccccgccgggctccggggacgcagcgctggtcccggctccagccggatgtgtgccggggaacgattcccgagggttaggtggaaggggaggccctggatcccgggacagagtgcgggacatgcgtgcgcccgggctggccgcgcgggaaagttttgcaaagttcccgagccccgtgcgcccggcccgggctggcaccccgacccggcccgcccgctcacctctccggtcgccgcgaacagcttgtctgcctgcgcgcgtggcccggctggggatggcgatgaaaccgcgtgcgtggcccggaccccgcgcggacttgcgtgcgacccggagcgcccgctcggcaaacgctgcccgccgcgctgccagctgctctgatttttttcccgcgaaaactcggcatttgggagttgcggggccgcaggaggccgtgccgggggcgggcgcctgcctcctgattggccgacgcagtggcgggaagcgagaaagagggtggggggcgcccccgcctctgtccacggcgcctccgcctagtgggccacggctccgcccagccctgcgcgctctgctgggcgcgcccagcgtgcaaaggggctgcgtggcagggcctggtcaccccccgcacgtggacaccccaggagccttggggacccccagggtacagaccccctgaactcttaagtccaagtccgttcgcagccccccactcgcacgcattgaccagtaggtctaagaaggccggaatcaatgtgtaaatactgcgagggaatgtggggggcccctaggagaccacctgcaccctgatggctcgcccgatcgccccaagccccactgcctggcgtcagggcctgccagggctccccactctacccacccgcagggcttgtttgctgtcttttcccgcctcgttttcccgccttctccaggctgtccaggcgggcagggctgccctgccccctccgccctgtctgttccactctgaccagtcctggcgggcacaggagtgacctgtgctgggcacctacaaagcagccggacaggttgctcagagctgcagaacccagcggtgtacatggcagacccagttggtggtctcagggagggaaaattcctatctgggggagacaggcaagaaatgaataactaaagcagataatttcagatgattccttataggagagtgaccagcagccatgtggtgggaggcggggagagaggatactctctcactggggccactgcggtgggcctctcagagaagatgacatttgagctggaatcggagatgagactccaaggacagatgggtctaggagggaaagtcaaacccagaggccggaaaaggcttagaggtgtccagggagcaggaaggggctggtgtggttggggcccactgagcaaaggggagggggagttgaggtcagaggggtgatatataataccttgaaggccaccggggaggactttggtctttcccttgagagctgtgagcagaaaaatgttgagttcccacttagctttttacagtttcttcgtcactctattaagtctcctctatctggtcagtgggacttctgctatgtccctaatataggagacagatcatggcccccgaagatatgcgtctctagacccccacgtcctcgcccccaggatctgtgaatacagtgccttacacagctaaaaggactttgcaactttgcaggtgtgattcagttaatgattttgagttggggagcgtctcctgggtgatccaggtgggcacaatgtccttaaaaggtcct

SEQ ID NO: 1561247 - DNA, 4001 bp, Homo sapiens
gaaatgaagccttctgtgctgacccaataggctgagtggcaaatcaaaatcagtttggatgccacaaagggagcacgcatcataggaggagggaggaagagagcgccaggcggagctcctctgtcgagcccggccctgcctcttctctgcacacacgcggcttgcaccgtcaactccccaagttctccagatcgcctcctcccggggcagggcgggttaactcagattcttaagactcaagtcatcacgtctcttacgggaagagggctaatgaaggtctcctatggcatgcaagccagagaaattaatcatcaggtctcatctggagtgagcaggcatgatcctcccagcccccaaaaacccctggccgggcgcagtgtttattttccaacctagacaccagatggcagcagtacccggttcaaaatccaacaacaacacagtggggtacacgcagctcaactgacgacttttaatccagttccagtagtctacgcccgtccccacggtccaaccaactccagcagatgggacctacaccttcgatcacactgtctcatcctgccgggaaaccccactcccagtaggtcccacagtcccccacaaaaacaccaaccaaagtagcacctccacccccaggtgccaatggagggagcgccccaaacgtggcagctatgaaatcaaagggggacattttaaatgcaacgaggggctggagacagaacagagaaagagacgagggtcggtggacccctcggggaccacacgccccaggtcagcagcagccgcagcacagcaggctcagggtggcggaaattcctgattagcaagcgccatctccagactctgaataagctaatccaaatttttagaaacaaacactcgcagggtctgatgcttaaccggtacaggctgagagcaattggtggtggatgtttaaaaaagaaaacctggtcccctccgtcctagctaccagatggtcctgggccctttctcgaaaattcctcagccttccatcggccacctccaaaacttctttctctagccattattttgaggcggagctttgaaaaaagaagtttaaaagcccagaccctatagattcgagggccagccgccagcccagcgtgtcaatctgtgagtcctccctttgttccttcctctcgcaggcatttgaggtttctgtggacttctccttccgggagagatgaagtgggaccggacgaggttgttggggggggaggtgggagggagaaagtatcggctggtggctgcagaggcgcgaggcctggaccaggcatagaacaaaggtgctggcggcgggtgtacctgtttgcccctgtagaacagcctctgcaggcctggctccacgtggaacagctcctggatcttccgcctcagctcctccaccttggtcagcctggacagcgagtccaccgtgtgggtctgcctcccgtccatggtccgaacctggatccacatggtgtcggcgctgaggggagggacagcaaaaacccccatcagttttaccagcacctctgagccatgccatgctctaaggagtcggggttgcttttgtccggcctgtggacaccaggaaactcccaggatgcccttccagtcctcctgtacagccagaccctggccaggaccagacacaacaaattaagcacttaaggcattaacgactagccaagtgttgaagattgaggaggaaggagaatgaaaagagggaattgaaagaaaagcagaaggtccaacccatccctccttccccacgaccagaggagaaaggaggcccgggccaagtggccgagttggttcgtttattcattcattcattgattcattcattcctcggattcctatttacggaagagggaatcccagaagtccagcgcgggccggaacttcagaagtcccgggggaactcaaccaagtgccactgagagggaaaaaccccacccgagatccgcggaccccgggacccctcggtgcccacgccccccctccttgccggccccccccgcgcgcgtgcgcgaccgggcccgccccgcggtggccatggtaaccggccgccccgtcccggccacccgcgagcgcgcgcgccccgcgactcacctcgacctccaacccccggcagctcgcgcccctccaaaccctggaccctcggcgtccctcccgcactcccactggcccgcgcgggtcgcgccagcgagcccacgcccacccccgccgccgggactacagagggggcccccgctcgtcaagtcccgccccccttcacttgagccgcctcttattggctccgcagcacccggccgccccgccccgctcgctccccattggcccagatgctcccggggaactcagggcgcgcgaaatcgggctcgggcgcgacaattgaatcgcggggcgccccgcgcgcaggcgcggagcctgacatcctccccggcggctcgccaggccctcccccacccggcgcgctcgaccccccgccgggctccggggacgcagcgctggtcccggctccagccggatgtgtgccggggaacgattcccgagggttaggtggaaggggaggccctggatcccgggacagagtgcgggacatgcgtgcgcccgggctggccgcgcgggaaagttttgcaaagttcccgagccccgtgcgcccggcccgggctggcaccccgacccggcccgcccgctcacctctccggtcgccgcgaacagcttgtctgcctgcgcgcgtggcccggctggggatggcgatgaaaccgcgtgcgtggcccggaccccgcgcggacttgcgtgcgacccggagcgcccgctcggcaaacgctgcccgccgcgctgccagctgctctgatttttttcccgcgaaaactcggcatttgggagttgcggggccgcaggaggccgtgccgggggcgggcgcctgcctcctgattggccgacgcagtggcgggaagcgagaaagagggtggggggcgcccccgcctctgtccacggcgcctccgcctagtgggccacggctccgcccagccctgcgcgctctgctgggcgcgcccagcgtgcaaaggggctgcgtggcagggcctggtcaccccccgcacgtggacaccccaggagccttggggacccccagggtacagaccccctgaactcttaagtccaagtccgttcgcagccccccactcgcacgcattgaccagtaggtctaagaaggccggaatcaatgtgtaaatactgcgagggaatgtggggggcccctaggagaccacctgcaccctgatggctcgcccgatcgccccaagccccactgcctggcgtcagggcctgccagggctccccactctacccacccgcagggcttgtttgctgtcttttcccgcctcgttttcccgccttctccaggctgtccaggcgggcagggctgccctgccccctccgccctgtctgttccactctgaccagtcctggcgggcacaggagtgacctgtgctgggcacctacaaagcagccggacaggttgctcagagctgcagaacccagcggtgtacatggcagacccagttggtggtctcagggagggaaaattcctatctgggggagacaggcaagaaatgaataactaaagcagataatttcagatgattccttataggagagtgaccagcagccatgtggtgggaggcggggagagaggatactctctcactggggccactgcggtgggcctctcagagaagatgacatttgagctggaatcggagatgagactccaaggacagatgggtctaggagggaaagtcaaacccagaggccggaaaaggcttagaggtgtccagggagcaggaaggggctggtgtggttggggcccactgagcaaaggggagggggagttgaggtcagaggggtgatatataataccttgaaggccaccggggaggactttggtctttcccttgagagctgtgagcagaaaaatgttgagttcc

SEQ ID NO: 1561248 - DNA, 4001 bp, Homo sapiens
tctggaagcctcatccctcttgcctcctgctgcccccccttaatgccacccccgcagccgagcctcctgtttgcgtcagagttaagggtgagatccccgcccccccccccccccccccactccactaggcaaaccttccagagaagcccaacttggaggatgtgaggcggggtggggcgggatgctggggggagaagagagaggatagaggagtcagccaagaacacccacgtcggaacctcctccagtgccacctttaagagcccggctacttagagcagggggagaggtcagtagggggtctggacattcaagttctcctcccattccgtcctcaggcctaggcggtgggggtcgcctaggggtctccttcacttccctactcccctaactccataggcctggaggctaggggatggaggagttgacctttgactctagggacccttcttccaccacccccagccccgtccagcagaaacgagcttagagaaagtaggcccctgtccctttaagaacacccgcgtccacgccggcccagcccggccggatttgcactcggaagctgccgcggcggggagcgggcgggcggggcagggtttgtgaatgaatcggccgagggggaggggagggaggaggaggggcggcgggggcggttcccggctccccggcctgcccaccctgtgtccaggcagcaggagttcagcacacgcacgcttcctgtcgcccgaggtctcccgaagcctgcagtctcaggcttggcagacacaccccttcccccaccccagccttcttgaaatgggtgggagtgacggggggaccccagtccttaagaaccaggggttcagagctctgtaggcgtggaacggcggtccacatccacccctgccgcccaaggtctcccagagtttgatttctcaaacgggagtgcccagaacgcctgggttcggttgggctggcttccccacgaccccagagccataaaggtgtggggtggggggtcatgcccctcccacgtctccctccctcctccaaccccaacgcagagcgtgggcctgggcgtgggcctctgtgcagatggcgttctggccccaaaatagctccccccccacctcacgtctccctccctccctctctccagtgcaaagtgggtgaggtgaggatgggccaggagggggaccaggagacattgctcttccaagaagtaggctccctgccgagaaggccctgaaacgtgtttgggagaaccggagggggcagggagcgggaagaccttctggacattcctccaaccccctcactcgggaggccaaagagttaactggaaaagcgcccccagacctccagtcacagccctctctggacgctgggaggggtctcctgtctccacactccccccactccagtcctctttacacctagggctgggagagtcctagaactcgtggatgccctgatggccaagcccctctacctatatcttacatccccacggcttggagaaccctcccaccgcactctccttcgaatttccagccgggtccgcgtccatgaggacccgtaacccagcccacaacaccagaccccttccaagcacccctgcaggcttcaatcaaactaccgagcccagactcttcctcactgaccctctaaaaacctggtctacacagacgccccagtctagatcgtttccgggtagaaccccggatacccgtccacgtccacacgggcctccgcgttcagccgcgtccacacgacccctccagcagcggccaccaggacccccgagagccctgccgcgtctacacggatcaccccctccggggcccagctgcgtcgacaagggctacccctctcaaaagtccagccacctggactcgggtcaccccccaggaaccccctgggagccgcatccacgcggaccccgaccccagcccgcgtccacacgggtcccccgacccccagcctcgcctcctacctccaacgcaaagcagagacatgtctccgagctcgcaggtgggccggaggcggccgggccggctctgtcgggtcgggctcagcggccgctgggctggggcatctcccggctgcagcccgcgcttggctcacgccggggcccggccgccaccggccatcttggttcagcaccgggggcgcggacagcgcctgacgtggcgctgatgcggggcgggcaggcggagcccagggacgcctgatggggcgggggcgctgcgggctgggggggcgttaaagggcctggctccgggaaggggcgcctcgccccacacctcctcgttgcagggggacaaggggcgacggcggcccccaagcaggtttcctcctgtgcagaccctcacctgcactgaaatggtgcacgtgcccccgccacccatgcatggacattcctgccctggtaacctgggcaaacgcctccctgcaatactcaagcaagtacaggcaaatgcaagctcttgtgtgtacgcccggcaccagcaccgggcagatggtcctgttctctgagtatctctcttcctctgtctctacgtctctgtctctctaactctactgcctggtctctttctctccctgggtctctgttcctctgactctgtccactgctctctcagtcatgtgtctcttagcctctctctgtaaagtctttttgcagctctactgcatcctgtctaggtctctctctatgtctctaagccatccagcccatgggtccttgcccacactctgaactccttttcatccatcaatgtcttgtctgaatatcctctcctccaggaaggcttccctgactgccccaagctgagcctttgtttctcctctctggactcccccagcccctatcccttcctctgattgggccctgacccgaacgaaactctgccactcctccccacttttcttttttttagatggagtctccctctgcagcccaggctggaatgcagtgacgcaatcttggctcactgcaacctctgcctcctgggatcaagagattctcctgcctcagcctccccgagtagctgggactacaggcgcatgccaccatgcccagctttttttttttattttattttttttatttttagtagagacgaggtttcaccatgttggccagcctggtcttgaacacttgacctcaggggatccgcccatctcggcctcccaaagtgctgggattcagacctgagccactgcgcctggccccctccccacatatcaaactgggcagctccatgtgggccccttgccctgcaacctgctcgctgtatcactggcacctaaactagcatgaaaggctgagccccacagggtctcctgcccccagcccacatgaaagagcttcataaatgcagaatgtgcatggagttgagtgaggccattgttcaaaaccaaactctgtctctcatcacaagcatggccttgggcaggtcttgtgacctcctcgtgcctcagtttccgcacctgtagaatgaatatgataacaagtcctgcctcacaaggttgctggaggtattacatgagttaacatgtgaaaccagttgtaatttttttttttttggaggtgtagtctcaatctgtggcccaggctggagtgcagtggcaccatctcagttcactgcaacctcaacctccaagtgatcttcctgcctcagcctcctgagtagctgggattacaggcgctcgccaccacatccagctaatttttttgtattttttgtagagatggggtttcaccatgttggccaggctggtctcaaactcctgacctcaagtgatccacccaccgtggcctcccaaaatgctgggattacacgaatgagccaccgcgcctggccccagttgtaatcttaatgcctaatagtaaccatgtttgtatctgtcactgctttaaatttttaaaaaaatcagcacagctaatttttgtattttttgtagagacagagtttcaccatgtcgcacaggctgtctcaaactcctgggctcaa

SEQ ID NO: 1561249 - DNA, 4001 bp, Homo sapiens
ttaaggaatatggggttagaatgagtcaaatgttttttgcttccattaggggctaaaagaaagcccaagtgggtggtctacccacgagagtgactcaatcgactaccacgtaagccccccatgcaaggacagggtctgagctcactctggatgagcaaggagtggttcccccagttctgaaacaccagcatatgccaagggacacctgtgccaaggtaagcctcggagcttcttcctgtcggagcattcaggaaaacaaacctgagcgagaggtcaggcacaaagcaagcctaaggtgaaagcaacctgaaatccagagggtgatgaggacattccccaggaccccggtgcaacacgcgccacccccccagcccctctcccaccccaggcaagcagcgcccaggaccaggaaatgcatgcccgatacttctcccaacccaagcccccatttaaaatacctaagtaaccttctctaaacatccacatcattaaaaataagtttccaacgtggcagactcgtttatgtaaagccattattgctgtcttattggaagaacaaaactcaaacccaacttttccaaggcaagagttgtgaagttatgtaacaggtcggtttcagcaacaggcgatgcaagaaaaaacaaaatacaacctgcttcctgaatgatcttaatagccagccaatatgtgctcctccatgggaggcaaaaattcttctctgcctcaaccttccgctggccagcgcccctatgcatggggaaagtcgaacctacgctccgtgactgtgaaaggtggggtgcccagatggctgcgaccacagatgggaggtgggacaggcggccagacccaccaatggggagaccgggcaggacccccggaccaggccagagacaggattagggcaggtcaccctggatactcccggaaagggactgagggaagtcactcaagctccggcctgagcaagacccggcccaggtcgtaggagaactcgaggcagaataccgagacctgcgaaagagggaccagggcaggtcaccctagcccggatggaatggaagaactcagataagtcagggggcaggttactccaggccagactgattgtgggacacaaggcaggtcagcccgggcccaggagggggagcaaacccagctggcgtaaaggaacagggtcaggttagctcggtcccgaacgaagtggaggactcgaggcaagtctgcccggcccaggagttgggggccgaaggaactcagccaggtcgcggccggagcgggggacccggggcagatcaggccaggcccgggcagattgcaggacctggggcaggtaagctcaggccgagccagagtaggggacccggggcagatcgccccaggcccggccgcgatgggggactccggccaaacacaggccgggcccgaggcgagttcggggcaggtctcaggcgccgaggccgggcccgggcttccggcaccgccatgtgccgctcacctgcgcgtcgagctgtcccgccgcagcgcccgcgcccgcgccgcccgggcctcccgcgccgccaccgcccgggccgccggggccgccggggggcgtctgcgtctggctaggaagagtaaagtcggtgaactcgaactcggagccctgtgtgtcggcgccaagcagctcggcctcctccgtgtccaggaaagtgagagtctgcgagctgggcccgtacgcctccacgctcatggtgcctccgggtagggccctcgggccggttccgcgctgcactcgagcccgccgccgcgctgaggcctaggccgcaggcctcgggtcgctgccgctgtcgcccccgcgcgcccggaaaggaccaaaccgcgcgccccggcgccagccggaccgagaggtaacagtgccgagccgccgccgctgccgccgagcccctccgcgcctcagctcccctcgaagccgccagccgctcgcagcctagagcaggaactgccgccaccgccgccgtcgccgtgcgcgtgcgcgagcccgacgccggcggaagcgcgcgcgctcttcgcgggcgcctggtgcccagcaggaagacgggacgcgcaccgcgcacgcgcagggggtggggctttcaaccgccgctgcggcggcagctcgaggacttggtcccgccccaactgctaattggggacgcccgggcggctggcggtgtggacttggtggtctgcacctgtggtcgctgcgacggtgtttcggtttaattgagcgctagccgaataccctacataggtggtctcggaacgcccaactggagagactgggcagggacggtgcgctcccactcctggcaaaagctgcttggaactcagtttccccatctgtaaaatggagggtgcctcgcacatagtagatgctccctgtgcattggtttaaaaagggagtggggctcggcgcggtggtcacacctgtaatcccaacactcagaggctgaggcgggagaactgcttgaactcaggagttcgagaccagcctgggagacagagtgagactccatctctacaaaaaatataaaaattaggccgagcgcggtggctcacgcctgtaatcccagcactttgggaggccgaggcgggtggatcatgacgtcaggagatcgagaccatcctggctaacatggtgaaaccccgtctccactaaaaatacaaaaaattagccaggcgtggtggcacgagcctgtagtcccagctactcaggaggctgaggcaggagaatcgcttgaacccaggaggcggaggttgcagtgagccaagattgtgccactgcacaccagcctgggcaacagagtgagactctgtctcaaaaaaaaaaaaaaaaattagctaagcgtggtggttcgcacctgtagtcccagctactagggaggctgaggtgggaggatcgcttgaccctgggaagttgaggctgcagtaagccgagattgcaccactgcactccagcctgggtgacagagcgagaccctgtctcaaaaataagtaaaaataaatgaatggggatagtcttacgtactgggcctggcacttggaaatgatggttgctgctgttcctgatgcctctgccactgttattataccattactatttttgctatgattattatttagtggacgtatacagcaaaacaactggaagcacatggtctgtggtggactctagacctgaccacttaccagctgtgtgaaattatacaagtgacttaacctctctgagcctagggtttctgttgccattaaggtggcataggaagcctgggcaaggtggctctttcctgaaatcccagcactttaggaggtagaggcaagagaatcacttgagctcaggagtttgaggctgcggtgagctatgattgtgccactgcactccagcctgggtgacagagatcctatgtgtgtgtgtgtatattaatatatatttatttatgttaatataaatagagtgactagtagctcatttattcctctcatactctcatgtgatatatggttgctgctgatatatatggagcccggtgcggtgtgtcacgcctgtaatcccagcactttcggaggccaaaagagcaagaccttgtataaaaataaattttaaaaactctgataggtgttactaaattgatctgaaatttgtctacaaattccactggatgtgttccaaagagagctttgcatgatattaaaattatctgttggtctgtcagtattcccccttaaactgtgccttcttggagagggagacctacttttattcattgtttatattcctacagtttagtgcatgctaggagccccccccgaaatgttatttttattttttattttttgtagagatgggggttttgctgtttcctaggctggtcttgtactcctgacctcaagtaatcgtcccacctcaatcttccaaagagctgtgattataggtatgagccactatgtcttgtccctgaaaaagagtgaagaaggctgtggctcac

SEQ ID NO: 1561250 - DNA, 4001 bp, Homo sapiens
gtatacacggtactggtcggctgtcacccatatggtctcagcaaacagggacaggcctgacagctggacagagcggtgggttaggaaggtctgctcggggccagcagccctggcaccaggcatctccacgagcaagttccctccccatttggagcctccactgccctctcagtaaagtgggcaaagacctcgccttccatgagcagcgatgagggtgagcagaggccaggagagaagagacagcccagccagacaaccgacccccacgccccagctgccagtttcttcggggataaaaggggatgccacgtggaaaggctggagcagtggactggcacagaggagatgcttggtccatctgccctcccttgacagtgctgttattccccgaggaggggaacatggccatggccataaacattacaaatgggccaggcaaggtggctcacacctgcagtcccagcattgtgggaggccgaggcgggaggattgcttgagcccaggagtttgagactagcctgggcaatagtgagaccccgtctctacaaaaaataaaaaaattagctagatgtggtgatgtgcacctgtagtcccagctacttgggaggctgaggcaggaggatcagttgagcccaggagttggaggctgcagtgagcaagcatcacaccactgcactgcagcctggtcaacagagtgagaccctgtctctaaaacaaacacacggccagtcgcggtggcttacacctgtaatcccaacactttgggaggctgaggtgggcagatcacctcaggtcaggagttcaagaccagcctggccaacatggtgaaaccccatctcttctaaaaatacaaaaagtagccgggtgtggtagcatgtgcctgtaatcccagctgctcgggaagctgaggcaggagaattgctggagcccaggaggtggaggatgcagtgagccgagatctcgccactgcacttcagcctgggtgacaaagggagaatctgtctgaaaaaaaaaaaattagccgggcgtggtggtgtgcgcctgtaatcccagctattctggaggctgaggcaggagaatcacttgagcccgggagttagaggttgcagttagctgagatcagccactgcactccagcctgggcaacagagtgagactccgtctcaaaaacaaaacaaaacaaaacaaaacaaaacaaaacaaaacaaaaaacacaaaaccaaaacccaatgttaattgaaagacactgttgtttttccttcttgtggcctcctgtgcaccaggctgtcactttatatccatagtgatgctgatggtgatagccagcattggtcgggcactttctctgagctgagggccacacatggattaatccacatgacaacagcccacacaatgaggacacagtctatagatgaggaaagaaggcacagagagggacagtcgcttgctaaggtcacagagctggggagaggcagagctgggatttcaacccaggctgtgctgaccactgagtctgcccgagagacagttctggaccctcatcccccaccccgagctcaggactgtcccctccccaccacacaaccactcggctcccagcactggggcgagtctcaccagaataatgatattgcccacaactagcaggcccaccacaactggagatcccttctcggcctccgctgctgccgcagacgccatcatcctgggacacatgagcagggatgaggccaggagcgtaaagggccagccggaccccccatctctgagccacaccctggcttcgaggggttgctccagctctctgcggggcccaggctggtactgatgtacccacagccctggtggggaggcattttgcacaagaggacacccgggctccggtggggcagtcactggcctgaacttggcactgcccctccctgagcctcagacccctcatgccatacccagactcccagggccccctcctcaccttctctgtctgcagcctctctggccagccccacccaccgtggctccctatatacgcccaggcccctccttgggctagtctcccaggaaggagggagggtgtgtgtgtgtgtgtgtgtgttttggggcacggcagtggggtggacaagaggctgagccggcagaccaggctggatgaacagctttgatgggctccctgccacccccatgatttatagacctgaaataccagattgtgtaggacccatggcctctgggtcccaggctttgttggcggtggaggagttggaggtggaggggcgtgcgcaccacctggtgtctctcttgctaggacatgggccttcctgggaataggagcaagatccaaatcagggcggggcgtggtagctcaggcctgtaatcccagcactttgggaaactgaggtaggcggatcgcttgagctcagtagtttgagaccagactgggtgacatagtgaaaccccgtttctataaaaaatacaaaaataattagccaggctcatgcctgtggtcccagctacttgggaggctgaggtgggaggatggctgaacctggggacagaggttgcagtgagccaagatcgtgccattgcactccagcttgagtgacagagccaggccctgtctccaaaaccaaacaaacaaaaaatccacttcggacccacaggtgggtcctgaatcccagaagtgtctctcctgctgtgtgaccttgcacaggtggctgctcctctgtgaggccgggagcccgtggggaggcccaggcagggacccctgccaaggccagggctggaccgaggcagagcagtggggagatgaggggacaggtggaaggggcgcttaggaggctgactacatgggcggtgggctgagggaaaggatggcacccaggataggtgtgtgaggggagtctgagataagtgcaaagatgggggagaagaacgtgctagaaaatgagagggggcacaccgggcttggttgaagaaaagtccccgtcgccccccaacacacgcatggaccagacatttatttcttcaggtgcagaatgagaaacctaggttcaaatcccggttctgcctcttctgggcggcacgacttggcttgtggatttgcccatctgcgaaatgggtatcatcagaccgcttccctggcggaggtggggactgagccagcgcgtgtccccaggggccgccgatgctgcccacgaggccacggtctctccgatgccacgccctcgcagcgcagggctggctccatgcaaaaatggtggcccagggcccccgacaccgtccccagaacttctcaaccccaaggctaggccgtgtattgcctctgctgtgggagcagtggctccccactgcggtgcctgcgaatttggcaaatgacactgaaaatcccatcgtcaaggcactggtttggtaataagatacatgagatgttttccgattaaaatggttaatttggttttagtcaacccactttagattttaaaatagtttttttggccagtcgtggtggctcacgcctgtaatcccagcactttgggaggccagggtggggggatcacctgaggtcaggctgactaacatggtgaaaccctatctctactaaaaatacaaaattagccagtcgtggtggcaagtgcctgtaatcccagctactcaggaggctgaggcaggagctaatcgcttgaacctcgaaggcagaggttgcagtgagctgaggtcgtgccattgctctccagcctgggtgacagagtgagactctgtctccacaacaacaacaaaaatctgtaaagtgtttattcaagaaaagcagctgaatcttagtaagagcagtgaactttatgacttttttaaaatttatttttatttttgttttcttgagacagagtctcactgtcgcccaggctggaatgcagtggcacgatctcagttcactgcaacctctgcctcccaggttcaagcaattctcctgcctcagcctcccgagtagctaggattacagg

SEQ ID NO: 1561251 - DNA, 4001 bp, Homo sapiens
gtcccagctacttatgggaggctgaggcaggagaatggcgtgaacccgggaggcggagcttgcagtgagccgagattgcgccactgcactccagccggggcgacagagcaagactccgtctctaaataaataaatgaataaataaataaataaatgcttgctgttggatgaaagcacggatgacgggtggtccccgctgtgactgaacacagaagaagcagacctgctgcacccgggaggggctgcactggctaccatgggccactgggttctcagctaggagcaggcttcctcatcccaggcctgagttacccacgctgtaaaacgccaccggcaccatcacattccacttgaaggtcccagtcagctccaccgtgcagaccctgtccccgacctgtcccccagtctgggatagaggaagtatgttctggcttccggagacactgccaatcataagcctttgcttttttcttttttagaaacggagtttcgctcttgttgcccaggctggaatgcaatggcacaatctcagctcaccacaacctccacctcccgggtttgagcgattctcctgcctcagcctcccaagtagctgggattacaggcacgcgccaccatacttggctaattttgtattttcagtagagacggggtttctccatgttggtcaggttggtctcaaactcctgacctcgggtgattcgcccgccttggcctcccaaagtgttgggattacaggcgtgagtcactgcgcccagcagctctaaatttttttgtagagataaggtcttgctgtgttgcccaggctggtctcaaattcccaggctcaaacgatcctcccaccttagcctccccagtagctgggactacagacaggtgccaccatgccctgataattttttgttttgtagagatggggtttcattgtgttgtccaggatggtcttgaactcccaggctcaagtgattctcctgcctgggcctcccaaagcactgggatcacaggccggagccactgcacccggctaagaccttgctgctttttttttcttttctctttttgggacacagtctcattctgtcacccaggctggagtgcaatggcgcaatctcagctcactgcaacctcctcctcccgggttcaagcgattctccttcctcagcctcccgagtagctgggattagaggcacccgccaccacgcctggctaatttttgcatttttagtagagacgcgggtttcaccacgttggccaggctggtctcgaactcctgacctcaggtgatccacctgcctcggcctcacaaagcgctgggatcacaggcgggagccaccgcacccagccaggccttgcttcttagcaccccacgtggaaacaccagacaaccctacggaggccacccccagcccggcttctatgggggccacccctatgccgtcccgctgcccacgtgggctcaggcgcagctgaagctttcacgctccttgttaaaaatcataaaaaccaaaatagtggcaaaggccgaagatgccgcgagtgctgggctggggatcgggactcggcaccttctgggcgcttccgtccagggggtcaccattcggatcccccggtagagatggggaaactgaggcttggagcggcctagccgcggagccgggcatgctggggtttggccttgggtccgtcacgtcccgttcacgccgggacgcgccgctccgcctctcggcctcagtttccccctctgtcaccgggaacaacaagggacctgggcccggcccggcccggcccccggaaacgcgcacaaatacggaacgcagcggcgcggggctgggccgaggcgggagcgcggatggggccgcgggtcggcgtcctcaccagttcttgaccagctcccggtagcgtgggcccaggaaccgggtcaccatcgcggcggagtcgcaccctcaggatgaccctgtccagctgacccggctacactgcgcaggcgcggccgcggcgcgcacgcgcgcggggagggcggggggggggggaggaaaaaaaaacatcatccgccactgtgcgcgcagacccggaagccacttacagtaacttccggcgagggttggacgaccgcggagaagtggtccggagtgggcggcgttagggcggtgctttctggccacgtggtctggcggccgattgtgcttctgggctccgcggggctacctgccagtgattttgtgcgcctagtatgtgccagaacgttatttacaatgaaggaaactgaggtccagcggggaagggtcttgctcagagtcacacagaggggaagagctgggattggagcccacttttggaggcgtcaggcgttgttcctgattcgctgtaggactttggtcgagcggcagtgcttccctgagcctcagcgttgcccgttgcttggaggccctgtcggaaatctctttgcaggattccgtttgcgagcctgggttattcctcattccggcagcagagggtggcctggctccttgctcggtgaacgtctctggatgctcttagctgatgacaggcaggtctttctgcctcctgctttccaccgcaccaggctcgcttgggctcgcctttctccagtccctgcttcctctgctctcccacaacccggcgcagcaccgtacatgctcactcagctcccagcttccagcctcccccctgcacaccgggccggtgtgggcagaaggaagaggggcatattcccagacaccgccattgcacttttgtgccttttcccccatattcaagagttgcctccctcaggaagccctcctggactgcctgacccacaggcacctttacagcatgaacggaaaggccatagcctagacggggcactgggcgtgatttgtctctcgggcgccagcgtcacttgcaggcctcgtgataaggaatggacaccgtgggttcttctgcccagcctggcctgtcctcctggggtcagcccctcagtacaccccaagcctgcagctctctggggactgcgggtgctaacccatccctatccctggttaaggactcagggtgggagccggaaataggttttggacaccacagtctgggcactgtttttctttctttttttttttgagacggagtctcgctctgtggcccaggctggagtgcaatgacacgatctcggctcactgcaacctccgcttcccgggttcaagcttctcctgcctcagcctcccaagtagctgggactacaggcgtgagccaccacacctggctagtttttgtatttttagtagagatggggtttggccatgttggccaggcttgtcttgaattcctgacctcaagtgatccgcctcccaaaatgctgggattacaggtgtaagccaccgggcccggccctgggcattgtttgtagaactttccagttggcttggggtttttgagcttgggatcagagagcacctgaataagactcttcccattggtggaaacttaaaaaagtgggatgcaggggctgacacagagactattaagagaaaggacaggaacacaagggctgctggaatgtcagcccagagtttccagatgccacaatgtaagagttcaccagtggccgggcacggtggctcacgcctataatcccagcactttgggaggttgaggcgggcagatcacctgagactgggagttcgagaccagcgtgaccaacatggagaaaccccatctctactaaaaatacaaaattaaccggacatggtgacggatgcctgtaattccagctactcgggaggctgaggcaggaaaattgcttgaaaacccgggaggcagaggttgcggtgagccgagatcacgccattgcactgcagcctgggcaacaagagtgaaactccgtctcaaaacaaacagacaaaaaaaagagttcatcagagacagtgacataaacaagagctgagagatggagagagatttgtaatgacacctggatccagctgtgcctgaagccattcaac

SEQ ID NO: 1561252 - DNA, 4001 bp, Homo sapiens
gacacttctcaaaagaagacatttatgcagccaaaaaacacatgaaaaaatgctcagcatcactggccatcagagaaatgtaagcctccaattttttgaagaaactttagcaacacgacgaattccaaagatgcttttcttttgctattgaaatgttctccttccttccttctcacctccaggtcccaaggatgggctagggtactctacacctgccatggacagtttcttcaaaacccactgatgctccttaacaaatattcattcacaaatactttgcactaactgtatacaaaatccgacgttgtgaaagatagaaaaataaagaagatattaccttctctatgcccttaagcccaagggtggaggagttaccaataaacacaatacagagtgtaaagtgtatgtgctacagagacagacaaatcagcaaataaaaactttattcacctgatccttaactgagattgaaaagatgggtaaggaaaacatatggacatgtagcaacttagtggaaggaccatgaagaaagtgcagagcccagggtgaatgaagacagagtaaaaagaaaagtggcgggcaatttggttagcgtgtaggggaagagtcacaaacagctatcagtggagccaggctggtaacagaatgaaacacgcagacctggtaaagactgtgacaaactggagaagaccacttgctccaactgcgggggcggccactacacagcacactatggaattttcccaagtagaaactagatcccagtattaccggcttccagcattttaagagatgccattagtcttcccagtttttttgaaaactacacagcctgcagacacactgcccacaggctgccatttctctatctccgatacagggccaagtaaagatggaaggcgaggcaaagaagataaacggggatctaaggacagagggtgtggaatagcccctgcgaagagctcagtggctacgacaattcgtcttgtcaaatccctgctaccacatgtccacaccacggatcctggtgcgagtcattctacctcgtctgttttctcatctgtaaaatgtaaatgtcgtcaatctctgcccgtccttgacgactgattatgttgtgacactacactgtaactgaccttgtgtatgttttttttgttttttttttggtgggggggtgatgaaggggaaggacatgaagggatcggtagtggtgagaagaccaacttcccaaatattagtaagtttccatttcttaagcatgtaagtgcccaaactgtgctaacggctttacgtagaattcctccacctaagcctcacgacacccctacaaaattgataaagatatgaatccatttcacaggaagtacgtttagaaactcgcccaaggtcaaacgacctgcaagcaacaaaacccctcagaggtggctggaacagcgggactacagagctcgtgaactcggccgaggaggaaccaggcgaagccggcggacgcgagtccaggccggccaccagaaagacgccccgagcccgggggccaggcccagagttgcggaggccgcccagcccgacctgattcaggctccgctcgcgcgcccgcggccgctccctgctgggggccggaggagcgggcaccgagagacccccagccctgctcgcggccctcgccccggctcaccattgaggcccacggaggcgaccaaaggccggcgcacggcctggccgctcagcgactcccggctgaggaagggccgcttcaggtccaacacaggctgctccggggtggcgggcaccgtggcctgcaccaagggccgcagcgcgcccgccaccccgcgggacgtggccgacaggacgggcgcgaacgggcctgagcgggatgctaccgacaacatggcgacagccgctccaaccgccaagccggtcacagggacgaccttccaaccacggcgcaggcgcgaggaggcgcgggacgcgtgacgacagcgcgccgccggaaaggaaattctgcagtcctgcagggcggggcaaacttggagaggcgctgcgtcgggggacggggctacaagccgtcgctgggggcggggcttgcggcccacctgtaggtcccggtgccacctcgtcagtgtcccgagagatccccagaagaacgagagggctgaacaggggaccccactgacgtccggtgggccgactttacgatcctttagggtaaaaatttcatctaggaagacctagagataacaataaacgattatagtttaacttaggatggtaatatatctcaactacgacgaagtccagcacatagtaatcgctatgtgtttactatgatgatttttattatcttcatctaacaacaacaacaacaaaaaggccagaggcatctgtgcaaagctcgataatgctaatggattatgtttattaagtattcactgtgtatttggttttgcgttttattatacctacgttctttcatttgttatcaaggtctctatgaagtcagagctattactatcagcattttacccatgaagaaaccgaggtttagagagattcttttccaggaactggatagccagcaagatgtgaagcagggtaatctgtctcctgagtctatgctcttcagtgccaccactgtttcccaaagtaggattttagaattttagaggatgcacagagctcgctcattcatgttccatcacatagtgagaaagttttgttttcttttgttttgtttttcaatcctgattgcaccaatgagaaagtctcagtttggtgctaatacatctttaattaaaaaaaaaaaaaagtagagatgaggtctcactatattgcccactccagtctcgaacttctggcctcaaggagtcctgtctccccctcccaaagtactgggattataggcatgagcaaattcacttggcctcagtttgatcctaatatatctttaattcctctctacacttatctcccacttttaacagaaaagatcttgagttagaagctcttagcagagaactgagtctagagtgatttcattatatggttcatagtattgattttctatccatactggttttctattctgtactatactgagataaagtttttcatttaggtcaaaaataatttaaatattaagtaaatgttaatataagcagtgcacagaattggctctgtgctgtgcatgggctctgtgatctgggcaagttccctcacctctctgtgcctcagtttcctcacctgccaaatgggggcagtaatgatgccatgtgtgttgtaaagttactgggaggagtaaatgaactaaaacgtgtaaagcatctacaagcaggcccagcacacaggcagcaccaagtgaggatttgctagtggtgtttttatctgagatgccacctcctctaagaagccttcccttgatccttgctgactcgttgttattcctcatgccaggtccaaagtgtactgacaggtttcccctttgaccttcctatgactccccttagggcctaggctttgaccagccttatagcccaagggactatattgtactctcaagattggaggctgcctcctcaggggccaccctagccaggctcatcacacagctggctcagtgctctcccttggcaacaaccttaggataaaagacatttccagagaagttgtcacacagcatgcatggtttgagtgcttcacaagaaataatatcacaattccctctgagttggtaaggaaatgaaaaatgaatgaatgaatgaatgatccttcacaaaaccttcacaatgtcccagttgggtgaacagaataggaattatctccagacctcctgggttcaattttagtttcaccactcactagctgtgccctagggcaagttatttaatctctgtgtgtgcctccgtctttctcttgtaaaacagagataataacaggatctaccctagagagttattttaaggatgagatggattaatacatgtaaaatgcctagaactgtgcct

SEQ ID NO: 1561253 - DNA, 4001 bp, Homo sapiens
ttgcctgtttggtcgagtgtctcttccttgagggcaagagctgtgctgggggaaagtcaccatctctgtggagtttcttcagccttcattcattaaaacctcacagaggccctgaggccaagaaggagggtgatcattataagcatcacacctgtttaattgatgcaatgtctagactgaaaatgccgcgggactcagccaaggtcccccagtgagtgagtgcaggggcggacctcacacacaagccctctggctctaggcagcctccccctgcctccagctctgccctagaatctactgcatgccaagtaccggacccaggacaaagggaaaaaagagttcctgcccaaaaggaactctcaattcaactggaaaacaaaaacaggacttacacacatgaagacattattaaccaaaacattttgtccttcatgtgcgggccttgtagctgcaagaattggaggctgtctctgcctaaccaagcaagaaggatcaacaagagagggtgcagcaaggtgtggtggctcacgcctgtaatcccagcactttgggaggccaaggcagggggatcacctaaggtcagtagttcgagaccagcctggccaacatggtgaaaccccgtctctaccaaaaatacaaaaattagccgggcgtggtggtgcatgcctgtgatcccagctacctgggaggctgaggcaggagaaccacttgaatccaggaggcggaggttgcagtgaaccgagatcacactgttgcactccagcttgggcaacaaagggagacttcatctaaaaaaaattaaaaattaaacaaaataataagagggggttcagagagcctggacaggaagctgagggcaggcagagctcctgggagccctagggagcagtggagccccaccccggctctcacaggggcatggtctggtcagtgtgctgctgttgcatctgtgcaacacacactccagccatcccatcagtcccggtatcacttgctcacaggacagcctctgattggctgagctctggcctggggctcaacccctggctctcctagagctgggagacagacggagggcctggcccctctgttctcacagtgggagggagggaattcctcagaaagaaatcaaggggtcatgaggaccagggatgaaagcgaggtggctaaaaaatgacagaaaccccctataatgcacgtgtttgtttagatcgccagtacaccgagcaacaatggggggctcctgtccttgaaactgactttgcctgtgcttgtggaggaggctggtaaaaccattgtaaaaggtgagtccgcaagcacccaggtgtttgtgaaagtgtggtgtgatggttacttttagctgtcagcttgactgggttaagggatacccagatagcaggtgcaacattatttctgggtgcatctgggagggtgttttcaaagagattggtactcgaatcagtagaccgagtaaaaaacatctgccctcaccaatgtaggtgggcaacattcaatccactgagggcccaaatagaacaaaaagacagaggaaaagcaaattcactctcttctggacctgggacatccaccttctcctgccctgggacgttgaagctcctggttctcagaacttcaggctcaaactgaatgataccatcagcttccgtggctcttcaacctgcagatgacatactgtgggacttcttaggctcctaatcactcaggccaatctccattataaagcccctcttccaggtctatagctatgtctacagcgccatctgtatcttgttcattctgtttctctgactaatccatgtggttaaagtaaaatcctcaaacctcacactaacagcagagaagctataacactgtcaagcttcaactcaccaatgcatatgccagagccctcttagaaacgtggcttccttgaagggaagaccatgttgtcatcagggcagtgacctccaaggagcctggaaaagagtgagaagacccactgggaataatgtggaaagaattcccatctgtgacataggagagaggcccagaatctggtggacgtgaagattccagttctatcttgtgggcagggacacatccccaggcctcacccagcaccctggggctggaatacacctctaacttgtatcctacctccagtcccagctaggcaggactatgatctgggaagtagattgtgggagccatgtcgtttgtgggtgacagctgcctattgctccctggactgagcaaaagaggttccatttgccctcactacctcctctttccagtgctaggcagggcaatatcagtggcaacgccatggggcatggttatgaaagtgggaaaatgcttgatcccacttgtgcaagcattttctactctgtgtgtgagtacagcagtcactgaacaggggtgggggccaggggctgctgctttgtgtccatgtatcagttagctattgctgtgcaacaaatacgcagcaatagctaaccgatacatggacactccaaagctcaatggctgaaaaaaaacaataatgtcttatttttcatgagtttgtgggagggctggagtgctgctggaggttggaggcttggctgaggcaactctgctccacatattttaccctcatcctaggacctgctgatttcgtccttatcttagagatggcagaaatgcacaagatggtatagagacactcagggcctctggaactggtgcactgtcacttcagcctggttctgttggtcaacacaggtctcatggccagcccagagtcacattgacagggcactgcaaagtgatgtggcaaagggtgtagataacagaaagaggtgatgaagcgaggccagtacccaagggtgaatggagctggggggcagaaactaggaagccagcttgatccatgccaggttgcaagggcaagttcaggccatgcacagaggagttgggagaagagtcaagcctgggggaaatcccagggaaggtacagagactaaggaggcagaaggccatggtgctggtggctgaaagtggcctggagcaagctggcagtaagcatgagtctcatcaacttcgccttgtgcccagaaagggcttgtgccagagtgcccaggcccataaaacaccacttcagggcagacctgttccaaagatccagagcaattttagatgtatctgtgtttctgttgttgttgatttttttcatttttgttgttgagacgaggtctcactatgttgcccaggctggccctgaacttccgggctcaagcactcctccctcctgcgcgtcagctgggactacaagcacgtgccacagcttgtatctgtttttattaaaaccatatttcctgaattgtagccattcacattcaaattttattgattttttttgccatatccgcttgccacctatactaatatttacttaatatttttatttaaatcaactcatattttttgttgtcgttatttagtttttatttcataatcataaactttacaatccagctaggcatggaagggaataaggaaaacttggagctcaaagggaactgcagtgagagcacaaagattataggatactgtgagcaaatggggtggaggagtgctctccggagctagagaaggaatggtcttgaggttaagataaaacacaagtcgactgggcacagtggcacatgcctgtaatcccagcactttgggaagccaaggtgggcggataacctgaggtcaggagttcaagaccagcctggccaacacggtgaaaccccgtctctactaaaaatacaaaaattagccaggcatggtggtgctcacctgtaatcccagctactcaggaggctgaggcaggagaatcacttgaacctgggaggcagaggttgcagtgagctgagattgtgacattgcactccaccctggatggcaagagtgaaactgtctcaaaaacaaaacaaaacgaacacaagtcaagcttattagagttgtcaacagtc

SEQ ID NO: 1561254 - DNA, 4001 bp, Homo sapiens
atacattaatgtcttctaatttaaagacgccaaactagttaagttttatatatatatatatatatatatatatatatatatatatatatatatatatatgaatgacagggtctcactctgtcgcccagggtgaagtgcagttgcatgaccatggcccactgcagcctcaaacgcctgagctcaagtgatcctctcacctcagcctcccaagtacgtgggactacaagcgtgcaccaccatggcccggctaattttttgtatttttttgtatagacggaggtctccctgtgttgcccaggctgatctcgaactccttggcttcaagcaattccacgaccttgacatcccaagcagctgggattacaggtttgagtcaccaccctagccactggatttttaaaccttcatcttgaaaacatggcttccaaacctaacagttgcgttattagagaaaaatggctgagaaatgaaaatccaacccacaaaataatttaaaccaaccagaacaaagaaagattcccgcagttcatcccaacaggtggtttccaagcaaacgagggttttttaagttctatcaaaacccccatctagtagaactgagtatatttttgtatctatgtaaacagtcgttcttatacaggaatgttcaattaaaaagttaagaacttttaaactgcttatagtgttgaagcaacttcctaaccctttataatccatgctcttccaaacatgacataaaatattttaagcaaattaaatactgcttttcaaagtaacaatttcaagacacttgaggggacagaatcaatctgaaagaccacagaatccacagaaaaatcagatttaacaataaaactatttcttaaattgggaatacttctttatataaagtcccactaggaaacacaaaactttgtacccttttcaccagtagtttaaaactcatttattatacgatgaaattaaaatttgtaaaaatgagccgggtgcggtgactcaggcctataatcccaacactttgggaggcgaggtggggaagggtaggagggggaggatcgcttgaggccagaagttcgagattagcctgggcaacatagtgagactctcttttttttttaatgtttaaatggcattatattgtgacaaatattaaataaccaaatattgcacaggaagcattatcatgacaaacgcggtaaaacttttccgtgcaatcaaagagcaacaaacagtacacattttaagcaatgtttaggtcattacaagctacaaatattaaggcgaacgcttccgttgacagcgtgctgcccccgcccccaaattcccacgcgctgccgcacgccttcagctcagaagccccctttcctgggcaggcgaacgggctgcacacccctcactccgctgcgaagtcaaagggctgcagacaaagacaacagaagcacgtgacaaaagtttatccccgttccctccgggggcccgggcagctgggcctaggccacgcggggcggcggcccagagcacaggcaggggcagcccggcgggcggaggcggaagcggcgcggggctgctagttaccttttcctgctcctcgcgcagccgcgccacatccggggcgcgcaacggaaccagggcaggggccggggccgaagggggcgaggggtcggggggcgtctccacggtgggcgcctccatgacgggcccgcgggcctcagcgcggcgtgtgagtcctgaaccagcgcctgcgcaggcggcgcggccggcagttgcccagcgcccgcgcgcccgccctcaggcaccgcgcgccccgcgcccaggaggccgcgcccgccgccgccgctgctgttcgcgtccgcgccgcccgctgccgcatctcacacgtgcatgtccccgccgccgccgccccgcagcgggctccgagtagcaggccgcctgccaggtaccgagacgcctctccggtgcgggcccagccaggcgtcgcgtggcggccgcgcctccccacacgccccgcctctcgcggcacgccggaagcaagcgcgcaggccccgcccccgacacgcccagctcgcgcaggccccgcccccaggggagtgcgcttgatgcgaaccgcgtggctggggctggcggtgtccgcgctgggctgcgtttgtatccctctggaagcttacattttatgccgatatttctttctttttttttttttgagattacgtatatgaaagcactaaatataggctttggaaccttaaaaaaaaaaagcttacattctatagaagctccacgcccaggaaacgctcggcaacaagagccgcgtgtcgccttgagtgccccatctccctccccgtcgtttggcgctgcatctgtatctaggagcttaattcatgtactagagctgtttcataagcacatttaattttagcaaattcaactctttctgtgcctttttagtgagttgaaatatacaattatattttgcatgttcattaattactgtacacattgtattttctcttatataaattaagctactgtactaattttaatatgctgctatgaatggactaagaaattttccaaggataactttgcccccacttttcttttttttttttttttttttaagagactgagtcttggtctgtcgcccgggctggagtgcagtagtgccatcatttctcactgcagcctcaaactcctagactcaagcgatcttcccacctcagcctcaggagtagctgggaccactggcccgcaccaacacatcctgttaatttttctattttttgtagaggcggggtctccctatgttgcccaggctggtcttgacattaagcgagcctcctgtcttagctaacctcctgtcttggattccctgaagtgctaggattacaggtgtgagctaccacacctggccgttccaattattttagaactcctgtgcccacttcctcctacagccctttgtacagcctcctattaacctaactgcgtgaaagtggccttgccttatctgctgcagtcgctagcagtaaagatgggtcgtgttcgttccacatcatacagacaagtctaggcagagagatgcctgcagagtcacagcctggtgtgcctgcttgctctgcttctcttccctcactcctgcccagctcccaagtccagatccaccctttttttcctttttatggcttcaaaggaagaaagcaaggacaacttgggaaaagataaatgttcattcctgtcttttcctcactgcatatccaaccatcatcacctctggaacagccaggacctgaccattgttaccatctcttctaccaccaccatcctctctccatccccagccacctcagcaaccattgatctggccttgctgcccctactcttgtcccttgtaatggagatcggctgctgcccaccccacttcccctcgtttaggggcttaacccgcgaccacatagtcctgtgcctgtaggaagctgacccaccccctagctccaggcaaagggggtgatgcatctcccttctaaatagttggttcaagaatgggtgtgcgatgtcgtccaaacagagacttcctggaggcttctgggaaggttcttttttttttcctctgttgcccaggctggagtgcaatggtgccatcttggctcactgcaccctctgcctcttgggttcaagcgattctcctgcctcagcctcctgagtagctgggactacaggcgcgtgccaccacacctggctaatttttgtatttttagtagaaacagggtttcaccatgttggccaggctggtctcaaactcctggcctcaagtgatccacccgccttggcctcctaaagtgctgggattacaggcaagagccaccacgcctctcctgagaaggttcttcctcattcttcaaaagtgctcccataaggaatcagtctatccccttggccaggaagtgcaaagcaggtagccccatgtgtatcagacagccccccagaccacctagacactccag

SEQ ID NO: 1561255 - DNA, 4001 bp, Homo sapiens
ctggccaacataatgaaattccatctctactaaaaatacaaaaagttagccaggtgtggtgggggtgcctgtgatcctagtgacttgggaggctgaggcaggagtattgcttgaacctgggaggcggaggttgcagtgagccgagatcgcgccaccacactctagcctgggcaacaagagcgaatctccatcgcaaaaaaaaaaaaaaaagtaaatgccatgaagtcaccccccttgtcttgttcccaaacctgtcccttctgacctcaacctcctcaccttcagtcaggacatggggaaatcccatgacctctgagcctgtttcctcaaccttaaactggtaacgacaactcatattttttttttttgagacggagtttcactcttattgcccaggctggagtgcaatggcttgatctcagctcaccgcaacctctgcctcctgggttcaagcgattctcctgcctcagcctcccgagtagctgggattacaggcgtgagccaccatgcccagctaattttgtatttttactaaagacggggtttctccatgttggtcaggctggtcttaactcctgacctcaaatgatccgcccgcctcggcctcccaaagtgctgggattacaggcgtgagctgccgcacctggccacaacaactcatattttaaaagattgagctgatccacataaagtgctcagaaaggaacttgtcatcctcttttacggctgaagaaacttatgtgtcttgtaagttgcaagccaggactcaaaccctgctcttgggccaactctggggcttaaccagacacattccatttttgccttgtaccaaattcctattcatctagcaaagccttagccacaatgcccctctgttgggcagccttgtgtgatgacccagggaagagattgctggacccccttagggttcctgtatctgacagtattgtggttctggctgcctacaagcatagaacccctattcctgtccaagggattcccagggaccagggaaggagccctaccgtgcctagtagctcactccgcatctcgctggtgtaccgcgcccgtgactgcagatgcaccgtctttgtggcgggcactcgctctctggctgtggttggcacacggccaggggccaggaactggttggccagtgctttctctgaggaggaggtctgcagaaatgtgggaagataagtcactggaggggcaggtcctggggaccaaagtgagcggtgatgggggctgagggggcaggggcaccccttctcaccagcttctcggcttgcagcatccccttcagaaaatccaccttccaggaatattcattgatcacctcagaggccggtttgctggaaggcaggaagaagaaaaacaaaacctgtccatggtccccagctcagggaagggtcccagctgggatagcggtactgggatgtccagtagcacagccacgtgctgatgtgaaagccctgaggctgcctgcactcacctcgcgtggaccttcagggcctgcaacatgtcctctagggctcccacgtactggggaggaaaagtggattgtcacccgggggtctttcccatgtcctgatcatgggagtcgggggggcggggccgacaaatgggaggggtcaagcgtaaaggaggcggggccagtgggggaggggcggagtcccagggacgggggcggaagctacaggtggacgtggcgggactgaccggaaagggcgctgcccgagaggctactggggccggggagtcgggccaggtggcttccaaccctaggaatcaccccccgggagtcgggctctacgcggcagtgcgagatcccctcaccttctccaggcgccactcgtccgggtcccgtttctccgctgccatcgcctcgcagcgggatagcagccgcaccaggtttagctccagcctcgacgccgccattatcgcccggccctacaccaccccttccgccggctccatgttaagagagggcggaagtgccttcaagtggccttccgggcggatgtttcccccgcgctcgttagctggcccatctttgtttggagcggaagtaatatcttgttttgagacggggcgctgggccgggcgcggtggctcagggctgtaatgccagcattttaggaggcagaggtgggaaaggattgcttgaggccagcccgggcaagatagcgctactctatctctattttaaaaaaataggagaggcgccaccccattcttacttaggcgaatcacttgcttttcctcgagagcatgttaacccttcgggaatgataggacgaccggggtcttctggtgtcagacccgcgtgcagtgtgcccttttgttctgttttgcctgctcaaagtacctccccgcaccccactcctacctggattcttcccagtcggagctatttcacgtccacacacccttcccgatttctgtagcctgggattcaggaatccaaggcttcccccacctcagcagggctcatctgtattgtggttatgggtttccaggtcacagctccagctctgattccatcctcggccctgggagagtttaacttttctggatccgcttcttcccccgggaaatggacagtgtgacagtacctgcctcaaggggcacatgagacagctctgcctgagagtgagcaaggtggggctgggtcccccctaacgcccagacccccatggagaaccccttcccagcccacctcagtacctggaagctgagtacccctatgccttgcagtgcctctcttctggagtgacaggatgagggtgggggcttcacaggaaccagggcctggcatgcagccttcatgttttcccacaccttaggtcatctgcaccttggttacaccagtgggcctgatgtccttgaaaaatatcatagacgggtaggtgcggtggctcacacctgtaatcccagcacttagggaggctgaggcagatggatcacctgaggtcaggagtttgagaccagcctggccaacatggtgaaaccccgtctctactaaaaatacaaaaattagccgggcgtgatggtgggtgcctgtaatcccagctacttgggagactgaggcaggagaatcgcttgaacccaggaggtggatgttgcagtgagccgagattgtgccactgcactccagcttgggcaacaaagcaagactccgtctcaaaaaaaaaaaaaaaaaaagaaaataccatggagggccaggtgcggtggctcacgcctgtaatcccagcactttgggagggtgaggtggatggatcactggaggtcaggagtttggagagcagcctggccaacatggtgaaaccctgtctctatcaaaaaacacaaaaattagctgggcttggttgtgcgtgcctgtaatcccagctactcgggaggctgaggcaggagaatcgcttgaacccgagaggtggaggctgcagtgggccgagatcgcgccactgcactccagcctgggtgacagagcgagaccgtgtttcaagaaaaaaacccacaacaaacaatggagaccaaacccagggcccatcaaaggggcctctagaggctggcagggcagagtctaaatcccagccatgcccctcccaactgtgtggccttggagaagcccctcaacctctggcatgtgctgtctgaacttgggttcttcacggtgccccaaccaataccagccagccagttcccacgactcccatccgatggcagcctgggagcccatctgttcctgtcctgctgggcccaccaggaactggccacctctgctggatgggtggctgctgcagctgacatttaggctccagaggctgggcactgaatcagggaggccagagagggctgccaggacagcaggcgctcctggccaagtgaggctctgctgggagctccctgtttggtggaggatcaagacagaactttgaggacagtgttccacccatattctgcacccttcttggctgaggccacagggcagaccccca

SEQ ID NO: 1561256 - DNA, 4001 bp, Homo sapiens
ttgcaaggtaaatccatctgcaaaaacaaaagacatgatactttatgtgcactagagcagcagaaacaggcaaagaaaaaaaacattacaccatgtgcccacttcatgctaactgcccagcttctactccagaaacccctcttccttccatttcaacaccaggccctccaggtgtcccctgcacatacggagagtaagggtgtgtccggggggcgatcgtcctctgtgttcctgtctgaagcacatcctggggcgtcatcatgacgtagaactggcctgcagggagagtggggggttagtggcaaggcagggtgaagtcagaactggctgggggggcttccctccctgctgggcccgttgcctcccccacctgccaatctgacttctactcctcacctccagcctgcaagctctggtctgtggtctgtacggacacagccgtagtatctcccacactggacgctgggaaataggcaaatcgtgcctccccgctgacagcctcggccgccggactgccaccattgctgaagggattttggatcacagcctggggagtaggagggcagaggctacccttagctttctctgttcctccatcccgtcccctcattgctgtgcttggggtttactgcattctctgcaattaacaggagtggggactccttctgcgtgtagcattctgtcctgtgtttcaaacagccctggaacatggcgggaggtcagcgatcacttgctgagcaaatccgtttcgcactctaagaaactttcctcttaagacacatcattcccattttgcgggaaaaaaaaattccaagagcactgtccccaggtttcacggtgcacaacagggatctggccccatgcagcctgaggcctgaaggcagcatccgctgggcgacacctgccccacccccggggctccccaagagcagagccagtgtcccctctccactccctcccccccccacccaggggtggcagggcacctaccagcgggaagggcgctgcaggacctgggggcacagaggcagcggcggggcccgggcgctgggctgccccgtccacacccacctgggtcacagcctgctgcccccccgcgaaggcagcggtggacacgacgctgacggcgccagctgtgtcgccctggccgtccagctgaccatcagtcacctggactacgcggtatgtcacctgcagggggcggcagagcggcgaggccggcgctggggccaggtccgagccttcccggcgcgcccgcccgcccgcccgttcgccctcgcggcccgccgctcacctgtcctccatttgtctctgtgcggaactggtactggatgttgtggtcgccgaacgccgcctgctggacgctggtgatggccaccgctgtctgctcctccgctcctgggccgtccccgcctggggccgaggagggtcggggcacggtcagggccgcgccgagcgcccccagccctccccgggcgcggccggcccggcaagcactcaccttcctgcagctcgacgccctcctccgcctcgggtcccttgtcgtggctgccaggggcacaggagggagcagggtcagcgcggcccgcgcccgcgcccccgcccccgcgcccagctgcagggccccagtcccacccggccgcgcctgaggccgggggcgccgccgaggccgggggccgggggcgggaggcgccaggtcccccccgcgccggcggcctccattttgagccgggcccgcggccgctcgggatcatggcggccccggcctgcaggccgcggggccggggccggggccggggcgcgggggcacggccgggccggggatcttacctggcggcggcagcagcggtggccgaggcagcgggatccagacccgggtccagcatgtccatggggggggcgggggcggggggggcgcggggcccgggggggaggggaggggaggggagggagggaggggagggggcgggcggccgggggggccccgagcccggcgctcacgccgcgcggcaggaggggacggaggagatacgggagccgctcgcgctgatcacggggacaaacagtggggtcatgtgaggaggagatgccgccgccgccgccgcagccgccgccgctcctgcagccgctgcagccgccgccgcctccgcctccgcccgcccgccggctccgggcggcccgaggctccgggacgccgcgcggccgcccccagcccacccagctgcccgcccgctgcacgcggccctcaggcctccttccctgagcagccgccgccgccgcgacttttttttttgaacacggcccgccctggctggccgccgccagtgccctggatcgccggctcgcgcggccgccgcccggcttggcccagtccggcggcggatcgctgctgcagccgccgccgctttctatttttcccccttttttttttcctcctttacttgagctgcgcgcgcgcggcggcggcggcggcggcggcgcgagccccggggcggacgcgcgctggggggaggcggcccggggcgcgcgcgctggtctgtctccgggggcgggcgggcgcgcgcgagcccggggctccgcggggcgcgaggtcgccgcgcgccgccctggtgaaacgcgggtctggatggaacgtcggggtacccggtgcaggggctggggtcgtcgggggccaggtgggctgcccgagtttggagacagtaaagtaggtcggtggggggctgggggggatgggctggaaggggagaggagcgcgcgcgcgtcccggacggccagcctgcggtgcgcgaaggcggagggccggggcgcatgcgcacgcctgggcggggccggggcgcgcacgcaggcgggcggcggctgcgcggggcacgttctccggccggcggcgcgggcgcgggccgggccaggctgggtctcttcctcccggccccggactccggtgcccccgggacgcggcgctttacagacgcatacgggagcagccccggtcccccgccccgcgcggccgaacaaatggttctctccagagcttgtgattatacgttttattagactcgggaggggtatggcagggcttcatcagtgttccttcaaattaaaaaaaaaaatacaaaagctacgtagaaaacgtcagatcagacgactaaactttcccgactcagggccaagttctgcaagggagaaagaaagaagggtatgagccgcggggaccggctgggggcccagggacggtctggacgccagggagggcggccctcaccttcttgagcctgcgctctcgggacgcctgcgagtcggtctccgagtacgggggcggcgcgggcgggtagtaggcctcttcctcctcctccttgtggggtctcctcctctcctccgaccccttcttcctcacagcctcctccagtagccgcccatcataggggaggtccccggacctggagccgttgtcccgagggtcccgggtacggtggtggtgggacctggggtcggcaggagggcgctcccgagacctgaagtcgtcgtagtgggggtcccgggagcgtgggaagtccctcgagtcgtcttggtcatagaggtcgtcccggctgcggctccgcgggggcatgtaggcccggcttctcccaccattactcgtgggagacctgctccctgactcggcggtgctcggcggggtgaggtcgtccagggcgtccacggagcgggcccggggccgcctggcccgccagcccccgcctgcctgctccctggcgggctcctggtcccatcccctgggactccggggggagtggccaccccactcctcatcccggatcggggtgagggcagggccccgggaaggccgagatcgccagtcgtcctcgtggagggaggtgacttcactcatggctgcagggaaggggggtgtcactgactgctggaggagcccggggtccagggtttgcaccaagagtccctgcggcaggtatcagggagacatgtttcacccccccaccttaaaagcc

SEQ ID NO: 1561257 - DNA, 4001 bp, Homo sapiens
ccgctgcctccagggagctcagagtgtgctggagggtctgaaacacatcgggggccccattcccagggggcacagtctccttgtactgtagggctgcttctggggcttggtgggcttccactgcaggtttgtggggcacttcgggggctgaggccagttccctgccagagcccccatccatcttcttgtcagtcctgtggacaccaactcaggcacttgagtcactccatgctgggcaaggaattcttttttattttttgagacggagtctcactctgttgcccagcctggagtgcagtggcgcgatctcggctcactgcaacctccacctcctgggttcaagtgattctcctgcctcggtcccccaagtagctgggattacaggctcccaccaccacgcctggctaatttttgtatttttagtagagacagggtttcaccatgttggctaggctggtgtcaaactcctgacctcaggtgatccgcccaactcggcctcccaaagtgctgggattataggcatgagccaccatgctcggccctgggcagggaattctgagggcttaaacttcatggtcttggggaggtgtgagcggagcagggagttggcaagagctgcgtgttctgggactggcatcccagggtgagactgggaggctgtgaattcaaggaagaggctagatagaggtggtgaagaagttggaggggagacctggagctgagaaacagagtgaagttggactgtgacgggcactgggaaaggcctgaaggtgagagacagaagtttctggaaatagggtcttctggggcggcggcttacacttgtaatcccagcacttttggaggccaaagttgggggatcacttaagggcaggagttcaagaccagcctggctaatgtggcctgtctcactaaaaatgcaaaacttagccggatgtggtggcgcacacctgtaatcccaactactcaggaagctgaggctcccgcttgaaccgggaggcaggggttgctgtgagccgagattgtgccactgcactgcactacagcctgggtgacacagcaagactcaaaaaaaaaagaaagtcaggctgaaggcaatagggagctatggtaggtgtgtgagcagagcaggcacatcagcagatctgtggatggcaaagatgcgtctggactggagtgaagggcacagaccaagcgggtcttacctgcttcctaggccttggccactgacctcctccatggggcccagctgctccagcccggagctcaccggaggtggggcaaagctgggcttggagctcccactggctgcctcgacctcctctgaactctcagccacgggatccagttcaccctgcaaatgacccccggggccctgctctgagccaggcaggacaggaccttggggtccccaggatctgggtgtggaggggagagggtgacacttacgggtggagcatgcctccctcgccggcttcggggccgcgtggcccgggcactcattgctgtccagaagccagtgccctctgaatgcttctccttcgtcaacccctaaaaccacagcctgccatgagctcttgcctttgttgtcctggacaaaggacaacctcaatttcctctgctgtgaaatggggcactgactacccctcaggaagggattttgttatcaatgttgattgggcagatttgaatgcctccctggacagggagctcactacctaagaaggttgtcctgatctcccccttcttctctgccttctttaccttcactacgtctttgtccactttcctcctctatttgagcctgggaatgcgatctcaagaattccctctcctccccggccctcctaaatgagaggttcagctctctctacctctctgatcctctgggggtaacttgatcagaggcctgagtcccgggacactctgttggggtcactctgaccactgcctgttcaggcctgggctggccaagcctggcctgggaggggctgggaaacaggaaaccccctcccctggtcacgtgacttgttattgtgttgtttccttctcggggacagcggcttcctgcagccctagcggggcacacatacctgactcccaaggtttcagcccctcctcttctcagcctccaaactcatggcccttctagctctgactcttggattttatttctcaagagctagaatgggccgagcaccatggctcacacctgtaatcccagcactctgggaagctgaggaagacagatcgcttgagtccaagagtttaagacaagcctgggcaacatggcgagacccccgtctttacaaaaaatataaaaattagccaggagtagtggcgtacgcttgtagtcccagctactcaggaggctgaggtgggaggattgcttaacacctggaagttgaggctgcagtgagccgtggtcacgtcactgcactccattctgggtaataaggcaagaccctgtctcaaaaagaaagaaaaaaaaagagctagaatgttcccgtgagctgatggtttttatttggctcccctgtgaacttttcttctctgcctgtctcttcattgtgggctgacagttctcttttttttgagatggagtcttgctctgtcgcctaggctagagtgcagtggcgcaaccttggctcattgcaacctccacctcctgggttcaagaaattctcctgcctcagcctcccgagtagctgggattacaagtgcccaccacaatgcccagctaatttttgtatttttagtagagacagggtttcaccatgctgaccaggctggtctcgaactcctgacctcaagtgatctgccagcctcggcctcccaaagtgctgggattacaggcgtgagccaccgcacccggctagggatgggtttttcccatgttggcgaggctggtcttaaactcctgacctcaggtgatccactcacctcagcctcccaaagtgttgggattacaggcatgagccaccgaccccaccagccccagaaacatttaagagccacttgaagcctcagtttatttatttattttattttattagatggaatcttgttctgccacgcaggctggagtgcagtggtgcgatctcggctcactgcaacctccacctcctgggttcaagcaattcttctgcctcagccttctgagtagctgtgattataggtgcgcgccaccacacccagctaattttttgtatttttagtagagacggggtttcaccatattggccaggctgatctctaactcctgacctcgtgatccacccacctcagcctcccaaaatgctgggattataggtgtgagccactgcccccaactcctcagttgtttttttttttttgagggtcaaagaagccggccacattggccaggctctaattcgagaatagccggaggggctgtgtaaggtgagctttgaagcataaagaacttgccagaaaagcaacaggaggaacagcattccaggcagaaggaacttcctgggcaaaggcttagagccttcaaagagccgctctaggtgacacagcgagactccatctcaaaaaaacaaaaacaaaaacgaaaaaaaaaaacacaacaaaaacccagctctactaaaaatactatatatatctcagccgggcctggtggtgcatgcctgtaatcccagctacttgggaggctgaggcaggagaattgctcgatccctggaggtggaggttgcagtgagccgagattgagccactgcactccagcctgggcgacagagcaagactcttgtctcaaaaaaataaaaataaataaataaatacttctggggctaagggggaagtgtgcactaagaagacaacggcagcctgggcgacagagtgagactccatctaaaaaataaaaataaaaaaaaaaggaaggaagcctagggtagtctgatgcggtggtcctcgcctgtagtcccagctacttgagcgatcgcttggctgtagtgactagccatgatcgcgtgact

SEQ ID NO: 1561258 - DNA, 4001 bp, Homo sapiens
cttgtgccttcgaactccatcggcccagaatggctggggggctggtggcgccaggctgcagccgctgcctccagggagctcagagtgtgctggagggtctgaaacacatcgggggccccattcccagggggcacagtctccttgtactgtagggctgcttctggggcttggtgggcttccactgcaggtttgtggggcacttcgggggctgaggccagttccctgccagagcccccatccatcttcttgtcagtcctgtggacaccaactcaggcacttgagtcactccatgctgggcaaggaattcttttttattttttgagacggagtctcactctgttgcccagcctggagtgcagtggcgcgatctcggctcactgcaacctccacctcctgggttcaagtgattctcctgcctcggtcccccaagtagctgggattacaggctcccaccaccacgcctggctaatttttgtatttttagtagagacagggtttcaccatgttggctaggctggtgtcaaactcctgacctcaggtgatccgcccaactcggcctcccaaagtgctgggattataggcatgagccaccatgctcggccctgggcagggaattctgagggcttaaacttcatggtcttggggaggtgtgagcggagcagggagttggcaagagctgcgtgttctgggactggcatcccagggtgagactgggaggctgtgaattcaaggaagaggctagatagaggtggtgaagaagttggaggggagacctggagctgagaaacagagtgaagttggactgtgacgggcactgggaaaggcctgaaggtgagagacagaagtttctggaaatagggtcttctggggcggcggcttacacttgtaatcccagcacttttggaggccaaagttgggggatcacttaagggcaggagttcaagaccagcctggctaatgtggcctgtctcactaaaaatgcaaaacttagccggatgtggtggcgcacacctgtaatcccaactactcaggaagctgaggctcccgcttgaaccgggaggcaggggttgctgtgagccgagattgtgccactgcactgcactacagcctgggtgacacagcaagactcaaaaaaaaaagaaagtcaggctgaaggcaatagggagctatggtaggtgtgtgagcagagcaggcacatcagcagatctgtggatggcaaagatgcgtctggactggagtgaagggcacagaccaagcgggtcttacctgcttcctaggccttggccactgacctcctccatggggcccagctgctccagcccggagctcaccggaggtggggcaaagctgggcttggagctcccactggctgcctcgacctcctctgaactctcagccacgggatccagttcaccctgcaaatgacccccggggccctgctctgagccaggcaggacaggaccttggggtccccaggatctgggtgtggaggggagagggtgacacttacgggtggagcatgcctccctcgccggcttcggggccgcgtggcccgggcactcattgctgtccagaagccagtgccctctgaatgcttctccttcgtcaacccctaaaaccacagcctgccatgagctcttgcctttgttgtcctggacaaaggacaacctcaatttcctctgctgtgaaatggggcactgactacccctcaggaagggattttgttatcaatgttgattgggcagatttgaatgcctccctggacagggagctcactacctaagaaggttgtcctgatctcccccttcttctctgccttctttaccttcactacgtctttgtccactttcctcctctatttgagcctgggaatgcgatctcaagaattccctctcctccccggccctcctaaatgagaggttcagctctctctacctctctgatcctctgggggtaacttgatcagaggcctgagtcccgggacactctgttggggtcactctgaccactgcctgttcaggcctgggctggccaagcctggcctgggaggggctgggaaacaggaaaccccctcccctggtcacgtgacttgttattgtgttgtttccttctcggggacagcggcttcctgcagccctagcggggcacacatacctgactcccaaggtttcagcccctcctcttctcagcctccaaactcatggcccttctagctctgactcttggattttatttctcaagagctagaatgggccgagcaccatggctcacacctgtaatcccagcactctgggaagctgaggaagacagatcgcttgagtccaagagtttaagacaagcctgggcaacatggcgagacccccgtctttacaaaaaatataaaaattagccaggagtagtggcgtacgcttgtagtcccagctactcaggaggctgaggtgggaggattgcttaacacctggaagttgaggctgcagtgagccgtggtcacgtcactgcactccattctgggtaataaggcaagaccctgtctcaaaaagaaagaaaaaaaaagagctagaatgttcccgtgagctgatggtttttatttggctcccctgtgaacttttcttctctgcctgtctcttcattgtgggctgacagttctcttttttttgagatggagtcttgctctgtcgcctaggctagagtgcagtggcgcaaccttggctcattgcaacctccacctcctgggttcaagaaattctcctgcctcagcctcccgagtagctgggattacaagtgcccaccacaatgcccagctaatttttgtatttttagtagagacagggtttcaccatgctgaccaggctggtctcgaactcctgacctcaagtgatctgccagcctcggcctcccaaagtgctgggattacaggcgtgagccaccgcacccggctagggatgggtttttcccatgttggcgaggctggtcttaaactcctgacctcaggtgatccactcacctcagcctcccaaagtgttgggattacaggcatgagccaccgaccccaccagccccagaaacatttaagagccacttgaagcctcagtttatttatttattttattttattagatggaatcttgttctgccacgcaggctggagtgcagtggtgcgatctcggctcactgcaacctccacctcctgggttcaagcaattcttctgcctcagccttctgagtagctgtgattataggtgcgcgccaccacacccagctaattttttgtatttttagtagagacggggtttcaccatattggccaggctgatctctaactcctgacctcgtgatccacccacctcagcctcccaaaatgctgggattataggtgtgagccactgcccccaactcctcagttgtttttttttttttgagggtcaaagaagccggccacattggccaggctctaattcgagaatagccggaggggctgtgtaaggtgagctttgaagcataaagaacttgccagaaaagcaacaggaggaacagcattccaggcagaaggaacttcctgggcaaaggcttagagccttcaaagagccgctctaggtgacacagcgagactccatctcaaaaaaacaaaaacaaaaacgaaaaaaaaaaacacaacaaaaacccagctctactaaaaatactatatatatctcagccgggcctggtggtgcatgcctgtaatcccagctacttgggaggctgaggcaggagaattgctcgatccctggaggtggaggttgcagtgagccgagattgagccactgcactccagcctgggcgacagagcaagactcttgtctcaaaaaaataaaaataaataaataaatacttctggggctaagggggaagtgtgcactaagaagacaacggcagcctgggcgacagagtgagactccatctaaaaaataaaaataaaaaaaaaaggaaggaagcctagggtagtctgatgcggtggtcctcgc

SEQ ID NO: 1561259 - DNA, 4001 bp, Homo sapiens
ttcaattggtaattaaaaacttttatttagaaatcattgcaaatatacataagaattgcaagattagtagaaataacttatattcccttcacccaaatttaccaattgtgtatattttgccacatctgtctgctttctctctccctcttttgatgttctatgtatctatctatctatctatctatctattttttaatagagacaaggtcttgctatgttgcccaggtctcgaactcctgacctccagtaatccacccgcctcagcctcccaaagtgctgggattacaggcttgagccaccatgcccagacatgttcaagtcccttatataacaggatatacttttactccacttaatgtttacctgttttctttgtagtaaccgtgctttttgttttatatatatataattatatatatataacatatatgtatatatataacatatgtaagtacatataacatatgtaagtatatataacatatgtaagtatatataacatataagcatatataacatacatataagcatatataacatatataagtatatataacatacatataagtatatatataacatatataagtatacatagcatatataagtatatatagcatatataagtatatataacatatataagtatatataacatataagtatgtataacatgtataagtatatataacatatataagtatataacataagtatatataacatataagtatgtataacatatataagtatatataacatatataagtatataacataagtagatataacatatataagtatatataatatataagtacataacatatataagtatataacatatataagtatatataacatatataagtatatatataacatatatatcctacattttcaacacgtgtaacaaatgtggatagtttcaaaaagatcattttacgttctagtagttaccctgtttgaccaaagtgtagtacttttatttttctattgcagtgcattttcttttttttttttggcgggaggtgagggagcggagcggggatggagtctcactctgtcaccgaggctggagtttaatggcgtgatctcggctcactgcagcctctgcttcctgggttcaagtgattctcctgcctaagcctcctgagtagctgggattacaggagcccgccaccacgcctggctaattttttgtatttttagtagagacggggtttcgctatgttgcccaggcagtctcgaactcctgatccgcccgccttggcctcccaaagttctggaattacaggagtgagccaccgtgcccggccttttttctgtttttttttttttttttttttttttgagacggagtctctcgctctgtcgcccaggctggagtgcagtggtgtgatctcggctcactgcaacctccacctctggggttcaagtgattctcctgcctcagcctccccagtagctgggattacaggcacccaccatcatggccagctaatttttgtatttttagtagagacagggtttcaccttgttggtcaggctggtctcaaactcctgacctcaggtgatctacccgcctcggcctcccaaagtgctggcatgacaggcgtgagccaccgacccagcccttttttcttttatatagtttttgagacagggtcttgctctgttgcccaggctggagtgcagtggtgcgatcatacctcactacaccctcgatccccaaggctcaagtcatcctccaacctctgcctcctgactatctgacactacaggcgtgggtaatttttaaatttttttgagacatagtctcactttgttgtccaggctggagtgcagtggcatgatctcagctagctaattttaaaattttttgtagagatgggtggggggagggtctcactatgttgcccaggctggtctccaactcctgggcacaagcgatcctcccgcctcggcctcccaaagtgctgggattacaggcatgagcctggccagcattttctgtttgaatgtttttacgtaaccggagtcgtcatgatggaggtacagttccttggacttccggctcccatggctctggaaatctcagctcggacccgccccttccggcgccgactcccctgattctcctgggaacagaagagttctgggcacagcacgctgcgtctgcgcagtgccgggcgcaggcctcccgacctacgggtctaggtacgggctctagcgtggccggggcacatagagttcctggcctagagctggtggggcgtaacggcaggagttagggttcagagaaaaccagcccaggggcgggttcatcctgttacccattcagcctcaagcgaggtggggtgtggtaggtgggctggtgctagaaaccacgccgggaattgttaataacagtcatcccggccgggcgcggtggctcacgcctgtcatcccagcactttgggaggccgaggagggcggatcacctgaggtcaggagtttgatattagcctgaccaacgtggcgaaaccccgtctctactaaaaatacaaaaatcagccgggcatggtggtgggcgcctgtaatcccagctactcgggaggctgaggcaggagaatcgcttgaacccgggaggcggaggttgcagtgagcggagatggcgccactacaatccagcctgggcgacagagcgagactccgtctcaaaacaacaacaaaacccccaaaaaagcggtcatcctccaggtggaagagacagaagagagggtgcggaagagacttaaaagtcttaggccttcaagcgtgtttgcctcagccacccgtgaatcctacaggaaaactaaaacaactcggccacaagcccccaagtcttggggaagcggacggtttcccagccgagctttaggaggaggcgccgcgggacctcacgggtgacgtcgtccccgggggtagtttgcgcagagggtcgctttgggcgcgcttagagtcgcgtggtgcctgggccagcgaagcccaggtgcagtcatttgtggccctgtcccggcgcgcgaggggccaaggctggtcgggggccgggtccgcgcggtagcaactgcgtcctgccagcttccatctctccctctgagggcctgagcggctgccagagtcaggtctgcaggccgggcgctcacgcgtctgtgcccagtgaggccccaagatgctggtgaggcctcgaccctgactggtgtccaggctcttgacactgtcgtgagaaggaattcatggatgagcagaacaaagtgtggagattcattgcgacgggaataagtacgtactgaagaaagaaaagtgcaggcataccacagagcatcacgcccagcggggtttggagctacctttaaatatttatttaaccaaggggtggaatattcatgaagattcttggaaaaaggtaaacatttcttggtactgcggtgccacacatttttatactaaatacgggtgttccccagagctgtcacagtgggtgtgtgacttagtatgttaatgagcacataatgagaggtcctaggtgaaacgggtcgaatccagcaccatgttgggtccagtcggctttagccagcttggcccacaccctggttttcagagtcttatccgcccctagcttacgcagcgatttcaacggtttcctttgctagtcatgtgaaactgttgcctggaattttccgttctcctgtgaccacctttattattcctgtctcaaggggcaccccatttgtgcctataaggagactgcattgggaccaggctcctggctgctcatggagcctcagccagatggttgtgtgcctgagtcctgtgttcattccacaaacatgcagcaaggctgcgtgggttggagccctgcctccagcgcttccctgctgcatgacactggcaagttgcttaagctctctgtaccccatttcctcctcaataaggcagggatggtgatcgtactagttccaaaggattattgtgagaat

SEQ ID NO: 1561260 - DNA, 4001 bp, Homo sapiens
gccttccaccgagcctgggaccggaaacgcgagggggggtggaggggcggggctggggggcaaggggagagaagagtcccggaggaagagggcgaaggaagagagcgacgctccctaaactgacccctctccagggcggacttggaagggatgttgctataatggggagcggataggcaggaagtcttgagggtatctgtgggtgtcctccttgctccaaattttccagccatgcctttcacatcagaaggaacaaacgcgggagggggattctctagtggtcataaaaaggaatgccacgccactccgatgtcaaagggcaggggttcaggaaatgcgggggatgtgggcaccacggggttaatccccaaccgtccccaggggcctccctgctcaggctgggggctttggggcaggaagtcccagagagagtagaggaagggagatagtattgtcaggctctggccccatgggagagattatggggggccaggggagggaagaataggggggatggttgggcccccctgcccacactggccccgccctcaggtgagcccaggagttcgggggaggccccggccagaccaaatccctgggtcccttgggccgccacccccaggattaaattcctgggaagatagctggaattatctgggaagcctgggtccctagggaagagggctatgaccttgaagctttccagctccccctcctccaaccccaaggctccgggtggatagggggacggtgagcaaagggggaggggccgtggtggggaaggcagccggcctacagcgcttggtgcccgccccccacaccagctgtctcgacaggtgagtcaggaagacaaaggcccccttcccccagctgccgcgccccctccctctccagggccgcgcaggtgggggagccgggccgcccttatggccggaggcggggagccgccctctgctccgagcgcccgctcggtcctaggcacggccagttaagcagattgtgtgcggagcgacggggaaggggggggtcccaccagactctggaggctgcgtccaggtccctggatcggttcacaccagcctcctccacaggaagacctaagtgacccccaaaatccaggggattaagaagtacccccgaagttatggagcgcggtcccacttggggagactttttccagcaccaagtaaacgggggacctgcacacccagggtctgagtctcagtctctcttccaagtcccagggtatcccaaatcggtcccccacaatccttcccggacctcgagctgaagtctggggggagggggaggagagtctgagccctgcctcaatcctggcatccctgcggggagtcgctgccaactttgaggtcctctaaaaaaagtcttaacaattcgggagtcctccgagcgcccccaaatcttgagggctcccaggagaacctcaccgccaccaccccccgagcttggggagtcagtcgtggagaagtgatcgacggttctggggcgcgtccaaggggattcagctcaaatccgaggctcccaaggatctgtccccaaattccagcccggagctagctgggggggagggggacaaaggcggggcgcggagcccgcccgggcggggacgggtcggggggcaggtccggctcacctcatggctgctcggcgggcgggcggctcgcccacgggctggctgctcccggggcgcccctggctggaggttcaggggttcggggctggctccgggctcggctcaggctcccccagggtcccgccccatagagtccggcttcctggggagaatgtggaccgggccggggcgggtctccgggcgccgcttccctcaggcggtctgatgagaggttcctgcagcagaaaggggatgcagcgtccgctccccagcgcgcaccccttgccggtggcggctacagtgttactcttactactgtacttctcttcgttacatttcgttccaaaattccactccccgcacccacaatgccccgcgccttaaaggggccgcgtgcgcctccaggcgagggggtggagggcgcttaaaagggcaactctgcaccctcggcttccgcgatctcgctcctctccccaatgttgtagcccaggggtgcaccctgggaatcacccccacctgaggggcaagttggtgaaggggaaggggacctcccttgcttcctagttcgctcccactgtgggaattctgaggagggtctcggaaggggcgcgatttctttccccatcgacttctccatctcgtactccgctcaattttgggggtcgaggaggaccctcaagttaagcaagtggtctcagattttctccctgaaatcccatcttcggaacaccgcccctccccagcgtttctcttctgtcaatttcggagaggttactaagggggcgagacccccacccgcacgggagtggaagtcgggggagtagggcccaacccctctcaccccaccccgcccgccccgggaaggtgaggaggaagtgggccaagggggcgcggtcggtcgctgactcacagccgcagggtcgggggtggggtggggtggaggtggggactggcgaggagtgcgggagtggggggcccggcattcgcccggggtgggcaggaggcgccggcttctttggtgtgtaaagcctccggcccacgcacgccccgctctgactcagtttcgcctgcggaggacagcaggatcatcccagccctcaggagggcccggaggtgaggagaccctcccgggagcccccgcccccacacgccggctccgggctgagcccagacaccctctgaggcttccgcagcgtgtcttgccggccccgccccgagtgacgtcactgatttggtcgcgccccttgggtagagcgccacctggcccgggtgaggcgcccgagccctgggaaatcagttagttccacatttacacacgggtaaactgaggcctggagacagggaatgaatctggcctatggccctcttgcctgagcccccagaacccggaaagccaccaaggtctgagtgtaaaaccaacaattctcagggccagctgactatgtgagagaatccacttttccagcgtatgtccaagccgagtcccatgtccggatgttgatgttgtcctgacctcctttacctggggagcacgtcatccttccaggccaagctttgacattaattcccctccccttctccaccccactctgggagaccttgaaccctgttcctcggaggttatcattgtttctcagtgtgtttcctcaggctgagttgtctgggagaatgggtagactaaatttctttttttctttttttttttttgagatgtagtctctcgctgtcacccaggctggagggcgctggctcgatccccgcttactgcaacctccccctcctgggttcaagcaattctcctgcctcaccctcctaaagtagctgggattacaggcacgggccaccaagcccaactaatttttgtatttttagtagagatgggatttcaccatgttggccaggctggtctcaaacttatgacctcaggtgatctgcctgcctcagtctcccaaagtgctaggattacaggcatgagccactgcacccagttgacttaatcaatttctggacctcactcaccccagccaggcccgcccggctcagcagctcaacaaacttacctagttgaatgagttaccagttcagtgtgaccttgggtaactgtgttctcctctctgggtctcagctttcccatctgtgacataggaggggtggcatttctgggtgccacctacactacaacaacagtcagcaaacatggttttttgtttgtttgtttgttggagacagggtctttgttgcccatgccggagcgcagtagcataaccagggctcattcgatcctctaacctcagcccactgagtagctgggactgtaggtccacaccaccatgccaggctaattttttgtagagacagggtttagctg

SEQ ID NO: 1561261 - DNA, 4001 bp, Homo sapiens
gaggtcaggagttcaagactagcctggccaacatagtgaaaccctgtctctactaaaaatacaaaaattagccaggtgtggtggtgggcgcctgtaatcccagctactcaggaggctgaggcaggagaattgcttgatcctgagaggctaaggttgcagtgagctgagatcgcaccactgcctccagcctgggcgacagagtgagaccctgtctttaaaaaaaaaaaaaaaaaaaaaaaaaggctgggcgcggtggctcacacctgtaatcccagcactttgggaggccgaggtgggcggatcatgaggtcgggagatcgagaccatcctggctaacacggtgaaacccctgtctctactaaaaatacaaaaaattagccaggcgtggtggcgggcgcctgtagtcccagctactcgggaggctgaggcaggagaatgacgtgaacctgggaggcggagcttgcaatgagccgagatggtgccattgcactccagcctgcgtgacagagtgagactccgtctcaaaaaaataaataaataaataaaataaacagaaggagtaaaggcgcatggatctcttccaccaatggccctgcccctgaaaaccacccgccaggaacccccatgggcccatctccattaacttatcctcccagctcttcatctgcagggccagcctgaggaccagatgggagctgtcccctcagacctcagggcaggactgtgtcccccaggccccaggatagggctgtatctcctttcatcccagaggagatgggactccaccagccccgccccgtcccccgttcccacccagcagccctggggaaccagacatgatgctacagcaacataatgcagccacatcacacgcccacccaaccacattcaaatagggatttgaatatatttcctgagccagtctcatacagccacagtcaaatccaccaccacccctccagcctgggcccctgcagaaatccctgccgagaaaatgcagctcttccaagcaccaagacctcaggacccactctctgagcccaggactgggccctgccttactatctcctctgagatggatgcagggaggaagctcagatccctggggctgcagccccccacctgccccatgctgccccaggcccaggcaggaagccaaggggaaggaagatgtaaggggaaggaaggggcccagggcccgggaggaggagacacatgtgggggaagatgttggcggaggctcctcccccacatccagactctgggggtcaaaggagtccaaagcctcaggtaacccaatggccaccctgggggttctggggagctcccccgagacctctggttggtcccatctgggggcatgaaccacagtagaggcgcctggggcttgagagagttaacccctagtttgccagttctcagcccagatgcgggccaactcagggcccgtgaacccacacagggagcctgttaagcttggggaggccaccccagaatctcagattgtgaccaccccctgggccagccctggacctgtaagcatattccctctcctttgcaggcccagaggtggagcagcacgtcagcccctcgactgtcagccccggggaggacccccgtctccaaccctcagcacacctgcccgcggagggctcacctgggacatctgggggcgcaggttgacctcacgcaggttgatggcatggggtagcaggttgttaagcagctgacacagaaggacaccatcccggagggcctgggccagttcacacacctgagccccatcccaggtcacgcggtggctgggcggcagcacccggcactggatgagccagtgggtgcattggcgccacagctccatggctaccgcctgcccagggccggccgtgcaccctcgcagcctccaccacccacccgcccgcacgcctgccctgctcgcctgtggagcgacagctagtgctaccacttcctcttctttgcctgtaactgtcgccctgagagggggtggaggaggaggagccatggggcgggggggagctgggggagcacctgcagcccagccccaccccacgccttccatgcagaatctgacatctctttcttccgcccactcgacacaggcctgggcatggggagttggggggctgggggagtcaggccagctagactatgagatgggtgagcttcctccatatgcagacggcggcagtgacactctgaaatatacccagaattcacccacttctcaccccctcctctgtctggtccagccccgtcatcactcagctggtcttctgactccagcccccgtaccccacagtctgtcctccctgcagccaccaccagaggttgcctgtgagcatctgagtcagggcacacccttcttctgcccacaactctctatggctcccactttcctccagggacaagcccaagtcctccccaaggcccacaaaaccctgcttgaattgcccagttccctccctgccctccccactccctctctccccctcttcactgtgctccagccacacgggcctcttcgctcttcctccaacatgccaggaacatacggccctgccccagggcctttgcacgggctgtgtcctccaccttaagcaacttcatggctagctccctcacccctacatgtctttgctcaaatgctaccttctcatgaggtcttcctaaatcccctcatttcaaatcacagccttttccgcattccattagctctacccacctccctaggttaagccctgatctttgtccaacaaatctgattttttaagttatttttttccttccttcctttctctccctctttccctcccttcctttcttccttccttccttccttccttccttccttcctttctttctttcctttctttctctctttgtttctttcttctttttttttttttgagacggagtctcactctgtcacccaggctggagtgcggtggcgcaatctcagttcactgcaagctccgcttcccgggttcacgccattctcctgcctcagcctcctgagtagctgggactacaggcgtccgccaccgcgtctggctaattttttgtatttttagtagagacagggtttcatcgtggtctcgatctcccgatctcatgatccgcccgcctcagcctcccaaagtgctgggattacaggcgtgagccaccgcgccaggcttctttcttctttttttttcttttgagacggagtttcactctcgttgcccaggctagagtgcagtggtgtgatcagctcaccacaacctctgcctcctgggttcaagcgattctcctgtctcagcttcccaagtagctgagattacgggcatgcatcaccacgcccagctaattttgtatttttagtagagacagggtttctccatgttggtcaggctggtctcgaactcctgacctcaggtgatccacctgcctcagcctcccaaagtgctgggattacaggcgtgagccaccgcgcccggctttttttttttttttttttttttttttttgacagggtctcattctgtcacccaggctggagtgcagtggcatgatctcagctcactgcaagctctgcctcccaggttttccctgacctcagcctcccaggcagctgggattactggcacctgccaccatgcccaggtaatttttgtattttcacagagacagggtttcagcatgttggccaggctggtctcaaactcctgacctcaagtgatctgcccgccttggtcttccaaagtgctgggattacaggcttgagtcactgtgcccaggctctttcttctgtcatccaggctggagttcagtggcatgatcatagctcactgcagcctcaaactcctgggctcaagtgatcctcccgcctcagcctcccaagtagctggaactacaggcttgtgccactgtgcctggctaattttaaatttttttgcagagaggggcttttactatgttgcccaggctggtcttgaactcct

SEQ ID NO: 1561262 - DNA, 4001 bp, Homo sapiens
tgttggccaggctggtctcgaactcctgacctcaggtgatctgcctgcctcagccttccaaagtgctgggattacaggcgtgagccaccacccagccagtttatggcattttcttatgagaaccctcatttcgtcccctcactcttcctgcagttcgttcctttccattatcttttcccacctattcttagtaggctcttcctctgggaagccttcactctgagatccctcagagccccatatgcccctccatcatggccgctggccaccaatgatgtaactgcccagtgacatgtctgtctctccactggactgtggatacccaatgggcaaggctaagtcttactgatgtgctccagtactcagcagaatgcctgacacacagtaggtgctcaatgaagacgaatgaatgagtgcctggcacagagcaggtgctcggtaaaaatgaatatgtccaattagctctgaagtaatagttcccacctgggacccagctcctcccacctccctgggtgcctgtctcatctctttcatcctcagctgtcagagggactcttcaacaatgctgatatgggccagcatggtggctcgtgcctataatcccagcacttcgggaggctgaggcaggaggatcacttgagcccaggagttcaaggccagcctaggcaacatagtctgaccccatttctaaaggatttttttttttaaatcagccaggtgtgctgtcgcacgcctgtaatcccagctacttgagaggctgaggagggagggtgagactgcagtgagtcgagatcgcaccactgcattccagcctgggcaacagagcaagaccctctctcaaaaataatagataggcatggtggcttagcctgtaatcccagcactttggaagggtgaggtgggaggactgcttgagcccaggagttcaagaccaaactgggcaacagggcaaaactgtctctacaaaaaaatacaaaaaataagccatgcgtggtggtggacgcctgtagtcccagctgcttgggagactgaggtgggagaatcacctgagctccggaggtcgaggtgcactccagcctgggcataggagtgaggccctgcctcaaaaataataaatttaggccgggtgcggtggctcacccctgtaatcccagcacttttaggaggctgaggcgggcggatcacctgaggtcaggagttagagaccagcctgcacaacgtgacgaaaaccagtctctactagaaatacaaaaaatcgaccgggcgtggtggcgggcgcctgtaatcccagctacacgggaggctgaggcaggagaatcgcttgaatctgggaggtggaggttgcagtgagctgagatcacgccactgcactccagcctaggcgacaagagcgaaactccgtctcaaaaaaataataataaattttaaaagttaaaatgctgatatgatcccctcctcccctgctgaagagcctgctatggctcccaatgcctacgctgggcggtctgtggtccctgcgtcgctcagcacctgtgggaaagtgggcctgtttgaagttagaggtccacacctgtgtcacttctcgcaactttacatactgattactaattcgagttttttggtgtttttatcaatccgatactcagtctagcgtctatacaagtgcacacggttccccctgcccttcctcgctttccagcctcggctctgcctccgcctaccgcctcggtgaagtccacctggccggccccgggcctcaccggtccttggcgcgacccagttcgtctagggcggcgcgcagctgctggtcgtggagggccaggcgctcggcttgggcgtgcaccgtgcgctccgccgcgtccagccgcgcctccagctccgctgcgcgccggtgcacggctgccaggtgtgcgtttgcctcccggatctgcagggccggcggcgccgacatggcccaggctgctgtacaggcccggccacgcccccaggcggcccggaactggcacaggccccgcccccgggagggccccgccccactagacctcggcgcgattggtcgctgaccccgctagaccccaccccagagggctgggtcgtgctctcctcaaacccaaacactaccaccggttccgggatcatgaaactccgcccctgagtttgggctcactctaggattggacaagatcttgacagccacgcccccaggctggccacatcctttggcggctcgcgcaactcaggctctggaaacaagattggtcacaccttcgatactgtcccctccctacttggaagctaacaccaggattggcccggactccgcgaaacagcaagcctgaccacgccccccgaacctgtggcctgtcaggggtagatccaggcacggcctcgccccttcatcccttatacagtctcagattggtcaagtcccttttaggttatgcctccaattctagccacgcccccaagtcaagcgcctgtgtacttcatccggcctagggcgtgggacagccgcggggtgaacagaggccacgtcccgctgagcttctcgtattgtcattggtcactttcccgataatccccgcccctgatcctgtccacggcccaaaacagtagcacgctgctcagactccagcttggtgactgaccacagggcatgaccactcgctatgcagattctgacactgggtgtggccacatccccgccatgccccgccccccagtcattgtttcgtcatgtcttgctcctatcaactggagtcccgcccgtcccagtctgagcccggcccctcccctagtagatagtccccgcctctagtagtccctaacctaggactccctgagctgggactagcgaaatctgtctgcactgatcgcagtcgtcctcagtttcaccctctaggaatcggcctggggatgcacgtgctactctcttcctccaggccggtccccggcgcgtgcgcgcgatccatgtccatgtccgcgcctatcaataaagttgctcacttgttgccggcccgctagcccgaaaggttgcgcgcgcagcccgagaagtctcgcgatagccagccgcggctgcccttgcgcttcccgagctggcggggtccgtggtgcgggatcgagattgcgggctatggcgccgaaggtttttcgtcagtactgggatatccccgatggcaccgattgccaccgcaaagcctacagcaccaccagtattgccagcgtcgctggtgagcgccggccgggccccgagggtggagggccgaggccgcagggaggtcgtggggttactgggggctgtttggatcgaacgggtctgggagtctcgcgggtacgcacgtggttgtcatcggggtgtcttgggcggtcgtagggggggatcttgtgtgaaatggatgttggtagggggtccagcagggttggggagcactgggaggtcgtgacatgcgacaagctagtccctggggtcatctgaggcggtcccaagctatcgccaggctcggggaaattgtggagtgagacagggctattatcaggtccaaggagctaagggaccacgagactttccaacggggtagagattgttagaggggatcatgagtcatgattggggcatctgagggcggtacagatgtttgagaaagttttggggtgggatgaggtctttctgtggtcagggggtgctgggtggttagggacacctgaagcttttactgggaccgccagagaggtcctaggtgaggtggatcaggagctactatgagggtagccttgcaggggaatgaaggggacccgcaagccctggcattctccttttttttttttttttttgagacagagccttgctctgtcgcccgggctggactgcagtggcgagatctcggctcactgcaaccttcacgtccctggttcgagcaattcccttgcctcagcctcccaagtagctgggattacgggctcacgccaccgcgcctggctaattattttgtatttttagtaga

SEQ ID NO: 1561263 - DNA, 4001 bp, Homo sapiens
ggcgtgacccacggtgcccagccacttttagttatttttatttttattttgagtctccctccgtcacccaagctggtaagtaattctcgtgcttcaccctctggagtagctgggactacaggtgtgtgccacatggttggctaatttttgtatttgagacagggtttttgccatgttggccaggctggtctcgaactcctggcctcaagtcatcttgagtggatcacttgaggcatttgggagtgcctcagcctcccaaaacggtgggattacaggcgtgagccactgtgcccggcctgcacatgtctttcttacatgtggactctccaggggatttatgctgttcaagaagcacctgaatcaaactgtgctttaaaaatatttttaaaacattccatgattcttcatagtacaaaaatgagaaatctcccctaaatctctaaagaattccctttttaaactttttgatttcctgaacttgtctgaaggacttaacacagttatatagagtgttctttgtgtaacagtatccatgactttcatttttagctctggtattagatcttcctggacaagagcattactggccatgtgtatgttgctatcacaaataactagtagttaatatttcctaaatcttagcaagagttatgataaatagctgaattccatgaagagaaaagactcatggcatgacaaccagattaggaaagagtgttttccttgtcctgcaggcaaaacagaactgagagatatgagtatcactcatgatgaggacaaaagggctgcgtgctgggaaacatgaggcgaccaacacagagttggtcactatccactggcctgggtttgcaactacagttgtccaaattgtcagaaaactatggactgaatagaaaacaaaaaaggagctcaccaggaccatgatggtgtgtgtggctctggcttcctgggaaggtctgcaggagagtctgttgctgtgattgtgttggacttgctgcttgtgtctgtagaggaagaagaccatggagccactggcccagaccatgaagcccaaactcataaaatcaggggaaaaatataagactgcatgtaatgagctaaatctctttgatgctttgtaagaacagtatccataattgttttttgcactactgtttttgctattcagtgggccattcactaatagaagaacagatgcattcatcaagacatggggggcccagcagaggagacaacagaagtcaataaaccttggggatctaatcttgatctccatccacctgcatatactggggttgagcttaatggcttggaatccattgagaaggcagatggtgctgagggaaactcttgtgcccaccctgtgataataaaagacaaacttacatccagtgtcattcagcaaatatttcaatccaaaagctgccattgtctgaggtatccctttaaagaaaaggaccatggagttagccaaggccagttggctgagaatcaagtccgtgggtctcagcttgtgtccagtgaacaaaattaagttataaaaacaaaggagaaaggaatttcccaggatcccaactccagtctgaatgaggaagctaatccctgattttacttttccaaaagccatttcatcaaaatctaggggatgttgattttcattgaggtctgaagaatcagtagaataaaaaagcagaaagaagtatcttgtcatcagtggagacagaagttttaatgtgtctccaaccatattttctcatcttaaacagaaattaagattgtccctgttcgtgcaaaggcaattgcttgtgtgtccaactgcagagaagcaggtgaatgaatgagggctcaaccgcacaacagatccacaaatcaaacctataaaactcagggcttacacacatgcaacaagtaaatacaagcaaaactagggaaatatataaaaacagaacacagaagagtcaatatcattagagtgatattatactatagtttgcaaaatgtaatcatgacggaaccctgggtaatatggacagggctttttctgtattatttcttatgactgcttgtgagtctacacttatttcaataaaaccttcaattaagtagcctggagatatgaaaagcaaaaataatacaccataaaaccttttccacactaatattttagtaaacaccattgttattgatgcattgaaacaaattttaggccgggtgcagtggctcacacctgtaattccagcacttcgggaggccaagatggagaccatcctggccaacatggtgaaaccctgtctctactaataatacaaaatactaataatacaaaaattagccgggcatggcggcgcgtgctagtcccagctactcgggaggctgaggcaggagaatcgcttgaacctgggaggcagaggttgcagtgagctgaaatcaaaccattgccctccagcctgggcgacagagcgagactctgtctcaaaaaaaaaaaaaaaagaaattaaaaaaacgctacaatacaattggtaacaaggccttcagcacagtacaaatgctaacttgaagaatttttaaaaactataatttttggaacaatcaacattgcatcatggtatattttattttaagcacatatatttctgttattttccaccggacaggtctagagattgtgaattgactccgtagaaataaccatgaccaccttgagcccacacatttttatctcaatgccatttctcacaagtaaatgcaaaagatcctgaaaataaatactaatcccagaaacacctaagatatccttaaaacttgttaaataggaaattcaatatgttccagaaagcttgggtttatttttagggaaagataattcaattgggagggaatttcattgcacaatattcatatatatcaatcacaaaagaaatagtaactgcggccaggcacggtggctcacgcttgtaatctcagcactttgggaggctgaggcgggtggattacaaggtcaggagatggagaccatcctggccaacatggtgaaaccccgtctctactaaaaatacaaaaattagctgggtgttgtggtgcgtgcctgtagtcccagctactcgggaggctgaagcctcctgggttcacgccattctcctgcctcagcctcctgagtagctgggactacaggcgcccaccaccacgcccggctagtgtgtgtgtgtgtgtgtgtgtgtgtgtgtgtgtgtttagtagagacggggttgcaccgtgttagccaggatggtctcgatctcctgacctcgtgatccgcccgcctcggcctcccaaagtgctgggattacagggatgagccacctcgcccggccataatttagattcttttggtgtctctatggaattgctatcatcagggaaaattatgaggtattttctcccatgaataactacatctctttaggggtggagcaatcaataacacagcagtatcaagattctcaggcgagaggtggctcacgcctgtaatcccagcagtttgggaggccgaggctggtggatcagctgaggtcgggagttcgagaccagcctgaccaacagggagaaaccccgtctctactaaaaatacaaaaattagtcagaggtggtggcgcatgcctgtaatcccagctactcgggaggctgaggcaggagaatcgtttgaaccccagaggcggaggttgcagtgagccgagatcatgccattgcactccagcctgagcaacaagagtgaaactcggtctcaaaaaaaaaaaaaaaaaactcaggctctgaggtatgaaaaccttttagattcccacaaaccacttgttgacaaatgtttttcctatttatatgaactcatcatttattttcaagatagttcctgattctttgctttaatctcttattttgctccattgtcctagttgtataatttatttccaatatgcatttggtttcctattttttcagcttctccttataaagtaccatttttacta

SEQ ID NO: 1561264 - DNA, 4001 bp, Homo sapiens
tattttagtacagacagggttttgccatgttggccaggctggtcttgaactcctgacttcaggtgatccgcccacctgagcctcccaaagtgctgggattacaggtgtgagccaccatgcctggccccatctgcaccctttgtaaaagtgagctgacacagctccctatattcctttttgtctcttatggatcattcttcaaatgtttacctggaaatattttaatatactaatctttctcaataaacattatcatatttcaaatgtccacagtttttttatgggatgtaaggcacaatttcaaaatgagatttcaagaggtcaaatatccaaaccataacaaccacccacatgctatgcccatttaggcaactgctatgcccatttatacaattccaagctctagtacgtcttaggaaaatttaatatctcagattggacatcacacatttaaagatgctttcagtatctatacattatttcaggactattttatggaatctgaagttcttcactgcaatcattaataaaaaatacaactatataagtactcacatgttaattacataagatttcatttactatggctattattatttagtatttcacattggataagtctctgtcttattcacccctctctctgcagtgaaattggctgataatcattcttaagatcccttgaggtctgagtgcatcagtggccgaacataaaccaagacagccaattcacattttcctgaaatcatgaaagaatcgtctatttcttctgcagcagatactgcagagcctggatctgctggggtcacggcacatgagaacaaaagggctaatagttggaaaacaggcaatgattagtgcagcagtgttcactagccaccaactggaattatcgaagagagctaaataaacgtaggtgatgaaggaaagggcgtaacataatgcaaaggtgctcaccaatgcaaggatgctttggatggctctgttcccaggagaagagttggggtagagattgttcctacagatgtgttgtacctgctgtttgtgcctgtacaagaccaaaacgatggagctgctggcccagagcatgagccccagacacaaaacatcatggaaggatgtcaatgctgcatatactgactttgtgacttcatcactaagtggggcagaacaatatcccaaatctcctttctttgtgatgttgttgttgctccatttgccagttgtataaataggaaaaatggcatttaccagcatgtggaaggcccagcacaggatattggagagaccaatgtatgtcggggcttttactttcatctctgcccacctggagttcctagggttgatggtgatcacctggaagacactcaagaggcaggtgcttccaatggacacacccctgcctaccctgtgtgcatacaaaagaaatttgcatccaaaataattgtcaaaatgtttcaacccaaaagttgccatggtctctgggattcttttagataggataaccaaggagtcagctacagtcaggtgcctgagaatcaaatctgtggatcttggcttgtatcccctaaagtaaaggaacatataataatataagagtgaaaaattccccaggattccaacaactacctggaatagtgtagggtccagccccacaggtttggtgggtttctctccgtgtgcagagacaagagagtgtagaaataaagacacaagacaaagagatgaaagaaaagacagctgtgtctgggggaccactaccaccaagacgcggagaccggtagtggccccgaatgccaggctgcactgatatttattggatacaaagcaggagactggtagtggccccaaatgccaggctgcgctgatatttattggatacaaagcaaaaggggtagggtaaagagtgtgagtcatctccaatgataggtaaggtcacgtgggtcacgtgtccactggacagggggcccttccctgcctggcagccaaggcagagagagagagagggagagagagagacagcttatgccattatttttgcatatcagagacttttagtactttcactaattttactactgctatctagaaggcagagccaggtgtacaagatggaacatgaaggcagaccaggagcgtgaccactgaagcacagcatcacagggagacaggcctctggataactgcaggtggtactgagtcaggccctccacaagaggtggaggagtagagtcttctctaaactcccccagggaaagggagactccctttcccggtctgctaaatagcgggtgtttttccctgacactaacgctaccgctagaccacggtccacttggcaacgggcgtcttcccacacgctggcgttacccctagaccaaggagccctctggtggccctgtctgggcgtaacagaaggctcgcgctcttgtcttctggtcacttttcactatgtctcctcagctcctatctctgtatggcctggcttttcctaggttatgattatagagcgaggattattataatattggaataagagtaattgctaccaactaatgattaatgatattcatatataatcatgtctatgatctagatctaatataactcttgttgttttatatattttattatgctggaacagctcgtgccctcggtctcttgcctcggcagctgggtggcttgctgcccacaaataggaagatcattccaattttcaggtccacagaggccattctgtcattttccagcactcaatattgagtaagcagaaggttctgcatggcaacacgagttgtgggccacattttcatggaaaataacctttcacttatgacgatttcttccccctgaatattaaaagtgaaatatatagagagatatattgttaacaaatttcccatttcgtgtatttctttttacagcacctacaatgtatgagtgacttttataaatgctgtacctattctgacatttaatattcacaactccatgaggtaggaattcatattattctcctttcaccaactctaaaagagtttaagcacaaggagattaggtgactcatttaaataccagaagagtgaagatttgaacgtgagtagcctggttgcagtaacattggtgttcactactacgctataatagttgcctagttgtgtcctttatatatctatacacacatatatatacatatacacacacacatacatacacgcacacctacatatgtataaatatttgtcatgttcactttataaatttggtttgataatttcctatttttgtcaaagtatttattctacatatcaatataacttatgagtgaatattcataggtcttgataagttataataggcactaaataatttcatatgacccaatgtatttaatgtgagtagatgttaagataccagcagaaacactcatttcactgtctgcaaagactaaaaatactacggcacccatcacggaaattaatgtacaacattaggtagagtgtgcactaaaatatgagacatgaaacataaaaggtgataaagcattttaggctagaaaacgaatcattttaaagattatgtaactatatatttattattttaaaacaactaactgaaacttgaattaatatttgatttgggaaacctatgaaaatataataattctgcaaaatggaatttgaaagtatggaatcttgtgcatttaatacattgaaaagagaaagaggctgggcgctgtggctcacacctgtaatcccagcactttgggaggccaagatgggtgggtcacaaggtcaaaagatcgagacatcgtagctaatacggtgaaaccccgtctgtacgggtgagactccgtctcaaaaaaaaaaaatttaaatacatatatgtatttttatatgtaaaataaatagaatttttatatgtgtatgtttatatgtaaataacatatatgtatttttatgctaaaatgcactctcatttttttttcacccttcacctgt

SEQ ID NO: 1561265 - DNA, 4001 bp, Homo sapiens
tctaccatctactcgtctagatcctcaaatctatgcagtctcacagagtgtgtgtggttttctgttgttgttattgttgttgtttgtttgtttgctttgaggccgggtctcactcccttagcccaggctggagtgcagtggcgcgatctcggctcactgcaagctctacttcctgggcttcaagtgattcttccatctcagcctcccaagtacctgggtctacaggcatgtgctaccatgcctaggtaatttttttcatatttttagtagagatgaggttccgacacgttgcccaggatggtctcgaactgctgggctcaagccatcctcccgccttggcctcccagaatgctgggactacaggcatgagccagcacgcccagtcagcatctgctttttaatagtcagcattcacaggatgtttttaattttggcataaatatatttttttgtctcattcttgatcagtgtaaccatttctacatgaaaatgatttaaatatactgatttccctccatatagttatattttaaattactattatctgtctgaggatgtaacgtacagattttataacttgggacccaaatctggaattaaccaaaacctcgcctccaagcaacctcattacttcaggagaacatttttttcttcactttcctgaatggtcatatcacacactgctacttgtcatgtaactttttcaacaatctcacgcttacttaatttctgcatagatttattatatcagatcgaaggttgcacactcaaagagatccccatcattgccagattgattcaggacctaatttttttaattgcgtagacctttaatgactctactgcaggccttaataaaactttgataatatgaatatttacataataattgcatcatatttcatttacaattgttcttactagttattgtttatcattggggtggaagttcaccctgtcttgttcatcaccttctcataattgggagaggttcataattaagattacattgcggcacagaagagtaagtcatcaattgaaccatgagcaaatatatacaatgtacatgtttatgatgaggttaggagatcttgtcatcttttccaggcaaaacaaaacctgtatacactggggtcacagctcatgagaacaaaggggctgagagttgggaaacatacactcattaaggctgaagtgttcaccagtaaactattgggattatccaaaagagccatacaaacttggaaaaggcaggagagagtgtaagaagacacaaaggtgctcaccaggatgaggatgctctgcgtagctctgttctctggggaggctctgggggagagattgctcctatcaatgtgctggacccgctgcttgtgcctgtgcagtatgcaaaccatggagctgctgacccagagcatgagccccagacacaacacatcagggaatgataacaacattgcacgcagtgtctgtgcgattttgttgttgcctcccccagaacagtatcccaaatcctcgttcactgtgatgtttgtgtagttccatttgccagtcacatacatgggaaagatgatgtttaccaacatgcacacgatccagcacaggagaacagaaaagccaacatgcttgggggctttctctttaagttttgcccacctggatttcctggagctgaccgtgatcacctggaagacactcaagaggcaggtggtgccaatggacactcccctgcccactctatggagatagaaaacaagtttgcacccaagagcattgagaaaatatctaaccccaaaagctgccattgtctgggggactcctttacagcggagagctaagaagttggctacaatcaggtgcttaacaatcaaatctgtggaccttaacctgcacccagtgcagtaaaaggagagataatggagaagaacagagaagctccccaggactcccaccacggtctgtgataagatcattcccactgccacataccgggaggccattctgccactgatgtctgtcactgatgtttgtcttcagggctgggaggtcctgcatggaaataggaggcatgagctacgtttatagtgtcacctgcaacccagcattctccacctcccattgctctgcccttagaaatacttaaagtcactcttctcttaagaggcttttgagagttgaatgcgtaacctttaaagagcacttcccatgtgggaatcactgctgtgcagatcatacgtgcggcaacttctttattcacaaacctatgaggcaggcattactattactttcattgtaaatatgagaaggacatacacacagagaggtgaagtggctggcaacatttccaccctacttacaggcaaaatgcgaacttgaacctgcctggttttattgcaaagacagtgcatttagccgttatagttgactaacaaagctagatagctgtgttctttgaataagacacacacacacacacacacacacacacacacacacacacacatacacacacacacccctttgtttttattccttgtcattatatttcagtcttgtagtaggttactgtatgttgtaatgattttacattatgtgtaaaaatgtattctatttgtcaatatccaaataaataaaggtttagagatcttaaaaaatgtagatgcagggattacagtttgatactatagaaacctgcaccatgacaagttggatttaatgactgcaagcatggatcaatattagaatggaaagagagtaaaaaacattgtgagcatttgcttttgtgccacggacaaaggcataaaggcacctaccacaatcatgtcttacccaaaacaataggacatgaaacaacaatatgggataaaatagtgtaaggtaataaccaaattcttacaaatgttagatgacatatctagatctattaataactgagttaaataaattattatccttaggacaatatttgcataactaaattaaaatgtgacaaacgtgaaaattggaaactctagtgggtgtatattatatatactttgtaaacggaaattagagagtttgggtgatgttagaatctatctgaagcagagaacacatcagaggacacatttgagtctgatagctgctctctttagctcattattataaagttaccttttccttaaatgctgcctccttaacatcaagaggaaagacagtctcaccataatcaacagactatggcagttttcagtagagacacaattaatgctcccattaagccctgcacactctcagaattagagaaaacattttcgttccagcaactactaattagatacactgtttgtgtaaggaattacatgactcctgtagagtcaatctattcattacaagtatggtgatattatagtcatttcctcagcaatcctgaaattttagtgtataattcctgttgggtaggcggaacagcagattgattttagtaccacagtccttaagaatgcaaccagctttcattattacgacagattgatttaagaatgttagtccttaagaacatagtcaggtttcactgttatttggtgaaaaaccaacagtgcgggtcagtgtggattctcctaaatcacatcaggaccgcccaaggattggtgtggggctaggaccccatttctctttagtagctcagctcatggctcacaaccattcctcttttcttggtgacttgggggttagactagttttcttttttttttttttttattgatcattcttgggtgtttctcgcagagggggatttggcagggtcataggacaatggtggagggaaggtcagcagataaacaagtgaacaaaggtctctggttttcctaggcagaggaccctgcggccttccgcagtgtttgtgtccctgggtacttgagattagggagtggtgatgactcttaaggagcatgctgccttcaagcatctgtttaacaaagcacaccttgcaccgcccttaatccatttaaccctgagtg

SEQ ID NO: 1561266 - DNA, 4001 bp, Homo sapiens
gtcactacctgacatactctgacttactagaatgtaagcttcatgatggcggggacttttccctgccttgtttgccacagtgtgcccagagcctcaaacaggcctggcacagagcaaatgctgggtctacgtctgctgagtgaataaatcattgtctcctttgcaaaagaaaatgtgccaagaaggtgggtggggggggtccccagctgtgtcagtacacattcatctctcaggcaaatctagacatccagccagagactcaaagctcagggccggaattatctagctggatggtccctaaaaaagacgtgccacttagaagcagatcagtacaggggttaagaggataaacttgggaaataatctgcctgggtttggatcttgcttctgccatgtattgcatgatggacagagttttgctatgtcacccaggttggagagcagtggcacgacctcagctcacttgcaacctccgcttcctgggttcaagcgattctccctgcctcaacctcccgagtagctgggattacaggcgcatgccaccatgcccggctaatttttttatttttagtagagatggggtttcaccatgttggccaggctggtctcgaactcctgaacccaggtgatccgcccacctcggtctcctaaagtgctgggactacaggcgggagccaccgtgcccagccaaattttttggattttagaacctattacatattacaacaccggcgagatccaggggcaactctccataagtatatgatttgcacaacaaaatctttaaaaattctaaatagtcacacatcagttcagagtgggtattgccagcaaacaagttcaaagccaggtgaggttggcctgccaagtaagttgcaaaacagagaaaaagacctttcagttttcagaacgttttggattttaaagttatagataagggactgcagacctgtaaatattctttaacatttcttttttagtgtctggcatccccaaccaccctgagaatgtgaattagctgggcaggatttttgttttagacactgctataataacctgggcttgaacagtgcctattagactagcaccgttcaaacccaggttatagtagtgtaatatcggttgcacggagccttccatatagtaaacgctcaataaaattggatgtgctgaagtcacctatgcaatggccaggtcaggacttgaaaccctaagactccaaccctcaggccagtctttatcttaatttatttgacttattcaacaaatgtttagggaacagctgctatgcgtcaactactgtatagtgttcctcctagaaagttcaggaaacagcacagcaaaaaggctaaaagtcagaccccacctcagcgcaggtggggcgattgcctaggcgacgacagagcctcccttcggccgcacctccatagaaaccacgggatgacttagacgccaagtttcacagcggaggagctgtcgaacttcccacaagttccgcccatctccgccttagccatgcccaacacggagcccaaggtggcttgggaagctcaagaggaggccagtgaaccccgcgacccggagccgctctcattccgaaccccgacagcaggggcctccgcctcccacaaacggtcgtgctgacgtcacggacgccccggccgagctgcggctagggggtcgggggacgtcccctcgttcgcctcgcttcccctcacctctgtacttggggactggggtgggattctgggcttctgcagcctgaccctcggatcctccgcagttacccggactcaccttctcagttgcccagcgaaaacttccgctgggcggagagcgctgcgcgcgcatcctgaatctgaggcgcccgcgcaggcgccgctgacttcctgacggcccctgggcttcgcctgcctgggaactccgtttcccagatgcctccgcggcaggcccgccctctgattccagacggaatggggattattccctcattgctcatccccctcccctccgttctagccgctttggaacgccttctggttctactgcgcatgtgtcagtgtcagaccaatcggaatgcaccgtgaggtacctctccaccaatcagaggtcacattacctaaacttctgcctcaactccgccccttacttccgcttgttttctcagaaacccgtcacaacgcgtttccatggcaacctaccgcttgctcttcggaaaaggttaacactccctgacttctagtaaaggcaagaagctaattagatgattctttaacaaggtaaaaatctggactacaaactgatgccgcctggtcctgattctctttctactctactcccacagtgctaaggctgaagaagcaggaggagatgggaaggcgaaagaagtcgcccgcacagccctctgggaaatagagtcctggcgctgccgcggaggatcctgggtgcagccgctcagagaagcttctcgcgcacaggaagtcgctgcgaggaggcgcgtgtgcggggagttgaatctcccgctcccttgaggctggggttgcgtctgttgacgcggccgactacaatcccgaggtacggagacgctggggctgagggacttgcgggctcggtccttcctgagaggtgacggaatgcaagtgggggcgacttcggcaaagggtgcgtcgccttgggcggcggttgtcagggtgaaggtgtgaaccgtctttcacagtctgttatgaaaaccgctcaaggtctgggcacggtagatcacgcctgtaatcccagcactttgggaagccttggcgggggggatcacttacagccaggagttcctcgaacccccagtctctactaaaaatacaaaaattagttgagcgtggtggcgggggcctgtaatcccagctactcaggaggctgaggcaggagaatcgcttgaacccaggagctggaggttgcagtgagccgagatcgcgccattgcactccagcctgggtgacagagcgagactacatcttaaaaaaaaaaaaaaaaaaagaaaggaagaaaaccaccttgggaggctgaggtgggcggatcgcttgagcccaggatttcgaggctagcctgggccagatggtgaagccctgtctccacaaaagaagaaaaaaatagaaaaattagccgggcgtggtggtgcgcccctgtattcctagctaattgggaggccgaggtgggaggattgcttgaacccaggaggcagaggttgcagtgagctgagaaagaaaagaaaagaaaagaaaactgctaaaggggtttccaggcctccctgatggccctgagaggagtggttctgttttattttggttttggttggggaaggaggggaatgagttacctgaagttggcaaatttaggcagaatcttgctggacgatggatgggagttcttcgggaagttgaagtacttaacatttacagtatttgagtgctttctgtgtgccaggcgccctgctggagttgcatttcctcttctgatccccgcagcagcactgagacataagtgcaggtccccttggcaccaaggcaatctcgggaatcagaatttttcagattttagaaagctaatagggtgcatattttataattaggcagcacccccccacaccccgaggaatctgggccagtttttggtcataaaatgtttctgtggggcaaggtgtgaatattcacacttatgagaacattaagaccctacatggcctgtggcaatccaggtgaagttttgcggtcagtttataaatcaagttctggtttttggagcatttaaaggaccatagatctgttgtatttgttccatttggtacatgtggaaactaaggcttagagaaggtaaatggtctggaaggaagggcaagactcttgggcccaaggtctctcagcctgataattgtttggcttaagtcactctgggctggatgaccttgggctccacctctgggccctcgtttctttcctcccagagctgagagtatatga

SEQ ID NO: 1561267 - DNA, 4001 bp, Homo sapiens
cgcgaccccgcgggcaccgcggcctcggccgggtccgccaggctccacgtgatgtcggcgggcggccgcgaggcggcggcgcagcgcaaggtcacgttactgcccgcggtgacaaagcgggcaggcgcggcgtcgcggtccgaggagaccgtgatggtcggcgggtccgggccgtctggagggaggaggggtcgggaccgcgagtgtcagggtcacctgggacgccgctaggactcccggagactgggtccccagcccgcttctccccaaggaccccctgtccccgacccgaggcatcccccactcacagaagacgctgacgtcggcggcagcctccctgtggccgaaggggctgcggacgcggcaagtgtaccgggcgtggtcgctgcgcacagggcgcacgatgagcagctggtcgccctctgagcgcatccggggcgtctcggctccctccgattccgccgcctccagggcgcgtccgtcccggctccagctcagctccccgcgacctggcccccaccccaggcagcgcagccggagctcggccgccccctcctctgtctctggagccttgggctgaaccgacagctggggtaggggctctgggagagggagaatgggctcaggacccacccagtcctggagcccatctttggtccccttagagggaaccccagccgctgctccctctaagcccctggagtctcagcccccatccctctcctctcataaacctatgagtttgagcccccagacacctcctctccgggacccaggagttcgccagaagaggctcctagcctcctcctcctccctcagacctgggagttcaggctcccaggagtctccatcccaggtccacctttgctcagacacccctgccttgacctctagctctttttctcccttcctcaacccagaagtcctcttctcctatccagggaccccacagcaccgtgacttgcccaaagcctggcagagcagagcagcccctgccgcctgcacgccggacgccagggcccacttaccatacacacccaccgtgaactcgtgagtctgctgggagacccctgcccggatgacctcagccgtgtagacccctgcatcgtccagctgggcagaggcgagctccagaaccccccgggcctggtcaaatcgcaggtggtctcggtgagcagggtccaggctgatcagaggtgcccctggccccaggcccccagctgccagcacctttgagccccggcgccagaccaccagagaggtggggggcccagggttggggattgggactagggggagccggatggtggtccccaccagcacagcgagtgggccccccacctgctggggaaagcttgcagctgagtgggtctctgcagaaaatttggattcagggctctgggcagagagtttaagatccatatcatccggggagaattttgaatctggggcctcaacagacagtttggtatgggagacttgagtagaaatgtttgaagctggggtcttaacagtgaaggaaggcttggggtctttggcaggaacttgaggatccgaaatatcaggaaatacttcagaaccaggggtttcagagaagggggaaaccgggctcaaatcttggccctcagcagaaacatttgaccagaaggacccagacatgttggaactcagggcctcaggaaaccagctggaatcagagattccagcagaggcttttgaatccaggaactgatctggaactttccagctgggaggtttgatggagggaacttccacacccagcccctgggaagagctctttgagtctgaagagaaggcagaggagaagttggtttgctgaagtccagaagaggctctgagggtgaggatccctaccaaggaggctgcagagaagagaggaaggcattgggggaggctgctgagggagactgacagggaagggactgagcagggaacttacccaggagtaggaagagtggcagagcctgtgggttgtccatggtgctggcctcactgaaaggacactggagagagacccaggactgcacccatccctcccgggtcagacgagtccaacaggactggtagcttagcttcctgggaggggaagggagccagacccagagggaggtgccaagatcctcaaccccagtgtggtggctgagctgcccacctcatcccactctcttcattagctggtcccatctgcagagaggcccagcctgatccctgccctccccacccccagggggaagctggagaaaacattcccagctaaaaatgtgggagcaaatttgtgagacaaagccaggaagacttcctggaggagggtgaggtgacctttccgagagccccacctctgatggccacagcttcagagcaggcttcctcctccccagcctcctggctccttccactctgtcttgcctgcagcctcagatacatctgaccctgctcctcctctgctccaaaccctcccacggctctctgttgccctcagaaccaagtctccaggtgctatctcctgccagggcctctatcctgagaccagagctgcatttccgcatccccgaggccctcacatggcctgtgtcccgctaaactcagactctttcctctaacccaaacttcctcacacctccaggatggcttcactgtcttcgcaaatgctggagaacattcccacctcctccctccctgtcaccactgtcgatctgagtccaaccctcctccccctagttctcactggccaggctctgtcttctcttcctgccccgtctccctcctctgcccagtctcctccattccctgccagggtccttctatacccagagctgaacctgcctccccctgctcacagccctcccctggctccccagtgccctctggagacatccaaggttcaaagcaaactcatgcacagcccccactcaagcacttgaacatcctgccattcttatcctgcccgcccatctcacctcccagtcctctacctggaatgctctctcccactctccacctccctccaacctggctaaaccacaacttgtccttcaggtctcaccttattaagaaccataattaccacttaatttgagccaggaactacgctaaatgtttcctatgcactatcaggctgaacacttctaaacaccctataagctgagtgtcattatactcactttgcaggccaggggacttaggctcagagaggtcaagggacctgcaggaggttgcacagccagagggagaagctggacttgggaccaggatggtcagaccattgactccttctgatagcttttcccaccatcccatgtggagcttagggcctctgctcagctcccagtcctctaagcttaccctggcccagttctcaccagtaataatactggtaatatatatatattttgagatggagtctcgttctgtcacccagtgagtgcctcagctcactgcaggctccatctcccgggttcaagtgattctcccgtctcagcctctgcagcagctgggagtataggtgtgcatcaccacaccaggctaatttttgttatttttaggagagatggggttttgccatgttggccaggcttatcatgaactcctgacctcaagtgatctgcccgcctcagcctcccagtgttgggattacaggcgtgagccaccgtgcccggactaatattggtaataatatatatttagcattttttgcatagcaggtgtggttatgggggtgctacataaattaacctttcaaaactccatggagtagatgatgtagcttaaagagggctgcaaatttgagcgtcctcctgttaagatgcggggtctatgtcccctctgcttggatctgagtagctgtgtgactgctggaccaagacgtggaagtggccctgtgccaggatctgcatctaggccggcatatgccactttctgtatcataggacactccctcatggaatccagccgccacactgcgaggatcagcagccccatgg

SEQ ID NO: 1561268 - DNA, 4001 bp, Homo sapiens
gaggccagcctggccaacgtggtgaaaccctgtctctactaaaaatacaaaaattagccaggcatggtggtccatgcttgtaatcccagctacttgggaggctaaggcaggagaattgattgaacccaggaggtggaggttgcagtgagaaagatcatgccactgcactctagcctgggtgacagagcaagactccgcctcaagaaaaaaaaaaaatgccaagaattgtcagccatcactagaagaggggcataaaacagacgctccttcatagttctcagaaggaatcaacattgcaaacaccttggtttcagacttctcatctccccaacttaaagcaattctaattcctttaagccaccaggcttgtagtactttggtatggcagccattgggggatgaggtcagtctcctggttgcccagcttactgtgctcagcagctggaggcttgggtatgaacccgatagtcatctctaaggcacaaatagccgggtgcagtggctcacacctgtaatcccagcactttaggaggttgaagtgggtagatcacctgagttcaggagtttgagaccagcctggccaacatggtgaaaccccatctctactaaaaacacaaaaaattagccaggcgtggtggcgtgtgcctataatcccagcttctcgggaggcggaggcaggagaatcgcttgaacccaggaggtggaggttgcagtgagctgagatcacaccactgcactccagcctgggagacaaagcaagactctgtcaaaaaaaaaaaaaaatgctcatctaaggtgcaaatgtgtgtaggagacgagcattaccccacaaggaagggctgcacccagaaaaggaggaaggaactgaagcagacgaagcacgtcgatgtccaccgcaccccccgtgcaccagggaggaactggggccttagggaggtggagctctgctgggtcaagcctagagtttctatgtagtaaagccgagattataacccaggtcatccgtttcacagtgtgagctctgtctgaatacatcaggttcaattggaggatggttaaaatcagcctaagaatcgagctggtcagaaaattgtcttcttggggccaggtgtggtggctcacgcctgtaatcccagcactttgggaggctgaggcgggcggatcacctgaggtcaggggctcgagaccagcctgaccaacatggtgaaaccccgtctctacttaaaatacaaaagtcagccgggtgtggtggcctgcacctgtagtcccacctactcgggaggctgaggcaggagaatcgcttgaacctgggagacggaggttgcagtgagcccagatcacgccattgcactccagcctgggctacagagtgagactctgtctcataaataaatgcatacatacataaataaataaataagagagagagagaagaaaattgtctttttgcccacagccttgcaccctgtagatccctaagcccagccctcctctattccgacggaggatgatggcagtactgcggtatttagcggctgcagactcggagaccccacagcagctctgcctttcccagcggagtctgtccccgtgtctctgcagcgcggcctcctcctcgcttgcatgtgggcggcagaactcacagaacccacagcccagacccacccaccgcaggtgtgcaacacctggaagtcattacttccacacaccgcatttccacctggactgccactcccacatgagtttttctcaccagcccaagcccattcgtcccagtcctggagactcaccgaggcaaagcagggagaggaattctgcggtcatagcgtcccttctgccagaaccaaggccccgccttgggttttacccttcaaaggcggagcgggactgggccggccgcagctctccggctgcccggttcgtccccaggatgtgcagatagaggaggttttgctctgacactctggttctctgccccactcttgcagtttccttctcacaaccgactcaggaaacaagaagccgtcgatgataacttcttccccatgaatccggtgtgtgtggccccacccgcccgagctctgtcctaccttatctgaagttctgccaagagttttctgtaaatgtaattttttattttaaaacactaataccggccggacgcggtggctcacgcctgtaatcccagcaccttgagaggctgaggcgggcggatcacctgaggtcgggagttcaagaccagcctgaccaaaatggagaaacccccgtctctactaaaaatacaaaattagccaggcatggtggcgcatgcctgtaatcccagctactccggaggctgagacaggagaatggcttgaacccaggaggcggaggttgctgtgagccaagattgtgccactgcactccagcctggacaacaacggtgaaactgtctcaaacaagcaaacaaacaaacattaatacctatagctttatagcttccgtgtacccactagccagctccccacaatgttaacctttttttggggggcgggggggacagagtcttgctctgtcacccaggctggagtgcagtggcgcgatctcggctcactgcaacctctgcctcatgggtttaaggattctcctgcctcagactcccaagtagctgggattacaagcatgcaccaccacacccagctaattttttgtagagatgggatttcaccatgtgggccaggctggtcttgaactcctggtctctagtgacccgcccacctcagcctcccaaagtgctgggattacaggcataagccactgtgcccggccaatggtaatctcttataattacagtactttttttttttttttttttttttgagacagaatctctgtcagccaggctggagtgcagtggcacaatcttggctcactgcaacctctgcctcccgggttcaagcgattctcctgcctcagcctcccgagttgccgggatgacaggtgtccgccaccactcttggctaattttttttgttctttttagtagaaacgaggttttgccatgttgcccaggctggtctcgaacttctgacctcaggcgatccgcctgcctcggcctcccaaactgctgggattacaggcgtgagccaccacgcccggcgtatggcacattttcaaaaccagagactttgcactggcatcacacgtttaaccaggttccagaggtcactcagatctcaccagtttgtgcataattcgtttctctttttctcttcctcttccttctatttctatttccttttctccttttccttcttttctcctgctcttcctcctcttccaccttcttttcctcctcccttttctttgcctatgggtatagttctgtaacattttattgcctgtatgtatggctttatagaaccaccgccacaatcaagacacagaactgtcccaccaccacgtaggaactccctcatgctgcccctttataatcgctctcccaccctagcacctgctaatctgttctacgtctctatcactttgtcactttgagactcttgtataaatggaatcgtccatcgcctcaccttctgagggtgacctttttcactcagcacaatgcctgtgagattcattcaaatggttgtgtgttatgatgatggatacattagccgggcgtggtggcacacgcccatagtcccagctactcaggaggctgaggcaggagaatcgcttgaacccgggaggcggaggttgcagtgagctgagatcacgccactgcactccagcctgggtcacagagcaagactccatcaaaaaaaaagaattatctaatggatacaatgtgtgtcactgggttagtggatacctgaaagccctaacttcatcattttggaatctatccatgcaataaagttacacttgtaccccataaacgtatacaaataaaaaataatcgtctgggcatgatgacttaccgctgtaatcccagcactttgggaggctgaggcgggattaca

SEQ ID NO: 1561269 - DNA, 4001 bp, Homo sapiens
atcgctgccctacttgcgcggccccacatgcgcggccgccgcggcttgctaagggagggagctgcgggacccgaggcggccagaaggggtctcccgcggcccgcgctgggctccacacttacgctgattttagttgcatccttatttgttacctaaaatgcaaagagggagagagagacgtgaggctcgcggccttctggctaggggaactcggatccgcctttaggcaagggcaccctcctccggcaggctaggaccgaaaccgcccgggggatgggggttgagggcacaaaggacgtccggctttccaagagtttcccaggaggaagcgggctttggagctagcatggtgcctgaccaacgggtggctgccctggtgcacacctgccggctgaactggggagactggatggacaccagggtgggaaggaaagcccctctccttccctctgggcatccttaggccctgccgcgtggctcaaaatcctcccccagctcactgggagccgtgaagaactggagggagggccgctgtgtctggacagcacccagcgggaggctcagtgggagtaactctgggtgggaccctgggagaatgtaggtgtgtgtaggtgtaggtgtgtgtgtaggtgtgtgtgcacgcgagcacactagagtgtgtaagagagtgtgggttttgaggcagacaggcagcgtgggcctgttttcggccacagagaagtggcccctctgtgcccctgagggctggaggtcctgccggctttccggtactcggttttctggtggcctctggaacgcagccgtgggagccctggggtcctcaaagtggcagagggcggggagagcctgatgggaccaagggggcttccttcactacccagcacccatcagagggccgcagccagcgagcacgagcaagcgaccaggctgaggtgtggctctttaggggctgggcgtgaatggagttctgggaggtggtgggaacagcgatgctgtcaaaataattgacaggtttgggggtaaccactgctgactttgaagatgctttgggatgcgaaggtggaagatgggctgcgccacagggcggcgccctgcgcgagtgaagcccgctgcttccctccctgggttagccttcgccgccccgggcgcgagccgggcgcgcgccggtaccgcgtgggcggcgggttaccttgctccgggcgcccggcacgctgagcgccagctcgtgcagcagctcccggggtggctccttgaggtaccaccactgaatctccagcgaatacgaggtggctccgctggcccggaacgcgcagggcatttcgatgtcgtctccctcccgtactgtcacatctttggggacttctgtgaatgcagctgggggtggggagagagagagaggcgtgaccagctgtaggtcgggggcctggggcaacctaaagcgaggcagtcggtctctggctggctggccttgtgccccccaccccgcagctgctccctggcgcacggccggaggggctagcaaagttcggggaagcggctgcagggccgaggcagggaccggccatcggctgcctactgcttccctccggatggggcggggcggcaggggcgactcgtgcttctcccccgcccctggccgcaccgccagagcctggctggggcgcgcctactcccgctccccgcaggcatcctttccgcagccggggccccggcgggactgggaacgactcgggcgcggcgctgctgctgcggcgacccttcgccgctcgcctctccctacccctccgggcccaggctgcacagcgggattgctggagaccgcgaagcttcccggttcgttctctttcttcttcttctcggtggcggccccagcaaagacccccccgagtccacagcggcagcaaagttcccgcgctcaccgtcggccacgaagagcagcagggcatgcagcagcagaggcggcaggtatccgagggcaccgagccggttccgctgttccatctcccgcggggggcgcggtggcggcgggggcccgggagcggagaggcggcggccgcgtgggctcggatcggctccggctcgggctaggacgcctccgagcctgccatggccccgcgcggcgccccctcccctggccgccggcggccgccaatcagccccgctccctcgccggcttgcccggtgcggctccggcggggggcgctgcgcggggtgtgcaggagacgcggtcccaccgggaggctgctggcgatcggtcagtgcctctctctgtccggtcgtccacaggacggtggggatccgcggttcagtctctgcccggcgggccgggcaggggctgggccgcgccgggacccatccctggccgagggagtgcgtgccacggagccgcgagcttctgcctccctgtctccttctggttctgctcccgattgccacctccttcggctcccgcagccgcccccgccggttcctccgcggctctttccgcagggcgagtgggcgctcagccgcggcgcgcagacctggcgtccgacccagcgcagcgcggggagagcgggtccggcgtggcggacccggagccggagagaggcggggagagggggaggggaggggaagggagggggcggtcagtggctgggcgccaagccgcctccaccgctgcatcgcccccgccctcccctctcctgccacagcccgccccgcccccgccccagagcgctccccctctctcctcgggggtcgctcggagggaccaccgtctttctggttggagtacagccccgccccgcacccgcttgggttgggagtcctcccacccaaactctccctggcttcttcccagtctgcacggctcgagacggccgctcatccctgctccccgtgtgtccctcggtcctctctgcagctcccagccctcaactccttaccccagtttgggcaaccagctgccccgctgtttggcccaggcctgggccatgacggatgggtgggcgcccggggccgcgagaagggcggaacgctgtgcccagccggagactacgctgggtggcggcggcagcgccgggagtctgcagtgcgcgagggagaagtgagcgcacagcgcccagcgagcaggtgcctgcggcgcggagagcgcacacgctagccagcccgcagcggccgtgagtgacggcaggggcggcgggggtggggtggggtggggagcgccgggcacgactcagggcccgggaggtttccgggagggggcggggttcctgcccctggatcgcgggtccctgtgtctccacgcgctcttcgccggtcgtggccccttctttgcccggtgcaaagcgagatgccgaggcggcaggaagccggaacccatcccccgcctgctctggcgtactcggcatcccggtacctcccccagccttcacccggagtctgctccctccccagccatctgagggagcgcggtctggtccccgaaggcaaatgcggggtggacatgtggttcggacgcagcgcgtagtcatagtcataggggcgagtcctaaggctcgccttgggtctctcctatctccttcccccgggagtccccagctagtgcgtttcggcacctctgcccctaccccggcccctacgcctcagctctgacctcaggttggggtggggcagcccggtggattcacgtgcctgcttccccggctaccagcctcccggaggcaccgccagaggattccctgggagccaaggagaaggaaacccagagggaaaacactctccagcagccaccctggtccaggcggccagcgcagcacagctcagaggggaggagctgcaggccctctccaaggctgtcctcgccagcgggtgcccggggccagcccttcttgcctccagtgcctgcctttcagtttcctcgtctatggcccaggagtcactcccaccccctggctcactgtggctcatctatcaagcccttgttttctaaggtctcctgctgggggcaaagggaagaa

SEQ ID NO: 1561270 - DNA, 4001 bp, Homo sapiens
ccactgcgcccggccgccctttataactttcaagtcacaagtgccaggcgctgccgcctgcgtggaagagatgcccgctagccctggaagatgctgcggtgtgtgagtgccggggactgggctgcaccgggctctatccaagcactcaaggcaggattagggctggtctgggattcgcaagtctcgaggggacctggagaaaggaggcagcagggtgaagcttaggctataacccctgagcagtcacccatcccagggccccaggccgcatggttgttccctggtgccctgcaggcaaagctcagatgggctgagatgtcctgtgggaaacgctcacgctttgctcctcttacctcccacaggtggatgctttctgcaactcctgccaggacgtagagaccattgggtgatgcagtcagacaggtgacaggcccggggcacatgatcttctgctggagctggtcctaaggatgcacagtcagcctcgtgagccccatgcaggacacgggagctactacagcagtggagggcgaggggaggggacgcctgggcaatggctaagtcagagaaccaggaagaggagtcgggagcagggtggtttgagcaaatgcatggtccagcaaggaagtgttcgcccctgcaagaggcttcgaggctggaggtggtagatgtgaggttggtgcttcctctgagggtcagaggggccctgggtgggaggagtacaggaacagaacaaagaggatccagaaggacactggggcccaagagcccagtaggcttgtgccccaatccttctatccataatgtccaacctaagaccccaagcctcagcttcctcctctctaaaatgggaaaactcagccgggcgtggtggctcacggctgtaatcccagcactttgggaggctgaggtgggcagatcacttgaggtcaggagttcgagaccagcctggccaacatggtgaaaccctgcctctacaaaaaatacaaatgtgggccgggtgtggtggttggtgcgggcctgtagttgcagctactcaggaggctgaggcccgagaatcgcttgaaccctagaggcagaggctgcagtgagccgagatcgcaccactgcactccagcctcagcgacagagtgagaccctgtctcaaaactaaaataaaatgggagaaatttatgagttgtgtgtagactccatcaggcaatgctggagcacagagccagtcccaagagatctcagcgggcacacgggggaagcgagtagcttcagggactggctgcatttgggcttgggagtagaggggaaactgtgggcgacggtgagtatctgttgctttattggaggaataaacatgagtttcctgcgccaccccttcatgggagactcccccagaccttggtccttctcccttttcctccagaaccacaacatccacagagctcataggccccttttaatcaaatttcgcgctccaagaactcgtgcatgcgcaattgccccaagggaccccccggagcgtctcccattttcccccactgcccccatagcagctcaggcctgagccccgcgcgtgcgcagagcggcctaacaggtcgcacgtatctccccaaagcccccagacccgcgcatgcgcagagcgcccgaacggagaccacctcccctccccacgccaattccgactaagggtgcacgcggcccccaccaacccatcccccgacttcagcctcgggcgccccatgaccccagcagcgagaccgcaccgccgcaccttccgctggagctcccaggcgctgatgtaattcttgcccagctgcgccgccagcagatactcgccattgagcagcgccaggccgcggggtcccgcctggccgccgcggtaggtgagcaggttggcgcccgagtgaagttcccacacgatgcagctccacatcggggccgccgagtccgtacacacggccacctccatgggcgccgccatcttgccttccccaccgccccggacgtgcgtcatcatgagcgagacgcggacgactgccccacgcgggccagagcggcggccccgcggccccagcgggtggccgacccgcgcatgcgcccgtgcctcggagagaggggctttcttgtgaagtgggatttcccgcttacctgagactcgagggtcgcgcggcctgcttagagatctggggaggcgacttcttccaaggcccagggtctccggcgatcagttagtagctctagagccggggtacctgacttggccttttcctcctgggcatttttggccaagtgactcaagctcttggattcatttatttttaaatgttcaaataataaagttccgacgtcacaggcctaaatgacacattgcgcctaaaagagagagcgcacacccagcaacatggctagttggcgatgaatacattggaattcactgcttccttatttatttagttttgtagagccagggtctcactgtcctgcccaggctggcctcgaactcctgagctcaagtgatcctcccagctcggcctgccaaagtgctgggattacaggcgtgagccaccgcgcccggcccagtgtttccttattggtcgacatctgcctcccccttgacccctctttaggggcctcaacatctaaattattagtcggatagcttggtgtaggtcaaacaagtcgccagttctgtccgagccaagcagggtctaacttcatgtcacggctgcccgtcacggaccatgtctgaaaacggcattcaaaaaaaaaaaaaggccgggcgctttggctcaggcctgtaatcccagcactttgggaggccgaggtgggtggattacctgagatcaggagttcgagactaccctggccaacatggcgaaaccccgtctttacaaaaagtacaaaaagccgggcgtggtgggaggctgaggcaggagaatcgcttgaacccgggaggcggaggtctcagtgagccgagatcccaggcactccagcctgggcgaatgagactctgtctcaaagaaaaacatatatctattatttatttatactaaatatatatctagtagagatggggggtctcactgtgttgctcaggctggtctccaacacctgggcttaggccttggcctcttaaaccgctgggattacaggcttcagccacaacgtccggcctaaaaacagtatgatttaaaatgtgcaattagttgccaaccccttaaaaagggataaaaagggagcattcatttaaaagtcgggatttccgcccgggggttgcagctgacctgggtcgtgtgccctcgagcagcaagaggcaggggctggaggctgcatgcggggtgcggtccccggaggcggtgcgactcctggtccgcggctcccggcggagggcacggccggggcaggaggctggtgccagagcgtgcggcgccgcagccccgctggccgccaggtggcaggcgcgagccaccgaccccgagcccaggccagagggagggcggccccggggacccgcctggtcggcaggaggggccgtttgagcggggagccagcgacccccagagaaccgtgtgcggggcaggcccgtgcgaaggccctggggcaggaccacggagcggggccgggccgtgcagggccgtgtgaacgaggcctggatttcattttatcctgggagggagggagggagtccaatccaaggacctgctgtgcctccagagtttcctccaacctcatttttattttctttctttattttgcgacagtcttgctctgtggcccaggttggagtgcaatggtgcgatctcggctcactgctacctctgcctcccgggttcaagcgattctcctgtctcagcctcccgagtagctgggattacaggtgtgagccgccacgcccagctaagttttgtatttttagtagagacggagtttcaccacgttggccaggctggtctcgaactcctgacctcaggtgatctgcccgtctcggcctctcaaagtgctgggat

SEQ ID NO: 1561271 - DNA, 4001 bp, Homo sapiens
gccgagatcaacccagtgcactacagcctggatgacagagtaagaccccatctcaaaaaaaaaaaaaaagaaaagaaaaagcgaagttcataacctgccaggaagaacaggactaaagtttaagctcaggctgcctgggtccaaccataccatcagcagcagtctgtgctcttagccactttgctataacgcctctctgaatttgctattgttatatgtagtttaatagctcaaagggcactttcaggaacatataagataaaggctatgaagtatagggtgctgggtgacagatgaaggtggctgtttgctttagaatggggttcgagaaggcctttcaagatagcgacattcaggctgagacttgaaggatgggaaggagccagacaggcagattgcagcaaaaagcccaggctgaggactcaccaatcacaaaggccaggaggcagaaaagaatatggagcctcaggaaaaccaaaagcaggccagtgtgactgaaccttggtgacagagagcacatgggaggtacagccagagccctgtagccaggagtgggcggtataatcacagtgcaggagaaagtcatggggcaggaacaagctccaccagcagctaccaggtatcctccctttatctggactccgtgccaagaagatcacaattaaaatttcatttccctccaatgcaatagtataatttatttatttatttattttgagacagagtctcactctgtcgcccaggctggagtgcagtggcatgacctcagctcactgcaacctccgcctcccaggttcaagcgatttctcccgcctcagcctcctgagtagctgggattacaggcgcgcgctagcatgccgggctaatttttctactttttgtagagacgggtttcaccatgttggccaggctggtcttgaactgatctcaggtgaacagcccaccttggcctcccaaagtgctgggattacagacgtgagctaccgcgccctaccagtagtatggttcttatcatctccattttataaaaacagattttgtgcctacacagctggaaaacaatttttttaattgccgctgtgctaatggaattccttctacctactgtgaaatcatttctttccatttttctgtctcaggatttagggaactgttctgtacgccctcctccccaggcagcactgcagagattttataaataacttctcacgtctttctcatagttttgagtgacaatatggattaagaatcccaccttggtgaggaaaaaggatagagatcgcagaaggtgagagaaggcggggtagaagcgaggaagagttggggcaggtaacactctggaccgaaccctcgaagggaccttaatgactcagcgggggccagggcagtgaggctgcagtgagctatgatcgtgacgtctaaaggcgatagaacgggggttaaaatatagcaggactaggctgtgatttacagaagcaaaatgcatttccacgggtgggaaccagcgaggaacccccgaattgctccaacgctgagggtggagccgggaaagcagcgaggagaaagtgggaggggccgtggctaaaggggcgggggttaggggacgaggcatggcagggaacaacctgaggggactggccgggggctgatgtcggggccacagttctcaggacgggactaggggaaacctaggaagcctggaactggggtagacatggcgagcagcttctcacccggttctgcaccgtctcctcggaggccgtcgagagtcgcgtccgccgccgtaggcagattggtggggcggggggcggggaggactggcccctccgcgccggaactcccgccatgacagagggcagcttctcccctgcatcgttccgcgcatagcctccggaccctacggccgccatcgtcacgccggaggcgggcgaccgttacatcccctaaccgccgctgccgccaccgccacgacccactggaacagcgaacagccgcgggaaagccggcgccaccgcctattggacgcgacgggcccggcctagccaatcgcagggatgccgggcggcgcttagaaccaatgggggcgaagaggcggagcgagtgcctggcggggcggggccacagccagtgtactggatgcctgattaagcgtcatggggtctttcatccagactgcgttttcattattcgctgaaacatacaggttttaatttttacgaggctaaggccacggccgcctcacctcggtttttgccgccacctagaggaactatgtgcgccccaacggttgcccggatgtaggcgtagggtggagccgtaagagattgactagccagttgatttggttggcgcaggctcagaaacgccgtgacgccgcccttccccccaacacgtgatgaaagtcggggtgacgaagggccggctttgcgcaggtgcacagtactcgctatggcccattcgtcacgtgacgagggcgggactgtggcactgtggaggggcgcctagtaggcaggcgctctcagctctctccccggtacgtgacgagactccacggacgtcacgtgaggcaggcggcgagcgcgggtggggcggggttaggcggcgctccgcgagaaccaaagtgcagccgctgacccggcaaaactcagcgggggctggatagccatgcccaagtactgcagggcgccgaactgctccaacactgcgggccgcctgggtgcagacaaccgccctgtgagcttctacaagtgagcgcagcgcggggcggggcttgagggaggcgggaccctgagaggggtggggcccgagcattagtgctgctgtgcggggcttctggtcttgcttgagggtgttaggaagtggggttaaaccatgaggagatggccttcctggcagtgtccattgcacatacaaaggtgcaggcgtgggaaacaggagtagacgattgactacagatagcgagcgaagcgagccgaagagtgaaagggatgtaagaagtgaagtcggtgcaggctgttagagagcctgcagatgcccacttgccctccccacgcatttgagccatctgaaactcagagcatccgaaactgagcttgcgatcgtgtctccccaaaaccttccagtctgtcttatcttagtagcgtgcttcattcttcttgttgcttaggtttaaaaaatgtcatccttacctctttcgtcatacttgggaaagtcagaattagcttcgactgtaaaagatctgtctccttatttatctggctgacataagccagttggtggaagaattactaggaaaaaacatttctttgcttttttttttttttttttttgagacaagatcgctttgtcgcccaggctggaatgcagtggaacgatcacagctcactgcaacctcgacctcccgggctcaagtgatcctcccacctcaccctaccaagtagctgggaccagaggcacgcgccaccatgcctggataatttaaatttttttttttttttttttttttttttttttttgccaggcttggtggctcacgcctgtaatcccagcactttgggaggccgaggcgggcagatcacctgaggtcaggagttcgagaccagcctggccaacatggtgaaaccccgtgtctactaaaaatacaaaaattagatgggcgtggtggctcatgcgtgtaattccagctactccgtgggctgaggcaggagaatcgcatgaatccagaaggcagaggttgcagtgagccaagatgaggccactgcaatccagcgtgggcaacaagagtgagactccgtctcaaaaaaaaaaattttgtttttaaagagagagatgggatcaccctatgttgtccagtctagtctcaaactcctgggcacaagcagtcctcctgcctcggcctcccaaagtgcttggattacaggcgtgagccactgcacccagccaggaaaaaatatttctcttggacatactgcagatgtaaagtggcagaattcccatccttt

SEQ ID NO: 1561272 - DNA, 4001 bp, Homo sapiens
cagtaggactagaaaccacgtatctagagtatgccatgagcaggtgggactgaggaattccgggtggggcaaggtcccagctgcatcagatggaatcagtgggcatgatctggtgtctggaaaggtggcttcggggactcattgttgtgcctttcactaacctgcccacccacttacctttccctagctgaagtggtgtgcttgggtcgctgtctactgctccttcatcagctttgccaactctcggagctcggaggacacgaagcaaatgatgagtagcttcatgtgagacttgccctacagaacaagtgactcttgagtaaggggtggggggaccccagcctggccatcctagactgacacctctctcctgtctcaggctgtccatctctgccgtggtgatgtcctatctgcagaatcctcagcccatgacgcccccatggtgataccagcctagaagggtcacattttggaccctgtctatccactaggcctgggctttggctgctaaacctgctgccttcagctgccatcctggacttccctgaatgaggccgtctcggtgcccccagctggatagagggaacctggccctttcctagggaacaccctaggcttacccctcctgcctcccttcccctgcctgctgctgggggagatgctgtccatgtttctaggggtattcatttgctttctcgttgaaacctgttgttaataaagtttttcactctggctgtcagcctcttctgttcagtggggtgttcctcctacctggcgggaagggctctagccccataggcctggtgtggggccccagtctggaggcttctggctgttcatttgcttacttcataaaccttgtgtcttaagtcaggtgctagggacaagacagtgacttctgccctctggcaactcaccagatggccctgctgacctagataatctaggctttggtttccttttttttttttcctttttaagaaagaaaatggtcttgatctgtcatgcaggctgagtgcagtggcacaatctatgttcactgcagcctcaaactcctgggctcaagcaatcctcccacctcagcctgccacgtaactgggaccacaaatgcgtgctaccatgcccagttaattcttgttttttttgagacagagttttgctcttgttgcccaggctggagggcaatggcatgatcttgatctcggctcactgcaacctccgcctcccaggttcaagtgattctcctgcctcagtctcccaagtagctgggattacaggcatgtgccaccatgcccagctaatttttgtatttttacattttgtgtaaaattacaaattttgtgttttcaaacccgtctctacaaaacaacccatgttgcccaggctggtctcaaactcccaggcccaagtgattcaccagcctggccctcccaaagtgctgggattgcaggcttgagccactgcgcctgccctgggctttgttttcttatcagagaatgaactggtaggaattgggaaaggcatgaaagactcggggtccttccccacttgtcagaccctcttttctctccggaacacccagggatccttctcaaccaggctggatcccatccctggtactccaggggtatttacccaacgtcccaatccccacagtataggactcttcatcagatcctcctcttaggcaagctaggtccttccaggaccctagcgctgaaggtccatgggacggacaccctggattcccatggacacactacaccggctaggaaaacccggcccccttaggaaaagcacttctgctcctaccggcattaagaggcattccgtcttggaattccggcattaagaggcattccgtcttcatagcccgtgagacgccagtgtcacctttagcccaaccagtgccctgagggtggcattttcctaccttcctgtaacgacccccgggattgcccagggctacagcctctctcccgtgagcctccagaccgcgccctggccccgccccccaccccgattggcccggccgggtctgggggcggggcgtttgcccggcctttccagggccggggaaccccaggaggaagctgctgagccatgggcgcctacgcgcgggcttcgggggtctgcgctcgcggctgcctggactcagcaggcccctggaccatgtcccgcgccctgcggccaccgctcccgcctctctgctttttccttttgttgctggcggctgccggtgctcgggccgggggatacgaggtgagtggggcctccgagctgaaacgtacaggaggcagagtgaaacccagaatacagtctagaggtgtgggtgggtctgtcctgtgggtgtctagtgaatggctgatgatatgacagtgtggtctgagtgcgtgctttgtgtcattgcgaggtctggctgtgcgcatctgagtataggactgtgtctgattgtacctgcctccgtgtctccgggatgcttgcctagactttgtctgcacttaactgtgggattggaggggcaggaggtggcagggggtgagcagtgtatgtgtggggggaggtgctggctgagagctgggactctggagtctgcctgaaattccagcctagctcttacacttcctgagtgtgtgacgttgggcaagtcacctatcctctctaagcctcagtgccttcatctggaaactggggataacatcaccccacctcccacggtggccgtctgctgtcggcaaatgctgaacaaacatcagctacttctattattattttcccggagtgtgaatgagagctgccctgtggggttgtgcaaagtggagttgtatctatgagcacaactatgtatgtgtgtgtcctgcctgggagggcctggcctcctctgcacataggcgagatcaggcctctctgagtcactcacctctagatcaagacttactctgcagcccccgacctcgggggttattgacaaggtatgtgtgtttggggtccctgtgcagacatgccccacagtgcagccgaacatgctgaacgtgcacctgctgcctcacacacatgatgacgtgggctggctcaaaaccgtggaccagtacttttatggaagtgagtagaggatggggactggtccctgggatccccatggtccctgtaatccctctgggtcctggacattagggtggggccagtgctaccctaatatccagggtttgggctcctctgtctaggaataacccccttggctctgctgttccctgagagccttatccctgttatccacagtcaagaatgacatccagcacgccggtgtgcagtacatcctggactcggtcatctctgccttgctggcagatcccacccgtcgcttcatttacgtggagattgccttcttctcccgttggtggcaccagcagacaaatgccacacaggaagtcgtgcgagaccttgtgcgccagggtgagcctaccccaaggaagtgaaaagaggaagcccagcccagcttctgcttctgcatctctggtttctgagatttgtcatgccacgtgcaagctgtataacatgcgtgtcgctccgcctgcctggactctccatttggagacctcctatacatcccacaaagccccacctgctgtgcatcctctgggaagcctgccatgcagggggcctctttcccatatctgggaactatggcctgggagcgacccctcttgtccttccgccagaaatgtgtacacaggcaggctttcacattcccagtatcacccaccctactcccactcctggctctgaccgctgaccctgaccttgcctgtcctggcacagggcgcctggagttcgccaatggtggctgggtgatgaacgatgaggcagccacccactacggtgccatcgtggaccagatgacacttgggctgcgctttctggaggacacatttggcaatgatgggcgaccccgtgtggcctggcacattgaccccttcggccactctcgggagcaggcctcg

SEQ ID NO: 1561273 - DNA, 4001 bp, Homo sapiens
attcttccttatgattatttttatgtatttatttatttaatttatttacttattttgagacggagtcttgctctatcgcccaggagtgtagtggtgcgatgtcggctcacagcaagctctgcctcctgggttcactccattctcctgcctcagcctcctgagtagctgggactacaggcgcctgccactatgcccggctaattttttgtatttttagtagagacggggtttcaccgtgttagccagaatgatctcgatctcctgacctcatgatccgcctgcctctgcctcccaaagtgctgggattacaggcatgagccacagcgcccggcctatttttatttatttttagaaatcattttatctttttttttttgagatggagtctcactttgtcgcccaggctggagtgcagtggcacaatctcggctcactgcaacctccaactcccgggttcaggcgattctcctgcctccgcctcccgagtggctgggattacaggctcccgtcaccacacctggctaatttttgcatttttagtagagacggggtttcaccatgttggccaggctgatctcaacctcctgacctcaagtgatctgcccaccttggcctcccaaagtgctgggattacaggtgtgagccaccgtgcccggccagattattattattttgtagacagtctgtctttcacccagcatggagtgcaatggtgcctcgaactcttggactcaagtgatccttccacttcagcctcccaagtagctgggattacagctgtgtgccactgtgcccagctgagagtaggttttaatctgagcatgggggcagctatgattccccgtagcacctggggtgagaccaggtcctggctccactcaccctgccaggatctcgtggtctgacaccttcacactggacacgccatctctggcctcatccagcgtctgcactggctcaggcctccgtgagcggcaatcccaacagcggatactggaatcaatagagcctgtgaggccagcatgatggtgaggtcaggtttggagggggagggcagcaccctgggcccccgtgcttaggccccagactcaccggacaggataactgtggcctcttcattaaactgcaccgtgttcaccttctgagaaagttattgccactcagaggaggctggactttggaggactgggataaaggcagggttcccagtgtcggttaaagcaagggcgaaggggaggtgaaaggttttgggggaacagcaaggacaggggttggtgactgcctagcctggcatgcggagtgggggatcgtcatctggggaagggatccttacggtgtaatgggggtggccgtgtcaccacctatgcgctaatacgggtcccctccactcaaatgagggtctccaggctttcactcacccctgcgtggccccggaatttgcgcacgacctgccctgatgccacatcccacagaaccaccgccttgtccccgccgccggagcagagactactgttgtcaaaggagctggagtaaaggaggaggaggatcagcatcgacctcggatcccagcctcagcgctcccatcccagcctggtccccggctcacccggccgcatccagcacctcgtagccgtggccgctgtacgtccgcagcagcgtcccccgaagcgggttccacagcttcagcgtcttgtcactgccgcacgtcaggcagtaattgccatccactggggaacaccaggcgggggttactgggccgtcgatctcaggaggcgggaggaggacccggaatgaagacgaaggcgctcaccattaaatcgtacggctcgcactgccccctgcccgcagtccagcgtcttcaaccgtttctgcggcagctctggaggccgcggctttggctcagggaaagccatgctcccaggactccttccttgcagccttaaatcggtctgtacggaaaattccgcgccttagaaacccacgcttgggtgtaaccttattattgttcttcctgacctacttcctgtttatcacttccgggttcatcattttggcatttcggtgatcgggttggaactattgaagcccgctttcaggttcttttccccattttccctttgaaaggaagacttctggcttctcctaaatctccgttctctgggtaaggggagtccaagcctctgtcatgaggaacggaaatgcgagggcctcgggtgttactctaaaatccgccctcagcttgcacgccggaagctgcgattcctgcagcggaagaggcgtgatctggccttcgactcgctatgtccactaacaatatgtcggacccacggaggccgaacaaagtgctgaggtgaggaccccagcgtcgtgggcacgggttcgggttgtgggtgtggatcggggccctgggaagcgcctgtctatcccgggggcaggacctgagcgcccctgaccctcgagcctgtcgcaggtacaagcccccgccgagcgaatgtaacccggccttggacgacccgacgccggactacatgaacctgctgggcatgatcttcagcatgtgcggcctcatgcttaaggtgggcggggttgagcttctatgggtgtagttggacctgagaacgaggcccgggggcgggtttggaatgaagcggggtgtcttgtcattgctgatggggcgggacctgagatcggccgggagtggggctgcgatgacgctgggccgagaaagccccagtctttggtgaagtcaaggattcgagtcaggttggggatgtggcagattggtctgcgagtggggccaggctttgaagcaacttggagaggagttgtggaaaaagggcagggtcttaagcatgtgggatgtcagagtctctcttggtcctgagagacgcaggccagacagtaggactagaaaccacgtatctagagtatgccatgagcaggtgggactgaggaattccgggtggggcaaggtcccagctgcatcagatggaatcagtgggcatgatctggtgtctggaaaggtggcttcggggactcattgttgtgcctttcactaacctgcccacccacttacctttccctagctgaagtggtgtgcttgggtcgctgtctactgctccttcatcagctttgccaactctcggagctcggaggacacgaagcaaatgatgagtagcttcatgtgagacttgccctacagaacaagtgactcttgagtaaggggtggggggaccccagcctggccatcctagactgacacctctctcctgtctcaggctgtccatctctgccgtggtgatgtcctatctgcagaatcctcagcccatgacgcccccatggtgataccagcctagaagggtcacattttggaccctgtctatccactaggcctgggctttggctgctaaacctgctgccttcagctgccatcctggacttccctgaatgaggccgtctcggtgcccccagctggatagagggaacctggccctttcctagggaacaccctaggcttacccctcctgcctcccttcccctgcctgctgctgggggagatgctgtccatgtttctaggggtattcatttgctttctcgttgaaacctgttgttaataaagtttttcactctggctgtcagcctcttctgttcagtggggtgttcctcctacctggcgggaagggctctagccccataggcctggtgtggggccccagtctggaggcttctggctgttcatttgcttacttcataaaccttgtgtcttaagtcaggtgctagggacaagacagtgacttctgccctctggcaactcaccagatggccctgctgacctagataatctaggctttggtttccttttttttttttcctttttaagaaagaaaatggtcttgatctgtcatgcaggctgagtgcagtggcacaatctatgttcactgcagcctcaaactcctgggctcaagcaatcctcccacctcagcctgccacgtaactgggac

SEQ ID NO: 1561274 - DNA, 4001 bp, Homo sapiens
tctgtctcaaaaaaaacaagaattaactgggcatggtagcacgcatttgtggtcccagttacgtggcaggctgaggtgggaggattgcttgagcccaggagtttgaggctgcagtgaacatagattgtgccactgcactcagcctgcatgacagatcaagaccattttctttcttaaaaaggaaaaaaaaaaaaggaaaccaaagcctagattatctaggtcagcagggccatctggtgagttgccagagggcagaagtcactgtcttgtccctagcacctgacttaagacacaaggtttatgaagtaagcaaatgaacagccagaagcctccagactggggccccacaccaggcctatggggctagagcccttcccgccaggtaggaggaacaccccactgaacagaagaggctgacagccagagtgaaaaactttattaacaacaggtttcaacgagaaagcaaatgaatacccctagaaacatggacagcatctcccccagcagcaggcaggggaagggaggcaggaggggtaagcctagggtgttccctaggaaagggccaggttccctctatccagctgggggcaccgagacggcctcattcagggaagtccaggatggcagctgaaggcagcaggtttagcagccaaagcccaggcctagtggatagacagggtccaaaatgtgacccttctaggctggtatcaccatgggggcgtcatgggctgaggattctgcagataggacatcaccacggcagagatggacagcctgagacaggagagaggtgtcagtctaggatggccaggctggggtccccccaccccttactcaagagtcacttgttctgtagggcaagtctcacatgaagctactcatcatttgcttcgtgtcctccgagctccgagagttggcaaagctgatgaaggagcagtagacagcgacccaagcacaccacttcagctagggaaaggtaagtgggtgggcaggttagtgaaaggcacaacaatgagtccccgaagccacctttccagacaccagatcatgcccactgattccatctgatgcagctgggaccttgccccacccggaattcctcagtcccacctgctcatggcatactctagatacgtggtttctagtcctactgtctggcctgcgtctctcaggaccaagagagactctgacatcccacatgcttaagaccctgccctttttccacaactcctctccaagttgcttcaaagcctggccccactcgcagaccaatctgccacatccccaacctgactcgaatccttgacttcaccaaagactggggctttctcggcccagcgtcatcgcagccccactcccggccgatctcaggtcccgccccatcagcaatgacaagacaccccgcttcattccaaacccgcccccgggcctcgttctcaggtccaactacacccatagaagctcaaccccgcccaccttaagcatgaggccgcacatgctgaagatcatgcccagcaggttcatgtagtccggcgtcgggtcgtccaaggccgggttacattcgctcggcgggggcttgtacctgcgacaggctcgagggtcaggggcgctcaggtcctgcccccgggatagacaggcgcttcccagggccccgatccacacccacaacccgaacccgtgcccacgacgctggggtcctcacctcagcactttgttcggcctccgtgggtccgacatattgttagtggacatagcgagtcgaaggccagatcacgcctcttccgctgcaggaatcgcagcttccggcgtgcaagctgagggcggattttagagtaacacccgaggccctcgcatttccgttcctcatgacagaggcttggactccccttacccagagaacggagatttaggagaagccagaagtcttcctttcaaagggaaaatggggaaaagaacctgaaagcgggcttcaatagttccaacccgatcaccgaaatgccaaaatgatgaacccggaagtgataaacaggaagtaggtcaggaagaacaataataaggttacacccaagcgtgggtttctaaggcgcggaattttccgtacagaccgatttaaggctgcaaggaaggagtcctgggagcatggctttccctgagccaaagccgcggcctccagagctgccgcagaaacggttgaagacgctggactgcgggcagggggcagtgcgagccgtacgatttaatggtgagcgccttcgtcttcattccgggtcctcctcccgcctcctgagatcgacggcccagtaacccccgcctggtgttccccagtggatggcaattactgcctgacgtgcggcagtgacaagacgctgaagctgtggaacccgcttcgggggacgctgctgcggacgtacagcggccacggctacgaggtgctggatgcggccgggtgagccggggaccaggctgggatgggagcgctgaggctgggatccgaggtcgatgctgatcctcctcctcctttactccagctcctttgacaacagtagtctctgctccggcggcggggacaaggcggtggttctgtgggatgtggcatcagggcaggtcgtgcgcaaattccggggccacgcaggggtgagtgaaagcctggagaccctcatttgagtggaggggacccgtattagcgcataggtggtgacacggccacccccattacaccgtaaggatcccttccccagatgacgatcccccactccgcatgccaggctaggcagtcaccaacccctgtccttgctgttcccccaaaacctttcacctccccttcgcccttgctttaaccgacactgggaaccctgcctttatcccagtcctccaaagtccagcctcctctgagtggcaataactttctcagaaggtgaacacggtgcagtttaatgaagaggccacagttatcctgtccggtgagtctggggcctaagcacgggggcccagggtgctgccctccccctccaaacctgacctcaccatcatgctggcctcacaggctctattgattccagtatccgctgttgggattgccgctcacggaggcctgagccagtgcagacgctggatgaggccagagatggcgtgtccagtgtgaaggtgtcagaccacgagatcctggcagggtgagtggagccaggacctggtctcaccccaggtgctacggggaatcatagctgcccccatgctcagattaaaacctactctcagctgggcacagtggcacacagctgtaatcccagctacttgggaggctgaagtggaaggatcacttgagtccaagagttcgaggcaccattgcactccatgctgggtgaaagacagactgtctacaaaataataataatctggccgggcacggtggctcacacctgtaatcccagcactttgggaggccaaggtgggcagatcacttgaggtcaggaggttgagatcagcctggccaacatggtgaaaccccgtctctactaaaaatgcaaaaattagccaggtgtggtgacgggagcctgtaatcccagccactcgggaggcggaggcaggagaatcgcctgaacccgggagttggaggttgcagtgagccgagattgtgccactgcactccagcctgggcgacaaagtgagactccatctcaaaaaaaaaaagataaaatgatttctaaaaataaataaaaataggccgggcgctgtggctcatgcctgtaatcccagcactttgggaggcagaggcaggcggatcatgaggtcaggagatcgagatcattctggctaacacggtgaaaccccgtctctactaaaaatacaaaaaattagccgggcatagtggcaggcgcctgtagtcccagctactcaggaggctgaggcaggagaatggagtgaacccaggaggcagagcttgctgtgagccgacatcgcaccactacactcctgggcgatagagcaagactccgtctcaaaat

SEQ ID NO: 1561275 - DNA, 4001 bp, Homo sapiens
tttctcttaatatacctttaagactaattcatattaatacatataactcatttcccaacagttactagctgcagggtattccaccgtgtggctgaactatcatttatttattcaaatttctattaatggacattcggtagtttccaaccttttgctactgcagctaatgccgcaaatgagtatctttgttagtgcctcataacattttaattttatttgattttaattaacttaaattgtagaactgaggccaggcatggtggctcacgcctgtaatcccagcattttgggaggccgaggctggcagatcacgtcaggagatcgagaccatcctggctaacatggtgaaacccagtctctactaaaaatacaaaaattagctgggtgtgatggcgcctgcctgtaatcccagctacttgggaggctgaggcaggagagtcacttgaaccagggagtcagaggttgcagggagccgaggtggcgccactgcactccagcctggcgacagagtgggactccgtctccaaaaaaaaaaaaaaaaaaagtagaactgaagcaatgaaaacatttttccattaacctaacttggaataatattttggatatatttgggttaaataaaatattaaaattaatttcatagctgggtgagatggctcacgcctataatcccagcactttgcgaggctgaggtaggaacatgtcttgaggccaggagttcaataccagcctgggcaacatagcaagaaaaaaaaaagtaaataataatgataaataaaatgaattttacctgtttatgtcaaaattaaaattgcatatgtggcttgcattacacataaaaacacacacatatataattttttttttttttaaagagacagggttctgctttgtcgcccaagctggagggcagtggtgcaatcatggttcactgcagtctcaaactcctgggcttaagcgatactcagcctcttaaatagctgggactatggccacatgccaccacgcctagctagttttttagttttagtagagatagggtcttgctatgttacccggccagtctccaactcctggccttaagtgatcctcctgcctcggtggctcaaagtgcagggtatatttctcttagctagtattgctctacattgttgtagtctggtggtggcctgatatccctactggactgaaaactccctgaaggtaggagtccagtctgtctggatttctcttgtgtctccataatcacccaacctgacatggaataggtggttaatccatttttgttgaatgagtggaaaaatgtgctctcccaggaagaaacatatgcttcccagcttcaagtgttagtgaacatcttcctagaaggcaggctgaggcggaaagggtattgactccggcttctccaccagaggaccttgcaattccagtcaattccctcggtaactcttatggaggagtggcaatataccttaaaaaaggagtgtgtgttgcggggtattccgctgcttggttatgtcaccaggtggattaaatttggacaaaatttcccaaggtgtaggtactctacaaacactagttaccctcaggaatgtgcgatcaacaaaagaatgcaagataacaaggcccctaggcagcccctgggtcttgtggctcccgtcgaaggcagagctctggagccgcctacgccggggacaggcgactacacctggggcccctcaccctcgggcctcctgcacgtggcagggaaggcagggcgtctctatctcaaagcattggctgcgcctgttacctgcgacaggattcccgacaagggacgggtacggcgtgtgcactcaggagctcctagagctaggggcagcaactaagaagctacctggcggatgttgcgagaggactccgcccacagaacggttggcccccaaccccgcagccggcggacttcccgaggccaggggtctgaacgcgcgtgcgcatgggcgcgcgcccggcgcgagaacgcgcgcgcgctctcgaaagaaaaaaaaaaaaaatcctctccgcggggtcccgcggcaatttaggccggggtctgccgacgaccgcgcgtgcgcgggcgtgcatctacgccctcctccaccgccccctccgctgggggtctagcgcactgctccgcttcccccgtttcccccgggctagcgtcctaggggtaagtgactcgagcctggcagagagtgagggagaggttccgccgaatgaagggaggaggtagacggggccaggagaaaggagaaaccgccccggcggggcgaagagcgcggctctcgagctgtagtctgcaggagacacacctccctccctcacgcccctcggggctgcggaagtgctctacagactggagctgcacgaaggcgaccagcggactaccgttcctaggaggcagcgcggcggtgcgcctacggctcccggcagcccccgcgcgccattctctttttgagttcgcggccggctagggcgaaactacagttcccaggaggactcgcgcgaagcggcttggaagtgggcagcctggaagtcactcgggccaccggagctggcggcgtctccagcgagcggcgcggagctggacgccgcgatcgtggggcccgcgaggcgggcagccggggcgtccaggtacgtggctccgggtgcaggatcggcctcgcgcaagggtggcggggaatcggtggctgcccggaccccgagggtcagcgcgggcggacggccgggtgtgggtactggccgtggggggcggcggcgccgggactcgcgccctccggacccagccggactcgtgcccgcatggctcaactttccaggcgtgcaccccggcgctgtggtgaagagcttggaggcggggagcggtggattcgcgtcccggctgtgccactcgggagccgcgatctgggaaaaccgcgccgaacctcaatttcccctgcagtaaaacggagtaggagagcatcttggcggagactctgttgagataatataataaaacatttggcacataggaggcacttactacgtatttgggttattgttagctctccgaaaaatgaggtgaagatgttatcgattgcatagggtgaggattagttgagcgtgtgcatgtaaagaggtgagtccttagttagcacccaatgcaggctagctgctgttaaccgagattattttgttaagagcgttggtttggaaggcagagagaccccaggttcaaatttgaacatttaccagctgtgtgactttgggcaactggcttcacctctctgtgccttggtttccctatctataaaatggggatttaaatagcaaccacttcgtcgagttgttttcaggatgcagtgagaataccatgtgtaaagtgcttagcacagcagctggcatataacgctcagtaaatggtaccatttattcagcgttttcctagtggcccagagaccctctgagggtggggctctggccgtagtattggtcacccccgagggccagattcagaactggtccagttgacttcccttcctactacctcaggttcctcatttacaaaatgggataataacaagatcactctcaaagggttgtaaggatttgctgagattgtatttctagtccagcgccatctctcactaagtagcagctcttatgtattataattgttcttcaatattctccatctggcccagagactgcctgactgtgggctgtgacatgacagccctgagctcccccacacatttgctcccatcctcagtgtcccatctgtggaatggtagtcataggacttttgtgccaggattgtttggatggttccaggagataattcatgtttagtgctttgcacaaggcccggcacacagtaagtgcttattaaatgattaaatgtatcttgctgtttttttttttaataggccctttttgcttctgtttgtacctacatggcagagtgagcacaaagttagtgtttttttatcttccccctccct

SEQ ID NO: 1561276 - DNA, 4001 bp, Homo sapiens
acagagcaaaaacaaaacggttcttctatgcgtagcgttcattcacatattccacaaataaacctcaagagcctcctcccccatggggcctggacctgatgctgcagctcagcagccacctaggagcaaagtccctaacctcgaggggccagttgctggcagccagaggacaccttgaggacggaacggggatgtcagaccatggcatgaggcacggaggagacagtggccctggctactttagacgggcggtcagggagggcctccccaagagcgcaataccgtgggggcagggaaccgccaagatccctgaggccagacctgcttgtaggtcagcaagacagggggatgggggaggagaacatggagaggtgccagatttgaaatggcctggaaggccacaggcagatcgccagacttcatcttaaacatgctgggaagccaggcagaggtttcgaggaaattattaaaaacacactctgacatctgcatgtgagtgcaataaatcaaggccaagcatgaaacgctacttattgagaatgttctttattgggtttttgttttgttttgtttttgagatggagtgagatgatctcagctcactgcaacctctgcctcccgggttcaaatgatcttgctgcctcagcctcctgagtagctgggattacaggcacgcaccaccatgcctggctaatttttgcatttttagtagagaaagggtttcaccatgttagccaggctggtctcgaacccttgacctcaagtgatctgctcatctcggcttcccaaagtgctgggattacagacatgagccactgcacccagccagtttttctttctttctccttctttctttctttttctttttctttctttctttctctctctctctctatatttatttatttatttatttatttatttatttatttattctggagacagtctcgctctgttgcccaggctggagtgcagtggcacaatcatagctcactgcagccttaaactcctgggttcaagggatcctcttgcctcagcctttcaagtggctgggaccacaggtgcgccccatcacactgggctaagtttatttcttgtagagacgacctctcactatgttgcccaggctggtctcaaactcctgggctcaagtgatcctcccacctgggcctcccaaagggctgggattacaggtgtgagccaccttgcctggcccaattcattgttgttattattattctgagtttcccgtttcttctgacgctaactgtatctcctggacggggagagctgagccaccgacccttgggctgcaattaggagcatcactgtgggtgggcctacctacggagactccaaggtctagatggggtcacatggtggggcagagcctcctcccagcgaagagtcctggttccccagcaggtggcagtgcggggagcccccgccggcatccccagcacgccctgctcaggtgggtctgacctttgcccacagatgtaccacagatggggaaatgggcctagggcctcgctgggggtcctggtgaagccaggtgggttttccatgggtcccccgacagctcgagcgccttcctcccgtgtggggaacaggccagtgccccctcaccccagcggcggttctgaccttggagagagggtcctggtcgccccagatcaatttctccggcacctggtgcttctcaggcaacagatgcggtggtggttccctgtccaaggccagggggtcgagggtggccagcaggtgcgtgtgcgggatcgacagcttgaagcggcctaaggccctcgccatggtcccccaggacagcttgccgggacaatactcgctggcgggggcggagggtggcggcaacttgcattccctgtcatgggctgtcggggagcaccgcggcggggaggccatctcgaagcccggtccgccggtggccgccgacaagcctggatgggaacggtggcgccgcgcgcccgcgcccgcgcccgcaccaagcccttcggaggcgcgcgctacgctgggcccgcgacttcgctgcctcctcgcccgctgggtgaaaactagtgccaccccgcgcagcacaggttacctatagaaaaatgggctttgcagccgggcgcggtggctcacgcctgtaatcccggcactttgggaggccgaggcgggcggattacctgaggtcaggagttggagaccagcctggccaacaggtttagtgaaaccccatctttacttaaaaaaaataataacaaaaattagccaggcatgggggcgtgcgcctgtagttccagctacatgggaggctgaggcaggggaatggcttgaacccaggaggtggaggttgcaaaaaaaagaaaaatgggctttgcattctgggaaccaggccgagccagcaaaaccagcaccccagcctccagccctccgctgtggtttccctggctcctgtcacagggcaatttcttcatgtcctctgcctgggtacagctcctggccaacccacttcatgacaaaacagaaaaggtcagtaagttatggggtagcccctgcatgaaataagatgcagttattaggggtgggtttacaacatttataatagatgagggaaatatctgtcacaaccccaacaacagtgacagggaataaaatgctaccaccagtcagataacagccccatagctagaaaaggacagggtggaattattcaaaatattgaagaagggtgtcatctttggatgataaaactaaaagtgattttcttccttctttttttttttttttttttttggtggagacaagagtctgtcacccaggctggattgcagtagcgcaatttcggctcactgcaacctccacctccagggttcaaaggattctcgtgcctcagcctcccacacagctgggattacaggtgtatgctcaccagacctggctaatttttttgtatttttagtagagacaaggtttcgccatgttggccaggctgtttttgaactcctggcctcaagtgatccgctggcctcggcctcccaaagtgctgggattacaagcatgggccaccgcacccggcctcttccttctttctgcttttaaaattgttgtgatctatgatgctactttcataatgtaaaatacaaatgctcaatactttattttttgtggagacaggggtctctatgtggcccaggctggtctggaattcctgggctcaagcaatcctcccgcctcggcctcccaaagctctgggattacaggcattagccatcacacctggtctgcactttatttttcaaaaaggtctccttggtacacatgaggtggcctcagagcagggagctgcagccgtgtaacccaggctgtgggtgcacattctcctgcctggtttccctgcctgtctcagacactttagtgacatctaccctgagaggctgaggccccctgccaggccctggctctgccctcccatggggcttcctgggcaccaacagtaacccagccacccagagagggaagagcttcactcccaaaaaacggcaggaggggccgcaaccgccccttctcacacgcttgtccttcagtgagtccaggctgtcttcatcacaaaaccagagagaagccttcacttttaacttcttttttaacgtcccaggaaattttttaaaaatcaagaagaaaatagaaaaattccactttaattaaactgttcagtctggatttttttcccccgatactaactgaaattaaaaatagaaatcaatttctgcgacctttcaaggcagtctttgaaatgtcaaggttttaaaaattattttacagcaggaatttacatataaatacactctgtacaatgcgttaactgaacaatcactgggcttccatcatggaggagaaatgattctaggacgagccagggcagcattcaattactgccttcttagtggaagacttttcagcctggaaaagaaaacagaaaagagagaaatggaaagtta

SEQ ID NO: 1561277 - DNA, 4001 bp, Homo sapiens
agaaactaaacagagtacaaagaaaaggctctggacccaagcggaatcagcatcccagctcagccgctgctgcgctgggtgacttgactctctctgagccttggggaatgggctggatgctccctgggggccacacggcccattctcttaccagagatgccacctctgccatccagaatgtctcgggggccctccttggtgacaggcaggtaacgggtggaccggaagatgccaccttccccctcagcagcttcggccccaccctcgatgttctcccttggcgccgggccaggcagtctctctgggccttggggacgatctggtgcagccaggctgcctgccagagacccctccatcggattttctctgcttggatccactcagctgctgcaccggctcagcggggcattgtgggcctggggatagagagaaggaagtgcttaggggatggaggaaagggaatctgcctcagtttcccatccctcaaaacctcagtcctcaactttgcagctcactgcctcagtttacctcccagcccaggggagctaatggtgttcagaccttttccacacaccttctatcccaatggcccctaccctcagcatgcctccgtctccccatcaataactcctcccctttatacagatcctgcactgcctcagtttacccatattgacacatgcacactcagccacctggtcttcttccatcaatcttaccatttctccagacgcctcccttcattcacacacagctgcactttccccagtcctgccctcacatccatgcacacgcacatcctactgccatgccttcgtttcctcggcaagaatcccagccacttgtacactctgatcctatacaccgtcaggagtctcccatcattacccctttacttttctccattgggttgtcccataccaatgatccctgcacttttcccacactccaacccttcccccacacaggaccttagggttctccagcattaaccccttcacccccctccacacacacagcctcaagtgaccccagcattaaccctttcgcttctccccaacattatccctcatgcatacccagcttgggctcctccattccccccaccccccaaccaagattgctctagtcctcgggcgaaagaaaacgatagggctcctggtccagaaatgaggaccctggggagcgggggttgtcctctctacctataaataccttcaaggtaacggcggaaagtgaagggcaggaatgaggcgccctccccagggagatggtggggaggccgggcccaggcaaccggggcggggccggggcgccaggcctggttgcaggcgctgccctcgggggcctggggattcccagggggctcctccgtgggctggcagtcttggtgggggtccctacccaggcccggaggaagcacctgcggttgtccactgggtgggcactgcccgcggggaacgggcgggaccgcaacttcggagcactttggcagcgtggggagggggctcctacccggacgccccccaggggtcgcagaggtgggggctgcgccgcgcgggcccactcctcgggggtccagggtccgggggatgagccctccgcccgtgcaccccggggcaggagaccccgcgggacgcgccgaggtaggggggacacctgccccaagacccccgcccctccccccacctgcacggccccgcccccggccaggccccgcccctgaaggccccgcccccgcccccgccccggggggtcccgcctggcccggcccggcccggggcctcccccgccccgctacggctccgccccacccgcgggctccccaggccgggccgggcctcaccggggaggcggcgccgccggccaggtgccggggctcggagctcccctccttggtgcggccgtcgctgccgctaccgccgctgccgctcccggtgccggtgccgcggcctccgcagccgccgccgcctccaccgctcgggggacattgtccctttaaatcgctccccccgccgccccgcccccccggcgcgccgccgtgacctcagcgcgacagccccgccgcgccgccatgatggggaggtccggggcgccccccccaccccacccccccccccctcgccgccccggggggggcggccagcgggcgcgccgccatgttgggagtggccaagcgggtcacccttaaagggcccgcacggcctgagtccagggagaggccccgttaccatgacaacacccttgtcgtcccacaccccaatggctccttatcgtcccactggtacttccaatggtaggctcgctaaaagcactaaaagagtggggagggtgcagagaagttcccccatgggtcattgatgggtcattgataggtcattgaagactccacccagccaatttttagccttttgtcccctgccccccatcagctaccttccaaccacaagctcactccctccttcccaatcatccacactggacttcagcacctccatgtccctagagttgccctaggtcttcagtcctaagtcaccttctccacccagttcccaggatcacagcttccaggactaccccatcagacacacatcatggcctgttgtcttgtcttatccaccatgtatccagatatctaaccacctagctatctcatccacttcctcaatctatcaatcactcatctacctatccaatgaactaatcacctatccacccacccctccaaccacctattaattcacccaaacacccactcaacccacccattcacttcccatctacccacccattcatccagcacccaagtaaatactcatttatccatacaaccaagcaagtacccaaccatccccacacacatctttccgcccagccccccaaacatccatccaccagtttgtctgttgatttggtccctccactaacatgtaagttccatgaggccaggagtcctgtctagttcattattgtttctccactgcccagttctcaggcgtctcaggagacctcaacatatgtacatatgatatatataatcacaacattgaaaaaaattttttcttactatgaaccaggccttttctaggcagacatacccaacctggttaaccaactacccagctactcacctaccaggtcaaacatccagcaaatgctaacctatccgtctgccgtttgctccacccactctacccctcacccatccactcacccatgatttgaatgactcatttacccaatcattcatacacagtatccaaccatctccacacctgacccccttcctttatccgcctcccagacccatggcctccgtgacatgaggagggcctaggaagatgctctcactgtgggattgggaggttgccaggggtggaatccatgcttcattgagaagcaggtgctgcctataacaatggtgaataccttttatcgaatgcctttaactatgggtcctctcactgtgtagggaactttacgtccatttcacagataagaaaacgggctcttaagagaatgaaggtctaaggtcacacagctggtgagaacttgtgtacatggccctctccatgagacttctaattaggggagaatttgggagagatgaatagggcttgcggggcaaatgcctaagaattggcaattcttagtgggcaaagaaaccaccaatttcactgaaatcaagattttactgggcaacttcatactgccagagtggttgggaccagcagctccactccccactgtaggccaagtagggctaaggcaaagtcagacaccccccctaagatggctatctctctgctcccagaccacgtgtgatgaggcaggatgggcagctcaggtggtgtctccattgaggcagggtgctttgaggggctggggttgactccaagacccccgcgtccttggagaaagctgcaggctctggacagcatccctcagctgagcctgagttctctccatctcatttaggcggtgctcctggggaggcagtg

SEQ ID NO: 1561278 - DNA, 4001 bp, Homo sapiens
cagcctggcgacagagcgagattccgtctcaaaaaaaaaaaaaaaaaaaaaaaaaaaagatccagttcagggcagccgtgagctgctgacaccattgaacgctcaaagacacaaaccccaggacagccacggtcccaggcatggtgaccatccatccaccaaagccaggtgcttaatacagaaggcgggttgggaagttctcgccccaggccccacagtatacctctgccccgctcacaatctcaccccaagagctgtcccaagaactagagatcagggggcctgggccacactgggaagtggaggctgtgaggctgctgggctttgcagatgcacctgcagcaggattcctttaggaaacatcctatgtccacagcacagtccgggcgagggcagccccgtgtgactggcacggttcccctctcccgcaaagtgggcttttcttccctcacacagtctccctctccagccgctaccatcaccaaagcctgggtcaggcggtatccggtggtacctgggccactccatctcccggttgctgtccacacccataccgtggcggggcagacggggaagcacccctttctgctcatcacgaagcatgaaaggatcagatagaatgagagcaccaaacgcaaagaagaaaagatcaggccgggcgcactggctcaagcctgtaatcctagcaccttgggaggccgaggagggcggatcgcttgagcccaggagtttaagaccagcctgggcaacatagggagactctgtctctacaaaaaaaaaaaaaaaaaaaaagtaagaagaagaaaagctgggcatggtggtgtgcacctgtagtcccagcttctcgggaggctgaggcgagaggatcgcttcagcttgagaggcgacggctacagtaagccgaggacgcgccgctgcactccagtctcggcgacagaggaagaccctgtctcaaaaaaaaaaaaaaaagaagaaagaaaaaaaaaaaagaagaaagaagaaaaaattatcagaaaatggctcagtgtgcccatgaacctgacttgcctgttaagttaggaaccgcacatcaactcactcggccagaacccctcgtgtgtcgggggacccagaggcaggggtgaagccgctgctggggatccaggcgcactcactcaccctttgcgctccccagtccccaggggatgcaccttcctcgtcccaaccccgtgcactgctgcacccccagccagccccgtgctctcctccgctgatccggccgcctacccgaggcagtctcggaaccccggaccccagccatgcgcgcagggaactgccgggccgagcgagctcaccgaagtagtcccgcgccgtgcgcgcctcgagcgcccgctccagctcccgggtgagcgcctccagccgccgctcggccgcgcttgggccgccctcccggccagggggcagcgggagtgcaggcagcgggaagggagccggccccgcaggctccggggagcgagcgggcgcggggcaggcgccgggcgggaggaagtcagcgtaggcgccggccgagccccgggagccgaggctggaaacgctggagcgggcgctgcccaccgaaggcggcccgggaccgggacgcgggtccgagcgaccggagcgcgggctgccgtggcgctggtcgtagcccaggctgatgccgctggatcgggcgctgccgccaccgccgccgccgtcggaccccgccaggctggcccgtgggctgcccgcaggctgcgcgctgagctccggaaccgccgcgcgccggggaccccgctccccgcggctcagtccgtccgccccggcctcggggccgccgctgcccttccctctgcggcccagcgcgggcgccgcctcgtctccaggcccaggccgcggcccccgccgcccccgaccgggagagccgcacccgggctccagctcccgcagggccagcccggccaggagtagggccgcctcgtccgcgcccgccctggagcgctgcatggcccggcccgccggccctggcgcgtcacctccgcctccgcttcccgccgccgctccggccgggccgccgcatcgtccgcccgaagcccggagcccgccccgggacccctgggcgcggggcggggcggggccggcgccgggccggggtcgttccggcggccacgcgcgggccgggggacgcggcgccctgctcggcggcgcgcgcggcggaggaatgtaagctcccaggcgccgggccgcgccccctcctcgccgcggcctcgcgcggggcggagggactcctttgcgggggcaggaatgcgaggaaggagacggcgctgcggcctctggaatgtggggggagtggcggcggccgcgctgcgccgggacctcggaggggcgtggaggccgggccaggacgcaggggcgggcggcggaggcaccgcggggagagcccagggtctgcggggcgcccgggccgtcgggccgctgggaagagctcggatttccgcaggctgagctggaggcagctggcgccatccgggccggagagatccaagcagtcgacagctttccccacatcccgccccatctcccttccctgcgccgccttgctctccggcgctgcagggccgacccagctcagcttggaacccacggcgcttcgcccgtcccgcgcccaggaatactgtgcgcctagcgcagatgcgtccccacgaccccctgcctggcccggggccatgtggccgcgcaccggcctctgaagcccccatctgactgctggggaaggcgcccagaactaggagcgggttggttggggactggtcctcgcgctgggtcgcttcgcccaggcccccaaggccaggctagaagcaggcctcaggctcagagccggtgggcggcgagcctcccctgtggccatcacaggcagtccccgtgaaatatggggactcctcccttttccagcacctgcatccagggtggtgggtgaggcttcgaggggaggtcctggaaccagcggggccataggggccacataggtggggaatcgagaggtgactagggcttcgtgcccaaggacacaactaaaatcccttgtacaagtcacacggctatagggaagaaaaccaaaccgttatctgtcagggcctgatggatccaagaaaagtgttgcgtgagagagtactgttttccaggccctctctgctcagagattttcgggaaggcgcctacagtggctcagcgcgcagggagcccgcacgggaactgtcccggccagaccgcccagggcagtgtggcctcaacaccactgagcacccgctggggccgctaaccccagcaccttcccatagcctgcggagttccagcccctgccccaccagggtaggggaagtggaagcaagcatttcgtgtgcgcggagggtgggggagttgcgctgttttgtttttttcagacaaggtgtcgctctgtcccccaggctggagtacagtggtgtgatcacagctcacagtgatcacacacaccccagagtctcaacctcctgggctcaagcaatcctcccacctcggactcctgagtacgtaggagtacaggcgcacaccaccacacaaaacgctgagattacaggcatgagactccgtgcggggtctagaagccagcatttgggagagcaaatacccagggaagccaggacatgaaaaatggtctacctttcaaatgagaaaggaaaagccagttcagtcatatcacatttcatggactgcattatctactatttaaaaattacaatattggcaggactgtggtgaaacagttgcacatatgctactggtatgagtgcaaattgggatatccttttgggaagagcagtttggcggtgtcaacatccgcacaaacgaacacgaaacttagaagcagtaatactgctgctaaacatctattcaagggaagttatcaaaaatgcagacaataatccaatcacaaccgtgtcgtataatcccaacatcatttaggtaatcta

SEQ ID NO: 1561279 - DNA, 4001 bp, Homo sapiens
ggacccagaaacccccagctccaggactgagtccagcccaacttcccatgcaaagaagcaacaggaatccaagcccccatccctaacatgctgagcccagcccctgtccccgccccacccaccaccatggactgagctccacttcccgattcatcccctcgccgagccccaaaccttgtgcatgaacacaaaggccctctcatgacagttgttgacatcttcataggcagggtcggtcacacagcgatgcttcacctgtgcccgacgcgccttcaggtatcggtaccagagtttgtagctggggaataggaggggacagatgctgatcggtcagctttatggacacccccagaaccatttgccctgccccagttggcaaatgtgggaagaaggggtgtgggaggggtgacatgtctcagcaatgacagggacagactgggacatcagagaaggtgtgctgacccatcaagggatgtacaggtcagtgatgaaacacgaagcaatcacccgggacccgggacccacttggcagttttgttataactggaccaggtggggtgggggctggtgggcagggcagctggagccattcccacctgcagggcagcagcttgagtgcccgctcgtatagctgattgagcctgggcttcggggcgccctgtttgaactcgatgtagcgaagccagcatttgacagagaattggttccgcatgatttcctcctcataggggaggtcctcttcctcctgccagggccagggaatgggaagaagagaggcctaccctcagagcctgtgtgcagcaccatcccactgctggggctcaggtccaaactccggacttttacctagatcccaccacccaccaaggaagtcaggtcaccagatgcccaggcaccaaaccagatgcccgacaccaagacagtggcccagacctttacccctcagaattcaactacccaaaatcgaacccaaatcatcagacttctcagtcattagggctctgggccaggaatgagtccgcatcaccactcgctttctgccccagatggtcagactccttagataccaaggccctggcccagatgccagtcctggacaccagaccccacttcttcaaaacgtgcctcttcccagacaccaggcctttggcccctcagactcccactgtcaccatctgacccatctccaccccaggcccagatgaccagatctttaccccagccaccagggctctcaggtccagattccaagccactagccccgcccccaggatcccactagccagcgtctagctcaactctgccccagaaattaaaagctaggcctttatctcacaggaggagttatacaccagaagccaagcctttaactctgcacaccaagaatctggtgaagatgtcacgcctctactccagagagtaagtatttcactggccatcgcctgacaagctccacatcaccagggttcttctagcctggccaccaccccagaaactgtcatgctgcagtccaggcctagagaccgctatccagaaaaccaagccttcatcccagaaaccagaaccctggcctcgtaagcaagcctttacttcagacaccgatcttcacctctcaaggttcagttatgcgatcttcctcctctcccattccctgcacgcccccatttccgcccctggttcgggaggctagacgcttcccttcgacagtggttttctactcagacccgaagatacaacaccatatttttactcctggacagttcggtgcggacatgacgatccggtctctggcccattagggttcccagaccttggcctggcagtttcggcctaaatctccttgccgacccagcctcgatcccctgcggcgtccaggtcccaatgccccaacgcaggccacccccggctcctctgtggactcacgaagacaaggtccggccgctcgggccgcgagagtcgcgccatcaccaccatttttctggatgcccaggtacaggagagagtcgcgcgcttatgacgtctaccactgacggcccgcccctccgagccagacccgttttctattggttaaatcatttttgacggacaggcccacgttattgacttcttttcgacgacgccagcgaccggaagcagaatagaggcgccagaagatgcgccatcaggatacacattggccaatcagcttcagcaatggagcgtgcaaaacaccagtgagcttctgtcttgctggagggtcggctttgggcggaactggctttgttgaccgggagaaacgagatgggggtgaagctggagatatttcgggtcagtggacacaggagtgggttgggaggctgggcaggggatcttcctggatctgaagatgaggttggaaatggggggacttcaaaggaagagggagctccaaggagaaagctcttaagatttgagaggaacctttctggttggaaatccaggagaggggacgctgggctgggggggttctcggatttgggcttctgggtttgggggctgtgagagggctggtccgaggaaggacctcagagaggggtgagctgagaagggggctctaaagaaggaagacttaagatcctgggggagctctcgggctcgtggtgggtgggtgtctatgacagggagattcctagacttcgagaagtggagttgaagagtgacgcctcctgggtttgggggtgctcccgggatcttaagtggggatgggtaatgaggtctcgaggagatgcttttgattgtagctggggcgtctgtgtgtctgtctgtgtttgagaggaagactccagctcagagggaactttcaggaatgaggcctcctggattataggagttaggttttagggtgcgaggtttctgtacccttggtgggagttctgggattcttgggtcggccgtaacgaggcgcttctggactctgcagtaggatgggtcccccaggctctgaggagcctctgcacattgcttggggggagctcacctcacccaccctctgccattccagatgataatctacctcactttccctgtggctatgttctgggtttccaatcaggccgagtggtttgaggacgatgtcatacagcgcaaggtgggcataagaggagtgtttgagggttcattccaggggtgggagagggtgtggggcagcagtctgctggggactaatgtctgcctcccataagccgaccctgccctgatgtggggctctggaggcctttggctcgtgtcccatttgtgacttttccttacagagggagctgtggccacctgagaaggtaagtgatctcttcttcctgccagagggatggaggaggctggattcttgtatccgggatgggttttagatgaaaattttaggccaggcgcagtggctcatgcttgtaatcccagggcatgggaggctgaggtgggtagatcacttgaggtcaggagttcaaaaccagcctggccaacatggcgaaaccccatgtctacagaaatacaaaacttagccaggcatggtggcaggcgcctataattccagctgcttgggaggctgagggagaagaatcacttgaacccaggaggtggaggttgcagtgagcccaagatcacgccactgcactccagcctgggcaatagagtgagactttgtctcaaaaagaaacattttactctcagccatgagtaaggaaccgagagcagaggagtagatggtttccttattgccttctcctggaagagtgaagcggatcccacgcggacccctttgtaattggcagggggcttccagtgaagacactgaaccctgaagccgtggtctggggcagggtggtgggagaggtgggcgggggggggtggtcccggctctgaggtgtgtgcccctccccccttcctgtcccacccgcttctccacccctagcttcaagagatagaggaattcaaagagaggttacggaagcggcgggaggagaagctccttcgcgacgcccagcagaactcct

SEQ ID NO: 1561280 - DNA, 4001 bp, Homo sapiens
aagcagcccccaggccaggaacaatggttcatgcctgtcatccgagcactttgggaggctgaagcaggaggaacgcttgagcccaggagtttgagaccagcctggcaacatggtggaaaccccatctctaaaaaaatacaaaaaaaactagccaggcatggtggtgcacacctgcagtcccagctactcaggaggctgaggtgggaggatcgcttgagcccaggaggtagaggctgcagtgagccaagccaagatcatgccactgcactacagcctgggaacagagtgagactctgtctcaacagataaataaaagattgactgtcaggcaaattgtataacttctttgggcctcagtttcctcatctgtaaaagtggggataacagagcctgcctcttggggttttttatgaggactcaatgagctaatccatgtgagtgaggtgtgtagagcagcgactgacaggtaacgttgaataatgccagctctcattattattattttattttttatattttgggggtctcactctggtgcccaggctggagtgcagtggcacaatctcagctcactgcagcctccatctcctgggctcaagcaattctctcacctcagactcgccagtagctgggattgcaggtgcacaccaccatactcagctaatctataaaattttggtagagatgacatcttactgtattgcccaggctggtctcaaactcctgggctcatgcaatactccagcttcggcctcccaaagtgatgggattacaggtgtgaaccaccatacctggctattattctttaaaaaaaattatttattttaataaaaatagagacagggtcttgatatgttgcccaggctggtctggaactcctgagctcaagcaatcctcccatctcaggctctgaaagtgctgggtttacaggcatgagccacggcatccggccagtttccccttctttaaagtggagttgattggcttagacgaccttcctggacaccttccagccctgagcccactggctgcaggaggcagagtacgtggcaatgattcattttgttccagctgaggaaactggaacccagaaagtagatgccacctgcccaggaccacacactgattcctgtggtcatcctggacttaatccttgggtctcctttcctctctgctgaggggcacagggattatgctgcccattttccgagtaaggaagctgaggcccagcaaagaaagtgactaaacccactgccagttggctcaggagcagaatctggaaccccggactccagactcctagtgaggaggaggtggggtggcaggatcacctgtaggaccacagagatggtcttctcgcctgccttggctgcccgccattttcggtaagtgtctgccttgagaagattttctgcacagtgagtctggaaacaacagtgggagaggagaattagggcacagagatgacagctaggcctccagctctcagatgattcctttgagtcctcccaaggcctctacgacccccagatttaagctctcccgttaatcccccgacactctgcctggagtttcccctacaacactttcccgtggaagttcacctatgggctctccaagaaagcttccctattcctccttttctctccggaagttccctagacgccggaacgtccctaattcaacatctctccacaattcacttttagcctcctggaaatccccccatgactctccttagacttccaagagaaccccaaaagctcttttaagagctatcctcattaattccctcacgtcttccaacctcccccatgcaggtccctcaccgagtcctggctgctgcaggacacgacatggcggaggcggatctccggcatgtcaacgtcgtgggcttcgcctggccagaaggatgaggtagagtatggggtccgaggggcagggagagtgggagggggcggggtgcgccctgcgctggctaaagtgcgcaagcgcgcgaggctcgggcctttcaaaccccggcgcgccggcgccggcgtcgacactgcgcaagcccagtcgcgcctctccagagcgggaagagcgctgcgttccttagcaacgagcgtttcctccagccccgcctccctccgccacacacaaccccgctctagcctcgcctcccaatgacgtccgaaccctgctttctgggagcctagcaacagaagcgacctccgggattggtgtctggaagaaattcgcctttctcattgcacgatggagttaccgcccacactgaagccgagaaagcaaatctttttgctgtattattatttattttattttttaaaaattttttgttgagacagggtcttgctctctcacccaggatggagtgcagtggcacgatctcggctttctgcaacccctgtctcctggggccaagggatcctcccacttcagcctcctaagtagctgggattacacgcacgcgccaccacattcggctaatttttgtattttttgtggagacatggggtgagagggcggcgggtcttgccatgttgcccagactggtctcgaactcctcagctcaagcgatccacctgcctcggcctctcaaagtgctggaactacaggcgtgagcgactgcgctgggctaggacagcaaatctgagtgaattttcgtagtttcgtagggaacctggattctacgcaacaggatctcttcaaatggctcaggcggctgcactcttctctctgtccccttgccacacacacacacacgcacatatacatacatacgcgcgcgcgcacgcgcgaaaaaaattagcagatctctttcagccttatgcctgaggccaaaagagaagggttctgcgtcctaaatataacacaaagcatgtgcccaacccccaccacacacacacacacacacccctatcctggagttcttccacaaaagcctcagtttcccaatatgtggactgtgggcatctgtcttttactacgcccgcctatgactgccgacagacatccctctgttcattcggtgccttggagacccaagggtgcagccctgggtggggtcgcagctggagacagcccaaacacacaaggagtgtgagccgagcacatgaagagaggggaagggagacaaggcaccccgcacccgcaggaccagcctggacatgctgggtgctccaaggtggggccctacccacactgggtgcttccttgggaggagaggggaagagagagaaggagagggaatcccagttcttgcagccactgggaatcaagaggcccaactccgtcttggtcttcaagcaaacaaacaaacaacaatgggccgtgggaaggtgagaaaacagggtggtgactttctgggttctaatagaagagggggatggaagcccagactcctggggtctccatggaggtggggggctgggcacaagatgcccaggtcacttttggattctggttctgccttcccaacccggaggccacagaggactgccctgggttctgacctcagctatttctccccgtagggtgaatgtgggtccagacccacccctcctcagcttcctataaaagctggggaccaggtactgctgatacacacaccatgaggctctccaggagaccagagacctttctgctggcctttgtgttgctctgcaccctcctgggtcttggtaagtgacaagggacctgaactgtctctgggacctcaggaagagagaggtcccagattgagagagagagagatatagagagagaaagagccttcagcaagtcctcaaggtgaacggggaggcattctggaaattcagattcatggaagaggccaagggtaaaggaagagaaagcctgggggtcccagagaagaaaagctcctgtgattggatccctgagagaggggcttggtgggctctgaatcctccatcctccaggaaggatcccaaacacatctcaattctaggaaatcagatgagagcatggctggaaaggga

SEQ ID NO: 1561281 - DNA, 4001 bp, Homo sapiens
aacctccctccatcagcacctcccaatatcacacagaggcccctgcctttgcagagaccttcctcactcctccctgtaatgcactaacctcgtctggttccttctcataacatgtggtgctttctttttctcttctgagcactcacaataatttctgaatatatattcatatgtctacttgtttacttggcacaggcctccaatgcctttccttctctctctcttttttttcttttcttgaggcgttgtttcgctcgttgcctaggctggagtgcaatggcgcaatcttggctcactgcaacctccgcatcctgggttcaagcgattctcctgcctcagccgcccgagtagctggaattacaggtgcgcgccaccacgcccggctaattttttttttttttttttttgagatggagtctcactctgtcacccaggctggagtgcagtggtgaaatctcggcccactgcaccctccacctcccaggttcaagcaattcttctgcttcagcctcctgagtagctgggactacaggcgcacaccaccacgcccagctaaattttctatttttagtagagatggggtctcaccatgttggccaggctggtctcgaactcctgacctcgtgatcctcccacctcggcctcccaaaatcctgggattataggtgtgaaccactgcgcccaacctaatttttttgcatttttagtagagatggggtttcatcatgttggccaggctggttggctgggcaccgtgactcatgcctgtgatcccagcactttgggaggccaaggcaggtggatcaccctctttttttttttttttttttttttttgaggcgaagtcttgctctgtcgcccaggctggtgcaatctcgcctcagtgcaacctctgcctcctgggttcaagtgattctcaagcctcagactcccaagtagccgggattacaggtgctcgccaccacacccggctaattttgtgtacttttattagagataggattttgctgttacccaagctggtctccaactcctggccccaagtgattcgcccacctcgacctcccaaagtgctgagattataggtgtaggccagcacgcccagcctgccctctcactacaaatctccttctcctgggtaacttttcatgatcagaattatcctcttccatgccgggtgcggtggctcacgcctgtaatcccagcactttgggaggcctaggcgggcggatcacctgaggtcgggagtttgagaccagcttgaccaacatggagaaaccccgtctataccaccccgggcgtggtggcctgcgcctgtaatcccagctacttgggaggctgaggcaggagaatcgcttgaacccgggaggcggaggttgcggtgacctgagatcgcgccattgcactccagccttggcaacaagaacaaaactaggtctcaaaaaaaaaaaaaaaagaaaaagaagtatcctcttccaggaagcttcactgacacccctaggctgggtcatgtgcctcctcagggctcccacaacatctccatcccaacacagggcctgacacatgggagttgagacaagttaggttgaatgaataaatgaaacacacagcacactcacggagatgaagagacaggaaaagggggccaacagcacaatacaggttcgcttcttaaatgagcggtaggcatggccctctgcgctcccggggggccacgaagctgtcctaagggtgtgggcgacagcaggcgggtactggggagccacggaagggtggggagcagggaagggcggatcgctaactgcaaatgaatgaaagttgcatttctctgcatatcgcacgctatccagtcccaagttgttttcttctaaaggaatttcctaaagaatcgccccccaaggggcctcctacccgaacctggcatcccagcgctgtgcacacctcagggttccagatccttgatctcgtgacctctgacctgcagtgacctcgccaaccgacgcggccgccccgccacgcccccgcccgcccgatctcctccgccggccacgtacgccacttacgcagccggggcgtccccgcagccgccgccgccaagcctgccgggtgcatccttcgccgccgccacctaagccgcggttcggagcgtgcccgcccggctcccgtacccacgccccgccggcgaagagacagccaatggacgtcaggattgagggaaggcctcgcccccacccccccgacccctccagccccccccttcacggaggcctggacgactgggcggtgccttacgtaagaggcggagactgggctactgggctcatgcagtaaagcgagtcaaggcctgagtggcaggagggcgaggccgggaccaatcccaggaggaggcggtgtctgccacgacagaaaatgagtgtctgccccttgccggggctcacgcccctaactccagcactttgggaggccgaggcgggaggattgcttcagcccagggattcgagactagcctgagcaacatagtgaccctcgccccgccccatccctacaattttttttttttttaatttagccaggctcagtggcttaacgcctgtaatctcagcactttggaaggctgaggatcgcttgagcccaggagttcgagaccagcctgggcaacagcgagatctccatcgctacaaaacattttttaaaatgtaaatatcgagcgaaaaggtcgatgggaaatgcagttctctgcagacagccgttcagtttgggtcattgagagcactggagagccagaaaaggctgtggagcaaggaaaagagaaacatttgtgttcctgaggggctaattggagttgtaggggcttatacaatttttgacatcccttaggtattaaagtaaatatttatttattttgagacagggtcttcctctgttttccaggctgcctcggaccccctgagctcaagtgatcctcctgcctcagcctccccagtaactggcaccacaggcatgcaccaccatgcccagctaatttttaaattttttgtcaaaacaggatcttgctatgttgcccaggctggtctcgaattcctgggctcaagccatcctcctgcttcagcctcctaaagcattaggattacagacatgagccacagtgcccggccttaaagtgaatatttagagtgagaaaaggaaacccaacaagttaggtgagaagaaccaggtgtctctcttggaatagatcttaaggcagtttcccagaaattcataaaaatgttctcacattgcaacctggttccctctgtccaccaaaagcattctacaacccccagcaactcacagcacacaggcgcacctgcaagtgaagagccctgcccacctagcgtccttagtctctcctctctctgactctcagtctccccccttctctccctctcagactccccgacttatctcaggaaaacatagtggtggaagttacttctgcgcagcgatagcgcatccggaaggatgtcagcaagtgaccctatcgctgtggcttcctcttcctcctctgagacgttgtctttttggagaccttaagggctgctcctggtttctcagtgatgagtgctggctccactgtggttcctttttgtgagcgaaatgcccgcattcttcttcacctctgatttagcctctgtcccctgggctccaacaccattttctcctcatcctcagccctctcttgctctggttgctccagatacatctcttccataaatgtttttttttttcttattgcttttttgtttgttttttgagatggagtcttgctctgtcgcccaggctggagtgcagtgatgcgatctcggctcactgcaacctttgcctcctgggttcaagtgattctcctgcttcagcctcccgatagctgagattacaggcgtgtgccatcgcacctggctaattttttgtatttttagtagagacagggtttcgccatgttggccaggctggtctcgaactcc

SEQ ID NO: 1561282 - DNA, 4001 bp, Homo sapiens
tatattcatatgtctacttgtttacttggcacaggcctccaatgcctttccttctctctctcttttttttcttttcttgaggcgttgtttcgctcgttgcctaggctggagtgcaatggcgcaatcttggctcactgcaacctccgcatcctgggttcaagcgattctcctgcctcagccgcccgagtagctggaattacaggtgcgcgccaccacgcccggctaattttttttttttttttttttgagatggagtctcactctgtcacccaggctggagtgcagtggtgaaatctcggcccactgcaccctccacctcccaggttcaagcaattcttctgcttcagcctcctgagtagctgggactacaggcgcacaccaccacgcccagctaaattttctatttttagtagagatggggtctcaccatgttggccaggctggtctcgaactcctgacctcgtgatcctcccacctcggcctcccaaaatcctgggattataggtgtgaaccactgcgcccaacctaatttttttgcatttttagtagagatggggtttcatcatgttggccaggctggttggctgggcaccgtgactcatgcctgtgatcccagcactttgggaggccaaggcaggtggatcaccctctttttttttttttttttttttttttgaggcgaagtcttgctctgtcgcccaggctggtgcaatctcgcctcagtgcaacctctgcctcctgggttcaagtgattctcaagcctcagactcccaagtagccgggattacaggtgctcgccaccacacccggctaattttgtgtacttttattagagataggattttgctgttacccaagctggtctccaactcctggccccaagtgattcgcccacctcgacctcccaaagtgctgagattataggtgtaggccagcacgcccagcctgccctctcactacaaatctccttctcctgggtaacttttcatgatcagaattatcctcttccatgccgggtgcggtggctcacgcctgtaatcccagcactttgggaggcctaggcgggcggatcacctgaggtcgggagtttgagaccagcttgaccaacatggagaaaccccgtctataccaccccgggcgtggtggcctgcgcctgtaatcccagctacttgggaggctgaggcaggagaatcgcttgaacccgggaggcggaggttgcggtgacctgagatcgcgccattgcactccagccttggcaacaagaacaaaactaggtctcaaaaaaaaaaaaaaaagaaaaagaagtatcctcttccaggaagcttcactgacacccctaggctgggtcatgtgcctcctcagggctcccacaacatctccatcccaacacagggcctgacacatgggagttgagacaagttaggttgaatgaataaatgaaacacacagcacactcacggagatgaagagacaggaaaagggggccaacagcacaatacaggttcgcttcttaaatgagcggtaggcatggccctctgcgctcccggggggccacgaagctgtcctaagggtgtgggcgacagcaggcgggtactggggagccacggaagggtggggagcagggaagggcggatcgctaactgcaaatgaatgaaagttgcatttctctgcatatcgcacgctatccagtcccaagttgttttcttctaaaggaatttcctaaagaatcgccccccaaggggcctcctacccgaacctggcatcccagcgctgtgcacacctcagggttccagatccttgatctcgtgacctctgacctgcagtgacctcgccaaccgacgcggccgccccgccacgcccccgcccgcccgatctcctccgccggccacgtacgccacttacgcagccggggcgtccccgcagccgccgccgccaagcctgccgggtgcatccttcgccgccgccacctaagccgcggttcggagcgtgcccgcccggctcccgtacccacgccccgccggcgaagagacagccaatggacgtcaggattgagggaaggcctcgcccccacccccccgacccctccagccccccccttcacggaggcctggacgactgggcggtgccttacgtaagaggcggagactgggctactgggctcatgcagtaaagcgagtcaaggcctgagtggcaggagggcgaggccgggaccaatcccaggaggaggcggtgtctgccacgacagaaaatgagtgtctgccccttgccggggctcacgcccctaactccagcactttgggaggccgaggcgggaggattgcttcagcccagggattcgagactagcctgagcaacatagtgaccctcgccccgccccatccctacaattttttttttttttaatttagccaggctcagtggcttaacgcctgtaatctcagcactttggaaggctgaggatcgcttgagcccaggagttcgagaccagcctgggcaacagcgagatctccatcgctacaaaacattttttaaaatgtaaatatcgagcgaaaaggtcgatgggaaatgcagttctctgcagacagccgttcagtttgggtcattgagagcactggagagccagaaaaggctgtggagcaaggaaaagagaaacatttgtgttcctgaggggctaattggagttgtaggggcttatacaatttttgacatcccttaggtattaaagtaaatatttatttattttgagacagggtcttcctctgttttccaggctgcctcggaccccctgagctcaagtgatcctcctgcctcagcctccccagtaactggcaccacaggcatgcaccaccatgcccagctaatttttaaattttttgtcaaaacaggatcttgctatgttgcccaggctggtctcgaattcctgggctcaagccatcctcctgcttcagcctcctaaagcattaggattacagacatgagccacagtgcccggccttaaagtgaatatttagagtgagaaaaggaaacccaacaagttaggtgagaagaaccaggtgtctctcttggaatagatcttaaggcagtttcccagaaattcataaaaatgttctcacattgcaacctggttccctctgtccaccaaaagcattctacaacccccagcaactcacagcacacaggcgcacctgcaagtgaagagccctgcccacctagcgtccttagtctctcctctctctgactctcagtctccccccttctctccctctcagactccccgacttatctcaggaaaacatagtggtggaagttacttctgcgcagcgatagcgcatccggaaggatgtcagcaagtgaccctatcgctgtggcttcctcttcctcctctgagacgttgtctttttggagaccttaagggctgctcctggtttctcagtgatgagtgctggctccactgtggttcctttttgtgagcgaaatgcccgcattcttcttcacctctgatttagcctctgtcccctgggctccaacaccattttctcctcatcctcagccctctcttgctctggttgctccagatacatctcttccataaatgtttttttttttcttattgcttttttgtttgttttttgagatggagtcttgctctgtcgcccaggctggagtgcagtgatgcgatctcggctcactgcaacctttgcctcctgggttcaagtgattctcctgcttcagcctcccgatagctgagattacaggcgtgtgccatcgcacctggctaattttttgtatttttagtagagacagggtttcgccatgttggccaggctggtctcgaactcctgacctcaggtgatccacctgccttggcctcccaaagcactgagattacaggcatgaaacaccgcacccagccttatgtatatatatttaattaataaagcaagtactgccaagtgcagcggatcacgcctgtaatcccagcactttgggaggccaaggcg

SEQ ID NO: 1561283 - DNA, 4001 bp, Homo sapiens
gcgcccaccacaaagcccggctaattttgttgtatttttagtagagacggggtttcaccatgtttggccaggctggtctcaaactcctgacctcaggtgatccacccacccaggcctctcaaagtgctgggattacaggcatgagccaccccgcacccggcagtttttgtatttttggtagagacggggtttccccatgttagccaggctggtcttgaactcctcaggttatctgcccacctcggcccccttaagtgctgggattacaggcaggagccactgcgcccagtccatctttggtcttctgcatatgctgttccctgtgcctggaacatatactcctgcttccctaccctattccccagggaagccttctgtctcctttaggtctcagccaattcctcacctcccccaggaggcctttctctaacccaccagattgtgtgtgtcccctgtgttcccatagtcccgatccataaccagtcccaccataaccctttgagagcaccacagttcgttcaccagcacccaccatcaccagcaccctgcccaggggaagagtggctgaaccctgagcataactctgagccccatcccacctgcctccccagcctgacctgtgaggtgtccacgtcaaagaagctctgatagtagctgaaggtccagaatcccggctgctgctgctgctgctgctcctgcaggagctgcacattgcgggcattcagtgcctgcccggagagcctgggtcagctgggggctgcaaggaggcaggacacagggactcaccgcggccttgtcactctcctcctccacctcatcctcggctccatagctgccacctgagcccacggccacagccacgtgcccttgtggggtcagctgatcgcttctgctggtggtggctgcatctggggtgtcagccagaagattagtggcctcctcgaattctgtggaggaggtatatgggacacacgcacgtttgaggggtggaaagaactcgactgggcccaagctaaaccgatgctcatctgggggcggaggctctgctgagccattgatctcccccaaggtggggcccaacttcctcagtttggaggcatccggaggacatctgttcccttcctcctaaagtggaactgcaacttagggttgacgctgggatggggtcagggtctggggacgagaggctcgggtttgaggtctgagttcagggcgggggcggggttcgagtcagagatgggtctcactcctgggtcagggttcacagccgcctaggcttcggggtagagaaattggaagccgtatcggggggaggttctggcccggggcgggagtgggagatccggccacgtcggggccgcactcaccatggaaggtcagctcgtcggccgatgccatggtcgttcaggggcgtctccgcatccctcgctgaggacagagaccggtcaggcacacttcccccccgcccccgagccggtccctcggcccccagccctacctggcgaccaactgcacccacggaggcttgaactcgtcgtcccgtccccacaggtgcgctccgccccccctcacctgaggccacctgggccggcgtggctggggctctctgcgcctgcgcgtctcgcctacccgtcagactccaaccgactcagacctgacagcaacatccggcgcctgtcctctttctatcctctcccgttgggaagccacttccggtaaagttggcgcttgcgcagaagagactcccgggctcttaacgtcgggtatcaggagtttcttcccggagcaaggacccccaagacggaagaggatggccgcggcggctctgaggagattttggtcccggcgccgcgcagaggcgggcgacgcggtagtggcgaagccgggagtgtgggcgcggctgggtgagtagcggcggaaggcggcagggtgggtggccgccgcgacagggtgggtggccgccgcggccggatcactcttaccgcgctcctctcccctcagggtcctgggcccgcgcgctgctccgggactacgccgaggcctgcagggacgcttcggcggaggctagggcccggccggggcgcgccgctgtgtatgtgggtctgctgggcggcgcggcggcctgcttcacgctggcgcccagcgagggtgccttcgaggaggcgctgctggaggcgtcggggaccctcctgctgctggcgccggccacccgcaaccgcgagtccgaagccttcgtgcagaggctgctctggctgcggggccgtggccgcctgcgctacgtcaacctggggctctgctcgctggtgtacgaggcgcccttcgacgcccaggccagcctctaccaggcgcgttgccgctacctgcagccccgctggaccgacttccccggccgggtcctggacgtgggcttcgtgggtcgctggtgggtgctgggggcctggatgcgcgactgcgacatcaacgacgacgaattcctgcacctgccggcgcatttgcgggtggtcgggccccagcagctgcattccgagaccaacgagcggctcttcgatgagaagtacaagcctgtcgtgctcaccgacgatcaggtggaccaggcgctgtgggaggagcaggtcttgcagaaggagaagaaggacaggctcgccctgagccaggcccactcgctggtgcaggcggaggccccgagatgaaaccctgaggcccccgagtcctggcaaactgcttgcctggggtggtgcagttctgagtgtgcctcacctgcagaacagctgagacagatgatgtgcaaagtgttttctcactggatttgcacaagtttggggagcctttctgccccccgtctttgttctttattagctgaagctaattcagagccacctgggtccgggagttggggacagcagaacgacttgacacatgttcatcactggcagagctggtcatgagccttttatataagcctttttcatcgggcctcagaggccctccttaaggaggtaccacattggtcagctgacttgcaaactcttctaaggccacttagattttctttttcaagtttgggttgtggcctggcatggtgatgtctgtaatcccagcagtttgcaaactgaggcaagagaatcgcttgaggccaggagtttgaggccagctagagtgacatagcaagactccgatgctacaaaaaagaataataatagtaattaactaaataaaatttgagctgaaatgtttttattctatgacctattctctctcgttttttttttttttttttttgagacagggtcttgctctgttttgcctgctggagtgcagtggtgcaatctcggctcactgcaacctctgcctcccaggttcaagtgattctcctgcctcagcctcctcagtagctgggattacaggcctgtgccaacatgcctggcaaattgttgtatttttaatagagatggggtttcaccatattggccaggctggtcttgaactcctgacctcaggtgatccacctgcctcgcatttccaaagtgctgggattataggagtgaaccaccacacctggcctttcattttgataagtaacatttttgccattcccagctctttggaaggctgaggtaggaggattgcttgagatcaggagttcaagaccagtttaggtaaaatagtgagagctttctcaaaaactaaaatatttggaagggtaaagcaggcaaatcatttgagcttaggagttcaacaccagcctgggcaatatggcaaaaccccgtctctacaaaaagtacaaaaatttaccaaaggtgttgaatgagaattgaaaatatgtatacatagaaaaattagccagacatgttggaccatgtctgtagtcccagctattcaggaaggctgagatgggaggatcacctgagcctgggagttcaacgctgcagtgagccacgatcgtgccactgcactccatcttggacaacagagtgagactgtctcaaaaagtaaaataagtg

SEQ ID NO: 1561284 - DNA, 4001 bp, Homo sapiens
agactcagggcaggaaagtcacatgccctgggacaccccagtaaacagagccaaattcaaacctcagcctgtctgcagctgacataggatgaagttgaaggacggggtgaggaaaaggagctcatggtgaagtcagacagagtccccccggggcaggccagcgcagctcccaggaaagcacataggaggtgcgtttgcattcggggtgaggaatctggcaggctgggaacatggctcattcctccacctccatcttgtgacagctctgactgctgcccccgcaggagggtgcagggaggaagtggagggcgggagggcgatgcattcctcttcttctgtcccaaagctttggcctctagcagccacttggaacattctcttcctgtctaactggtcattagaataatgggggctctgtgggcagagggtcgtccaggttaggaacctgggggtggggcacagcagcagctgtggggtgggggtgggaggctgcgtgggaattggagcctggtgaaggagggtggcaggcagggcaggtcccttctgctgttgtgggattctgggggtgttcagtggtgccttttgctatcccgaatctcggcccctagatgagagaagcttcaaggccccaaggatttccctgtcagacccaggaggcctgaagtggcctgggtccaaagggaactgggcctgacactcgccaaatgcttccaggagggggctttctgggaggtgaaacctcaggccagggtggccatgccacactcaccctgctctcagtcctacctgcttctctccacctcacacctctgcccaccagaccaccacgggggatcacctggccgcacacagcagcctcctgcccccaaaactcaacatgagcctgggggggctttgaaaactcgaacaccagattgcatcaccgggtcccaaacctgctgatggctcccgagggctctgggaacattcaaactccaaactcctcaccatgcctaagaggcccttctgtgtctccagcctcgtcagccagttccccactacgttctagctcctacccacccctgagagccccctcactcccctcacttagcatttgaggcccccctcacctcaccccttcaccccaaggtgaagtcacagctcctaaaacactcttccctagactgagtctggacatcggctgaggggacacgtgccctgctaggtgggcagtgggcaggagctgttggacgcatctggttcacagtgaggtcaacagccttgcctggggtcccatgtcacaaaggctgaggaggatgaggtgagagtcacagccacggcgccagttctagatcccaaactcaccaacctctggcaaacaggccctgcgttccaaatctgctctagccatgactgccttccccaggcctgtttcctcctctggacaagggaggtggtagcatttgagctaagctccgctcttcccatgtcggcaagtgggggctgcagctccaaggccctgggagagatggagagtgggggtgggccacggttggggttcggtgggggagcgaccagcgctgctgatgaatcattcatgaggggcgggctgccccggaggcagtttccccagcaacgcagcttagtgtctccagcaagatgccaggagggtctcggattcccgggattcccaggcccgtcttggccatatccctgcctccggttccccaccgtggtcatgcctctgccgttgaacctccatcccggctgtgcccgtctccagtccccggaccccattctgtcccagctatgaccctgcctccggtcctacgggctgctcctggccccatgggaaccatgcccgtctccagcttccctctccccagctgacctgaggaaatgccgctcttcgggcgcctccgacgggtctgggccggctgcgctgctcatggccgaggtgagcccgggcgccgggcgctgccgccaccgccaccgccttttaagcgcatccgtggagggaggggacgccccctcttctcctccctcccgcccaccctgcatgcccgccaatcaggaagcgccgcgaaggcgctgcgcgtcaccattggtcggtggactcagacggacttcaccctttcgtgccaggagcccacagcagaggcacctggccaatcttggttgcttcccccgacttactttccctgcagatatccccgtgtctctgagcttccctctcagggagcgaggagcccctccgcagacaaataccctcgccatgcctacaattggcagggctgcacaaggtatggtggctcacgcctgtaatcctgtaatcgcagtgacacgggaggctgaggcgggaggatcacttgtatccgggaggtcaaggctccccccactctccagacctccgtggagaaggtctgacccaaagctgacccaggggcccccagcctggagaggtaagtgggctgctgacaggcatggtttcaaaagggaggcaggagagtccaggtatatcggaggcagagaggaggccgccagtggatccaggggcagcccctaggtgtgttttgaggtcaccctgtgcatatctgctgcgtccccatgctacatgtgatccggtggtgcctagctgggccctctcccccttctttcccccagtccccaggaaaacaggcaggccaggtctgcagagcatttattccgtcccagtggggaggggcagggatccaggtggccggagggcacagggcctacgtgtaccacatgaagccgtggctggcatggagagcctcctctgtggtgcgcagcccgtacagctccccgatcaaggggggcacccagcgggttgtgtggaacacagactcccccacctgtggggacagtggggtatgggtagaggcacagccacccatatacagcctgctaggacccatcccccaggatcagtggcccctgtgcgtggcaggcgctacagccttcccttgtgggacctggcacccaccacccccttggtcctggggtttctatagaaagctgtgggagctccccaaccccaggccctgtctctgccgtggctggcacctctgccctcccagccgggacccaccttccagtcgggcacgtccttcatgatgatggcctcctcctccaggttctcccgaagcatctgcaaggtcctgtggggatggggccgatggtgggggtggggcctcagtgccctgaggggcccctgcctagggcccctagtagcaccccttcaagcctccctccgaccctgtctccttttcccccagccaactcctagcttttctcttgccccaaccccagtgctgcctcctcctccaggaagccttccggttcgcccccttgggtctccactaagtctccacgcctgaggatgcagctgacggcacagggcgatggcccccacgtgcattctggccaccttcggggatgcaggtcaggccctgcagcctggggccttccggccagtgacctcccaaccttggcccctgcggtgctacctccggtcggtttctgcctgtaacagtggcaacagcgcgatgcgagcctcgaagtcctcgatttgtaggcgcctgtgaaagcccgaaacccacactcaggtcagaccaggctaggtcgggggagcacaggcagcacagacctcaggggccagggtgctgctgggggaagaggcggaggggggcggggaggcaggcagggggcagggcgagggtcgcgggaagggcaagggctgtgggcagagcccaccaggagcctgagaggagggcgggtgcaggcagctgcacgggtgactgcccacaagactgttggctttctactttcttttcaattaaaaactttttttatcctaaaaataactctgcctgatgatcgcgacgaagagggggtgacttcatcacggggctctgggcctcacaaaaccacgtccccttcatctcaaaataatcagtgtgtgaggctggggcaggcggggccacaatctttcctttctt

SEQ ID NO: 1561285 - DNA, 4001 bp, Homo sapiens
cccaaggccctggccgcctcctgaaggggccttagctctccaggctgcagctctacactctccccatacacaaagttcaggagctgggcaaaggtagaagggctgatgccttctcccagagcccactggcccctgcggcccagctgctggctgacacctgctagcaccaggctgtgggcggggaactcctggctccctacggtgatcagagtatcacagagtgctggccggagcctggctgctagctgtaccagccgatcagagccataggggctgggcagtcttatggggggcagggacattgtgccttggcttgggtacctaactcagaggctctaagaggaagtccacagtgtgaggtccatggttgaaaggggagggaggaacatctcatctcatttcaagcctgtggatgtgaggggagagggtgtgagttgctggtcctagatcagagccctctgtcctgagtgagcaaataaagtaacccaagagaggattggagcttatccagaatcatagcaggtaggcatggtggcgagagaatggaaatcagaccaaattcaggacttaaagagcaagggccagtcagttaacagaaatatctagtagtgggtttaagacaggcgtgcgggaagtctgccagttggcagtctctgacgtaaaagatagcagatactgccacttctgcttctccaagcccctctgcagggaaacacctctgcgcaagccaggctttcttcattccagacaaggatcaccacaaaacccagtcaacgccggcactaagggatggagcatgacacagtttcacgggagagcttagaaagctagtgggtcctcccccaaaagcccatcgctcctgaaaggcagagagggcagcatgatagggatcctggctgcaggagcgcaggcgctaaggcatccggcagtcatcactgtgaagctgaagcttctagaacacatcctcagggaaggaaccagacattcccatccagagaaagaggagagcaggtgcagaagccacaggagaggaggctcctgacccaatgatggagagaccttttggagaatggactcctgaggagatgggaggaaaggacgtggggactggagacagggaggctgtttcctctcaagatttgggtaaggagatggtttaatttgtttttcataagacaaaaagtgaagaatagaaagacagcacccaaccaggcaggagtttctcacacatcaaaaccaccacattggcttttaagaagagagctgggaacccagatacgaagagaaccagaacctcagtgtcttagcacccagcaggcagagtcctaggtgcaggttccctgtgagcaagggcccttggggcagggagggctgcacttggacacctcagggagagggctctaggttggcagggaggagacagaaagagttgtgatgggaagaaggcctcagctggagagaggctatcactcaccgcttgtagcttcttccaggacaccgcatgctctgaactactgttggggctcctggggccccccctggagctagccccgcccctgacctcacaggcctccattggatgtcccaagtatcagtctgccacagtccccccgaaggggtgtggttttctaaccctgcctctgccttctgcctgcaggagagaccaccccctctacctccagaatgcacacattctgcccctagcctcctgtctcctcacttcgtttgtgaactcctagagtcaaagaagtgtatctgtggcagcaaggaccttggaataatcagccctgcctttgagtttcatctctgccatttactatttgagtcaccttgggcaagtcacttctctgggcctcagtaacctcattcatgaaataggcataatatctgcttacctcatttggaggtgggggtgaagatgaaatgacgtgacgaatatgagtgtggtttgtaagtacacagtagcattcagtggtatggttgtttcttagagatgacggcagagcacacagctgcagaagtaaaaaggattgaaacatttggatcccaagaatagggtggaggagccagaagctggcctcctccctctccctgacttggtactgggaagcctcatttgctgcctgggaatgacctgggggtgggtgtgtgagtgactcagatcctcccatcaagctctgaaaggggcaaccccaggaaggacgtgtggtggtcttcgaagagaaaaatctccttttcttgggctgatgacaaatgacatttctctgaaatcaggacttgggtttctttcacttcctgcccaaggggtcaaggtccccggaggtttcccctcttttcacacttcagaactctttaatctggggaagggatggggtcttagaggctcaactttctttttctgtttcttattattctcttatccctgatcctatagcaaaattttcatttatccaacaaattttgatgacatgtttattttgagacggggtcttgctctgttgcccagtggtacgatcacggctcactgcagccttagcttcctgggctcacatgatcctcccacctcagcctgttgagtagctgggactacaggtttgagccaccatgcctagctaattttgaatttttggtagagacaggggtctcactatgttacccaggctggtcttgaactcttgggctcaaatgatccgcctgccttggcctcccgaagtgctgggattataggcgtgagccactgcgcccagcggataaagcatttatgatatgtgcctggcgtatattagatacacagtaaatgactggaagataaacaagtcaggtactggtaagctgctctggtgacaaggcacagtcggcttccccataggcttctcttttttttttttttttttttttttttttgagacgcagtctcgctctgtctcccagactggagtgcagtggcgcaatctcagctcactgcgacctctgcctcccaggttcaagcgattctcctgcctcagcctcccgagtagctgggattacaggcgcccgccaccacgcccggctaatttttgtacttttagtagtgacagggtttcgccatgttggccaggctggtctcgaattcctgatgtcaagtgagccacccacctcggcctcccaaagtgctgggattgcgcccggcctcccataggcttctcttaagggggaaggatctaagagtccttgtcccctcctagatgcaaatactgtccctaagctcccgtttcttcctttggctccaggaccctcgaatgttcagaccagcctcccactctctctttccaggcctaccacgccttccctccacatgggtgcaggcacatgttaacccttcctagatcagacagggtgtgtcaatgggtgaggctggtggaggggcaacagggtggggagaggggaagatgagtcagaacgaaagggaaaatgcaaatgtgagagctgtgttcatctgctactctgaacgttaactattttccatttctgagctttccaattcctcacaccaccacacccatataaaagacacataaagcatcagtccctctgatatgtatgtacgcagagggaaacacccttcctccaacacagaaatacagagtccctcaagacaaggaaggagtgcggaaagccctgagggactagccccagggatgaggaaaggtacaggggtctggacgattacatggtcacccctctgagtgtggccccctcgctttccagccccacatcatgtgcttgtgactcagctcccccgctggtttgctcattgatgatcgagagagttggagactgctcaaagggcagcattctgtgtaagccaaatatagttgacagggagcatcagtgggctttcggggaacctaaaagggaggaggggcaagggaactcccctttcagtgaacaaaagcccccaagaatggggaaccccacctaaggatatccccttagagaccgcctcctagaattatctccag

SEQ ID NO: 1561286 - DNA, 4001 bp, Homo sapiens
cgaatgcgcacagtcacgtcacagaagtgtcccccaagcctctgcccattgagggtctcaagcagagagcgtgagaagttctgcaggtgtatgtgatgcacagcctctgcagccgccatctgcacagaacaagaggagggcagggagaggtcaactgaggacccccatctgtcccaacgtccctgtcccctcaccccttgttgcaggacagggctcgagtgcaccacactccaaggcgcgctaacccatccctccccagctgcccttcacagtccccattcccaacacaggacactccagcactccctcctccccctacctcagacctggccaggccgtctacagccccccattaacgctgcaaaccctagcacacccctaggagagggtgttggcctcaatcactgctcccgaaaaggttcaggccttggcctactctatgttgactcacccacccaccccaccccaactccaataaccctaagcctccccatgtgcccctccaagagggcagcccggtgtgtagaagaggccagggacccccatcccaactggctaacctgcctcaccccgagtagaccttgctctctacccagctagcttccactcctcctccacccctgctgacagctccttttggtttcctttagccacatccccccagtatgagaccctgtgcataggcaggattgctgcctcagaaccaggtcaccttaactagtatatacagaggctctcgcaggagtggggtggcatgacctgcttcctgggcagggtggttctgggtgtgcctagtcactaagggctgagggtaaaaggttgggcagtaccttgggagatgccccagggaaaccagtacatgctccctggcagcccctagcatagcgagcagggaggtggctcctgcagccccagcttcttgccatctcgatggggcctgtggggcccagggtgtgggtgtggcacagagaggggaagtgtggattgagcaggggtgtgtgactggatagctgcccatggagtaatcggggacacggcccaacatcaggcaccagaaaggggagggggtagtcctcagaggactctggaatctgaggagttctgctactccatccatcaagcaggtaaaccgtgatccttcggcctgtttccccttctatcaaacaagggatgagatactcggctcatcccgcacccagactgcacacacctccagtctaagggaggagggtaggagctctggactctgacatccgtataggctccaccagcctgtctctcccttggagtcacaaagccccagggtgggctcggcttgatgctgcccctacaccctcgggctctactggggtctcaagattcaacccctccgactccttatgcccaatccgccgtccctttgctcagccagacgcctcccttttttgcatgccccacatttgaccctcagaccacttcgagcacctccactgccccgttcccgctgtcctggacggatgaagaaacctggctggtgtctctgcgcccctcgcctccccttctgttccccacacggcagccagagggagcttttccagactacggatccggatacaccaccccgctccctggccctgttctgagccttctgtgcaatgcctcaaaaaagccaggcctgtgcccgcgcaaaggctaactcagcaagcagcaccgccccatctgtattcacctagcacctgaaaggattctaatctgtccggccgatggggacggaaacttgcgcatcaacccgagagacttgaaccttcctttcccgccccgccccgcgacgggctccattcctcagtcccgacgccgcaaggccggcctggacacttcagaacaaaggcctgcactcgagacccggcgcccaggccagcttcccgggtccggcgccgcacactcccgccacgccttcgccgcgccgtgtgctttactccgagcgcgttctcccatactctgctccattgcccgcgccccaccctacgcccaaagcacccctctgacccgccgctgccaccccgcactctggcccccgccgtaccccggtcctgcagcgccccctcgcgttctcagcgtgcgcttctagcggagcgcaggtgcccctcccctggcacgccccagcctcctcgcccgccctgcggcagggggatgcccattcgaccccacctccgactcctcttcaggcaccaggctctgccgtggccgcttcctcctgaccgactacaaggccgcacttccgggccgttaccccggcggaacggaggcctgcggtcgcggcggcgcaggggaaaccctaggccgaagcacgtttccggtatttttatggcgatcagctcccgccagtctgcactccggctctcctcttagtcggaaccaaagtcgaagaggctagggctgccgcgtcgcgaggaatgtctggaccagagcactcttccggcgtcgcccaggagatcaggggtgtggcgggcctgcgcgatcaatccgcaagctccctgtgatgcagaatgggaaggcagttcccggcccaagtgcccaacgtgttctggccagtttaaaccccactgcgaaccggggaagtggccttattcctgtgacacgggtgagagctgaagtaggtctcggtccctggccgccaggaggtgcaagcaagctaccactactgcagacgctccaggcccgcccgctgtgggtgggactggggaaaggaccccatctcggccttggcaccttctactacaacgcagacaggaatagacaactgcctcaccctgctctgggcctcccctgagctagaccctgtgagattctgggacattgcaagtcaatctggtatgggggacagaattccgaaaatggccccctccgagatttccgtgcccaaatccccagaacctgtaaatatgattatctcacctatgaatagttacactacatggtgaaagggtttttgcggaaataattaaggttactcattagctgatcttaaaataggatatgattctggattattttggtaggtccaaggtatcataagggtccttaaaggcagaagaggaaggtggagaaacttgaagtaggagaagggttccagaggctttgaaggtagagaggtccatgagaggaaatgcaacaggacaggtgtcatgctgagaatctgagaagagctgcaacaacagccagcaagaaaacagacctcatggcccggcgcagtggctcatgcctgtaatcccagcactttgggaggccaaggcgggtggatcacgtcaggagatcgagaccatcctgactaacacagtgaaaccccatctctactaaaaatacagaaaattagctgggcgtggtggcaggcgcctgtagtcccagctactcgggagactgaggcaggagactggcatgaacccgggaggcggagcttgaagtgagctgagatcgcgccactgcactccagcctgggcgacagaacgagactccgtctcaaaaaaaaaaaaaaaaaaaaaaaaaaaaaaaggccgggcgcggtggctcacgcctgtaatcccagcactgtgggaggccgaggcgggcggatcatgaggtcaggagatcgagaccatcctggctaacacggtgaaaccccgtctctactaaaaatacaaaaaaaaattagccgagcgcggtggcaggcgcctgtagtcccagctactcaggaggctgaggcaggagaatggcgtgaacccgggaggcggagcttgcagtgagccaagatagcgccactgcagtcgggcctgggcgaaagagcgacactcagtctcaaaaaaaaaaaaaaaaaagaaagaaagaaaagaaaacagaccttagccctagaagtgcgtggagctagattccgcccacaacctgaatgagcttggaagcaaattcttccccagagcctccagatagcagcttagtccataccacaccttgattttagcctttatgagacccacagaagacctacttgg

SEQ ID NO: 1561287 - DNA, 4001 bp, Homo sapiens
tgcctccccccgcctcgccgccaactcctggctgcattccgccaacatttagtgggcgccgactgggtgtccgggcccgggtggacagcaacctcccgccgcggcccaccgtgcgcccccgccagccagcccgggcagcgcctcccagaacccgcagaggcccggtccctgggggggcacccgctcctccgctccgctcagcccccagccaggctcccaggccgggggggctgggtctcccgcccgggaggtagggagcgggagggagggggctggatcccaccagctcccccctcccctgcccgggctcaggcttcgcacgtggtggtggcgtcaagggaaaggagggggggtccgggccagaggagacggggtcacgcgctttgggggcgcggacggcggggactggggtgctctctccgccccctcccgcgggtcggagccggacggccgtccgggcagggcgaggggccaggccaggccccccacccggggctgagtcaggcccgggcgggggcaggaagcggccccctcccccgccccggccgcagcgcgcggcccccgcccggcccgcggtcccccgccgcctcgcccgcgcggggggctcctacctccttcccggggcagcggcgagggggcccggccccggcggcggcggtggcggcggctgcggctgggctggctccctccgaggggccgggaggcggcagtgagcctggccccgcgccaccccccgccgccggcggccaatccccacccgggctggggggagggcgatgcaaattaccccggatctgggtccgcccgcccgcctcccccacgcccgggcccggcctgcgctaggccgcgcatccccgggctcgcctgcaccgcgcggccgcccgggccgccgccctccccggggagcgcggggagggtgaccccccccccacgggcggggggccgaggggaggggggctggggacggttacacaaccaggcggggaggggccccggggcggggagggggccggcccgcgggccgcgcagccggaagccgggaccgccaccggcccccggcgaggggagcccggctccaggccccgccccctggcgggctggccccgcccccgcgccgcgccgcgcgatcggcccgcgcccattggctctccggcccgccgctcaccgcccctcctccgcaccgcccctacccgcaggccgcggcgggctgtcggcgcggggcaccctgggacttgtagtccaagccgcttgccacctgccggctgcaaacggcggagggactacgaagcccagaggtccctgcggccctgcccgcccacccggacaccccaccccttccccctcctttccgaagcccccctccctgttttttcagccccctcccccccatcccccatggagctcaatcctggccaactccaacgtatgcacgcagcaccgaataggcccccggggggcgagagcgcccctcgtcttcagctggaaacttagcaggcgacgcgcccccctatctccccacgccggctccccccaccctcaatgcagccctgcttcccctcccccgctccccgcgcgcctgggagccccgaaaagccatgcacccgggttggggggggctggcgcacaagctcatgcacttagcccccaatccccccttcccgggcggcgccccctccccgcgctcgggatccagggcgcctccagcctccgggcagctgccaaccaccccttcctctgaaacttgggggaacgtccccggctccccggatctccccttcccgagggggcagcggtggccgcagcgacccccgcccgtccccgccctgcaccccgtgccgggggccgcgccgggcgctgacttacctcgcggggccgggccggggcgcgcggggccggggcccgaagttgggactgggctccctcggccgctcgcctccggggtccgcggcgctcgctctgcccgcgtcgcgctgccctggtcgctccctcgcgcggcggcggcggcgtcactgcccctacagtaactgtacagtacagccaaagccccgtatgatgctcgcgactcccttcctggtttctccgagggcaagaggggtcctcccttgtcttaaaggtgccgcagccgccggcccccccacgcccagcccgccccccccagcctggcctcggaggccagaacaggctcggcaggtcccctcttgccacgtctctgccctcccgtggggcttcgcccgctgcgccggggagaccgggctgttattaggttttgtcaagtcgggggggggggtccggcccgccccggcgcgcccccccgcctctgacctctccgccccgccgcgcggcgccgtgccagcttgccagcttatctggccccagagctccccggggcgcggggggagcgggccccccggggtggagggggggtgggggcctccagataaacaggcccccagcctctgcgcaggggcggggtgcgggggggcgcgggctgtgcccccgacgcccggggcgtggcaggatggcagcgggggcggggagcgcggtgcgcacagcgaggagcgacgcgggcgtgtgggtcgcgcggcctgggctgccgggggtgggttgggggtgaggcggtggggatccccccgcaaggccaggccctgggcctccccgggcctcagtgggacttgccgcgccagggaccccggggggtggccttgccaaggacagcccgggtccgcggggctcccgggtccctaaatgaaaccaccaacctgccctcccgcgattatataaaggagtcgcctccaccccgctgcgctaggggcgtcagcgggggaaggggttggcgaggggcggggagggcggttgttttcccggcttcgcgagttcccccacccggctgcgggccgcggggcgggacggggaccgggccctggacgcctggtccgcgcgggccgctccttggcacaagggggtctgcatggctcgcgaggggcggaggtggggagtggggaggcgttggttcagcgcgacttttttttttcccctgtccgtttctcccacttcctccccggtcgtgggagaggtccggcgggggacagggaagggggagcagggcacgagtggtgagaacgtcctggcccggcccggggagggctggctggtgcgaccgcgcgcctgggggggggggggagggctccaggactcagtttccccttcctcattcctccagacagagagagtactgacagctgctttagctgccgtttagtgagcgcttatccagtgggtgaccctgttccggggctcactgtgccttcattctaacacctaatcccagggtcattattatgttttattattatctggcattcttagtaccaacaccacctgacagcgggaaccaccaccggcctgggtgtagtgtacccagcctgtcctctgacttcaaagcctctcctgcgagagacacagtttatggcttcttcgcacaatttattaaaagcgcctttcaacacccaaacgggttggattggcttttgtaataataatctggctacgaggggaaacccgggagggccccccggaggggaagtggactgtctcaggactcgcagcctgaaaccagccgggtaggtgggaagggacccagggaggggccgcgtggatctagggcgagggtgtcatccagggactttgctccaaggaccctgcctgggatagaaatccttcttccttcaaccaccggccatcagcctcgggaccaggaggccacgctgaagcacgattcttcccagatcccactgttgtgtttggatttctgcaaatgatgcccagacgtttttttttgttttgtttttttgttttttgttttagacagacttgctctgtcgcccagcctggagtgcaatggcacgatcttggcttactgcaatctccgcctcccgggttcaagcgattcccctgcctcagcctcctgagtagctgggattacaggcacctgccaccacgcc

SEQ ID NO: 1561288 - DNA, 4001 bp, Homo sapiens
gtgctatagagcacccacccaaatgacccccaattacaaggatggagaagggacctgaatgaacccccaccttctgcctcctaagctaaagtacctatcatccaagtaggacagggtgtgcctcccccaggagaaaggatactgccgggggctgggagacccccaaccccaaacccctaagagcggggctgttgttcgagatccccccaaaaagggtccggagcccctcccccatccccttccccgaagccaggcgacgggcaagcgggcccgtagctgccagctccgggcgcaggggcagccaggacccccgtgggtctccgcagcaccccccacggcgccccctccccaggacaggcggacgggcgcggggggtccgaggggcgcctcctcaccttcccctcagcatggcgcccaaaaaagacagagcgagagcgagggagagcgggcgagcgccgcgaggggggggaaacgcatgaggccgggagagaaagcaagcgagaaagagcgagcgagcaagcgatcgagagacacccaccgaccccgcccttcctcctcctcctcctcctcctcctcctccgcggcccggcccaacatggcggccgccccccttcctcctcctcctcttcctccccccggggacgcagccccggcccaaccgggggcctgacctgtcgtcagggagcgggaggcggtggtggaggaggtgcggggtggccgggcgggcgtcgggggaacacggaggaggcgaaggcgttgatggcggcggcggcgatggcggcggcggcgactctgatggcggcggcgggggggtcccgggcgcggcctccatagttcctttgggggggaggggatgttaatgcacgaaaaaggactgcttgggcgtggcgggaggggcacacttaagctcggagggctcctgatgggaatggggtatatattttttcggtttcggaatcacctctgcgctgacctccgcgtaggccgcacggcctaggcctcggagggccgctcgccgcctgctttctccgcagcccacccttgcggtcactcgctcactggcgcggggccctcataggggcgagagccccccccccacgcacccccggggggcgggacacccgggagacacggacactggtgggtggttgggtgtaattagcgcgggccgcgcgcgatggagcaagcgaagggtaaggggagaagaggagagcgagcgaggggggtggggggttaaaaagaaaaaaaggatttgagggagagagggaacgggccgcggagacgggccgactgtctcccttctctgcccgccctgggtgccccggctgcccggcccccgccgcaatcaggaattgacacaaaatggcggctcggcccgaaccagcctagaggctgaggcgggaggaagggtgagatgggagggggaactgagaggcggaggcggaggccgtgtcacgtgcaggagaggggtagagaccgcttgcccgaaggccggcggaaagagccgaaggcaaagggcgaggccgaggggaggcggaaatagccgaaaggagctgagcaggagcgaggaggcgacgggggagagccagaaagagctgaaggtggtgatatgggtggggctagagagagcatgagaaacctaggggagccataaatagcctaagccgatcgggaccggggaaggaggagaaactgagacggtccggaaagagccgaaagcggtgtccgggtgggtggcaggaggtggaaacagccgaaagaaaagcagccagggtaatgcgattaagagaatgagctgaacgggcggggctgaaggggagaataaacgactttcaggaattcgccggagagcaagagggaaaaaccgaaaattgctagtttgaaggaaggcgggaagagccaatagttttaggtgggagaatgggagggaaggaattcaggctacggagagggaaaaaaaaaataaccgaaagctggaggccaggtgccgagagtcggaggtttccggagaagcgatgaagcccagccagcccggaggtgacgtcactcgacaacccagtcgatgatgtcatcattggatgcgagaggggcggggcttggtagtccctcaggggagtttaaggacctggggtgtaggacccatggaaggctctcaaatagcagagctagaaacactggccggtgtcgtagactgtacaaacaaaatcttttgaccctcataaccgtcctaacataagctgctgctattcccatttgcagactgaagttcggtgttttaagtaatcggttcacggtcataggattagttctaaaaagcacagcaagattttttttttaagagacagagtcttgctctgtcgcccagactgcagtgctgtgacacgatcatacctcactgtaacctcgaatccagggatcttccttaaatacttgttagctctttctacagtgccagtccctgtgatggagcatgggaacagtttctgtcttcatggaacttaaccgataatgccccaagggagagaaacagagttaaagaataaagggggtgggtggagtgttagaggagggtcttgtaattgttcttttaggctggtacatgaaaaagaagagatggttccaggcagaagaaataccttatttcaggcggggcgatgttgctcacgcctgtaatcctagcactttgggatgccggggcgggcggatcgcttgagctcgggttggagaccagcctgacgaacatggtaaaaccccttctctactaaaaatacaaaaattagcaggacatgatggctcacacctgtagtcccagctgctcgggatgttgaagagggagaatcgcccgatcccgggaggtcgcgaggctgcagtgagccgagattatgccactgcactccagcctgggcaacagagtgagactcttgtctcaaaaaaaaaagaaaagaaataccttatttcaggccctgacaaagcaaagaccacttagattccaggaagagagaaaaaccgtgtcaacagtgataaatctggagacagaggcaccatgtgacttcctggtatattgatcctacttttttttttttttttttgaggcagagtctcgctctgtcgcccaggctggagtgcagtggcgcggatctcggctcactgcaagctccgcctcccgggttcacgccattctcctgcctcagcctcccaagtagctgggactacaggcgcccgccaccacgcccagctgattttttgtatttttagtagagacggcgtttcaccgcgttagccaggatggtcttgatctcctgacctcgtgatccgcccgcctcggcctctcaaagtgctgggattacgggcgtcagccaccgcgcccagcggatcctactgttttttaaatgttccagctggcagcggggcgtggtggcacacacccataatcccaacactttgggaggccgaggctggcggatcacttgaggtcaggagtttgagatcagcctggccaacgtgacgaaaccccgtctctactaaaaagacaaaaaattagccaggcatggtgtggcgcgcctgtaatcccagctacttgggagactgaggcagaagaatcgcttgaacctagggggtggaggttgcagtgagccaagatggcaccactgcactccagcctggatgacagagcaagactccgtctcaaaaaaaaaaaaaaaaaaaaaaaaaaattagccaagcgtggtggccggcacctgtaatcaccagttactcgggaagctgaggggagaatcgcttgaatccgggaggcagaggttgcagtgagctaagatcatgcactccagcctgagtgacagaaagactttaattaaattaaatgttgcagccggcacagtggctcatgcctataattctagcacaggaggattgcttgagcccagaggttcaagaccagcctgggcaacatcgtgagaccccagtttcttcaaaaagtcaaaacatggccgggcgcagtggct

SEQ ID NO: 1561289 - DNA, 4001 bp, Homo sapiens
aaagagacctagtgggtaattccatctaaactgtaaactcctcaactaatcaccatcgaatgaaagttctacgtggtggctcacgcctgtaatctcaacactttgggaggctgaggtggaagaattccttgactccaggagttcaagatcagcctgtgcaacataaggagacctcatttctacaaaaaaatttaaaaattgcgcgtgggaccacgtgcctgtggtctcagctactcaagaggctgaggtggaaggatcgcttgagccagggaggtccaggctgcagggagcgagatcacttcactgcactccagcctgagggacagagtgagaccctgtctctaaaaaaaaaaaaaaaacttaagtaacaaaataaagctctgcagttagcttctcttcaggaggtttacttccagaccatccaaatgattagaaagaggcagctcataagagaaactaaattactgccaaatgctcatgtcaatacctactggaggccgggtgcggtggctcatccctgtagttctagctacttggcaggctgaagcaggagaatcctgcttgaacccgggaggcggaggtttcagtgagcacatcgtgccactgcactccagcctgggtaacagacccagactccatctcaaaaaatacaaaaaaaaacaaaacaaaacaaacctactggaaaggggtaggaattggaatctaccttcatcaccccatcattcactgggaaggaaggccaaagcaccaggtcagtggacaggacatttcaggggttaaagtctaactagctgaagattaactggaacaagcccgcatagtctgacaaaatcatatctattgactggcagaaagggagaaaattccacaggaagggttggaatagaatggacgagagagacgagaaaagctctttcgtaaacggttgagttccagctgaaagattctaaggaggatctaatgacagctgcaatctggaatggctgctgtttccgaggtgagattaggagaggcagggattaatgagatattgaatgcaatcatgagtgtaatcaagagggtatccccagtaataaaatgaaaacagcaaagcaagtctagaacatcactggtaagaaaactgtaatctctcaaagagggagtcattatgccattttacaactactgcaccacctggggagaaatcatgttttctattaattttgcaactggctttatctgtctcttccttcctagcctgattaatgacagagctgcttcattgttcagtccgagctgattttcattccacagaagaggaaagcaaatgcccccacgcccagaaaaaataaaaattacacttcatggaacaaaacggaaacacaaactcatctggatgttgacttgtctatatgcaacagcaatcatttcctcctctccccgctgccttcctaaagaacagcaggattgggaaaggagacgggaatcttgagaccgcgggcctttcctggagccggccttggctgagcaggacacacccccgctagcgcacttgctccctccgtctactgcgcgcaaaacccgatggaaataacagggagcctggaataaagctgaccctttcccgtatcagagcgaaaggccaggtacacgaagacggggctgggatctgtctccgagttccccgcagtttccatgggagggagctcgggtaaagctgtgcaatctgcagttcttcagactgcgtctttttgtttgggggccttcattcactccggggttcctgtatctaactcggagccattccgggccgctggacctgggcggctctgaagcgagaaggcagaggacgcaacagggcacccggcgcccagtcagcgccacaaactccacagctactgcctcctggctcacactgaggtctgcgccgcccccgcgccacccccgcgcccattgcctcggtgcaagcgaccaactcacctctcggagccgacaccagcagcgaagccggaaagaactgcgagcggaggcctgtgggaaatgtagtccgccgatgggagggactggttccagccccaacgggctgcgcggagtgcgcatgcgcgggggccggagccccgggtgcgctcggggcgggaaggccctccgcgctgcgtggggctgaggcgagctcgggcttgcgtttgcttttgtcgctgaggaagacttttatttgtttattttcttgagacagggtcttactctgtcgcccaggctggagtgcagtggcgtgattagagctcactgcagccgcgacctcccgggctcaagcgaccctcccacccgagcctccagagtagctgggactgcaggcgcgcgccaccacgcccaactcattttttaagtttttatagagaccagatctccctatgttacccaagccggtgtcgaactcctgggcttaaaagatcctcccgcctgagcctcccaaagtgctgggactacaggcgtgagccaccaggctcagccgcggaggatttagaaagaagttttggcaccagcagatgcctaatatgtgtactaaacacctaccagttactcactgcatacacccaagcaaggtgtgggcacacatcaggcatgcaatgaaaatactctcaaagcccaccagaacctggagcaggacgtaaacctagaaaggtcgctcgtgctcactgccctctccctttctcccactctgtctctgtctctgtgtgtgtgtgtgtgtgtgtgtgtgtgtgtgtgtgtgtgtgtgtctcgtatctcctgcagttgtgaatgtattgttctactaaaaatacaaaaaattagccgggcgtggtcgcgcgcgcctgtaatcccagctactcaggaggctgaggcaggaaaatcgcttgaacccgggaagcggaggttgcattgagctgagatccgccattgcaccccagcttgggcaacaagagcgaaactccgtttcaaaagaaaaagactaactggagaggtctgtctccaatgagactgaatttgtcctgtcctgcgttccttcaggaaagaaatgggataagcccaccagggaccaccctgaggcatcttctgtatcccaaattctttgatatattagttaatacatgaaagaatttgttctttccttaagaatataaaactttagaagatatttgaaaatgcctcggcaatctggtttcattttgcaaacaataggatatgcatgaaataggagataaatgaaaaatctgagctactttataactactaagaaggtggccagacgcggtggctgacgcctataatcccatcactttcggggggccgaggcgggtggatcacctgaggtcaggggtttgagaccagcctggccaacatggtgaaaccccgtctctactaaaaatacaaaaaaatttagctgggcatggtgacgcacacctgtagtcccagctactcgggaggctgaggcagaagaatcgcttgaaccagggagacggaggttgcagtgagccaagatcgtgcagctgcactccagcctgggcgacagagcaagacgccgtatcaaaacaaaaacgaaaacaaaacaaaacaaaaaaaactactaagaaggccgaaggcccaaagtatttttttaattcaaaatcacggtcctatgtacatgtttacaattaaatttatgtaaggaaatcaacactccattaaaaaaacaataaaaagaattattaaaatagctcctccatattctctgttttgactaagtttttttttttttgaaacaaagtcttgttctgtcaccctacctggagtgtggtggcacaatactgtctcactgcaacctcagcctcccaggttcaagggattctcctgcctcagcctcctgagtagctgaaatgacaggtgcccaccaccacgcccagctaattttttgtatttttagtggagacggggtttcaccacgttggccaggctggtctcaaactcctggcctcaagtgatccgcctgcctcagcctcccaaagtgc

SEQ ID NO: 1561290 - DNA, 4001 bp, Homo sapiens
ctgaggcacactctgttcaagtcacggaggtaagaactgtggcaaaaactgagcagtcaggaagatgaaagtcagatgagtgtgagatcccagtagccaagggaaaaaagggggcctattgaaggacagggatgagctatttgagggataggtagccacctgttttgtaactgaagttttactggaacacagcccatccattcatttacatattgtctttggctactttagctctataagagcagaaaggagtagatgcagcaggactttcaaagcctaacatattttctgctgtggcctcatccagcacaagtttgccagcctctgagctatttcaaataccaatgatagtcaaaaaagactaagaattgagcactgcatctggtaatgtgaagatcacagtaacccactcaagagcagtttgggtaggacaactggaagctggttcatctgtacatatattttttgaggcctcagtggaagtgaaatggttcatctattaatgagctagctatgatatttataggagaagccaaccgaaacaaacacaactatttactggcatgttttaaagccacaaaatcaagtggaaaagcctttcatattgcgcctcctctccctaaaatgttgtctttctttactgtgcctcccaaacatcttctctcccttcaaggcaaggctcaaaaatcacctccttggtaaataggcctacccttccgctacaggaggctggaagccaggagcgccttgtagtcctcgctcataatacttggcccaaggatgatcacattctagaatcttgcttgtttccttgacattgggtcaacaggctgtgagctccagagcagggactagggcttagctattggtttgctcagtggctggcacaaagtggtcaccaaacaaaccatgtatagcagaagagtctgccgtgttcctcaaggggcacaattcctccatcagagtccctctgagaaaagcggtacaagggagaggctgaatcatttcatcaatcaagaatgaaggctgattgggatgaagaagaagcaggcatcgaggccccgggcagtttaaacttttccccgtagcccatcacttcactagaacgtgaagaaatagaaacccgcgcccaaacaggtctcttaaactgaaaactttcaagaaaataagcaacattaagtcccgaaaagcaagactgcatttcagagacaagagatgaaatgccaactcacctgggacatggctttaggttcaattcctgtccccacagcctccagcttcttgtttctctcctggggaagagcagtgtccctggaaggcagagctgaaagagaaaggagtagctagagaccaggtctacaccacagtcccaaatcaccagcctagaaacgtcccttcctgcatgaaaaggtgggatcagatcattaccctgcctagggactgccacaacgtggagataggtttttttcctccctgggagcacgaaaacaggaaaagcgtctagttagagtcaccctgggaaagtcaacacccttttaccgcggcttgctgctctgaatcagttgagcttccaaatcttcagattctcccactccaccagcttcaaagaccaggggcacagttctccagcaactggtccccgagagcccaaccccctcccagatctcatcccgagatgaattcgtccctgtccgctcggccccaaacacctgtcactctcacctctgtgcccaggccccgtaggggccgctcctcgctggcctttggatgcgaggccattccttgagcgcggccttccccgggcagggagggccaaggtggctggagtccctacagtcgggcctcggcccgcccggggctttgtgcggggggcgcctctacccgggagcggcgtcggctcgcggacactcgcgctcgccgccccccgcatgtcacccgaggccgcgcgacgcccttccgaccggtccctcacagacccacacccctggccacacccgcccgccacgcccagcgaacagccccgcgcgcgctcccccatggcccggcatccactgggccgcgccgcggagccgccccgcccccggccgcgccccgcccctccccacccctccccgctgccccgccccgccccgccccgccccgccccgccccgccccgccccgccccgccccgccccgcccctcagcctagagaagcccggcgcttcccacttccagtgcgcaggcagcgccgccggaaccgggcgtggcctcggcgcaatgcccgctgggaagcgtagtcccaagcagggacggatgcggcggccctcggagctcaggttgcaagatacggtttggccccgggcctatgcaacgcccgtccgtcctgccctctgcgggtcgctctcacttgtccctggaccgcagccgccgcataagtggtggccaacgctgggcctgggtgtggccggaagcagaggccgctctgactacacacccaccccccaaaggcttctgggagtcgcgcaggcgcagcggcagaccgggtgaggcggggcttgcggcgaggggtgggaccgcagggccggagtaaaagggtgcttggctgtgacaggtgctaagggcctgggcgtcagctccttgcgggagcgtcactgccgaccgggaagggaaaggcaatcttgggggcctccggagtccggaggatcactctgatgggtgatgtgtgtgggctaggaagggggatgtagagagcttgtgggattgttttgggtgccccctcaccttctcccattatctctggctacacgggcctcccatcctccaaaataccattttccattttgtaacctatgtatttgcacgtcctgggtcgaaatagtctaaccccaaattttcgtctgggctggctcctttatgccattcacttgtcatcgcctcagagagggctgcctaacgtctcaaaaataccagccctggcgacctcttaaagttcccttcctgtgtgaatcacggtctgaagttagctgatggatttattcttgaacatgtttaggaccggtctctcccccaggggccttatcagaactggagagcttcatcctgggagccaagggccttgctggctcacaggcagtgatgctgttacaccagtcatcacagatgcactgacctctgcacgcccagtcacactgcacgcctggtctccttactcttgaattgatttctttcaggtctcctggcctcagtgatggaattaagatgacttctatctctgaatccaagggtgactgaaagccgcaagctgcagaaaggacaaggtcagcatttctctcaaagcacttcagtctcatagaaaaggcttagtttcagtcaggtggacctagccatgtaatagctgtggcagacactgctaatggtctctctggtgtctattttgcactccttccacagcagaacattgatgctcttcaagtggccatctgcccagcttataatactcacctccccagtctccttgtaaggagtagtggctctgtaaccaatgaattttaagtacacatttgctgggggtttggtggatgtgtggaaagagacacagctggcatgtaactctggccttttgtcatctcacacaaccttcttcctgcttgggtatgacacaggatgtcaacaggtagaacagctgtagagagctggcaaagggatcgtggccaactcaacattccactggaggctatatgatcaaacagcaaactgtttatcatgaatgcagaatgtgggcaaagtcgcttctgctccagccaccagaaggtttgctgaaggcaatcactccctggtgtcatgctccttgaggttatctaatgggacatctagagcctattggttgacgaatgcagtcttgcaagcctgctgtaaatcaagctactgaccgacaaccaccccccttctccctattcactctaataaatacgaagggctgtaaaggctcagggcctgtgttcactggaagcaaggagcccc

SEQ ID NO: 1561291 - DNA, 4001 bp, Homo sapiens
aaatacctagcaatttaatatttaaatattacattgttgcaaaataacttaaaaacctttattgtagtatacaagattcatatgtaacaatttcttgatgattcttatttacaacaatacttctcaatattacattatacttttttcttatgactaaatataaacaaaattcttattattgcataacattccatcacatggagtgtgatttaaccatttccatactgctagatattaattttataaaagaacatcccgaaagtcattaccagttatttcatttctagacagtgagaatcaatgttgttggagcttatacaactctgataataccatgaaatgatagacttcctcgctccactgaaaaaattaaccatttacaaatacatacaacaattctgtatataatcttaaaatatctttgttgccctgaaagctcataaacagagtccaaggacttatgttaccaatccctgttctggtccactgcagggtctggctcattttcctgcttgcaagcatccatcataattaccttcacatttgcattggtcttggaaatacacaaagctgataggaaatgactgagcatcatcattttaataccagtagctagtatgaattaaggactcactatgtgccaggcactctcctaagagcttcacaaatattaattcatgtaatcttcaaaacaacaccgtaaagtatacactattacaattctgaggaaattgaagcacagattgcttaaactcgttcagatttaagtggcagtcaggattcaattccacttaatctaggctcgaaattcttaaccactacactacacctccctcagtcgatccaagatatacccaaaataaactcatgctgccagacctcaaaccacatctggctggtaccaaaaacttccactcatgaatttcctggaaaaaaagaaatctccactcctaccccagaaccattaaacatatctaaaccctaaaaaacaaataaaaacaaagtatgaacattaatctccagcacgggtatttccatatcatcaagatccttagaaaaacagcgctcacagagtaattgaatttgcagcctacagttaactaaccatgtgtctaactatagaacagcatgaagtgggcactaacaacgggaaatctattaattaggtcccctgccgttaactaggtagggaaatcctaaggcccaaatcaatgaataaatagatcattcctaagcaggattttaaacggaaggaactcgaatgcatttcacagaaacaaagcagcagcacgaactcacagggaaccggcttttagaagagcagcagcgattcgtttctccttctcaagcgccttctctggaaactggcagggctggggaagcaggcagagttcaggacaccccaggcttttcttgactcgattggaacccaccctccacgcttccctggccccaactaaccgccacctgcatgcacaaatggaaacgacagggcagagggtcagcagtcacccgcgtctgggttcgcagctccgggtacgctgtagttccgcacccggttgcccacgcccgggaccacccactgtgtcttttcggaactgtccagcgtgtcctcctagaccccagacacccaccccaaatctaggtcccagcgttttgcaggggaccttcatcctggggcgttcacctctgacttccctcttgggccttttcgctacggccgagcctaagtggctgaagcgcggacgaggatgcgcggggcctcggtctccaactgcaccacaggccgcacccacgaacctggtccggcacagttactaccgcccgggcctccaggcctcagggctgcagaagctcagtcccgggaaaaaaagcacaccggcctgaggctccacaggaaccttttctccaccttggcccggcctgcaaaacctggcccactccgcgctcttttccctcagaaaagcagcggccacagtggcgcccggctcccagccccagcctcacccgactcagaggatagcccagccctgggagtcagcggcgccagaatacgggagagcgcctgtctccgtcgcgaatgcgctagcgcgcgggggggcggaggcaagtcccgcagctgctccgggccgggaggggcgcgtggggccgggtctcggcggggatagtcgggccggggagacggagccagaggggccgcagtgtccctcgcctcaggcctctacctgtaatggccgccccgtgactgaccagtgccattaaagataatccaggcctgctcccctgtggacactgcggtccaaaatttaaaaaaacaatattccgcctttttatttttcatttggttctcggctcggagacaggcggaggctgcgagccccgccccgcccccagcgacgcctcaccggaacctttggaaatcggcttctgcctcgagtgcgcaagcgcgcggggggcgaacgctggggcccttcagggagcaagggagaagtgtggggccgcacctgccgaggggtcgggaggtttggaggagggtggaggttggctacaggatcccgatggggatggagtgttcaaatctaggcctgtagccgtgaccctggcgtgagttggatggaggaaaccccagtatcgcgagcctggaccaaggcgcggcgcgtgctgcctgtggtgtttgctgagtgacggccgccgcgcccccgcgtacctggaccgagtgcctggccgctggcggagtagtgtttccgtgcacggggctgctgcgtgcgcgtgtgccgttctctagcgggggattaggatggtgccgcagagaaggctgcgcggtggtgcctgactctgacgctggctgtagcgggtctctggggtctttgcggtttgtgtctgcgtttgtgacgtacctgacatcggatctgtgactgtggctctgcctcatccagcgttatttccagaatccttctgatagggcagcgcttctggttctggttttccatggagacggtttgtgggtccctatgaaactgagtgttgggattttgattatctgcatctggcccttgtgtgccctcaggactgtggtgttaggcaagtaaaataattgcaggaaaaaaaattggaaaggaataaggttgctattacttccaaatgatggaattgtaggactgtgtcagaaaattgaataggacaccatgaaacgggagggagaggcattttattttcttccatacctggtcttggaatattctaacaaatgagatttgttttttcccctttgttcctggatgaactcttggataaattcaatgtctccaagcattcttggatagtaagtttctttgatctttagttgaaagatcagcctcattttcgtagctaaaaatacctttagtaataaaaatgttcattgtaatacttcatttaaaatatttaaaactttcttctttctccttgatctcttccagatatctcaagttttggttaagtgaatatgtggagtatatgtactaattacgtcaattattttctctttaaaaccaagtacatttcttacatgagtttgtttatcaaggatttattggttttctttgtacttgttgctattttttagaaatgttccaacagatatgttaaatgttcatcgattattttttcagtggttcaaacatcggagtagaatctctcttccattctgtggctgcaattggactgtacagttgtcctaaaatttaccgtcattgttttcctaagtttgattcttgtttcctagaattcagctaatttttgctaaagttcttttccaataagttccttaagatgcatgtattaaagatgttttttagttctttcatgtttgaaattttttttttttttgagacggagtctcactctgttgtccaggctggagtgcagtggtgcaatcttagctcactacaacctctgcctccccagttcaagcgattcttctgcctcagcctcccgagtagctgggattaaagacgtgcacc

SEQ ID NO: 1561292 - DNA, 4001 bp, Homo sapiens
ggggagtgggttaatgcattctggaaaaggggattacttgattactgtcccccaagtccccacagccctggggtccatgcagagaccacagtgcaagagacgtggctccccgctgagatccagctgatctgaccgggcagtcactttgtcactcagaaacagagatgcgattgaagatggggagtcgccggggggctgccacgggctggggtggtgcaaaaactcccgcctcgaagacgggagagtcagagccccccaggctgctgccgctgctggcatattcatcagggtcggatcccagggactgtacagagggggtccgaaccaggccacccaagggcccccagacgctgataggagtggcccttcggcaggaggggcaacagactggggtggggtctcttcgagccaggggggtgccaggggcagcagagaaggcagagggtgacagtggaaggtccccaggtggtggtggggagctggagggcgagaaggagctggaggacagggaagggccggccaggcctggtggtggtggtgaggtccggcggccagagggcaggccggagaagctgatgctctggcgaagcacaggagggtggcccggggccgccaggtcttcgctagggttgtggatgaagtggcagcgagagccgtaggggcagcggccctggaggtagaacttgtgacagagttccgtcttgtatttggggtggcgattggcctggcgcagctcgcccaggccatgggcaaactggcacttggccccgtagcggcagcgcccactctctgagaaggtccgacatagctcagtcttgtagcgcgagggggtggtggaggttgcagtgggcgaagtgggtgagggtgacagctcagggcccaggcggggagccagcggtgcgaagccagggggtgggggcacccagccacagctgcggccctccactaggctggtggagcggccaggcaggcgggaggtgaccccagacgggctggagtcggaggggctcaggctccagggtcccgaggagccccagcctgggctggactcagtccctccatggtcggatggcacgggcacgtcagggctcagcgacaggaggctctgcggaaatgggtcggttaaggcacctgaaaatgcagggcgacgccccaccccagctgcagggaactagagcttgccaggccggtttgtgggctccccgcctgagccccacccgcccgcagaaacccctgggttccggatgccaggaacccagagttggaggttctgagtttacccaccaccgaggccttatcccgagggacccaggaatcccggcttccccggctggaccaagagggggaccccgaagtcagggcgcaccactgtttcccaattttgggtctcttgtcctccccggatatgacccacgcgtcgggatctccagtttcacaactggagaaaccgggcaaagttgacctggaagtccggattgcttcggttttagggttctctgtctctacggtcagggactggagagacagaagtcggatccccccaccctgagacttcagccccagagacgcctccgcgcaaaaccacgccctcagcaacgactaggggtgagccaggtatgggggccacttccgcctccaggcagcctcggtctgagaaaagttctccgactttccacttgcatgggccgccccacccatgtttgagcgaagagccgggtgtcgcgggttccattttcacctccaaatcaccaagctggtctgagcgggaggcaggggccccaggctggagggcgcggcgctagggagccccagttggagaagggaggcaagcgtcccgggctggagtttgcggcgctagagaggtggggactcggactcaggcatgcaggtaccggggatgccgtgcggcggggactcacctcgtagatggcagtcagatccatggtgtaacggttggccatgaggggtgtcggccgagagtgggagcgctgaagtcaggctgaggctggcaccgagagccggctacttataggaaactgcaagcacggggcggggccggggccggggccgggggcggggcaggaggggcgcttcccggacgcgcgcccccggcgcagcctggctggccctggactggttcccttccgcccggccctgggccaggacgcgcctgagcttggccggtggacagccgtgaccgagcggggaatgcgtggggaaggggtgggggtgcggatggggggacgcctgcccagttttcaaagctggagactgaggcttgtagaaggaaactggggcggaggtgggggcagggccccaggggcaattgacaagagcagaagcccgatgggggtgcgcgtgcgacacagacggatgggggcggggagagacgcagaggggtacagacaggcagacaggcagagagaaaaacatcgagagagacacacacaccaagagacatacagagagagatagacagggtgaggaagggagggaagacggggagacagagacagtcccagagacagattcagagggagaagagggttgggaggatcacaaaaagaaacagaaaggggctgagcgcagtggctcacacctgtgatcccagcactttttgtgtttttctttcctttttcttcttctttttttttttttttgaaagacggggtttccctatgttgcccaggctaatctccagctccggggctcaagcgatcctcccacctccgcctcccaaagagctggaattacaggtgtgagccaccaagcccggccaatcccagtactttcagaggatgaggcaggtggattacctgagatcaggagttcaagatcagcctgggcaacagtgagatcccatgtctacaaaaaatactatttaaaaaaattaaaaagaaaaagaaactggacaaaaaggagaaagactgtgagaaataagcacttacggaaagaaatctgcagagcaaagtgccaagaaagagccagcaggccttggaggggaattctctgagaactgcctgccttgtgtggtctcactcctaaacagcccagacagataaggagacctggactgctctccctctccccacttgctggggttgggtgggtgagtgagtgggttgggtggggtccaggatacctggcaaggctgaaaaggggcctcctttcccaattcacagggcggctctagccccctcaccctcgggcggatgatctcttctaggctgagttaaggagaactcacctgggctgagttctaagtactttacgcacattaatcctaatgccaggtggtatgcccatttaaggcaggaggaaaccaaagtgaagttactctcctgcccggctcacacctgtagtcctagcactttgggcgcccaaggcaggcggatcactagagctcggagtctgagactagcctgggcaacacggcgaatccccatttctacaaaaatgcaaaaattagctgagtgtggtggcgcacaccctgtggtcccgctactcgggggcggggagggagcaggctggggtgggagagtcgcttgaacccaggaggcagaggttgcaatgagccgagatcaggcgactgcactccagcctgggccacagagcgagactccctctcagggggaaaaataaagttactctcctagttcgagctagcaaatggcacaggcctcatactagggtctgaaattatgtcgaggtttgccctctgagaaaactcaagattggcaaggtggaggtctttcactataactgatggttgcattgattgaaaaaagctttcaaaaaaaaaaaaaaaggtcatcctcagttgatggctggatgggtctcttatagtggggtgtgccttcagactacattttccttttttttttttgagacggagtcgcgctctttcacccaggctggagtgcaatggcgcgatgtcggctcactgcaagctccacctcccgggttcacgcattctcctgcctcagcctcccgagcagctg

SEQ ID NO: 1561293 - DNA, 4001 bp, Homo sapiens
gggtggctgaggcaggagaatcgcttgaacctgggaggcggaggttgcggtgagctgggatcacaccattgcactccagcctgggaaataagagcgaaactccgtctcaaaaaaaaaaaaaaaaaaaagaattcctgttctaggctgggggcggtggctcatgcctgtcattccagcactttgggaggccgaggcaggcagatcacttgaggccaggagtttgagaccagcctggccaacatggtaaaacccggtctgtactaaaaatacaaaaattagctgggtgtggtggtgcaggcctgtaatcccagctacttgggaggctgaggtataagaatcgcttgaaccacggaaagggaggttgcagtgagctgagattgtgccactgcactccaacctgggtgacagagcaagaccctgtctcaaaaaaaaaaaaaaaaaaaaaaaaaaagaattcctgttttagactatttaagcatctgatctggctcatttattttttactaggaaatactcaccacaattggcttagtattttcattttccccccatctatagaaggctgatgtagaattgctccaaatcactacttaagaatacataactaaggtttattaagtactaacgaggtctcaggaactgttctaagaactttacacatagtaattaaaagaaggcccacagaagtaatgaaaaacatctaccaaatgggtatgtgcatacaggctctcgggaggggacctaggtatcagctcaatggacaggacatttatggagaatgaaacaaatattctcatgtcctaagaaataagaatgcatttcacagaagaaagcagaaacacccactcgcctcgaccttgacttaaacaggcaacagcaattcattcctcctcccgctcggaccccttttcttaaagaattgggcaggactggctaataagggaaccaggcttttcttgcagcccagcctcgcatagggcacaatgcccccaccgcccacccacacataaccagagtaacataagagagatggtgttgttaactcttcccagtatcaaagaaaggccagggtcatggatgcccggggctagaactggagttcacaatagcttcctggaagcaatgctgtggttctgaaacctgcagctggactcttcagagttgtgagtgcacgtgcgtgggtccgggtccgcgaggaggtggtgtgggagtcccttccaggagcaagcctgggcgggagcgggggctcgttcagttctaatattcctatcccaaggtcgggtctgagccttgtttcgctgttgcccaggctggagagtagtggtgctatcatagctcgctgcagcctcaatctcctcctaggctcaagccatcctcccgcctcagcctctcgagtggctgggaccacaggagcacgccatcacacccggctcattttttaaatttctggtacagatgggagtttcgctttgctgcccaggctggtctcgaactcctggcttccagcgatcctcccgcctcgctctcccagagctctgggattacagatgtgagccacctggtccggcctagtctgcgcgtttctgctgggagtctttggcgtgcagaaactgaccgagggccatttctctgcagctgggcccggtgtgggcagaggatgctggggtcagtcacgcactccacggccacaacaaccttcgctcatacaatagtctctgcacccaagtcagccgcacagactccgtcacgtcccagccccggccccgtcacgcccacgacacacacacccgggcctgaggcgcgggctcccgcccctctgcgatactgcagtggccccgcttacctctctttaccccctgggccgcagcgcttttcctacagattaccaggaccgacgctccgggccaggactgctcactcggggcgcgaacccgaggcacagcgatgcccgaacggaggaagccgctgccgggtcacgccacaatccccggggcctaacgggctgcgcgcggaggctgctgggagggccgggcgcgctcacggagtgcgcaggcgcggccagtctcaagggtccgctcgctggtgcagcccctgctctgcgtgaacccggagccggagctaggtccgtcccagcgaggctgcgcttcgagtcccttagcgcctggggacggcgcggcagggcctggaggggagcggggacagatggctggcgcgttaaagaggggcgcccgcgaccgcctctctatagtgccaactagggagccctgtgagcgaggacggcgctgcgagtctgtccctggcgcgctcctgggtgggattctttcactgggtgtggctgttgggatttgagaccgtgtgactccggagattcggggaagccagttcctatattttccatttctgtatttttaaatggtaaaaacaatgaaaaggagaacaatattttgtgaaatatgaaaatcatacatgtcaaatttcagtgtccataaataaaagttttattggaacatagccgtgtttgattgtgtactgtctattgctatatttgagctacaaggacagactcgagtagttacacagaccagatggcccacgcagcctaaaatacagtcagttctcactattcacagtagttatggtctataaacttgctacaaacacggaattagtgaataccattccactgcttctaggggaaatacagggttagtttcctgtaagcatctggtcacattttagtcaaccgatgaatgcataagcttattttattgtgtttattttctttttttcttttttttttttttttttgagatagggtcttgctctgtcacccaggctggagtgcagtggtgggatcttggctcactgcaacctcctccgcctcccgggttccagcaattctcctgcctcagcccccagagtagctgggaatacagatgcatgtcaccatgcccagctgatttttgtattttgtagaaacggagtttcaccatgttgaccaggctggtctcaaactcctgacctcaggtgatccacccgccttggcctcccaaaagtgctgggattataggcatgagccaccgcgcctggccttattgtgtttctatttaaacactttaatatatattattgattcattaacattgaactcatggccaacagctccataactcatgcctgaatgaagcttatctaacacatgtattttttctgtaagacacatgaccgctttctcattcataggaacatcaacagcactttagtactactacatttggggtccctttgaaacagcaaaatcaccagcaaaaaacaaaaatatgagaagccaaggtactaaatggactgcaaaaagggtacctgtttacagtatgagagctgaaataagaagatagagggtcactttgtttgactttggctgagaacatgcctgttaagggactcaaaaaggttcaccgctcttcggatgtccacaaatgaccacaaaggtgctgcaaatattgactctgggtttataaaaaagttttagcaagtagatgaattcacaaattcagaatctgtgaatgaagattgactgtatttactatcaggccctttaaagaaaaagtttgccaatccctgtttttatatgtccctcttagttatacagctagtgtttaaaaactacttgaaataattattttccctgtgccaccaattatgtctataattgattgtaccccattaaataagcacaaagaaaaaagaaagctttctttatagaagaaggccagctaataactatcaagggtttgattttacgtggcttagacacgctgcttcaaatgcatttaagatgtttggttttaacaaggattttgcaacagtatagtgttttccttaagttcaatgtcatttctatgtcatggcagctgtcacctgcagttaggtaagacagtgacatcattaacatggatgcattttcatggcatgaaggctagccattgatggggtaatataac

SEQ ID NO: 1561294 - DNA, 4001 bp, Homo sapiens
acagcaatatcacagcactggtggaagggtcggcactgccgctccaccgcgggaagctgaaacaccagcctggatctctcttccatgtgctgaaatgcagtaggaacaccgcggggggcaaagacccccctgagctcagcagaggcccctctatgaggtgcccaaggggtggtttgtatctgtgggggctcagcagggactgtgagaaacaaggttatagcaagctaccagctggaaactaacacaagggtgacacgcggaaatgatcaactgttggggggggaatctggtcccctcagagatgccagccctggctcccggactgggactccagtcttgggggcagatggacgggctgaagatagcagagatgctccgaggagcaggcctgggagaacagtgtagagtgtgtgtttgtacacttggggcacaaacttaccccgtgtgtgtccctaccctctgagcccttctgcccctggccagttcccagtgtgtccccatcccctgccatctctcctccaggatcctttctctccctcccctcccaaacgaccacatatttaagacctagaaaaggatcttaaatatcacaacactcagggccctttctccctcctcactgtcccagcagggtcccagttccctggaaacccaggtgcccaccctcttatttgacctcaggacctcctcccacataatactggcttcccgccaagtctctgtcccccttccccagtcaggcctcagttccccaccaacctcggtttccgcccctccctggggtaacctcccaggtctctgtcttctctcctccaccccacatcaggggtcaggttcccacccctactccacaccccaccccaggtctctgcccctgcctgctaggtaccctcccaggtctctgccttctctcctacccccaccatcaggggtcagtgccctccacactcgaatgttgctgccccctgcccagtcgggaaacttcccaggtctctgccttctcctcctccagcaatcggggattaacgcccctctgcccttcccctcctcctgcccagccagacaccctcccaggtctgaattctctccccctaccagcaatcggggtcagctccgctctagctctccccctgtccagccagacaccctcccaggtttctgtcttctctcttacccccatcaggggccaattcctcacccctcgactgtggcttcctcctgcccagccaggaaccctcgctgatctctgttttctcctcccctacaagtaatcgggggtcagctaccctctgtccatccccctgcccggccaggcaccctcccaggtctgtgtcttctcctccccccgcaatcgggggtcaatgcccctctgcccttcccctcctcctgcccagccagacaccctcctaggtctgtgtcttctcttcccctaccagcaatcaggggtcagctcccctctgcccatccccacccactccccggccaggcacctcccaggtctcctccctgcattgggtcagttccgtcccctcccctcctcggtcagaccacccaccccccgcccgggtctgtcccctctcgctgccctcctcgtggcgcccccatcaggggctgacccccccgaccccgcacaggcccaggcccaaacccaggccccctcccacttcaggagccccctcccgctcccgccgacagacaccgttggctgcagagacgtctcagccggagccccggagcccgcatcccgcccggtgcctaacctgaggccgccccgcctgcttctcccggcgccgcggcttccctcaggccggggttccaggttggggctgggactggggccgggccgggcgcacgcggcgggagaaggggtaggcggggtcccggccaggctgcaggggccgggactggcgggggctggcgcggcggggcagttacctgtactgcgggccgccgccctgcgcgaagtcgaaatactgactcgtcgccatcttggcgtcttccccgagcctggcggacccgcgacgtcacccgccccgcccccgagccgcgtgccgctcgcgcctggccacgcgccccaagctccgccccctgcgcgaagccctcaccttctcgcttccttctcttaggctagggagacaccgccccgcgaccacacctgccccgaggccccgcctcctacgcagagccccgccctcctcttaaccactcaaatgtggaggtctctgctcaagccccgcccatgctagaagccctgcctctttctcggagccccacattccctttaaccactcagatgtggtggtatctgatcaagtcccgcccatgctacaagccccgcctcttactcagagccctgccttccctttacccactcagatgtgatctctgctcaacccccacccatgccacaagccccgcctttttttggaaccgtaccttccctttaaccattcaggtgtggaggtctctgctcaagccccacccatgccacaagccccgcctctttctcggagccccgccttccctttacctgctcagatatggtctctgcacaagccctacctctgtctccgagccccaccttctctttaaccactcagatgtggaggtctctgctcaagccccaccaccaccacagccagctaatttttaaattttttgtagagacagtgtcttgctatgttgcccaggctgatgttgaactcctggcctcaaataatcttgccttggcctccaaaagtgctgggattacagacgtgagccactgcatctagcctcagaatgactcttcagaaggcccccatggtctctgcctcctgtgttcacaacgtgatataaataaatgataggccgggcacagtggctcacgtctgtaatcccaacattttgagaggcggaggcaggaggatcttgagccctaggactttgagactagcctgggcaacatagcaagaccctgtttctacaatttttttttaattagctggtcatggtggtacatgcctgtggtcccagctactcaggaggctaaggtgggaggatcacttgagcctgggctgtcaaggctgcagtgatctgtgactgtaccactgcactccagagtgagaccctgtctcaaaaaagagaaaagaaagaaagggctgggcgtggtggctcacgcctgtaatcccagcactttgggaaggcgaggtgggcagctcacccaaggtcaggagttcaagagcagcctagccaacatggcaaaaccctgtctctactaaaaatacaaaaaaaaaaattagccaggcgtggtggggcacacctgtaatcccagctactcgggaggctgaggcaggagaattacctaacccaggaggtggaggatgcagcgagccgagatcacaccactgtactccagcctgggcaacagagcaatacaccgtctcaaaaaaataaaaaaataaaaaataaaaaaataaataaataaataataaaagaggagagggagaggagcagggagggagggaagggaaggaaagaagagagagagagagagagagagaaagaattgaatgaataaacaaataaatggaggcaaacagacaaatctcttatgcagaagaattcctaatttgtgtagctacactgcgcttaaggagatagagagtaactctacacctcttgagtgtgggttgtgcatagtgacttccttcccaagactgcagcctggaaggagggggagggagagtcacttgacagtattgaaacctgacaagcagcagcgtgtttggcggtcccgcggatccgtctcttgcttccacagtgtttggatggaacagatccgggaactcacttccagcctccgaccacccgctgatttcctctcttcttgcaacctccaggagcatcggctcagccatctcctgcttctcggaccaaccaacgccgtttttttggttagctccttcttgccgaccaaccatgagctcccagattcgtcagaattattccaccgcggtgga

SEQ ID NO: 1561295 - DNA, 4001 bp, Homo sapiens
aggctggagtgaggtggcgctatctctgcttactgaagacttcacctcctgagttcaagcgattctcctgcctcagcctcctgagcagctgggattacaggcacccactacaacgcccagctaattttttgtatttttagtagacatggggtttcactatgttggccaggctgatctcaaactcctgacttcaggtgatctgctcgccttggcctcccaaagtgatgggattataggcgtgagccactgtgcccggcctccccaggcttttgaatgagcccatacacataaaatactgcctgttaacctcttattgttgtcactaccaacaaatagtagctgttagcattattgggaaaaatcaccgcagccgcagctgcagcctaagcaaggccaggcctgattcctaaagagaccaggtctcacattgggagtggggagccactgagtcaggagcggcaggactgtatctggcaccagctcaagttgtcaaccagagactgggccacgtgtaacgtagagcacaggtgagggtccacaccgacgccagagagcacccctacctcccacactggtgtttgcgttgtaactgggagaaagggcggcctggccccagccggcccctacctgtacgtggggatgatctgcaggctggagtccggctttatctgaaacttcagagtcaccccctcgaacccagggtccactctctcggtgccccggcaggggttcagctgtttccggggccttctctggggtggggccgagggagtccccgggggctgcagacggcggcccttttggctgatcctggtctgtgtgtccttggaatccctgtccagcagcaggcggccctgagtccccagagccatcgggtcccagcaaggccccaggaccggggtgtcctgggcaggggactgacccagcctctccactgtctcttggaggaagcacagggcggtgaccgactcctggcatgcaggccagagggacctggggagaagggcagtggggtcacgttttcttgggtgactcctgggtttagccggccagggggttccaacttgggccggctctttgtgtacccttggacaggctacacaccccacctgaggttcagtcatttctaactctgggtggaaggtttaagagttgcagtaattgcaactcacctcgcccactgtgggcctcccaggcacgcccagccctccacatcaatcaaccccttacggcacccgtagatcacccaggcagggaccgccctaggtgaccgaggcaggatatcaagcctctggctgcaggatcgagaaaaaggttactttttttctttgtgtttcttttagagaccgagcctcactctgtacccccgcctggagtgcaggggcgtgatcaggactcagtgcagcctagaactcctgggctcgaccgatccttccgcctcagcctcccgagtagctgggacttacaggcacgcgccaccacgccgctggcttgccataatatgattacgatttttatcattttcattattattgagttgccctccataacccctggatgatccctggggagtgcctacatcagccccagagacatggaattgcatggcctctgatccctagatgaccccaagtgtctctgggcaccagaacctctttgtaagtttcagtaactattataaaattgccacttctcgataaccccagcaaagagaggtcatgaccccttgatcactgagccaggtggtgaagtgctagcggggtccggggaatggggtttggccttacgcacctctcactgattctgcagcatcctggggtcctcggcttctcctgggagggggatcctcccagccgctccaggttcagacagggcggcgccagaagctttgctggcattgaggagtccgggattggctcggcctccattgcgccccagcccagccccctccctaatttcacccggccctgtcccgctgggcccacccgatgaaacccacctgggaggggcgggacctgtgtggtgggagcgctcttggtagaggatgcgatgagccccagctgagagcgaccagcctcggcggcacctttcctctttctggcttttttcaggtcatccgcgcacccctgcgtggcaagggcggcctggaccccaccaaatccctccgcagctgccggggcggggccttccacgctagccctccccctcggaaatgggggctcccaggcctctgccttggatccccagcggcatcttagatcccagagggaaaagagaaccgggggcccagcacagcagatgcaggtgtggtttgtttttgtttttgttttttttttttttgagacagggcctcactctgtcacccaggctggagtggaatggcctgatcaccgctccactgcagcctaaatcccctgggctcaagtgatcctcccacctcagtctcccgagtagctgggactacaggcacttaccaccactccacgctaatttttactgtttttatagagacgaggtctcgccatgttgcccaggatggtcttaagctcctggcctcaagtgatcctcccatcttggcttcccaaagtgctaggattacaggtgtgagccacctgtagaccccagatctgtcccccaaggacactcaacatgctggggcctgtgttatcgatttattgcagctccaatatgagtccactcctactcaaaccctgattctcaggggcctggggaaggccaccccactaggggccctgtccccaccagagcctggacatgggactctctcccaagcaggggtgttgtccttcacaggggcttccacgtctctcccgggcctgtccgcactctgggcagggctggcacctggctattccctcaatctgggccctggggccatggcaatgtggaatggtccaggtgttcatgtcagtggggcttggggacatggccatccacgtagaagttcctggtgatcttgggcagggtgaattccgctccttccagctccggtgtcagcacaatctggcagcccagccgcgagttctcctggaggaggggggccatgtctagcatgtcgtcttccctagggtggtgacacgggcagtgttagccgagggcaagctagctgggtgggtggggggccagaggtgggggagggaggaagctgactgagcgcagggggtagtggtgggggaggcagctcccattccaggaactggaagtggggaggatggtgggggctgctgaatgctccagggtgaagctgccagctagacagggctgacccactcacctctcctcgggaggaggcaggagatccaggtggtcttcactcacatacacatggcaggtggagcaggccagggaggcttcacaggcccctaggggtgggaagtgaagggggcgcaggtgagtggcagagtcaggaaggggctgctatgcgaatggcgtagaggagtagacctctcttccaccacgtgcctcacgtctccctcctgggcctgcagctccactgtgtgtaccaggcactgtgtcatgtcctcaatgtcctcagctagctgttccccagtgtgtagggtttacaaacggacatctgggaggccccatttcccagggactccctagcaggctgagatgcagaaccattaaggagcagggacttggctgccaggtagctgagaggggaaaggccaggcaggctccccgcagtctgtgagcccttgctgtgaccctatcactgtgctgggctaatgtgtccccacctctccactgctcttggaggatggaccggctgactcagcagtcagtgtggtgggggaaggaatcaggcattaggattttgttttttttttttttgagatggagtcttgttctgttgcccaggctggagtgcagtggcacgatctcggctcactgcaagctctgcctcccgggttcacgccattctcctgcctcagcctcccaagtagctgggactacaggtgcctgccaccacgcct

SEQ ID NO: 1561296 - DNA, 4001 bp, Homo sapiens
cattatcttcaagaccaggattacccactcctaattgtgacccatagctactctgggccaaacactggccaccaccttttggatttctccatcttaaaccacttccagaattctagatgtacatggacagctactcacctgatgtctccatatatcattctttggaatatctcagactatgataatagctaaagacaaaactcctgttatccttaatgaaaattaattggctgggcatggtggctcacgcctgtaatcccagcactttgggaggccaagacaggtggatcacctgaggtcaggagtttgagaccagcctggccaacatggtgaaaccctgtctctactaaagatacaaaaaaaaaaaaaaaaaaaaattcgctgggcatggtagcacggtagcatgtgcctgtagtcccaactactcaggaggctgaggcaggaggattgcttgaacccgggaggtggaggttgcaaagagccaagatcgagccactgcactccagcctgagtgacagagtgagactgtctaaaaatagacaaataaataaataaaataaaaataaaatcaatcctataacatgctatttgatggagattccatccttccagatgctaaattcaaaatgcctggagtaatgcttgaccagtatctcttaccctcaaaatctgaaaatgcaagcaggcctaattaaaattctgacccagaatccagccacttcttctaccttcacagccaccacactggtgaagccactatcaaaactcaccttggccactgcagtagcctcctccctggtctttctatcgcctccatcacacccacagagtattctctatgctgcattaacagtgaacctgatgagaccagtgtcagataacctccgttctcttctctaaacctcccattgttctcatcacctccagaaaaaacacccaatttctcagagccattccaggcctgagtcctgccctgctgctctgagttcccatgagaaagaaaggagagttgtgtttccctgaatcagctcagcttcactgccaaccttacacattattgtacgtaggcggggcaacctttcacacctcattccattgtctgccagcaataagaacgtctacaaataaccaccagtctagaatcaggatgtcaagcttccagtttgtgaagagtccttaggtcaaagaactggatggtggcaaaaagatccatgaaaaaaccccaggatggggccaggaccagtgagggcctgggacaccctccactcacctttgtgaggtccatatgtgtttctggagacacagtaacctgtggaaagccaaagatcatgaaaggcaggtgaccatacagggctctacggattcaggcttccctggattcctgtccaggccagagccaggtggactgaggatgcctgcattatttctgagcctcagcgttccagtcctcagtgccaactcttagcaactgtgggaccttgcacaagaactcaacctccctgtgcctctgtgttattccattctattctagtctaactccatgaggtttttggaaaacttcgaaagacctaactcagaccatatgccgcttctgtacacaaccctccacggctcctagcatcctaagaattgagggaaaactcctcaccttggcactccaggtatgaaccttcttcactgtgtctccaagagtttagaaacgctggtccctttgcctgtaaccctcttccgtgccccatcacccaagttctggaaatagggaccccacccacgagcccccactgtactggacatgaggatctcgaccgtagtgacccaagaaggcactaatttggggatggagggtgaggcccagtagaggcagcgctcacctgagtcggggccctcagcgcggccgcagccatcggagtctgtgggcagagcggggccgggacccgacagctacgggcggagggacctaggcaaagccgtcaaccccgccgccgccgacccttagaacccccactgttcagcgggaggacccctcccctcgcgccttccgactgtcgccaaacaaagcgctcccaaagctctgacggtctggatgcacccaagcgctgcaaaaatgaccgccactgaagtgataccggaagtccctccccgacccattggtcccaaagcggaaacgacccttttctcagcgcggattggctcagcatccctgcggctggagacaaaaccttctgggttctgtagtccccgctggtccccagggctgagggaaggatgctgccgcccagcgtcacctcaaacaaaagccaagcggccgcgctgggggcgcagggaaatggcgtcgccacaatgcaggagagggctgggccttgtcgctccttaaacaggccgctggtcgatttctgtggtcccgtcgcggctgagcgcccacgtgattagaagcattgattcaggctcaggaagctgaggccagatccacaccgacgcgtattccatacgtattcgacgctcctgcgggagcaaaggagcctcgtgcccctcccttgcggggtcaaggcgttcgaggccgtgccggggccaaggctattctgtgaaaggagcgacttaggtgtcgcgctgtgggcacgtgtcccgggaggccacgtgggggccgcgcccccggctgctcctgctctgacctgagccctttgactgtacccagaggcgggaggcggggccgagacgtcccatgggaaggggttctccgtagctccaccccgggggacgtctcctccaggggggccgggcgagctgggaaggccccagagccgccgaggaaagcgcctctgcttccctgagtcccctcctgggtctaggagccgttcctgcgttttctgacgccctctccaccgcccctcggctgagaactgggtccagatgagccttggaccccgttgaagacgtctcctacctcatctcccacacctgctgggaccatctccaaccgccctcagggcagtagggaggtaggcgggttcccagggcaccccaagcggtggcgtacagtggtaggaacaaggcctctggagcccaagaatgggatttagtccccgaggggaagtccatgctctgccttacagcggctggtatgggcttctgggggcaccctgagactcggcctgtagggatactcataatggcctccatgaaggtgcaggtttaaccactggaccagtctcatctggccatcctctgttggtaacataatgtccagttattttgcaggcacagagctaaagagttgcaagttacacagctagagaatgtgcagaaaagaaaatgtcaggcccagcgcggtggctcacacctgtaatccaagcacattgggaggctgaggtggaaggaccacttgggcaacatagccagaccccgtctctacaaaaactaaaaaattacccgagtatggtggtgcacctgtaatcctagctactcaggatgctgaggtgggagtatcgcttgagcccaggagatcacggttacagtgagttatgattatgccactgcactccagcctgggcaacggagccagaccctgtctcaataaataaataagtaaataaataaataaataaaaagaaaagagaaaagaaaacattgacccaacactcggagctgaagtctcacctaccagactccaccctgtcaccacaggaaaccaaaatatcaggctatggctggaacccaagtgctgaaacacttccgaaagcaaggggtctgttgtctctgaatgttgggtgataacaaccccatccccgccttgccatcaatagatttgtttgaagtccttccaatcaaaatccacccttccagtgcttaccaacctgtccttcctaatccttaaaagctgccccaaaccccatattggggagacagatttgagctggactcctgtcttcttgtttgtcgacttgcaataaaggtttgcttttctcaaaaacctggtgccatggcattggcttctgtgtgcgtcg

SEQ ID NO: 1561297 - DNA, 4001 bp, Homo sapiens
gggactgagccagtcccactggcaaaacagcctggcgaccagcacacacagcccaaggagcgcggcactccacagctttccatcaccgcaaggcaggcaagcacagcaaccgtggccccgcccctccctgtggacaaccccacacctatgcggcaaaccgcagccgccccgatcaaagatggcacccaggtgggcggggcttgaacagaccgtcccgcccatgccacctgcagccacttcagccttgccccgccgcatctgccgccaaccaatccgggcaacgcctgcgcggcaaacctcagctgcccccatcaaagatggcgcccaggcgggcgggccttgtctcgcccaaccaactaggacagcgcctgcgcagcaaatctcaagcactttcattaaagatggcgcccaggtgggtggggcttgaacaaaccactaggtccaatgccaccctgtcacttcagccttgccccgccccatctgccaccaaccaaccaggacagcacctgcgcagcaaactccagcagcccccatcaaacatggcatctaggtgggcggggcctgagcagatcgtcatatccaatgctacacagtcacttcagccttgccccgccccctctgctaccaaccaaccagggcagcacctgcacagcaaacctcagcagcccccatcaaacatggcgtccaagcgggcagggcctgaacagatcgtcacatctaatgctacccagtcacttcagccttgccccgccccatatgccaccaaccaaccaggggagcacctgcgcagcaaacctcagcagcccccatcaaacatggcgtcaaagcgggcggggcctgagtggatagttacccaatcacttcagccttgccccgccccacttgccgccaatcaactagaacagcgcctactcggcaaacctcagccaccctcataaaagatggcacccaatgggtggggctggaacagaccattacatccaatgcaacccacagtcattcagctttgcctcgccccatctgccaccaatcaaccagaacagcgcctgcgcggcaaacctcagccaccctcataaaagatggcacccagtgggtggggcttgagcagacgattacgtccaatgccacccagtcacttgagccttgccccgccccatctgccgccaaccaaccaaggcagctcctgcgcagcaagcctcagccgcccttatttaagataccgcccgagagggcggggaaagaaaacccctacaggcaggacagcccttcgcccctcccaccaccactgcggcaaacaagccccgcccccagagggtagccgggcacgccggcgccgcgaggccgatggcaccccgcaggaaggggcattttcgcagcccccagacccagcccaggaggcccagggctcccgagagccgcattccgccgtggcaacagggatagcattggtgtcgaccttgctggacttgccgtggcagagcccccggctgtctgccctaatgcccccggtttgctgcggtggcccccggccagtcagaaaggcgcggagaccctgcagcagcccctcagaccccggactgcaagatggcggcaccaacgcagcagcccgggctgcgcccacccctgccccaaaaaggcaccaaccatccacagcctggccgccactgtgcccactctcggactgggcagcgggcggccaagtaccatgtccgccagcccgccctgccacaagggtcgctggcttgccgcggggtcttgggcttgcggcaagacggccactctggcccagagccgtcgcgacaccaaggtcccgcgggcaggaggcgcgcggggcggccgaaggcgcactcacctcacctcagtgctgcgcagcctcgggcacgaacagccgcctagcgcaccctcatggcgcccggcgcccggcggcgccaccagcccagggtggacatctcccgcgcctcccaaacctctcctcccgcagctgcccagacttctgcaccgaggtgcagctcgacgcctccttgtcagggcttctccgcagaggcggggcttctgtgctagccaatcagcagcctcaccgccctctccgggccccctcaccacagccctgtgacgtgccaatcaggctgcggttgccacagcaacagtttggcgcgaaggctgggggctgacgtcagggagtggccgtgagggaccccaaagccaggtctggaaaaggggggtgggttgggtggtgggggtgcagcccccaaagaaatgggggtcgaaatggaggaaaccccactgagatgctcaaatgtaaaaccgctgaagaataaagggacaaatgtacacatctgtctaaatgaaaaaaatgaaaatcctggccgcaaaaacacatacattaacgtctaaagacctgcagggaagacaagacttttccgcctgggacacatgaaagacatcgagctaatttccttaataaatgaagagctcttggaaaccaacgagataaagaccaaaccaagacagaaaaatgggcaaaagggataaaactggcaattcgcaagaaaatccaaacggctggccgacctgcgaaggaaacatcacgacctgtttgcataaagaaatgcaaacctgaaacaccgggcacgtgcggtttaggggagcgggcagtctcacacactactgagttgtttcccagcagccgtcaatacagaccttccactgcgtaagcccactgcattgccatttaataaaacagcaagaaaatgagagagaaaaataatgaggtagaattgtatgggattattaaggattgaattctcagtagatttagtgaaatatacaagttactgaagtttgtagaaacgaactggtaagtgttttctcatttatttgttttttaaggataaacccaaatataggtaaaactgttggaaaggtaggcaagaaattgttgatgagttacttctagggacaaggaatgtggggtggaagagggatttttcccttctgccatccatactgtgaatttccttggcagaaatacgtatttcttctctggcagtaaaatcaatgaattactaaaagttcactaatgtactctttggtccaactattccactctcaaggaactaaaaaagcaaaggaaatacagggatatacagaagattctatacagggatattcacggagcatcatttttatcaccaaaaatgtgctccacagaaaagaattaaactgtattctggtaaatttacacagcgcgattttaactgactaataaaaatgctgtatgattttaactttaaaggaaaaaatctgtaagatgtggttaattaccaaaaggtgtttacctaaggagcacacagactttaataccccaaattaaactttatattatactcaaggagttatcagtggttgcttgctacactgagaagctgctttatgtgttttagactccctagaccatcaacagtctctttttgcccagcagtgccacataaacataatatacgaatgaaaacactgtgcttcttatgaaaatacacgttcaaaacaaattccccagcaggaatattgaaggtgaatgtggtagtaccctgacttaggttacagattttcaaatctggctactctcattaggctcacctggagagctgttaaacaatgcagattcccagtgtcccacagagatctttgtttttcaggttcccaagggatcctaatgtctagttaaggttttgtaggtgattttaatatattttaaagactccatcatccccctgtctcctcaaaggcctctatctgcaataccagtttctctccggatcctgaatcattaatttccacaagacaccacatgctctcagagctcctgcagttaccacccccttgctcagcacctcttggccctgaaaatgcctcttgatagagcagtctactgtcactaactcaatggttttaccatacattctctcctgctaacatatatgccccacaggcttccatccctt

SEQ ID NO: 1561298 - DNA, 4001 bp, Homo sapiens
cgcctgtagtcccagctactcgggaggctgaggcaggagaatggcgggaacccgggaggcggagcttgcagtgagccgagatcgcgccaccgcactccagcctgggcgacagagcgagactccgtcccaaaaaaaaaaaaaaagagagagagagaaagctaaacagcagttcaacagcacctttaaaacaagcctgtgcaaagacaatgaggcaagcatcagatcagctagagcacagtaaggaaggccgagagcagaaaccatgaatcctgaagcagctgtggtcgtgacgaataacgccgcagtgaacatgggatgcagatagcccttcagctttgccataagcgggacagctggatcattggtaattctttgccaaaagcgtagattttggccacgcgtggcagctcacacctataatcccagcactttggaaagccaaggtgggaggatcagttgagcccaggagttacttttttttttttttttttaagaccaagtcttgctctgtcgcccaggctggagtgcagtggcacagtctcggctcactgcaacctctgcctcccgggttcaagggattcccctgcctcagcctcccgtgtagctgggattacaggcatgcaccaccatgcccagctaatttttgcatttttagtagagacaaggttttaccatgttgttcaggctggtctcgagctgctgatctcaagtgatccgccggcctcagcctcccaaagtgctgggattataggcgtgaaccaccacatccagccaagcccaggagtttgagaccagcctgtgcaacatagtgaaacctctgtctcaatgtttaagtaataaagtttttattttttattttattttattgaggcagggtctcattctgtcacccaggctggagtgcagtgatgtgatcccggctcacagcagtttaaaaatccctggctcaagcaatcctcctaccttggcctcctgaatagttaagactatgggtgcatgctaccacatcagctaactttttattttttgtaaagaagggatcttgctatgtcacctaaactggtctcaaactcctaggctcaagcaatcctcctccctcagcctccccaaatcctgggattacatgcatgagccaccacaccagccaggaataaagttttaaataagtaaatatgtttttaaaaagaataaacttgccgggcacaactttaatgtttattaaagtttgaggagtccaattctagcacaaaaaatatatataattttaaaaaacagtaaattgtaaatgctttcaccacaaaaatagattaattagcttgatttaatcatccccccaatgtaaacatgtatcaaaacatcacattgtaccccataaataaacacaattattatttgtcaataaaaagtttttagaagtagctgtgggccagcagtaatgctaaggactggagggccacgaaaataattttgagtgtcctgggagcatcacttttcaatatgacaactaaaaaaaaaatctaaactaccaatgtaaaatatttagcttattccagcaaataggagaggtagaaaaatgaaactaagtaaaaatgcaaaacaaacaaacaaacaaaacccagacatttggttttcagggagaaaaaaaaatcagcttacctccagtggaatctggcataaattagcaagttgattgatttctgatgcctgtggtcttttcttctgaaagggactgaaaatgaaaaggcgtgtatactgaaaagctacactaatgactaaaacttaatcggccctctacccgctgtattccgcatcataatccagtcaagaaacaacccaaaacactcacttcctatcaaaagccccacctgatcctatcaggccacatcaaaatttcaattcccaattctttcctcgacttctccaaaactgaatgaactctcataaaaattgtgattgtgaaagcttaattttcaaatctgcccaatcagtttccaatggaattttttttaagttcatgcaagtaaaaattttttaccttaactttgaaatagaaagcatggaaaacattatccaaatgtcagaggatgaaaataaattaaaacaacaaaaattggctgggcacggtggctcatgcctgtaatcccagcactttgggaggacaggagttcaagaccagcctggccaacatggggaaaccccgtctctactaaaaatacaaaaattagctggtcatggtggcacgtgcctgtaatcccagctacttgggaggctgaggcaggagaatcgcttgaacccgggagacggaggcttcagtgagccaagatcgtgccactgcactccagcctgggcaatgagcgagactccatctcacgtctcaaaaaaaaaaaaagaaaggaaaagaaaaaagaaatagggccagcggaggtggaacaatgccttaaagtgctctccgcccgacagaaagaattcaggctccaacctccaactggcaaaatctcttcagctgtactaatactctcaaaatgagatcaacatgccaatccatccccaccctagtctgggtgttgaatttaaacacaggctacatgcccttgcctgcagacatggagaccttccaaaattgagcgtccaactgaattccaagagattaaaccagacttcatgggacaggatgcaccagactagacctcctcccaggagaagaggtatccaaagatcgtattagcaaatgacccttggcggtgtgcggtggctcaagcctgtaatcccaacactttgggagactgaggcagacagatcacctgaggtcaggagttcaagaccagcctggtcaacatggtgaaatcctgtctctactaaaaatacaaaaattagctgggcatggtggtacacacctgtagtcccagctactcagctactcaagaggctgaggcagaattgcttgaacccaaaacacagaggttgctgtgagctgagatcatgccactgcactccagcctgggcgacagagggagactccatctcaaaaaaaaaaaaaagaaaaaaaaagcaaaatgacccagccagcctgaatcccagccgccgtgtcggactactatagtcccagatacttggaaggctgaggtgggaggatcaattgagcccaagaggtcaaggctgcagtgagcaaggatcttgccactgcattccagcctgagagacagagcaagcctgcaggtgaacggaaaggggtggagtgattttatatatatatatatatatatatgtatatatatatatatatatatatattttttttttttttttgtctgagccgctgtgcctggccttttttatttttttttagagacaggctggtctcaaactcctggccccaagtgatcctcccatcccagcctcccaaagtactggtattacagatgtgagccactgcagttggctcaacagcagattttcaatgtagatgaaaaagccatctattggaaggagattccatctaggatttttatagctagagagaagtcaatgcctggcctcaaaacttccaaggacaggatgattctcttacatgaaactaatgcagctggtgactgaatttaatctaatgctcacttaccatttaaaaaattttaaagcctctaagaattatgctggccaaatgcggtggctcatgcctctaatcccagcaatttgggaagccaaggcgggcagatcacttgaggtcaggagttccaagccagcctggccaacatggtgaaaccccatctctactaaaaatacaaaaaaattagccaggcatggtggcccgtgcctgtagtcccagatactcaggaggctgaggcaagacaatcacttgaacctcggaggcggaggctgcagtgagccgagatcacaccactgcactccagcctgggtgacagagtgagactgtgtctcaaaaaacaaacaaagaaaagaattatgttaaatctactctatctgtgctctataaatgaaacaac

SEQ ID NO: 1561299 - DNA, 4001 bp, Homo sapiens
caacgtgtctccaagaaatgaaagctgggttgggtgaagacaattttaatgtctcaaggggttaccttttcaaaataagactgcaccagaagactcctctcagccccagggcatccacttgctcccttgagaggacacattccatacctcgggtcatcctacgggagaaaataaaccagaagctgacattcactaggcactttagctgacagaaccatggcggatatctcggtttatccacagatagtactgaaacccaggaccaggaaaaaactaaagggtggctgaggacacatcaccccatagatttttccaaatcaaaaccttgacccaaaaacattctgataaatctctgtgcctagagaaggtaaaaggaaaagagacacagagattttctacaatacagtgtcagaggattagtctttgtttccttttcgtgggaaatatttacaagcggataacacatcttcttaaaagcgccatttaatgctttgtcaaaaacaattaattaaaatatggtataaacaagtacactaaaggacaaataggtgataatgtgaattaggaaggaaaagttgacatttgggaacgccagaagaaattggaaatttagtatcttactgcaagccagagtgaggctggagaaatgggggacgggggttagacttaacaacctgcttgggacacaggtgaaaaatgcagcagaaaatcagttccccgtggagtgtgaaaataattaagagacaggcaattccactgaggtgtctctagtccctgggttcctacttaaaaaaaaaaaaaatctaactcaggtgcattttttttttaattactacattcagagaaaatgtaggcttaaacaactataaactgttaattaacctctgattacacaaccaggaaatcttcacctgtattgtacaaatcaagaaactacgttactgtaaccaattactaaatttagttttcttcatcatacattttataaatgactttccttcaagcctctcccatagacaacaaactacaaaccatagctggatactctatgattcttgaatcactgtttgattaaattctttaggccaggcgcggtggctcacgcctgtaatcccagcactttaggaggccaaggcgggcggatcacgaggtcaggagttcaagaccagcctggccaacgaggtgaaaccccgtcccaactaaaaatacaaaaaaataaggccggcccagtgacaggcgcctgtaatcccagttactcgggaggctgagccaggagaatctccagaacccgggaggcggaggttgcagtgaggggagatcgcgccactaaaccctagcctgggcgacagagcgactccgtctcaaacaaacaaaaaaatcgttaatatttgtgcagtgactcccatacatttttaataggagaaaagaggaactgggaaagccacggaccaaagatcttcccattcatgaacccgcaccccgagtcaggattttcccctgacgaccctcccgtggtccctgcacaatctgagagagacgcggcgctgcgggtgcagagctgccaagagagggctccaggccaaggcacagtcactacgcagggaagagaaaggacgcctggggtcctggctgtcagcgcagccgccatcttatggccgaaggggacggaggccgagctgggcaaggcgcagattgtgaagctgactgcggagaggcctgagtcccgccacagctacttcccaccagttccaaccagccctttcgccgtctctcgggatgtcggaccgggcactctcaccatttctaggcttctagggggtcctggcgtcttagctgtggatctcccaatatctgcaggtcagagggccacacaggctaggcccctaggagcagaagacacagagaagtgagagcaaaacctggagctccggctacagcgagagacaaagaccccgccaaacccggaagccgtccagtccgctccagctgcatgcctgattggacggtttccagcccagcgtccctggttggataatgcttaaatccccgccctgtcaggctttgagtgacagaagatgtgatcagatgcgggttcaatgaagaaagagtgacagcctagactgccccctcttctgacagggcttcctccctcagctgagctaggcccatcccagagagtatttgcctttaaatttgtgtataaggtcatatgtataaataaataatacattatatagctatacacaagtgaaaagaatataacaattattttaaaatttcagcttttatgaccttcctggcttctggccctttgagcaggcagcctgagattttagaaaagagaaaatcatctaaaatgaatgtcagccacatgtggatttgaaattttctagtagccaaactttaaaaagaaacaagttgaactgattgttaacaatgtaattcacccattatattcaaaatattatcattttaatgtgtgagaaatatgtaattattgataaaatatataaatatttggaactaaatctttgaagctgactttgtattttacctttctagcatatcgcatttcagaccaggcacattgtgggaacccagtagccacacatggacaatagctgtcacattgaagtgcagctctgatgtcagcggtgtgaagggcctgaacatctctttcctgcgagagtgaaagaagagactctccctacaaacatctctctttggttcctagggtggaccagatagttcccatagaaagagctgagggcagtaggaataaaatagccacaggtaataaacaactgctggccacctgttgcccacctttcttttagagaccagatagtgaacaaaggatgatggggccacaggagaaaaaacaactatgtcttcagttctgtccacacacttgaactccagtatttagagatggagaaaatagattaaaaacaaacatagtttgctatatggtcttggccctaacaatcaggctgtgtttatctgttttctcctgtggtgtgggggactatgtgagtctaagcaccaatcacacgcatacatgtctacaggtatttctgcattacccaaaattctcttacaaaacatcgaactttaaatcaggggaagaaatcagtacctagagggtgtccactgttagaagccaactcttagtcaacctgtcactgaatcctggcaacttatctgtactgggtgcatgtattagttagctattgaggcataacaaatcatccaaaacttattagtttataattgaaatggttggccatttaggccgagctgagtggggccattcttctggtctcagctgagctccttcagacatgtatcatcacctgctttttgactagacagctgtgcatctgggggtgagcttctgctcctgggtctgtcaacaggggcaccttgcttctcctcttcatggtatcttattttccagctggctaacatgggcattattcatggagatggcagcattctaaaagaaaaagagaagcagtcaataccatttgagcctgggccccaaactggcccactgtcatgttcacaggtttctgttgacctgagcaaataaggtcagccagatatagggctttgaaaacagattccagatcttgatggaaacagctgtaaaagcacctggttatgggcaaagatacaagagggatgaaaaaatgtcattttgcaatcagtatcattctaccttttttgcatatgtggtatatagaactcttccacatcaggaaacttgtgcaaagtcctacggctactaagtggctgggctgagactcaggatcaactttatctgactccaaagcccatgcacctccatagatgacactactaaagtagctgccctgccctagactattgaaatcctggagagtgacacttccatagtagaagtcagattccttttagatttgtgctcatttgggaataatcctcacaaaaattgcagaagcacacggtggctctca

SEQ ID NO: 1561300 - DNA, 4001 bp, Homo sapiens
ctcatcaaacaaccaggaaagattaaccacgccaggacagacttttcacccgttcttccgagggcagctggaagaagtccctggacggtcctgaaacccaggaccagaaagataggagggtgggctgaggacccaataccctgtgaagttcccaagagaagcctccacccaaagactgtctgataaggtggccgcgcctagggaaggtaaaaagagggcaggcacagtgattttttttttttaacatcggagtgtcagggggttattttctgctttgctcgcatgtgaaatgttcacaaacggaaaatgaactttttaagaagtgccatctagggctccttggaaaagatgacagttaaaacactgggtcttgccaggcgcagtggctcaagcctgtaatcccagcactttgggagaccgaggcaggcagatacctgagatcaggacttcagcacggccaacatggtgaacctgtctctactgaaaatacaagttagccggacgtggtggcgggcacctgtaattccagctactcaggaggctgaggcaggagaatcacttgaacccggaagacggaggctgcagtgagcccagacagtgccactgcactccagcctgggcgacagagtgagactccgtctcaaaaataatagaaataatgataataataataatgtgaagtggatgtactggagggagaacttagggttggggaatgcggggaaatttagggatttactgcagccctgggaggagcgaagctgggggacggggtcgtgggtttgaaacccagcttcccacacctttggaagactccgaaggaaacggggaccgcctaagggaggaggaactggggaccccacaggccacggctcctcccgcacgaaccccacacccgaggcgggattccccctaagaccctcctgaggcccccgcacgatctggggagacgcggggctgcgggcgcggagctgccctgagagggctccggggccgggacaggacacccggggtcccggcggctggtccagctccacccggcgaccgaggggaccaagggtcgagctgcgcctgggggactcgggtcccagacccccacagtcgccgcggggaggcccaggtccagccactgccggttccgaccagctcctcctcaggtctccggacgcccggctccgcacgctcaccatttccggcttccgggtgtcctgggtccttcctggggctggagcagccagaacaggtcccacacgacaaaatcagccgtatccggggcaccaggggctccccgaggaactaaaacccggacccgaatggggggccggcgggaaatgagaccgcttcgggctttggaagttgcccctcctcccggcgcacctgattggacagtttgccgcacagcgcctctgactggctggtgccccaggtcccgcccctggggcttgagcgacaggagaggtgatcggaatcctcaaataatccgctcgctgtgtggggtgtgactgacaggtgctacccacagcccctcgctgggaccttggacctggacttgcatggaagcagaacttgctcccgttagggtcaacccaaccagactgttcccctccttcccccatcagtcttacaatacagtcctttgtgaccgccacacaactccccccgggctagaagtagacctcctccccactgacccttccagtaactgtttgttcaaaagacttcagctgaaccggcagacagttccaggatgcggtcacaacacctgcccaccttgcataacaaagctggcaaaaacatctccaggatgcggtcaggacacctgcacccccgactcagttctcacaccccagcccagttcctcgccctataaagccctgctgtagtctgtaagcggggctgcctcctctaactgtgggggagcagcccagcaggttaataaaacttacttgactgacttcaggtctcttcgtcctttcggctgaccttacagctcctggttttccggagcaggccctgtcggcttcctgtactcagtgggtccttcctgctgctttttttttttttttttgagacggagtttcgctcttgttgcccaggctggaatgcaatggcacgatctcagctaactgcaacctccgctttccggtttcaagcgattctcctgcctcagcctcccgggtagctgcgattacaggcgcccaccaccactcccggctaatttttgtatttttagtagaaatggggtttcaccatgttggccaggctggtctcgaactcctgatctcgtgatccgccggcctcggcctctcaaagtgctgggattacaggcgtgagccaccgcgcccagccgcctcctgcttctttttccggaacaccggtcacatgagtgtgcacggaattccagactccgtgttcagtgaagccatccctccaccttggagctggagagactcccaggtcacaatggaacaggtaggaggccctgatgtcctccagagatcaggaatttatgaggctattggtcccatggccaaggcttcctacacgttacttcttctcaggctactccttttcagccaagaaaataaaaacatgccttaaagggaacaaaattattaaatgcagggaaaaactggagtaaaccactttttttttctttttttttgagacggagtctggctctgtcgcccaggctggagtgcagtggcacgatctcagctcattgcaacctctgcctcccaggttcaagagattctcttgcctcagcctcccgagtccgagtagctggaactacaggcatgtgccaccatgcccggccaattttttttttttttttttttttttgtatttttagtagagacggggtttcaccgtgttagccaggatggtctcgatctcctgaactcgtgatctgcccgccttggcctcccaaagtgctgggattacaggcatgagccaccgtgcccggcctggagtaaacattctataaaggtattgctaccagaaaggggtccagtcccagactccaagagcagaagcttggaccttgtatgggaaagaattaatattggagaaaaaactgaaaaagtaagtatatcgaactgtatcatgggacagaaacatgtcattcctatttttactgaagattatcttatttgatactatgtgattattaagtcctattacatttcctttctccttttacgaagtcatgtatcttaataatatgcagccgggcacggtggctcagcctgtaatcccagcactctgggaggcccaggcaggcggatcatgaggtcaggagtaggagaccagcctgcccaacatggtgaaacaccgtctctactaaaattacaaaaattagccaggtgtggtggcgcatgcctgtaatcctagctactaagaaggctgaggcaggagaactgcttgaacccaggaggaggaggttgcagtgagccgagatcacagcattgcgcctgggcgacagagcatgactccatctcaaaaaaaaaaaaaaaaaaaaaaaaaaaaaaaaaaaaaaaaaaaccagagccgggcccggtggctcacgcctgtaatcccagcactttgggagtccgaggcgggtggattacgaggtcaggagttcaagactcagcctggccaagaaggtgaaaccccgtctctactaaaaatacaaaaaattagctgggtgcagtggcaggcgcctgtaatcccagctactcgggaggctgaggcaggagaatcgcttgaactccgagggcagaggttgcagtgagctgagatcacgccactgcactccagcctccagcctgacaacagagtgagactccgtctcaaaaaaaaaaaaaaaaaaaaaaaccagaatatgcagtgggtggccgcagcgggtcacacctgtagcactttgggaagtcgaggcaggcagatctcttgaggccaggacaggagttccagaccagcctggccaacatggtgaaaccctgtctctcctaaaaata

SEQ ID NO: 1561301 - DNA, 4001 bp, Homo sapiens
tctgcagccataatggaagatttccttttttttttttaaagacagggtctcactctgtcgttcagtgcagtggcgcaatcacagctaacggcagtctcaacctccccgggttcaggtggctctcccacctcagtctcctgagtagctgagactacaggcatgcgccaccatacccggctaatttttgtatttgttgtagaaatggggtctcgccactttgcccaggatggtctcaaacttctgggctcaagagatcttcccgccccagcctcccaaagtgctggaattacaggcgtgagccacctgggcaggagaatcgcttttgacttccagagcagactgggcaacatagtgagaccttgtctctacaaaaaataaaaactagccgggcgtggcgcatgcctgtggtcccagcttcttggaagactgaggcaggaggattgcttgggccccagaggttgaggccgtagtaagccatgactgtgccactgcatgccaccctgagctgcctcagaagggagaagtttctttctactgtttctggccccaccccacccccaagggccagcagggaatccctctggaatttcctaaggaaacttcttttcaaaagacaagaactcctccctaggaggctcatcaaacaaccaggaaagattaaccacgccaggacagacttttcacccgttcttccgagggcagctggaagaagtccctggacggtcctgaaacccaggaccagaaagataggagggtgggctgaggacccaataccctgtgaagttcccaagagaagcctccacccaaagactgtctgataaggtggccgcgcctagggaaggtaaaaagagggcaggcacagtgattttttttttttaacatcggagtgtcagggggttattttctgctttgctcgcatgtgaaatgttcacaaacggaaaatgaactttttaagaagtgccatctagggctccttggaaaagatgacagttaaaacactgggtcttgccaggcgcagtggctcaagcctgtaatcccagcactttgggagaccgaggcaggcagatacctgagatcaggacttcagcacggccaacatggtgaacctgtctctactgaaaatacaagttagccggacgtggtggcgggcacctgtaattccagctactcaggaggctgaggcaggagaatcacttgaacccggaagacggaggctgcagtgagcccagacagtgccactgcactccagcctgggcgacagagtgagactccgtctcaaaaataatagaaataatgataataataataatgtgaagtggatgtactggagggagaacttagggttggggaatgcggggaaatttagggatttactgcagccctgggaggagcgaagctgggggacggggtcgtgggtttgaaacccagcttcccacacctttggaagactccgaaggaaacggggaccgcctaagggaggaggaactggggaccccacaggccacggctcctcccgcacgaaccccacacccgaggcgggattccccctaagaccctcctgaggcccccgcacgatctggggagacgcggggctgcgggcgcggagctgccctgagagggctccggggccgggacaggacacccggggtcccggcggctggtccagctccacccggcgaccgaggggaccaagggtcgagctgcgcctgggggactcgggtcccagacccccacagtcgccgcggggaggcccaggtccagccactgccggttccgaccagctcctcctcaggtctccggacgcccggctccgcacgctcaccatttccggcttccgggtgtcctgggtccttcctggggctggagcagccagaacaggtcccacacgacaaaatcagccgtatccggggcaccaggggctccccgaggaactaaaacccggacccgaatggggggccggcgggaaatgagaccgcttcgggctttggaagttgcccctcctcccggcgcacctgattggacagtttgccgcacagcgcctctgactggctggtgccccaggtcccgcccctggggcttgagcgacaggagaggtgatcggaatcctcaaataatccgctcgctgtgtggggtgtgactgacaggtgctacccacagcccctcgctgggaccttggacctggacttgcatggaagcagaacttgctcccgttagggtcaacccaaccagactgttcccctccttcccccatcagtcttacaatacagtcctttgtgaccgccacacaactccccccgggctagaagtagacctcctccccactgacccttccagtaactgtttgttcaaaagacttcagctgaaccggcagacagttccaggatgcggtcacaacacctgcccaccttgcataacaaagctggcaaaaacatctccaggatgcggtcaggacacctgcacccccgactcagttctcacaccccagcccagttcctcgccctataaagccctgctgtagtctgtaagcggggctgcctcctctaactgtgggggagcagcccagcaggttaataaaacttacttgactgacttcaggtctcttcgtcctttcggctgaccttacagctcctggttttccggagcaggccctgtcggcttcctgtactcagtgggtccttcctgctgctttttttttttttttttgagacggagtttcgctcttgttgcccaggctggaatgcaatggcacgatctcagctaactgcaacctccgctttccggtttcaagcgattctcctgcctcagcctcccgggtagctgcgattacaggcgcccaccaccactcccggctaatttttgtatttttagtagaaatggggtttcaccatgttggccaggctggtctcgaactcctgatctcgtgatccgccggcctcggcctctcaaagtgctgggattacaggcgtgagccaccgcgcccagccgcctcctgcttctttttccggaacaccggtcacatgagtgtgcacggaattccagactccgtgttcagtgaagccatccctccaccttggagctggagagactcccaggtcacaatggaacaggtaggaggccctgatgtcctccagagatcaggaatttatgaggctattggtcccatggccaaggcttcctacacgttacttcttctcaggctactccttttcagccaagaaaataaaaacatgccttaaagggaacaaaattattaaatgcagggaaaaactggagtaaaccactttttttttctttttttttgagacggagtctggctctgtcgcccaggctggagtgcagtggcacgatctcagctcattgcaacctctgcctcccaggttcaagagattctcttgcctcagcctcccgagtccgagtagctggaactacaggcatgtgccaccatgcccggccaattttttttttttttttttttttttgtatttttagtagagacggggtttcaccgtgttagccaggatggtctcgatctcctgaactcgtgatctgcccgccttggcctcccaaagtgctgggattacaggcatgagccaccgtgcccggcctggagtaaacattctataaaggtattgctaccagaaaggggtccagtcccagactccaagagcagaagcttggaccttgtatgggaaagaattaatattggagaaaaaactgaaaaagtaagtatatcgaactgtatcatgggacagaaacatgtcattcctatttttactgaagattatcttatttgatactatgtgattattaagtcctattacatttcctttctccttttacgaagtcatgtatcttaataatatgcagccgggcacggtggctcagcctgtaatcccagcactctgggaggcccaggcaggcggatcatgaggtcaggagtaggagaccagcctgcccaacatggtgaaacaccgtctctactaaaattacaaaaattagcc

SEQ ID NO: 1561302 - DNA, 4001 bp, Homo sapiens
gggcacatggagaaaagtatgacatggtcccagaaatagaagaactttcagtgtatggatttagataaagagaaataagaaacaaagagctataagacttaggcaaggcaaactctatactggaacacaaaattcatcaccatccttctccaaggtacaattctcttgcatcccctagcttcctcaagtaaggaccattctgtaagcttcaacgaatgaaaaccttagagtagctgctggcatttccctttcaaagtcttggatataagcaatttatgatcatcaacgtttggcaattatgacaatcaatcaaacgatattatactaagtcgatgttagagatttgctttaaaatactgaaacaaaaaaaaaagggacagggagttgatacaagactggcaaatgttaacaaaggttgaagctgggtgacgcttccacagaattattttagtcatattacatttggctatgcttacaaatttccatagtaaaaacttaagggaaaaataaaagctatgaagcctatttggttaaacatgggtgaaaatccaaaaagaagtctactggaagaggaaaacattgaaatattaatattgttactgttatatcttgtggttagcataatttttttcttttacactttctatactttcttaatcttttacaatatgcaataatttatataatcagaatatgaactataaatatttcaaataaaattaaattacagataattttaaaaaatcaaaaattcaaagcttattaaccttgctttcacggtcctctagtaaaatccaaatatgtgttctgaagctgatactaaacacatcaagaactaaggcaatggatggaaactatttgaattcaaatcccagctcaggctcttaccacctgggtgacctaaagataaaccacctatgctctatgtctgtttgcttatctttaaaatgggaatggtggtacccaacccaggctcaaagggctcttgtgaggattaaagatgttaattcatatcaaactcttagaatgatcagcactaaatgtttaaatactatctttattactcatgcccaagtactccctcatccgtttctgcatttattgaacaaatatcagcgcatcttcgagcagaatttgccagtgaatgatggaaatatcgtcttccctgaaaagaaaggatgataagtactactcaggtgagactccgctgccaagtgccaaagggtcattccctccttctccctgcagcctttttcaagaagtcaaggctaaagaaggaaaggaggatgggggaaatcagaactcctgcatgaattacaatggactacccagacagccaggagtgatcctgtcctaaagaaaaatctctcagtgatcagaaaagggccagggatactctgcagctggagctctgaccccatcctgggttcacagaagctttcagggaactgagtccttctcagaaaattaaaaagtgctaataacaagagacccatcttctaccacctgtcaggctctgttccaagtctttttatttaactctcaaaagaactccattagatagatactagtaccattttaaagaaaaagaaacataggcagagagattaagatactcgcctgttattatactgctaggaagtggcagagctggttgatggtcaggggaaagggctggggaagtacagaacccaggagatccccagtccctgcgatgtaggatcttggacccccggcgctaagtggggatgcgccagctgccccacactggagaaggctcattcaaagataacacaaatcccgcccttcgccgcaagtggattatcctcccctagagctactgcccggttgctactggaccccaacaaaacgaacatcagtatggacggaaggagcaggaagcagggcggggagcgctcacctttctgggaggaacgaaggccgcggcctagcgtacctggggcggaagtggctctgcctaccgagacctcctggactacgcttcccagaattcccgacgggatcagggagacggcctcagcctcctagagcggaagttacccgactacacggggctcccaaactacatttcccagaattcctagaaaaactctccacttatctgcctgcctaggacgcaagtaccgggtgccaagctgagagcctggatgatatttcacatgtgccggtcccaaaggaattccttaactcccccttcctggaaccgaaatgcttccaaagacagagagctcgtatatatatttctctgttttacccagcggaccgtgcatgaaaggcgcctttcctggcgcgtgtgtctctgaccctgtggatcttctggacaattcccggaatttcttgcagggtagcactttcccttaagtcgtctctttctcgtttggatagtcagtatttgtatagtcactattctcttttggttagccatccaattttatactgctagtccagttctactgccttccccctagagtttgaatttatttttcttcaaacgcgacacaaacccaaataaactcaaccaaagcggactttacctacctacctacctacttaccaagaaaatatcccataaaggagagaacagagaagcttgcaatacaggaagaaaaaagaaaagaattacagaatggaagcgatgtgtgcgctaaaaatgcaggtacttaaaggaaattgggctgatttgtactggacaccgaatttaaggaatacaggatctcaacctttctttgactcgattacctttttattccattttggtgtggacgcgtctgaaactgatagtgctgctgctacctaccataatgtgtttgttgcaagatccacaagaacgtggatgccaagaatccacaaaaaaacagatgcaaccgttgatgaggccataagcagaaacagtaaatggttcccacgtttcctctgctttaactactgatgatgaaatgcaagtcataaggcaaatagaagggctgtactgatacagacaaaatgttattattatgggaagggataagtctcttgtaaaacctcgaaatttttttcttctttgagaaaaatctatcacctattttcaccctgctcttgatatagcaaatattgtaagttgtcttatggaggacaggatgattcagggaggacggtgaatgggttgactcaatccagaaaaggaagaggaaaataaaaagacataacgaccaatctgtgaaaatgctcacggggtcaggagatcgagaccatcctggctaacatggtgaaaccccgtctctacaaaaaatacaaaaaattagccgggcgtggtggcgggcacctgtagtcccagctactcgggaggctgaggcaggagaatggcgtgaacccgggaggcggagcttgcagtgagccgagatcgcaccactgcactccagcctgggcaacagagcgagactccgtctcaaaagaaaaaaaaaaagacactattaagagatgagactatttgattctttatttaacaactcctttccaaggaaatgtttctgaaaatacatacggtttacatattaaagaggatcaatctgataataggggatttttttttataaaatgaaaggaaattttaaaaataaaagggacagaataatactttgtgtacttccacttccagtaataataaaatgagtgatttggaacaaacatctggcagaggaaagatgagcaaactttttaaatgtcaaaaggcatcaaaagacaagataatggagaaatggtgggccaaaattcagaaacacttgggagagtcatgcatttggggctacttttctcctggggatgatggtctagtttaggatctgaaaagcctagaagctctgcagcacttttgacacctatatgaagctgggggaacaaaagattctagcaaaaactaaaattcgcatcttttcaagtgcacataagatttgcacaaattagcaaaatgatacgggatttcaaaatactgaaatactaaatat

SEQ ID NO: 1561303 - DNA, 4001 bp, Homo sapiens
agggctgggattacaggagtgagccaccgcgcccggcaacaaacagccattatagttacactgatgtgatgaacacaccacctacgatgtatctttcatttttattttgtttaaatttttctttgttattatatatgtttcaagacaaggtctcgctctatcacccaggctggagtgcagtggcactagcttggctcactgcaacctctgctttctgggttcaagagattctcctgtcttagcctcccaagtagctgggagtacaggcgaccaccaccacgcctggctattttgtgtgtgtgtgtgtgtgtgtgtgtgtgtgtgtgtgtgttttagtagagacaggacttcatcatgttggccaggctggtcttgaactcctgacctcaggcgatcatcctgcctcagcctcccaaagtgctgggattaaagccacgaagcctgaccaacctaggatgtttctgtctccctccctccctcccttcctctctctttttccctccctccctccctcccttccttccttccctctctctttctctcttcctctctctttttctctctctctttctctcttcctctctctctttctctctttctttcttttttgagacagggtctcactctgctgccctggctggagtgcagtggtgtgatcagagctcactgtagccttgacctcctggggtcaagcagtcctcccacctcagcctcccaaagtgctgggatcacaggcgtgagtcaccgtgcctggccaggtctaactttcaacgacacaaggaacaaccacacaaatgcacaggcgtggacgttctgccattctgactacccagggactccaactagtaaatgtcatgaacaaagggaggcaagttcgagggtgtgagccctggaagagaaacgcacacaatgtgtttgcatcctgcctaaagaaacataactctaggccaggcgtggtggctcacgcctgtaatcccagcactttgggaggccgaggcgggcagatcacctgaggttgggagttcgaggtcagcctgaccaacatggagaaaccccatcactactaaaaatgcaaaattagcccggcatggtggcacatgcctgtaatcccagctactagagaggttgaggcaggagaattacttgaacctggaaggcagaggttgcggtgagacgagattgcaccactgcactccagcctggataacaagagaaaaactctgtctcaaaaaaaaaaaaaaaaatatatatatatatatatatatataaaagtttttttctattaaaacaaaacaaaaacaaacccccaaaactcttcctgctccaaatgtgacatctgatgaccgtttaatgactgtggtcaacttaaatagtataagatgagtcatttgttcataaaatgttagaatgccataaaatctacaacttacatgatatttggaagaaacttgatggcaagttccctcaatttgaggacaaatctaaacgtttacatgacactgtcagcaatgaattgcggactcaaaacttttctaaaccattaataatttaaaaattaaattaatcatatgagaaaaagctgaatttatatatagacactcacacataaatatatgtgtgtatatatttatatatatgtgtgtgtgtatgcatttatatatatacatgtataaaaatatatatacatatatattggccaggcacggtggctcacgcctgtaatcccagcaccttgggaggccgaggtgggcggatcacgaggtcaagagatcaagatcatcccggctaacacggtgaaaccccgtctctactaaaaatacaaaaaattagccgggcgtggtggcgggcgcctgtagtcccagctactcgggagcctgaggcaggagaatggcgagaacccgggaggaggagcttgcagtgagccgagataacgccactgcactccagcctgggcgacagagcgagactccgtctcaaaaaaaaaaaaaaaaaagaaaagccccactgttgcctgggggatccaagtcactttgacacagaagcaagcctgtgcaactcaggggctgagctgtaaataagagtttttgagacacaacattccacgtctatcttgaccttatagttcccaaggaaacagccacacctgatgataaccccattacacgcatctcagctgtaagcctacctaagaagataaaaccgcctatttcaatttaagtttccctgaattccgtcctttccccaatacaattggagcgccggttctgaccctagtaacctcagacacatcagctcaggacagtagtttaaaaaaaaaaaaaacagaaaagaaaagaaaaagaaaaacaacgcatcattgtgagtcagctcaggtgagcaggctgaggttggcttttgcctgattgtccatgacgaagatatacctggctgatgaaacacattcccacctttgccctgagttccagtaaatcagacctcaccggagcggattagtgataaaaatgcatcttgttccgaccgtggggtttgatcctgacaccttcacaccactctccttgcagcttgtcctttttatatatttcctctgctgaggtctcagttcccataaaagaccatgttcagcacacggaactcaaaccctcaaagctctttatctggccaggcgctgtggctcacgcctgtaatcccagccctttgggaggccgaggcgggcagatcacgaggtcaggagctcgagaccatcctggctaacgcggtgaaaccccgtctctactaaaaatacaaaaaattagccgggcgcggtggcgggcgcctgtagtcccagctacttgagaggctgaggcaggagaatggcgtgaacccgggaggcggagcttgcagtgagcagagatcgcgccacagcgctccagcctgggtgacagagcgagactccctctcaaaaaaaaaaaaaaaaaaaaagctctttctcgtaagaaaccagtgcatcctgcacgtctggccctgcccaggacttttcagttcaccctcatcacaacaggctccaatccaatactttttttttttttttttttttttttgagagagagtcttgctctgtcgcccaggctagagtgcagtggcacgatctcggctcactgcaaccttcacctcccaggtagaagcgattctcctgcctcagcctcccaagtagctaggattacaggcgctcggctcactgcaatctccacctcccaggttcaagcgattctcctgcctcagcctcccgtgtagctaggatcacaggcgcccgccaccatgcccggctaattattattattattattatttatttttttttttgagacagagtctccctctgtcgcccaggctggagtgcaatggctcgatttcggctcactgcaacctccacctcccgggttcaagcgattctactgcctcagcctcctgagtagctgggattacaggcgcatgccaccacggccagctaattttggtatttttagtggagatgggggtttcaccatgttggccaggctggtctcgaactcctgacctcaggtgatccgcccacctcggccttcgaaaatgctgggattacaggcgtgagccaccgcgcccggccagctccaatactttcatggatgcaaagaacacaacccctgcaaccgctgcatgcgggcatctctgctgcccaagcccggggacaggcgctttcgcaacgctgcagcacggtatgggggaagcgcccttctccctgggccaaggtgaagggcgcgctcggggtctgaacacgtgggtcattcgtgccttcccctttcctcccggaagggtagagacaatgaggcttttgcagacagcaactctcaagtccctgggccccggcccggtcccgcccttagtacggacactcaggcacacttactcttccactagctccggcttccagatgtctctgtcggtggcgcagcccaaaagcgcgcgcagcccaggagcgtctcgga

SEQ ID NO: 1561304 - DNA, 4001 bp, Homo sapiens
cacaacccctgcaaccgctgcatgcgggcatctctgctgcccaagcccggggacaggcgctttcgcaacgctgcagcacggtatgggggaagcgcccttctccctgggccaaggtgaagggcgcgctcggggtctgaacacgtgggtcattcgtgccttcccctttcctcccggaagggtagagacaatgaggcttttgcagacagcaactctcaagtccctgggccccggcccggtcccgcccttagtacggacactcaggcacacttactcttccactagctccggcttccagatgtctctgtcggtggcgcagcccaaaagcgcgcgcagcccaggagcgtctcggagctgcaccaggatggggatcaaactgttgaaataaatcaacctaacgaggccgccaggaaggaccgactacagagattcgtcctgcccagacattttgtactcgcttcttgaccccttcctcaaaatggacggtgtaagggaccagggggaggagaggggagccgagcaggcaggggatcccagcgcccgcactcctgcctgcccacccccgtcccaccccccgcccccgggacccgatcgacccgaccccagagtctgacccccacgaccagtagattgacatttcctgtagaacttactccccaggcactcctgatccaagcaggaaaccccagccttgggtcctcgctgtcgcctccgcccgcgccaccgttcctaggctctccagctgggaagcgcgctctctgcgcagccaacgcgcctccttgcgggctccggagactccggccgcttgctggcttcctgcatttcccaaggaaagaaggcttttttttcccctcagtactgtaaaagggcggaaacagacaggttggggagtctccagtttctctcttgtccccatttttatgtttttgctaccactcccccccatccgttgactagcggctaaaccgcaaggctcccgtcgcctacccttgaaatgatttttttcttccttccttcctttcttttctttctttcttttttttttttgagacggagtctcgctctgtcgcccaggctggagtgcagtggcgcgatctcggttcactgcaacctccgcctcccgggttcatgccattctctcgcctcagcctccgagtagctgggactacaggcgcccgccaccaccctggctaagtttttgtatttttagtaaagacagggtttcagcgatctcctgacctcgtgatccgcccgcctcggcctcccaaagtgctgagattacaggcgtgagccaccgcgcccggcccttcttttcttttctttctttctttctttctttctcttttttctcttttctttctttcccttttttctctttctttcttctctttctttcttttcctctccctccctccttccttccttttttctctttctttcttctttttctttctctctctcccttcctccttttctccctccctcccttcctccctcccttctttcttctctttctttctttcttctttcttttttctttctctttcttccctccctcccttctttcctttctctctctccctccctttctctttctttctttctttccttccttccccccttcctctctccctctctgcccctccctccctcccttccttccttttttatttttttccttttcttattctttttttctttttttttttctgagacaagttcttgctctgtccttcaggctggagtgcagtggcgcaatcttggctcactgcagcctcaagcgatcctaccacttcagtctcccaagtagctgggaccacaggcacgtacaaggcatgcctggctaattttaattttttttttttttagagatgaaaactcactatgctgcccagactcgtctcgaactcctgggtgtcacgcgtgtccgtatagaagaccacctaaacaggctttgtgtaagcaacaaaggctgtttattcacttgggtgcaagtgggctgagttggaaaagagagtcagcgaagggagataggagaggggcagctttatagggctggggtaggcagtggaaagttacagttaaaggtggttatttgttgtcagcaggggaggggctcacaaggtgcattgtggagagatcatgggactcattgtccaggagaagaatgtcacagggtcgactgatcagttggggcagggcaggaacaagtcataatggtggaatgtcataaggtgggttaatcagttaaggcaggaactggctgtttcacttcttttgtggtttttcggctgctccagacttcttggctcctgcaggccatctggacgtatatgtgtaggtcacaggggttacaatggctgagcttcggctcagaggcctgacactgggcttaaagtgatcctctggccttgggaggctgaggtgggcagatcacctgaggcgaggagttcaaggccaacatggcgaaaccctgtctctactaaaaatacaaaaacgagctgggcatggtggtgcatacctgtaatcccagctgctcgggaggctgaggcaggagaatcgtttgaacctgggaggaggaggttgcagtgagctgagatagcgccattgcactccagcctgggtgacagagcaagactccgtttcaaaacaaacaaaacaaaacaaaacccaaaatgactgcctaaacccagacctctaggacacagactcagtttcccaccctgactctgcttaactggggagtcgcttgatcttcaggtgcccctgatgcaaatcagctgaacaaagcgtttatcctctactcgagttacatcgtttcttttcctttgagggtccccagcaaaccttgatgtgcatctctttttcttttggttctttgggaggaaagattaagcccagcccagccagctcctggagctccccaggaaggaagggctgggagtccctatctggtcaattaaataatttatttatttatttattttgagacggagtttcgctcttgttgcccaggctggagtgcgatggcgcaatctcagctcaccacaacctctgcctcccgggttcaagcaattctcccacctcagcctcccgagtagctgggattacaggcacacgtcaccatgcctggctaagttttgtgtctttagtagagacggggtttctccatgttggtcaggctggcctcgaactcgcaacctcaggtgatccacctgcctcggcctcccgaagtgctgggattacaggcatgagccactgcaccccggcctaaataatttattttttatggactgtctttcttcactctagtaatgaaattctaccataaagcttaaattgccaaatattgatcatacttaccccagttacatttttttacggtgataaaatatacatcacaaacatttccatgtgaaccatttttttttttttttttgtgacggactctccctctgtcacccaggctgaggtgcagtggcacgatcttggctcactgcaagctctgcctcccgggttcacgccattctcctgcctcagcctcctgagtagctgggactacaggcatctgccacgcccagctattttttttgtatttttagtagagatggggtttcaccatgttagccaggatggtctcgatctcctgacctcgtgatccacccacctcggcctcccaaagtgctgggattacagacatgagccaccgtgcccggcctccatgtgaaccattttaaagtgtacacttcagtggcattaagtacagccacatcgctgtgtaaccatcatcacgattcatctccagaactttgtcatctttcccaattaaaactccgtacccgttaaataatcacaccccattccctttttctctcagtccctggtaagctctgttctactttctgtgtccaggaatttgactgttctaggaatctcctagaagtggaatcactcggcctttgcctttttgtgtctgacgtatttaattttgcacaatgttttcc

SEQ ID NO: 1561305 - DNA, 4001 bp, Homo sapiens
ccctttgctgactccttttctgaactcagtctgcctgcacccaggtgattaaaagctttattgctcatacaaagcctgtttggtggtctcttcacatggacgcacctaatgctagggaggcaggagaattacttgaacctgggaggcagaggttgcagtgagccgagatcgcacctctgcaccccgacccgggtagcagagcgagactctgtctcaaaaaaaaaaaaaaaaaaactactagactgggtgtgttagatgttcaagttttccctaggatcaaatttttcagaaaaaaatgtcaaaactacacttagtctaaacatgctgttaataaattcaatagatactactttattacactaatactagaataatattctgattataaagcctccatcctggccaggagcggaggctcacgcctgtaatcccagctctttgggaggccgtcaggcggattacaaggtcaggagttcgagaccagcctggcgagcatggtgaaaccctgtctccactaaaaatacaaaaaaaaaaaattagctgggcatggtccccatgcctgttgtccctgctactcggaggctgaggcaggagaatcacttgaacccaggaggtggaggttgcagtgagctgagatcgcgccactgcactccagcctgggcgacagagcaagactccgtctgaaaaaaacaaacaaaagcctccatcctttcttcctgtgggcccgttttgaagctctgtgggggggtacagacctaggaacttcagataaagacaacagctgtgtattattgcctttctttcttttttgagacggagtttcgctctcatcgcccaggctggagtgcagtggcagatctcggctcactgcaacctcggcctctcaggttcaagcaatcctcctgcctcagcctcccaagtagctaggattacaggggactgccaccaagcctggcttttttttttttttttttttttttgtgtgtgtgagacggagtctccctcttttgcccaggctggagtgcagtggcgcgatctcggctcactgcaagctccgcctcccgggttcacgccattctcctgcctcagcctcccgagtagctgggactacaggcgcccgccatcgcgcctggctaattttttgtatttttagtagagacagggtttcaccatgttggccaggctggtctcgaactcctgacctcaggtgatctgcccgcctcgacctcccaaatggctgggactacaggcgtgagccagcgcgcccagcctgcctttcttttgtagaaaggcttgtagctggtaacaacaaaaaacattaagtccaagaaaataaaataagaaactaaaggctcacagtctacacgtgttcatatttacatgcagatataggcacaccctaaacgactattttttttccatcagaaagtaatgtgtcaaaaataagaataggacatcaatgccagattctcagacgagacatttttaagcaaagaaatggaagtcagagccctcttgaaaccaattttctgcaggtgttcaccaggaacatgccggaaacgccaggttcctgaggcgcggaaatgcggggccggagccaacctgactggaacggcagaaatccttttactttcagaaagaaagaaactcacaaaggttgctttccaagcttttgaagaagggagcacagcggatgaaaccactccagaaaacgcgcggagtcgggacaaacacacttcccgacctggctcctgactgggacccactgagcctgcggcctctagccactggccgcgcaaggaggaccgacagcccctggagaagagagtgaaacgaggcggatcggagaggctcctgggcgacagcacccaatcgttcctttgccgccccccgctatctccgggatccccaagcaggcggaactcaccacagccagggtggactccaccacgataaaggcgaaatggcactgaccatgcggagccagcgccggaaaagatggcgattgtgcgctgacgtcacttccgctccgagcctcgggccgggcggggctcctgggttcgagtttcagccacataggacccagtcaaacacagaaattgtagtttcttcccgggtgggcgcggacaggcccttacttgggggcggtttagaggtgggacccggctagccggcggttcaggtggccggacctgctggaagggcgggcgtgggggatgggacgcaccccaggggatgctcctgcagagcttttcccaggtgggcacagtggctaaggcctgtaagtccaacactttgggaggctaaggcaggtggatagcttgagtccaagagttcaagaccagcgtgggcaaaatagcaacatcctttattaaaatatatatgtgtgtatacatatatataaagcttgtttgtatacatctcatgttcctagagcctttccatgattcttccatatggataaagctgccagtgaatggcatggtctatctcttctattcagtcaggctttctgtaggcctttatttcttcattctttattttttagaacctgctggttccattgcgttttcttttttcgtttttctttttcattttttatttttttttgagacagatctcactctgttgcccaggctggagtgcagtggcatgacctcggctcactgtaacctctgccccccgggttcaagtgattctcctgcctcaacctcccgagtagctgggattacagatgtctgcctccacgcccagctaatttttgtacttttagtagagaagagtttcaccatgatggccagactgatctcgaactcctgacctccaatgatctgtctccctcagcttcccaaagtgctggaattatagacatgagccaccgcacccggccacgttttcaatataataatattttctgtaaatcttgatttttttttgtcttcatcaagtatgtatttctggctgggtatggtggcttatgcctataatcccagcaatttgggaggccaagggatcgtttgaggccaggagtttgagaccagcctgggcaatacagcaagaccccgtctctgtttaaaaaaaattttaaatatgtttttgtttttgttttgagatggagtctagctctgttgcccaggctggagtgcagtggcacgatcttgctcactgcaacctctgcctcccgggttcaagcgattcttctctctcagcctcctgagtagcagagattacaggcaggcgccgccatgcccggctaatttttgtatttttagtaaagacagggtttcaccatattggcccagttggtctcgaactcctgacctcatgatccgcctgcctcacctttccaaagtgctgggattacagatgtgagccaccacgcctggccaaaaacatgtatttctattgttatttttctgatcttcccacatgggccaggaccacatttcctacattgtaaaatagcactgacaccagacattctccccaggtttattcagaaatgtaacataatcccagtaaaaatattaaaagttttttctggagttaggtacgttgatactaaagtttatgtggaagaataaatatctgataataaccaagaaaacaaaaacaaaagcaatgatgagcagcagatgttaaaacatactattaacagttttcacacaaggcaaataattaaattatattaaaataaaaataaataagacatactataaagcctctataattaaaactatgtggtactagcacatgaagcagaaacagactaataaaatatctaaaaacagacccaagaacatgtaggaatttggttcataaatgtggtattttgccaggcgcggtggctcatacctgtaatcctagcaatttgggaggctgaggcgggaggatcacctgaagtcaggagttcgaaaccagcctgtccaacatggtgaaaccctgtctctaataaaaatacaaaaataaaattagccaagcatggtggtgggctttctgta

SEQ ID NO: 1561306 - DNA, 4001 bp, Homo sapiens
aggctcagccactatcttgaacccaacccacaactgcatgcagtgtccacacacaagcatccatcccttggatgtttccagcctaaacccgacataatttcataatcacatgtttagtggtctacttggcacctcaatttggtagtgtctgggacatctcaaatacaacatggccaaaatccaactctttatcttccccctgaaatctactcctcacaccaacttccacatctgaaagatctaaggtcaatttttttttttttttttttgagacagagtctcgctctgtcacccaggttggagtgcagtggcgcgatcttggctcactgcaagctccgcctcccgggttcaagccattctcctgcctcagcctcccgagtagctgggactacaggcacccaccaccacgcctgactaattttttgtatttttagtagagatggggtttcaccgtgttagccaggatggtctcaatctcctgacctagtgatccacctgcctcggcctcccaaagtgctgggattacaggcgtgagccaccacgcccggcaatttttttttttttttaagacagagtctcgctctgtcactcaggctggagcgcagtggcacgatctcagctcaatgcaacctccatctcccagattcaaacagttcttctgcctcagtttcccaagttgctgggattacaggtgcacactaccatgtcctggctaatttttctgtatttttagtagaggtggggtttcgccacgttggccaggctggtcttgaactcctgacctcaagtgatctggccgccttggcctcccaaagtgctgggattacaagtgtgagccactgcactcagccttaggtcaatcttaacatttcactttctttcactgtcccacatcaggtaatccatggcccagtttgggcagattcagaagccaaccatctgtcctacctccacgggcacccctctgtccagctacccaaagcacacatctggaccacatctgtcagctcctcactggccttcctgctccaccatcaccatccctccagtctgctgcccactaggcatccatagggcgtctgttaagactggagtcagagcacctacttcctctactccaaaccttccatggctcccaccaccatcagaatagaggtccagctcctcaggctgccattccaggcctaactattggtttcccttccctgtttccaccagactaaatggagaccggcagtccccagaatgcttccatttcatcaccactaaacaaggtacacatgctggtcactgtccctgggacagccttccagatctcattccacaggattccagaaatgggaatccctcgatataaccccttgcctggattcaggatggtaagggtaagtgactcccagggcagggcccaggacccacgtgtgaggacaggacacgatcaagagtcccaggacaccaacatcccctctatctgggcttcaggatcctgagggccggaatcccagcgggtgagggcctggggcacactccacttacctgcgccgggcccatcagcaacgctggcaaccccattagaacctgtgggctgggcagggccataacaggaggcccagggctagccctgccgctgggccgaaccctcacacttccgctgggtgacggtcgcactcaggacctgtcttcccaaatgcaaaatgcgcgcaaggcctctgggcaccgcagggacgaaggctgggtatggagaccctggagacgcgtggcgctggctccactttcgggaacaccttggctcataaaagcagagtaattagccgggcactatggtgcgtgtgaaggcgcggtgacggtccctgcacccactcccgtgccctggtgtggctccagaggcctgctgtagcccaacccaccagcagcaaaatgaggaccgcaatggcggcgccggaagtcccgcctctcaatgacagctcggacttgccactggtccgagctttcattggctcaaggatccccgccgtctatgacgctatttccctatgcccgtcacgctactgctaggtcgttgccaaggtgattgaggaatggcgtttattgcgtcgctgctcaggcaacgcaaactacattatccagaaggaccctcgcggtgcctcagggctggccattggcagccgaggagacaggcacttccgggcggagtgtaagacgctggccaatcacagcctggcagcgggacttccgtcgtcgtcctcggaccatcactttggcatttctcgattttgtctgcttctgaagggaccgcgttgtcaggcgagggacggaatcttggaggctccctgggcccatggaaacaggagcgaggaaggcacgagagtcggggaagttccgccttcttgacatacaagcgcccccaccgcggcgaatatcgcccctgagcccagtgttcgccccccacaacaccgcaccccccttccccaccctgtgccttagataaagccggcccagtgggaccctcaggttgcaccgcgcggaggtgtccgcggctctcgggagtcgtcgcccttggcgttatgttggctttagggagcgcgaggccgaggccaagaaaagctacgcattgggaggtcttgacccagtgtgcgcccggctgtaggcatggaacgtgcgccaaaggtctcctggcacccactccgctggactcagcaccattgtcctaagtctccgattgagaagtatctgccccaggtcctctgcgggccccactgaacagtgtggagcgttcacaggttgggggtcaccatttcagaatccagtttgttgagacgtggagggtacaggaggagggatctgcatatgcgaagacttggacttgaccctgacctgagcgttcaggcaggctctcatgcccccttggcagcgagtggagagcgtaagaggagtcctgcctctcctggcacaccgagggcgcctgggagccatgaaaggtgttgaacagaaaagggatggacatgacctgagttagaatttggaaagtatttcagtggttgctgaatgaacacactactggagaaggtggttgtagtggggctggaagcagggagactgtgggggaggttattgcagtattgttccagacagttatgatagtggcctgtccagaacggaagcaagaaggatgggagaagtgatcagattcccagtggatcttcaagatagagctaatggaattttttgctaccttagataagtggaataagcatgagtaggggtgaaggaccatcccaagtagttaggaagaattaggatgcctcctgtggagaatagaggttggcagttggcaggaggaggatgtttcatggaagattagcgatggattttgtaggtatagagtctgaattgtctggagacctgtgagtggaggtgtcaaatgggcctctggatatatagaattctggtgtggcttcaggacgtccagactgcattatgttggtggcctggcccagtgaacggcctgaggataggatttgggaaggagggttttaggttggaggaccagtggctagggctcacgctcagtgcttagatcacatctgtctgcccattggcttggtgttgcagggcttaatgacctttgaggacagggtcagtacatcttccaagaatgtggggctccttagtgaggtccaagggggcttctacagtgacatgatactacagagctttgtactccagtgcccactaggtaaggctactgtgtctcctctttcccctacacatgaaatctaggttttcctccgcctttccattgttccctctgggaggtgctgctggccctggcactggccagtgtcctgctgtgtccggaattgtttccttcctctgggttcttggtctcgctgacttcaagaataaagccgcggaccctcgtgttgagtgttacagttcttttttttttttttttttgagacggagtctcgctctgtcgcccaggccggactgcggactgc

SEQ ID NO: 1561307 - DNA, 4001 bp, Homo sapiens
ctatccatgcaaatgaactgatgagtttttgaaaaattaggtttgttttgcctgctttaaagcttttaagaaaatttggttaagatttttccattgtaataaaatacttcaaggcaacttaatattttgaccaatcattaagtgctagtataaatttcccttactttgtacatacattttttagttccttctgcgtacttgcaaggtgtacactagcccttgcactaaaccagcctacctgatacatattcctctgaaggggagctgcagtgatccttcattagagatgttcatcaattctgcttacctgagggtttgggtaactgaggcaccaatgcactggttggggatgggactgctccacaggcagcgcccatgaaggcatgctgagcctgtagggtggcaaacctactgcatccctcaccttggtctccagtgcaggccaggctacttatgctctacagccctctcctcttgctgacactataagatataataaaattcctcttcaaaggtttagcctgttaacttccttgttctttgttctcaaacctttcttgttctccatgcctccttgcccctagttactataaacaaccttcctgtaagcactaaccaataattcacatctgttcccttactcactttgcacccattgcccccgccaaaaccacacgtcctacacaactcacatgtcccaccactgtaactcaccttccccttccctcttccttatttggaaaatactcacaaatacccaattggctcagcttagattaagcggtccgaccccagcccatgggggagtgacacagaggaaggtagggactatgggttagagataaaaaccccttccctcctttgttcagtgtgctcttgggatcgtgattaacacaggcagcacacttgcacagaagtaaattgccttgctgagaaaacttttgcctgagtgctggtttcactttgcagcaccaagcattgacttccaacaacaccatctagaatgctttcacatgccaggacccctcctttctggaaggaatcttaagtgtccaccccttcatccctggccttccaccctaaacccacctctcacttcagagaccacacaaaataacttccttgaaattccaccctctaaatctgatctactacaggctttgaccttatgcctcacccattgaagtctctagcacaactccctctctagaaccccagacctgcatgttcagctacccgtgatgaacctccagtgcagaacaccttagattcaccaagtccaaaacccaattcctgatgcccctgaaacgtgctccctgctgtgacttaccaatttccattctttcacacgttcaggaaggaaaacaggccaaaaaaaccctggatagccctttcctccctacattcactcacgaccacatctgatgcggcaggaaaccccattggttccatctttaaaaatctacccagaatctcatgacttccccacccaacccctcctgccactgctctggcccagccaccaccgcaacacttctggagtttgttgcagggacctcctcaaacgtctccttgcctccatcctcatcgtttctacctcactgtagtcggtttcctcctcagcaaacattggaatactttaaaaatcctttttcggatcccttccctccaccattcaaaacccgccatggctcctatcgtcctcgcaatgaaggagcaacttctcccctcgacattgcaggcctgactacggttcacacacgctcccgactgctacgggctcagtccagctccaaacctatgctcaggctgcccctctgccagtcacactcgcccccacccaccagcgccccgctgccttggacactggggcctgcgctgcagggactcagacaggcgctcctcatttggaacttcaggatttggggcgggcgaaagtctgggaaaggcagcacccacctgcgccgggcccatcaccgcggccgccgccatcacagttcgtagaccacccggagccgcgagggggtcccaggtcgcgggaccctggcaccgcggtcgtccgtccccgggggcgcaggcggggtcttcgctggcgagccactccgcagagcgaacagcgacttctcccgcaccctcccgcttccgtcacctcggaaccgcccagcaaccccgagcttctgctccgatggttccacctaagagccgacaagatgtccaccgcgaggaagataccggaagtcccgcccagagagcttccgtccgcagggagacgcccctaagagtgccgccgccgggcggcgcacaggtttctgggcaatgcagttctcatgtgcacttggccgtggtgacggctaactcccctgcacgctgggcaaaggccaaatggtactgcgaggggcgctgagaaattatgccctgagactctgaggtcagggcgtggcttcgctccttttaaaggaccctcaaccaggtcttgtgtagtgaggtctgcagggatccccgaaatattgggatatattcttacagatgttccctgaagccacaccaccaaatggacacacaacatccaatgtcactctgagtccactcatagttcagtcaaatttccttcatttaaaaaatatgtgtactgtagagggaagctttgagtcagttttgtgagcctcagttgggtcagagttaacagagaattgtccccaggcagggccatggagtggaagaatggtctccagacagtggctatggagggatgctggagctccctgaggcaagtggactaatatagagctcttcctctggtttcctcagaaaaaaaatacctgagagaaccatgaggaggaagacaggcgagagaaggtggtcaaggaaggcacctttcctgcctgtatggtcactaatgtccaaccaaaggagaaatattcttttatccaaatgagagttcctagcccaaaagttgagatatatctatttccttttggtgatgtttcttatctgaaaagaagaaccattataaatgcttttatatgccaagacaggggctgaaaatgtggtgtctgaacccagaaataaagatttggaaaattgggatcagatttcttggctgggaggtgattctcatttcacctgcaattacaccgacagtgtctgaattgagaattgagatttatttatggttttaaaaaagaaaagggcgagtgtatggggaaagaaagacaaaaacatttgtgaattgtttaaattactcaaaagttgttttgtgttttttttttttgagacggagtcttgctcagtcgcccaggctggagtgcagtggtgcgaccatagctcactgcaggctccgcctcccaggttcacactattctcctgcctcagcctccggagtagctgggattacaggcgcctgccaccatgcccggctaactttttgtatttttagtagagatggggtttcaccgtgttagccaggatggtctcgatctcctgacctcgtgatctgcccgcctcagcctcccaaagtgctgggattacaggagagcccccgcgcccggccaaattactcaaagttaataattctgtagttattcacagatacatgacgaaatggacctggagaaacatatctgtgataagtgaaaacggttaagatgacagcaaaatttgagcaggagacattgaattctgagaagtgagcaaatgaagctgagcacacagctgtgttagaactatgactacaagcagcgtttagtctccaaaatgtaattttatttatttatttaattttggagacaggatctcactgtgttgcacaggctggagtgtagtggcacgatcatagcttgctgcagcctcaaactcttgggctcaagggatcctcccacctcagcctcccaaaaagttgggattacagatgtgagccaccatgccaggcctcttttcattcttgaaaacactcaataatacctggaaggagaagtaaagaaaacatttagaaagtgctatca

SEQ ID NO: 1561308 - DNA, 4001 bp, Homo sapiens
agcacagtgagccatgattgcatcactgcacttcagcctaggggataaacaaagttataaagctagtagcagaagtctaaagactgaatctgggtggttttttttttcccccgagacggagtctcgctttgtcgcccaggctagagtgcagtggcatgatcttggctcactgcaagctccgcctcctgggttcacgccattctcctgcctcagcctctcgagtagctgggactacaggcgcccgccacccccccggctaatttttttttgtatttttagtagagacggggtttcaccgtgttcgccaggatggtctcgatctcctgacctcgtgatccgcccacctcggcctcccaaagtgctgggattacaggtgcgagccaccgcgcccggccaaatctgggtttgttttttaattttttagagacagggttccactgtcattcaggctggagtgcagtggcacatcatggctcactgcagcctccaactcctgggctcaagcaatcctcccccatagctgggattacagctacaagccatcgcaccagtccccttgtacgggttttctgacattcctacaggaggctggtttcttctggtggcttatgggtggggttaatgtcatcataaaaaggcgagttccgcccccttggcctccatgacgtctgaggaagcggcactcgatgcgccatcttggagcgcagagcatgctaaggccttcaacttcagactgcagagccggggcacctacaattttctgacatcacccagcctcaggtatgcaatgacggccgcacaaacataaagcccactcagacagggacccgtgcccgctgacctccagcgcggcgtgggcggtcctttcagaggcaggctgtggttggggagcttggcgcggactttaggaggccgggtgtgcaggtagaggccggacacgagtagaggctagatgtgcaaatagaggccgggcacgagtagaggccgggcaccagtagaggccaggtgcgcgagtagaggccagttgtgcgagtagaggccgggcacgagtaggggccgggcacgcaagtaggggccgggcacaaggaggaggctgagcgcgagtagggacggggtgcaaagaggaggccgggcgtgagaaggccgcgcgcgaggaggccgggcacgaggtggaggacacgcgcaaggaggccgagattctcaccgggtctgtggagacgcgcaccccaggggtcatgccctggcttctggcaggaacggctggccctgctctgtgggaaaggggaggtgagcagctggggcaggcagaggcggtgctcaggtccccaagccggggaactgcgccagagcctggggagctccgcggagagccgtccagggccccgcgtacccgtttaagcgcctgctgtgtgtggggcggccctccgctcggagaagggcagcctagggttttcccgcctgtctgagggaagctgaaggcctggcgggtgcggacacatatctgctgcgcagactctgagccttaacgctacagtgacaagggccgggtggttgcggtcccctggccctgggcactatgcctcagtttctctcttccatcaacaaaggtggcggcccagtgcccggtgtggggcagaggtggggccaggggcggggcgcgcgttccctcaggggccgtcggagcagctcctgtccagctgggcgttgggccccgccctcctctcagactagggatgccccgcaaagcctgcccccgccagccccgaaacggccttccccaggccccgggcagcaaaacggactccacacagacgcgcgctgctggaaactcgccccgccagggcctcaggaagatccccggaccccccgcacccggcccggcccggcccggcctggcctcccctccccctcctcgccggcctagctcaccctcctgactgcgagacaaaggccgcggcaccggcagccgacactgcgccggcgcgagcctaactccatttcccagagagccgcgcgcgcatttccggccgccctcccccacctcgctctcgcccttggcgttcgtgagctctcagtgctgctggagctggagtgactgggcctggtgaaacagggcgcgcggggtgcctgggcatcaacgcgggataagtgccgcttggaacgccgtgagctcccggcgcgaccacacgggctttcgtgttggaaactctaccgtcagttttactgctgcaaacaaagcaatgattttttcaaaacacatactttcaaccaaaacattcaccaagatcgcacacacgggagtctttgcattttccacactgaggcagccatggagacttcacactgtatttattacatggttataaggaacatcacgtgcaagacactaacaattatgacgactttggacattgctaggtaattgtcaaaattgtgcatttgaacagcagcaaaatattcaaagctggtgtgccctcgctgacacgaaatgaattgtcattttctgaacattcaccaaagcctgccaggcgctaggcctaggttcagcagcacacaatagtgaagcccccattcaagcgggcttcgtttcaccagcgtacgtcacacgtccgtggagcagcgagaccagaggagctgggaaagccagggctgagccttgtgcttttgcccttttaagggaggacagattaattccaatcagcctgggcttgggagctgtatttgaagcagaggaaaagttttaagacgggcatttttttttctttgactgaaacaactctgaaaacagcagagaacacaatacgaattctcgtaccacacacagacacttgcaaagatttggctggttaacacacaagttaagactttaaatttcataagccctaaaacagtggcaattatgaagagatataatggctcaaaatcataatgcactgatgtaaacaaagcaaaggcaagcttcttggcttttaagggcgtcctgtacattccaagtactgtaaagccccacatttgtgaccgtcgcactgaaagccagcctgcttttcactctacagcagtaaagaggctttccattatacataaaatgccgtttttcagttctcgaactcacaaacccaaatgccacaaaacatctttttgtgtattttttctttcacaaaatgtatactcttgccccccacccccacccccaaccgtttccttttactggatcaaaaggtatgaacacacaactcatggtgaagtctttttcccaagcggtctgatagtcctggtgagaagctgtcagtggtgccacactgagcctgctcagccctgatggtggccaggcggccctgcccagctccctcaaacttgcccctctgtttcctccctcagaccttctgatcctctgtttttctcagccaggtttctaaaccgtacatgcttttgcaggggcgggctctttctacaggggcaagtgctgcttggctccagccaagtggggtcgtgcggactggcaagcccagcgtcccaggtctggatttctctaaagaacccagagatcaggatttctatgtgaaatctcttgatttttaaaagctggtagggatttcaaaggctttaataacactctaccagtcaaataagatgagctggaggctactccagtgccacccttgctgtggtctgaacctcctgctgtctcttgtaaccactggctgggcccctctcagctccttcttggcttcctgtacgaatctccaagcagagcattgctggttgcctctctgtggcctggaacaggaccccccaccatgagcaggtgggctgcacatcagtacagcttccaagcaatcctgcaatcacagcatggatagcagaactgtgtcatgctgtatgttaatgttcaaaaagttaatctgttcaacacatacatttaaaatatactgtaacagttacagctccctggacatatttctccctttaaaaaaaaaatctttttgacagcttcaaaacct

SEQ ID NO: 1561309 - DNA, 4001 bp, Homo sapiens
cacaaaatatgacccaaagtgtctgaaaaagggggacaggatgtgggctgatacaaagttgtttgtcaggaattctcactgatttacagaagtaacattgataagcgcgtggctatgcactgttaagctatagggtgtgggttccagggtcccgtgttgcattagtaagttgattatacctacttgtggcaatagcagtttcaaaagatgaattcatagcttcagggagttagaaggtgattgctgtatcacttgaatgtctctatgtgcccgttcatttaaaaggacccacatttatcagacgaaaattatttttttgaggccgggtacagttacgcctgtaatcccagcactctgggaggccaaggcaggcggatcgcgaggtcaggagatcaagaccatcctggctaacaaggtgaaactccgtctctactaaaaacacaaaaaattagccgggcgtggtggcatgcgcctgtagtcccaggtactggggaggctgaggcaggagaatcgcttgaatccgggaggcagaggttgcagtgagccgacatcacgccactgcactccagcttgggcgacagagagactccgtctcaaaaaaaaaaaaaaaaaaaaaaagttatctgggagtggtggcgcaaaactgtggtcccaactacaggggaggctgaggcaggagaatcgcttgaacccagaagatggaggttgcagtgagccgagatcacgtcactgcactccagcctaggcgacagagcgagactctttcaaaacacacaaaaaattttcttttctcaatcctcaataccagcatctgattggctgaccaccagtgtgtctccaaaggatggaaactggggttgggggaggaaaagctgagtgcccccagaggttggctatttagaagcagggtatgctagatttatcctagtcccagggcattctcccagccttctatttcaactgtcctctaggaagactcacccaagacccaatattcactagatcctccaagagacttggcagctgtgggcagcttgagtcagccccagacagttttgaaacccagaaccaggaaaaaataaataggagggggcgctgaaggcatatcaccctgtaaagattccaaaggggaacctcaactcaaagacattctgatgaggtatctgtgcatagaggagacaaaaggacaagcacaaaggtttcttacagcggagtgtcaaggctatgaacagaaaacaaaccttgatgaaagagtaatccattgctttgttgaaaaataaacaatgaaagcacaatatctgaaatgtagaatataggagaaacggttgctaatgtcgtgaatggaaggggagaggttggcgtttggaaaagcgaaaagagaacaggaaatttggggatttactgcaagccctggaaacagcaggctgggggacagagtgaggatttgggaccctgcatcccatacacttagaaaactcagggaaaaacgggtgtcctctgtggagagaaaaggaactgggaacctcatacaccacagctccttccacgcacaagtcaggatttcccccaccccatgaccctcgcgtgggccccgcacaatctgaagagacttgggtcttcggggccggggccgcaatcgcggcacagggcgggacgaggacgcccggggtcccggctgccggcccagccccaccctgaggccgagggtaccaagggctgagctgcgccagagggactcggtacgcagacccagagtcgcccacgggaaggcccgggccgcgccacagccagttccggtcgtccaaccagcccctcctccctgtctcgggacgcagggcccgacacactcaccatttcctgactcccgggtgtcccagcttcctccctccggatcccaaggcaggtacaggaaaccgcgccacagagactccaggcgagccactctgggcctctgggactagcgaagcgaaaccaagtacggcagacgcgagaaatgaaaatcccgcgagaaggttgaacgtctgcagctgcgtccccgacggcgcgcctgattggaccgatcgcagagctcctccccggtgcccctgattgggtacagcttcgggctctgccccctgcatcttgacagatgtgaatgacaggagatgtgaagcatagatgagtgaagcgggaatgaggggtcttggccccagccctcaaacgcagggtggacttcttcccctcgtccccttcactgtacttggtctgcgggggatggggagatgggagatacttgcattttagcagaacttaatccgggtttaccaaaggagatacttcctgtactcagtgggtcatttcttcatctacctcttgcatgaggagtcacaggtgtgcgcagggagttccaggcaggactggaacagaagaaagggcgtgatattcccagggatcggaaatttgggatgaggatatgggaagcgtgcccaaggctttctcataccatacctctttatctctctctattttttactttatttacttatttattactttatttacttatttattactttatttatttatttgagacagggtctagctctgccacccaggttagagtgcaatggcatgatcatagctcactgcagcctccatctcctgggttcaagcgaaccttccgcttcagtcccctgagtagtagagactacaggtacatgccaccaagcccggcaaattctttaattttttgtagagacgggatttcgtttgttgtccaggctggtcttgaactcctagcctcaagtgaacctcccactttcgcctcccaaatcaatctactcattttcacccaagaaaataaaaaactgccaacaagtgaataaaattattaaatacatggaaaaacaagttctatttccgtaatctgtaaagaaatcaaaagggaagtaaagcgaaaatttgaactagctcagataagcagggcacttcagaacatttaaaaaggaaaagatgaattcagaaggtagaacatattcccaagcttaagagtcagtgactgctgaagtggagccacagagtacattagaccctgatgatgaggcaggaaacctaaggatttaactctgggagctcaacatgccctcctgtcacagcatcacaatgtgggaacgctccctccttcaataccttaataatttacaccagcagaaaactctcacctgtggtcaatttaggccccttgaaattccaacctctctagctcataaaccatttctctggaacgctacctaaatgagtctctaaatatgatctttacatattttcttcatatatacaaattacagcctgactgcagcaactctatacatagaaaaatcaaggccgggcacagtggttcatgcctgtaatccccaacactttgagaggccgaggcgggcggatcacttgaggtcaggagttcaaaaccagcctggccaagatggcgaaaccccgtctctactaaaattacaaaaattagccgggcgcctataatcccagcttctggggaggctgaggcacaagaatcgcttgaacccgggaggtagaggttccagtgagccgagatcgcgccactgcactccagcctgggtgacagagcaagactccgtctcaaaaaacaaaaagttttccggaaaactaccttgggaaactagaggtacaacctcagaaaggagagaaacccgcacgtgcatttgcctgtgaagttcctgctttccagggctctgcagcttctcagaatccacactcctggagctggagctggagctgttcggagcagctggagactacctacaggggaaggcaggctgcccaggaagcaatcgggggagctccctttccctccctttgcaggctccagattagtctcagtgtggatcaccggcctcaggctatgctgccccctgcaagttttccacctgcttttcacccacattgttcagttccacgaggcaaacaccctcaatcccagtgttcgaaag

SEQ ID NO: 1561310 - DNA, 4001 bp, Homo sapiens
ataaaagatataatctacaaataaccaccttagaaaaaccattatttattgattattttatacaaaaataattagtattccaattctgaaaaactatatactacacctttcaggatagggtacccaaactagatatggtacccaaactgacatatcagcatcaaaagaatacccacaatcagccaggcgcggtggctcatgcctgtaatcccagcactttgggaggttgaggcaggcagaccacctgaggtcaggagttcaagaccagcctggccaacatggtgaaaccccatctctgctaaaaaataaaagaattagccgggtgtggtggtgggtgcctgtaatcccagctatgcaggaggctgaagcaggagaactgcttgaaccagggaggcagaggttgcagtgagctgtgatcatgccgttgcactccagcctgggcgacagagtgagattccatctcaaaaaaaagaaaaaaaacaacaacaaaactacccacaatgactctagacttaggaaccttccactggttaattgctcagagaaaaacacactgacctattacaaccacacgaggaaagaaaaaatcacaacatacacttacaatcagaatgtatcaaagtggtgtgtgtcataaacatcactctcacaaacacctcaaagcttaccacttagccgggcgcggtggctcacgcctgtaatcccagcactttgggaggccaaggcgggcagatcacaaggtcaggagatcgagaccatcctggctaacacggtgaaaccccgtctctactaaaaatacaaaaaaattagctgggcgtggtggcgggcgcctgtagtcccagctactgggaaggctgaggcagaatggcttgaacctgggaggcggagcttgcagtgagctggagatcgcgccactgcactccatcccgggcgacagagcgagactccgtcacacacaaaaaaaaatgcttaccacttatatacggaacaaatgacatacagagattttgcatcatcatggcactccaacataggcgaaatctcttgggtagaaaccacacagataaacacacacaaacaagaaaatttaaaagaacctgaacaagctcacaattaattccatccagaaaccaaagaaactaaaaatcgcacacattcacgcaagggaacaaaattacccagagcgaagggaaactggaattaagggtggctagaattaatatttgatcaaggagtccaaagggaagaaacacaaactttctgatcagttaagataaggagtccccttccccgcagttcgaaaagaaagcccacattcagaaggtcaaaaacacccccagacttgagtgctgggagcactagagggggtcagtccctggtgatgagggcaggggcgtttgaacagccacaggaacctgaccccggcagcaaggacctagccaggcttcggttctcacaagtgaggaaacgcacccgtggattcatcgtaaggtttccaaccaagtggtttcttaaacgcacaaaccccacagaccgagatgggatctccccaggaccctcccgctgtcaccgaacaatccggggagacgcggggctgcgggcgcagagctgcccatagagggctccaggaccgggggccgaggtcgccccgcggggacgggacaggacgctggggctcccggctgcgggtccagctcccacagagaggaccgagggccgaactgcgcccgcggtggcccccgggtctgcaaaccccggagttgactgcaaggaggtccccggcctcggccacagacggttccaaccagaaacctcccctcggacactggccccgcacactcaccatttcccagcgtccgggaagtcacggtgtcctccctacggatctgtcagtacctgcaggtcacggcgcgacaaaggatgcgctagagccaccttcggccttcaggagcaggtgaaacgcaatcttcccatgggccaggaatggcgacgtccgcactgcgcaggcccagcgtggcgccgctcacatcttttcagctgaggtcctgattggacagatccaatggccccgcctctttatcactgagtgacagcggagcaggaaggggcgtggttgagctggcctggcttcagtccggcttgtccccgccaggacgtttgcgtttaaaccgaatgtgttctttgcctcccatccattttaagtgttctcttcagtactgttaaatacattcacattgtgaagccaatttccagaattgttttcatcttgcaacactgaaatctgtctcgttgcacaactccccgtgcacctccttccctcagggtcttttgcaacctccattccattgtctgagttcgtgaatttgactgtgggaatctcatgtaaatggcgtcataaagtatttgtcctttcctgacgtgcttatttcacttagcataatgtcctcgagcttcaccttgtagtatgtgttaggatttatttcttctttttttttttttttttgagacggagtctcgctctgtcgcccaggctggagtgcagtggcgcatctcggctcactgcaagctccgcctcccgggttcacgccattctcctgcctcagcctcacgagtagctgggaatacaggcgcccgccaccacgcccggctaattttttgtatttttttagtagagacggggtttcactgtgttagtcaggatggtctcgatctcctgacctcgtgatctgccggcctcggcctcccaaagcgttgggattacaggcgtgagccaccacgcccggcctcttcttcttttttttttttttaagagacagggttttgctctgtagcccaggctgaagtgcagtggtgtgatcattgctcactgcaggcttcaactcctggattcaagcaagcctccaacctgagcctcctaagtatctgggactacacgcacgcactaccaggcctggctaattgttttaattttaattttaatttttggtagagatgtgtgtctccttctgttgcccaggctggtctcgaactcctaggttcaagcaatcctcctgcctcgacctctcaaagtgctgggattacaggtgtgagccactgccaccggccaatttacttctttttttttcctttggagatggagtctcgctctcgttgcccaggctggagtgcagtggcgctcagccaccgcaacctctgcctcccaggttcaagtgattctcctgactcagcttcctgagtagccaggattacaggcgcccaccactactcccggctgatttttgtattgtagtagagatagagtttcaccatgttggccaggctggtctcgaacgcctgacctcaggtgatctgccctctttggcctcccaaagtgctgggggtgtgagccacctcgcctgtccccaatttacttctttttaatgctttatttaaacattttttaaagagttcctaaattagtcagttcctaaatctacatacaatagaatagaattgtattctattgtatgtagatatcaaatttctggatttttctggatctatttatctttctttctttttttttttttgagacagtcttgctctgttgctcagactggagtgcaatggcgtgatctcggctcactgcactccacctcctgggctcaagcaatccttgtgcctcagcctcctgagtagctggggttacaggcatgtgccactatgcccagctaatttttgtaattttagcagagatggggtttcgccatgttgcccaggctggtctcaaactcctggggtcaagagatctgcccaccttggcctcccaaagtgctgggattaccgcatgagccacctcgcccggccttatttatcctttcctggacacctaggttgcttctgcctttggctatggtaaataatatgtctatgaacatgggtgaacaaatatgtgggttgctgctttcagttttttagggtatgctcagaagcagacttcctggatcatatgattactttgt

SEQ ID NO: 1561311 - DNA, 4001 bp, Homo sapiens
cactgcaacctccgcctcccaggttcaagcgattttcctgcctcagcctccgcggtagctcagattacaggcgcccgccaccacgcccggctaatttttgtatttttttattttatttttttttagtagagacagggtttcaccatgttggccaggctcctctcgaactcctgatctcaggtaatccacccatctcggcctcccaaagtgctaggattacaggcatgagccaccgcacccgaccaagatcacagtaaattaatacattcacttaagtttgcgcacacttcttaatgtcacatggtatatttatttgttcacatttgttatgccccttagtagtattttaaagttctttcctaatagttctgaacctttaagtttcttccacaatactttatctttttactgctattgtaaatattagttttcttcaactatgtattctaactgatatttgtaaattagaaggctatttatttatagatattaacttggtacccaattactttatttaactttttgtaatttaaaactatgtcaatgacgacagcgggggcggggtgatttccttagaaaacgcatctttggagacgtcagtagcattctccattacttcacaaaatccatacaacctgagaacgcctcgactcattaaggaattaagacacctaggatttagtccagactcatagataaacactgcaacaattaagctttcttcaaaaaatgaggataactgtgcctaacctaaaaccgttgactccctcatcctgggcgccgttatatgggattgcttctcaaagcgtacaatgctgtttagtctagggctttgcttaacagccctatttaagtaccccaaagatggggatttgaatagtctgaagtaggcaccccgaaactaaagttccttcgaaacactctcgtttaattaaaaaaaaaagtcacggtgatttgcatgccactccaattaaaaagaaatgcttttatataaaaactcgttttaaaattattcaccacttagcttttccaccccttcaattttcaagtaaaaaagacgctccaggaagatggcaccgttataattatcagcactttcgacaagggaagtgcagctcaaacgttatacctcaatgctggtctcctacatctccctcttaggcacaatcacacacaatcccgcacccagtttcacattcactcaacaatcccaaacatcaggtcaaactttgaggacaaactcggtcacactcgctcaaacccgcctcagaggcccccatctccgccccgcacgtaggccagaagctcttacacccactccctgccctcgcgccgcgcccctaaagatcaggaatcctcccctttaacctccccggtccgaccgacccgagacgcccagatcccacctcctactttcgcgccacgtggacccaggggccgtactgacccgcggacaaagaccaaaatgtccactcggtgcgctgcgcttgcgcactcggagagcgaggaagcactcccagaagtctccgcgacgcggcccgcctcggtcaccgcggccaggcccaggctggtactgaattaccttctattaccagcaacgtcgcttctcaggccttggactacatttcccttgaggctttactggtcgactctctgtctcctcccctccccccgcgaacttggccgcctccttctgtgacgatggagctcttgaggtaagtagtcctttagcgtcagatgacttcaagcttgctggaaggtctggagtggcgacgccctctccgaagactcgtgggcgcaaaaatgtcaaaacgagccaggccccgactcagagataagagaacgccattctgtccgtggccgatctagctctggactacaattcccagagcccacagcggcctgacgttacgtcgttcttgacgtcgtggcgagctagttagctccgcaaggacccggacgcgaccaggggaggcagaaggtgaggggtctgggagtcctgggcggggccggggcgtgtccggagcctcgaatctgtgcgcgcaggcgggagctggctgcggatgcgccgttctgaatgtgtctttgtggctgtgtggctgggtgtgggtgtctgcaactgtgcacgtgtaaccgcctgtctccagggtgtctggtggtttttgtgtaaccatgtgtgatagagagtatcggggtgcagggtccttgtgaccgggggtgatactgcgtgtgtccccgttgtatatgtggcctgttcgccctgttcctggggtgtgagtacagttgtgactgtgtgaccactgcgggtgtgcggttgtgattcatgtctccaaggtgtgtgcgtggttttggttgtgtgacactgtggccgtgtgcaattgcctgtgcctgtgactgtgtggtgacgccgcttgtgtattcctgtatcccttggtgtgtgtgtttgtgtgtatgtgtgtggtgctgtgtatgcgggagtggggtgccactgcttgtgtgggttgcttgtgtgagtgtgactgtgtgtatgtccacagtgaaagttcagttgtgactgggtgccgtaaagtaccagtgatggcgtgtgtcccctgagtgggtgtgtgactgtgactatatgaggcatttgtgggtgttggtgtgtggggcttgtgactatacgggagtaactgtatcacagtggagagtagattgtgtgactgggtgtgtcttagcgggtgtgtgattgtgactggaaagatattgtgactggaaaggtatagaggtgtctgtgattgtgtcctgtgtctcaggagtggatgtagggccgggtgtggtggctcacatcagccctttgggaggccgaggtgggaggatcacttgagcccaggagttcgagaccagcctggcctgtacaaaaaaaaaaaaaaaaaattaatggctggcacggtggctcacacctgtaatcccagcactttgggaggccgaggcgggtggatcacctgaggtcaggagttctagaccagcctggccaacacgataaaaccctgtctctactaaaaatacaaaaattagctgggcgtggtggcaggtgcctgtaatcccagctgctcagggggctgaggcaggagaatcgcttgaacccaggaggcagaggttgcagtgagccgagatcgcgccatcgcactccagcctgggggacaagagcgagacttcgtctcaaaaacaaacaaacaaaaaattaaaaattatctgagtgtggtggcccacacctgtggtcccagctacccgggaagctgaggtgggaggatctcgagcttgagaggtcaaggctgcagtgagccgtgtttgaaccactgcattccagtctaggtgacagagcgagaccctgtctcaaaaaaataaaagagtggatgtgtggttatgtttgtgtgacactgactgtatgtgcagcaccaagtgtgccagtgactctagtgcttgacccatgcagaacctttgaagttaggacagattctggccctggacaggagtgacctcagccttctgagtgacactggatttaggcagatgcctggtgttctgtgaccacacttccctatatggtaggtaaggaggatggtggttcaaaaatgacctggttgttcatgattccttgctcttaacccttctccaagaaaggtgccaagttcaagtacatcaggttttattcttatttctctgaaatccttcttgtttttcaggacatgcttttctttccttcttctgaaacttcagaaccaccccaccaccaccctcacccctaccaaagtaacctggtctccagtatttgccataggagtaatttactgcgtgccttggagatggactgaaaggcctatatcctccctgctccctgcatacctaatgttcttttaaatttttttctttacttttcattttgaatttaagactttaaaatgtagcaacaatagaattcccatttgctctttttttttttttgagacggagtcctgctctgt

SEQ ID NO: 1561312 - DNA, 4001 bp, Homo sapiens
tctgaagcactccccagatttccagacctgggtgttcagccacctacttaatgcctacttaatgtctctgaaacatctcaaactcttacatgaccaaataaagctcctgttgtctccagtgaatattactgttaataccaacttctccatctcagttgaagaaccatggggtcatcgctgaatcctgtttcactccctcgctgtctacatcagaaaatttagttgctccctttaaaaatttgcatccagaatgcaacacatctcctaatcaatgactctggtccattaccctggactggctgtagcttccactctgatcttctttcctcttccctcaaccccacagtctgctctccacgctaacgggatggaccctgttaggactttggtaagatcacctccctcttgtaacccaaatctctcattacctccagaataggtacccaacttctcaggcagccactgcagtcctgactccttccccctgctctttgttcccagctaaaaggaaacagatctatggtttcctcaaaaatctcagcttagttttactaagcacttgcgcctcctgataccagtgccagagataacctttcacaagtttccactggctgacaaaaatgggaacacctcagtataacccctgtaacctctggcatggacttaagagccctgggcttggaatttctccagggcaccagacccaggattggggtaacagcacttaagaatactaggaaaccacaatcccaagaacatgggggtagaggctactgagggaccgaacactctccacttccctatgtgagttccatacgcccttctacaactgggagaaccagggaaagaggaatgcatccctggtgaggctagatgagctcaagcctccctgtagccctgcctggccctgaactcaggctggctgttttactttctggtctcagtgctgtcacctcttgccaactgtagggcaatgaaaaaaagatgtagcctcccactatctcaatgtcctcatcgccccatcgctgctcttcctgtgaacagtctttggaaaagtttttaaaccctaacatagggcgggcacggtggctcacgcctgtaatcccagcactttgggaggccgaggcaggaggatcacttgtcaggagttccagaccagtctggccaaaatggtgaaatcccgtctctactaaaaatacaaaaaattagccggacgttgtaatcccagctgcaggcttgtaatcccagctgctggggaggctgaggcaggagaatcgcttgaacccgggagtcggaggttgcagtgacccgagatcgcgtcattgcactccagcctgggcgataagagcgaaactccgtctcaaagaaaaaaaaactaacataaatggcgtccctcctttgttcagaactctccgtggcttctagcatcctcacaatgacagtacaaccctaggagtaactccgcctcatattcttcgttccctgcagaaaacagctttccgaattctcctggctcagtcgcgcctcaacctttgcacgcgccggttcctccgcctgtcacgctctcccacacctcgtcacacgcagtgtcaaaaaaagggccccacccacgaacgcctcagtgtccccgaccctgggcagcggggactcgagcaggcgcccctcactgatggctttagaacgtgggtgggggaaggtgtgtgaggacgggaagacgccgcactcacctgagttggcgtcctcagagtggccgctgccatcagactctgcgggtagagctgggccgggagcgacgggcgacattggtagggacccggggacagcggtccctatcccaggcctgacgtgggtcccccagggcggcgtcgccaaggcttagacgctttcgtgcaggagggacgacgactcccctcacgccttcgtggccccaactcggcgctctgctatctctgatccggtgaacacacctcagagaagctaaaatggccgccacgaagaggcccccccaaaagtcccgtcctttctttttgtgactctcaaggaaagtcggttttctgagctcttactggcttagtagcgtggcgttcaacgcagagcattctaggtaatgtagttttcatagatcccgaggtgggtgccggggaccctttgcaccaacctcttggagtaaaagcgaagctccagggcgctgggcgatgagaaatggcttatccaagtcctagggcagtggagggacttcgccctttcttaaatgggtcgtaatcagacagcatattagaggtgccatctgcaactgatcacccaagtgtttggggaatattatttcaaacttcataaagttcagcaggctcccagaggctaaaattattatcagacgctccctaaggctgccaatccaaatatgtacatcattccatagagccattcagacacgaaatatatccactagtagggaagctaataaacattaccatataagtttattcctttttttttttttttaagacaaagtttccctctgtcccccaggctggagtgcagcggcgccatctgggatcactgcaacctccgcctcccgggttaatcgattctcgtgcctcaaccttccaagtagctgggactataggcgcgcgccaccacgccaggctaattttttgtattttcagtagagacagggtttcactatggtggtcccaaattcctggccccaggtgatctgcccgcctcggcctctcaaagtgctgggattacaggcgtaagccaccgtacccagcctctatcatattacatttcaaatgtatgcactccgaagcattgaagtcagtctgtgcacttttggtcagggacaggtgaaaaactacttcagatagtggcatgatagtgcttctagaagatagaagagaaatgttagatcaccttgaaacagtagtacaaaggtagaattctgtctgattccaacagaaaacatcttttgcctgcatagtcaattattgtgtccaattactgtgtccagtcaataactgtgtccaattcactgagcaacgcttttatccatttcataattcttacttgatatctgagatatattccttctagaagtctaacatcaatctcaaaaaacaatgaaagaaatgctactttgataagagacaaaggggagaggtgggacttcttaatcagaaagccggtgaaatgcacttgaaggaagtgagaaatgagccatgtgggtatttttagaataaattccaggcagaagaagcaggttactagagtgcctggatggatggagacttcacagggcatttcagcattggagggcctagggctccaacccagcaggccttcatctgctttgctggctgcagagacactcagggtatataggtgagaaatctcttcttttttttttttctttttttttgagatggagtttcactcttattgcccaggctggagtgcaatgacgcagtcttgtttcactgcaacctctccacctcctgggttcaagcgattatcttgcctcagcctcccaagtagctgggactacaggcgcacgccatgacacccagctaatttttgtatttttagaagagacggggtttcaccatgttggccaggctggtctcgaaccactgacctcaggtgatccacgcatctcggcttcccaaagtgctgggattacaggcatgagccaccgagcctggccgagaaatctctgctgctttgttataaagttttggagccgcaaaataaatagcactcgaatataaaattttctttttaattctcagcaaggtaatgtacttttttttttttttttttttttgagatggaatcttgctctgtcacccaggttggagtgcagtggcgcgatctcggctcactgcaagctccgcctcccaggttcacgccattctcctgcctcagcctcccgagtagctgggactacagttgcccaccaccatgcctagctaattttttgtatttttagtagagacagg

SEQ ID NO: 1561313 - DNA, 4001 bp, Homo sapiens
ctattaatctaattttaaaatgctccacaatgatatggttccacaatacaaaatccttataaaaagtgaaacaggatgttgacaaatttttaaaagactcctacagaagtccaagtctatgagccttgctctcaaggtcccttcaatcaagtcctaactctctttccccacctgattccagctagttcctctacctcaatgaaaatgtatccaagggatgatcaactcaggctctgacccaaactgcctaggttccagctccagctgtacctcattctactgggaactaagcaccaggtgtctcactcccatatttaaaatggaaaagagcgaccgggcgcggtggctcacgcctgtaatcccagcattttcggaggccaaggcggtcggatcacgaggtcaggagtttcagaccagcctgaccaaaacggtgaaaccccatctttactaaaaatacaaaaattagctgggcgtggtggtgcgcacctgtaatcccagctacttaggaggctgaagcaggagaatcgcctgaacctgggaggcggcctattgcactgagcccagatcgcgccactgcactctagcctgggcgacagagcgagactccgtctcaggaaaaaaaaaaaaaaaaaaaaaagaaaaagagcaatacctttccacagagccatggtgtggcgtaaatgtatttatttccataaagcccttagaattaagttaccaattaaggtttaattattatcaacacccatgcccaaggacacatcctatacactcttggttgaggtgaacatctctgtaaaagaaaaaaccggcccggcgcggtggctcacacctgtaattccagcactttgggaggccgaggcaggcggatcacttaggaccacaggttcgagaccagcctggccaacatggtgaaaccccgtctctactaaaaatacaaaaattagccgggcatggtgacgcatgcctgtaatcccagctactccggagctgaggacagagaatcgcttgaacccaggaggcggaggttgcagtgagccaagatcgcgccactgctgcactccagcctgggagacagagcaaacctcattctcaaataataacaataataaaaacagactaacaaaataaataacttttttttaaaaagagaaaagccaaagaccactcgtgtagacagctttgtcctcagtagccaagtccctccctgcagctcttttagaaaagtcaggctggggaaggagaaagctgtcaaacactctgcgtcgccgtcccggatacaagttaaatgctcctctcccttcgtgaaacgtggatgcaacccacgccttcctaaaaagaggtcagaggcgtccgggatcatccagagccctgccgggctccaagagaagggccggagcagctggagctctgaccccacccgggcacctgaccacttcgcgggaaattaacaggacaccaagtgacaggagctgttaagtctttgttttataccacaactttcaactcctaaaacaattctatcaggatggtcctgaaatcctcatttaaaaaacggcaatgggaggtacagggagattaagtaacaccccacgttatatcgcgagaaagaggtcgcacacttaagagtggagggaggcggactgaacgaggtcaaacacctggaaaaccctctaaacaggcacacaagactagacagagttcttccccgccccccccgaacccccgacgactcctccggtggacctgagtacagcccccaacgccagaaggctccatcgacggcaacgaaacttccctcccacccctcgcatctccaaacctcaggtcttctccagggcttcttacccccttagttgaccccccaggtcgttaggcgcccctaataactggttcactttcgcaaagacccgcaagacacatacttggctcaaaccaccttgttaagtagcagtgtcctgctcggagaccggaagtgtcgatgatgccacaggcgtctggactacacttcccagaatcccccgaatccgcctgcctgagccaaagttcccacgactccacagagcaaatggactccacttcccagaattcacaggtcctcctgcctgggccaaaattcccacgcctcccaagctactcgcgaaacgcctgcgggagccaaatttcctgcgcatcgaccgggcaattagactcccgcaggcgtttcgctggtatcttgggaaatggagtccatttgctctgtggaggcgtgagaattttggctcaggcaggtggacctgtgaattctggcctatcaacctatatttttattttaaaaaaatggagtctcatgttctatatcaatttttctaaactaaaaaagaatacttttcatggttttctttagataaagtgactgtgccaaccacagtatgaggaacacttctctgaaaattgagtgactgctatttctaaaccagttacagctgtatccttgctctgttctgccctcccaagagataaaaatttattgacacgctcaatcgtagtaggcaggaaactgtgcctaatatattagggtatatctggcatcaaaggccctttctgtcccccaggtccttgcactctgggcctgtgatgggaggagaagctgccataatctgtgaaatgcctttggggtcattcttccattgtcttggacaataggtcctggcttcagttgacatggccaatccatactaaattcatgaattagttagttgcttaaccatacccttgtattcttcaggtttcctgtttttttttttttccaaagtagataggctgtaaacttttaaaaattttagttctgtttcccttttaattaataattatttcagtcattcctcacttcgtgcctttcactacgggtagtcaagatgattcaagcaacttcaacactttgattagaaattaattcagataaacaattatatcattcacaaattctaccttccataaaacactagcacctgaatataattcagccaaattctttgtccctttataacaagaagctctcttctcttccaataacatgttcaacatttctgactgaggtcttcagaatggcctttactgtccatatttctaccaacattctgatcatgactacctaggtatgctctaacaagattgatgttttctctacagttcttattctctatttctgagcgctaaccagaattgtccttatcagtccattcatggcaatgtaggcttttcctagcatacatgtaaaaactcttctagactctatccattacatagttccaaagactgctacatttttaggtatttgttgcagcagcaagcccacctctcagtaccaatattttttagtcacaaaatatcatagcctgcctggcttttattttattttattttattttattttattttattttattttattttattttatttttgagacggagtcttgctctgtcgcccaggctagagtgcagtggcgcgatctcggctcactgcaagctctgcctcccaggttcatgccattcttctgtctcagcctcccgagtagctgggactacaggtgctcgccaccatgcccggctaatttttttgtatttttggtagagaagaggtttcaccgtgttagccaggatggtctcgatctgaccttgtgatccgcccacctcggcctcccaaagtgctgggattacaggcgtgagcgaccacgcccggccggcttttaagcaacagaaatctattcttcacagatctggaaactgggatccaagatcaaagcactggcagattttgtgtcaggtagttggccactttcttgttcatagttagcaccatattgctgtgtcttcatttggttgaagtgacaaacaagctccttctggcattttttataagggtattcatcccgtgacctaatcaccctccaaaggccccacctcctattaccatcacattgagggtaaaaattacaatatatggattttggtgggcca

SEQ ID NO: 1561314 - DNA, 4001 bp, Homo sapiens
atttaatatgtatatgatatattaactatatatggaattctacaaagggaaaaaattgaaaatatatcacatttagaaaagaatgacatgagccaatacaggattccacaaaagcttacttcagcaataattacatatagaaaaagagactgaattagataagcttcatctcaaccttcagcatgaactgtgagatgaaaggtaaatacaaggcaccaggcagtgacacagccagtcactccttgcctctcttcactgcccccaccctaccccatcctcggaaacaggaagagggagacccataactgaatgaggcaagtcactgcccaatggctaaacagcatgggcaaatgaaagctagcctcttatgccataattgtaaaatgcacaagccttttacacagagctttgtaattctcatccttatatgtagaatttaaacaattagattacaatttaaatgtaacacattataaatagagaaatcaaattgtcatatccaatctcaactcacctctcacctggccccagggcgcccctctttctttataactatgtgttcctctcccccattttgtgcctctcactttcaccttgtctctccagcctttttccccttttatcttccccctaggattctgacgatgttgtgcctcttttttcttctgctgtttctcccttctttgttttttccccttatatctgttctactccattcttccaatttgtttcacctcttgtggcgttttctttccaatcttttcatcgtcccaatctccatctatttctgcctctttcttaccccatctccgcgcctcctctgctctccctgttaaatcccctcttccctgttacacccgcttatccccactctctggcactcccagatcccaggcctccctgtgttgtggtgctccctctgctcgccttgtcaccagctgtcccctccagctgtcccagcaccacgcagctctgtctgccctcggccaaatcctttctcctctcccccactctctgtctgaggaggctccttctttgctgtccctctccttatcttgttgtcctgcatctcgggacatcgagcttttctctacatttcgccaattgcttttctgcccctgctactttcttgactgcttctttcactctgtcgctgcaaatctctcacccatcctccactttgccatctgtttatgggtctccctcatttttcttttctctttcttggtttttccatctcctctcagtggctctttgtctctctttctcctgattcccttgggccacacattcactggagggtttgtagtaagatgtctgcatgttggaggagtacattttccagggggtggagctgggcaggcaaaaacaccgggtgtcacaggacgggccccgggcacctccccaacgagggctcaagggaagcggtgactgcgaaggggaggcctggggagcagcagggcccggcacgaggaggagggaggtggggggcgacggcgccttaggacaggggtgggatgtgcaggatcccaggaccaggcggaggcgcggcctccccgggactgggtcggcggcgctgcgctccaggggccgacgagagcgaggctgggaggcgcccagggcaggcggtgaggactttaagcgatgcggggcgggaggaggagtcagtaaaggattttaagcaggaaaatcctgcttaaacgtttaaaaaaccgggaaaggccgtgtttacttggcccaaggcagaaagaccgggggcagggaccagcctcagggcgactttaacccaaaaggaagcgtctccgggcccacacagcaaggcctatttacctgaggtggagggtgcggtgcggagattttaagtccgtagcgacccccgggcatcgggtgtgcgaatgggggacggcgaggcgcaggttgagtctacacagaggaacactcatacgccatggtgtgatgcttgctccgcacgatccacttccgggtctgtgggcaactgcgcgaaggaaagcgaccgagcggcccggggcggggtccgagatgggcggaaccggaaaagggcggggcgttgagagagccgggctgaagcaggggccgccaggcagggaccccagggaaggaacggggaggagccaccggggaggggtggggagtgaccaagtggagggacccgggggcgggccggggaggagccgccggggaagggcggggaggaaccgcgggaagggaccgcgggggaggaaggcgaagggaccgcgggggagggaggcagagggaccgccaggaagggacccgggggagaggcggggctggacgggacacgttagggtctgcgatttcgtgtgatgcccacagcccagcgcccagagccatctgtagtgtcttgtggaacggcgtagatgtttcaaacggtttcaagttaaaagcacagttgtgtaggttattttggaaaccaaactgctttcctcttagaatggaggcggtttatgttgaaagcattttttgctagcgcgtttacccagtaatgttattgacgctgaagcagcccaggagtctgggaacatgggttgacacggagcggtgatggcatgctggaaaagtttctgcgattaaaattaagtaatttaaaagccctgaaattagcagtaacttttaaaaaatagatataaattgcattgtccttttttatacttactattctattccgtgcgagatgacaacctcaaacgcctatactttttttttttttttttgagccggagtcacgctctgtcgtccaggctggggtgcagtggcatgatctctgctcactgcaacctcggcctcccgggttcaagcaatgctcctgcctcagcctcccgagtagctaggattacaggcgcccgccaccacgttctttagcggagatgaagtttcaccatgttgcctaggctggtctcgaattcctgacctcaagtgatccacccgcctcagcctcccaaagtgctgggattacaggcgtgagccaccatacctggccccaggaactactttcacctactgaatatatattaagtcctttgccacaaaaagataatatacataatttatctcagaacaattaagatatttaccactgtaaatgacaaattcagacttagagaaggaagattttattcaaaaggactattgcaatagagagaatgttccaatcacaagatctgaaaatgtccaagagacacaaactaaaaagcttttttttctttttttcatatatggaggagtaaacaaggctagaaagcacaagcacaagttatgaggctgtggatgagcacttggcatgactacagttattcagggaaagtttgttatgttatgttatgttatgttaaaaatgttacatatttcttggagagagtcttgctctgtcacccaggctggagtgcagtggcgtcatctctgctcactgcaacttttcatctaccaggctcaggcaatcctcccacctcaatctccccagtagctgggactacaagcacacgtcaccatgcctagttaatttttgtactttttgtagagacggggtttcgccatgttgctcaggctagactcgaactcctgagctcgagggatcccccacaccttggcctcccaaagtgctgggatcacaggcgtgagccaccgtgcccggtctatttattttttgagagagcatcttgctctgttgcccaggctagagtgcagtgtcaagaccatagctcactgcagccttcaactctggaatcaagtgatcctcctacctcagtctcccaagtggctgggactacgggtttgcaccgccacactccactaatttttttactttttgcaaaggcggattctcactatgttgcccaggcaagtcttgaacttctagcctcaactgatcctcccgccctgatctcccaaagtgttgggattacaaatgtgagcctggctcatcatggaattcaagaccagtttgggcaacatagcaagactcc

SEQ ID NO: 1561315 - DNA, 4001 bp, Homo sapiens
ctcaagcctctaatcccagcactttgggaggccgaggtgggcggatcacgaggtgcagagatcaagaccatcctggccaaccatggtgaaaccctgtctctatcaaaaatacaaaaattagatgggcatggtggcgcatgtctgtaatcccagctactcgggaggctgaggtaggagaatcgcttgaacccgggaggcagaggttgcagtgagccgagaccacgccactgcactccagcctggcgacagagcgagactccgtctcaaaaaaaaaaagaaaaaagaaaaatcaacattcaacaattattaagtgaataaatttaactattggttacattcatttctaactgccgacctatgtgtacatatttagaaggatactggttcattagtggttaaataaatgttttatacattcggccgggcgcggtggctcatgcctgtaatcccagcactttgggaggctgaggcgtgcagatcatgaggtcaggagatagagaccatactagctaacacggtgaaaccccgtctctactaaaaatgcaaaaaattagcctggcgtggtggcgggcacttgtagtcccagctactcgggaggctgaggcaggagaattgcttgaactcgggaggcggagcttgcagtgagccgagatcgcgccactgcactccaacctgggcgatggagcgagactctgtctcaaaaaaaaaaaaaatgttttacacattcataaataaataagttgcagggaggggataagcaagcaggtcagttactggtcccatcagcaaccaggcctgcctgctacaaattcagttgctggaagcttgctggaggcccttgactagatgtgagaaagccctacccccgtctggacccaatgtccccactagtctggatgaccttcctattgttccacagagtgggcctggggggctgctgggtctgcaggtgcagaaatctaaaccacctcacacctcagtctccagcctaggccagttccttaacccattcagaactccgtttttgcagatatgagccagaatccctcctatgacaggtctgcgcctttctaaaggtagcgtcaggcttatggacccacccatgatctgccctccaaaactcagccctccaaaatgcaactcataatcctctctgaaacctgctccctaagctgacttctccaactccattctttcagattttcaggccaaaacaaaatccatggaatagacccttcactaccctcactgctacatttgatgcagcaggaaatcctgtcgactctatctctgagatccatccagaatctcatcacacttcccctctactgcaacccctctggcccatccctaccataactcaaggggtctcctcagcggtccccttgtcctggtttaacatcctgtttttcccaactttaaacgtctacctctgggcataacccttcctgcacagccttctacggctttcagcagctccgctgccctcccaggcgagactccgcctcaccctcagctccgtggagacaaagacgctcgggctccccagtgccgcccgctctgcagcacctctaagcctcgcacgtgcaggtccctgacaggagctcccccgcctcacagcaccgcggacaccggtaccccacacaagaacgctcctctctttgggacacaggggcctgacctgcagggcccctcctcggggcttcggcactcggaggagggatcgggcggggcgccctgggacgcggcacccacctcagtcaggttcatcggcgcagcctccgccagcacagccagggaagagcggggcgggagcggcagtgacctggacgctgacagaggcaccaacgcctgcaaccgattcaaccgagcctcactctagcctctgtacaacggggaaaccttttctcgcgtttttccgctttttcacctcagtctcgactcagcctgaaggtgaacagatcccaacgcagccatattgacaaccccaggaggcgttgcaggaagtcccgcccacacgcattgcgaacccccgtagacgccgctctgctaggccttcattggctacactcgctgcttgtgtccgccgctgtgtcttttgggtaatgtagttcccaggccactgcctgccccgcttctgaacttaagttaactcgcgttcaggatgaaagccaggaggatcctcctgaggctttgagaaatgcagttgcggggctccaaggacgtggaggggcttcattggcttttaaacggcaagcatccagattttcccggaaggcagtctagaacaagtcagagaaatgtttcagagacctgtcctttcagattctgtaaagcacagcaagttcccaaaagacgaacatccgaaggaacatggccaaccataaagaactggtcttccacgcatagcggtcagctcttttgtgcttgccaaatacacacagaacgaagctctggagactgttttatgatcttcaatgtgctctgctgggcacattgaaaagacccagacatggcatgatggggagtttgaggagtaatatctttcctttctgaataatcagttattgtctttcagcctacccagcaacactttattcacatgatacttattactttatatctgagatattttccacttattttaagagactgaaacctaactgaaaaggaaaagcgacttatctaccattatctgccagaatagtgtggccttccaccagtcaaagcccttgtgcaaagaaagcatcttactcctgagataaaggtttgggaatgcatgatctcatctcattagtggaaagtgatttatcatttcgcctgaaattgtatcaacagtgtctgcacagggagttgaaattgtctctgaataactcttgtgaaatggctattactgaaactattaatgacgattatgtagatatccaaagaaagtggcaaaaatagttatagagaaacatatttgtgataggaggaaaaaagctaaggttgtcctggaaccttggacacactcaagtttggtgtccaaaatctgattctttttcaaacttgaaaacattgtgcattaacagcttgaagggagaggtaaagactatatattaaaagagttaccagaaaagtaaagctgaatagggaaactgtgctgtcgtatttattactctaacatatttgatgaacactcattcgatgccaggtacaatactaagtgcatgggacacattaggagtagggttgctagctgtctgtggtcctctaagacacgtaagacgtatttaatgaattagtcctcagtcctgtattgaccttgtcaggtcactttaaatgtcctgtattccgctttttacaataaattacaaaacctcagaagttagagctatttttctaccactataattgtaaattaaatcacttagcagctatgttagctgaaaatcatacccccacaaataaagatatggacatagtcttgtgatctctcctgcagaattggtgagggaaaaataaaatggagcactgagatattcagtaaaggagaagactgttttttggccaaagtcttgaaatttggtttatcaaattacaaaaagaaggaaggaaggagagagaaagaaggaaacgaaaggaaaagaaaaaaccacccaactgaaggtctggaagagttaaagctgttcagtagtgccagctacatggaagttaagacgggaggattacttgagttcataagttcaaaaccagtttgggcaatatagtgagatccccgtctctgaaaaaactgaaaattaaaaacatgttaatcatttaccaacaatacatccctaccatcctacaattctatttctagatatttaccaacagaaactaaacaaactttttttttctttttttgagatagagtctctctctgtcgcccaggctggagtgcaatggcacgatctcggctcacggcaacctctgcctcccaggttcaggcgattctcctgcctcagcctcctgagtagctg

SEQ ID NO: 1561316 - DNA, 4001 bp, Homo sapiens
cccaggagccagaagctggataggtgtttggattttccaaccagggacacggcggagagtcgtactgggctatgaagagagatcctgcagcctcaatgatgtggcctgacctgggggttctgcagaagccttggaaaagcaatgagtacatggtcactcattcaacattcactccacaaatatttcctgagggcactgaggtgaagtcactgtgtcagacattggagtagacaaagttcagaaagcccaactctagttattagtcagggttaaaaataaagactgagtctggactaaatggtgaattcattgcagctttgccacattttcactgtgagaatatgaaaatattactttagttgtagtttccaaaatgaaaatgcaggtatttatcacagatgttgggaaacttaaccaagatgaagcttgtcaagtcctcagtgcctgcctggcacgtgataaatatgaattaaaaaaagaaagttgtcaatttaattgtcagctaaatatcatgggcattatcatacccattttgaggatgaggataatgaggctgtgtgctgttacataatttgcctgaaggttactcagtctgtaaatggaaaaacagggaatcagccccacatctgccttgttctaaactgtacactgtctccactatctcatgtacccatacgtggccagcttccagaaacaccatttcctctttctgttgccttcatagaactcaggccgggaggtggctctgtctggtgtacctattctgagcttctggacttttcagtccccgtccataatacaccacacacagaccagcctcttctgactagagctaaaacttaaaatcactgtcccaatccccatcttgacacagaaaatttgcagacatgcatcagggcctccagttaccatttcttgcctgtccacaataagttgcccccaccgcacctgaatgcaatcactgacaggactgactttcagaaatccccaatgagtgtactacagggctgccagaaagttccaaaatgcctcccagtcactgacatggcacaggcttctgaaatctttactgccctgatagccaagaaatgtttcccagcgagcacaattttctggtttccataaaacgacaaataatccccaacataggggtccaaatgaaatgccccaataggaaaccatcatcgatgtgctcaactgtcaattactgatccttaccatgtccaagggacccaagaagaggccaacactgacccacccaccaatccctgaaggaccccaacactcactgcctagaaagcaatgcattcaccctcacaaatccccatcattgaccccctacgcctccagtcaactggctgccataggctacccctggcaaccccactctactgattcctataggttgcccatcactggtcccctgagagtgttacagtgtgatcctcaaagtcctccaacctctgaagctcttggctgccaatcaatcactgactcccctagtcccacggacagtgaatcccttccctgaacgtcctccagcaccatccgcaaaggcgctcttaagatgcacgttcactgtcctcaagttagcaagtttcgtggaccaatataaaatccgatattaaagtacacttggaatttaagtcacaaaaatactacaagcagaaaataagcaagaaaagagggaaaattaacaggctaattatccaactaaaattagcaaacgccacttaccccacagcacccatcacccaccccagaaacccctcatcgctcagccaaaacaagcccgtcactcacctcacagcctcgtcttcagccgagaaatccctttatcacgcacccccacccccaacaagcccctcatcactcccccaaagccagccgccccttcctgaccctacagaacccccactgctaatattcccaatcacttcagcgtccagtaagcgacataggcttagatccacttaacaacagaagctaaatggtcgctctaggccacttccggtttgggttacattcccgttaggatttccgtaggcgctgttgaaccgcgcgcatgcccactaacacttttgaagctacgctccgccaacagttatcatggcgtataacggcgtacctttattccgcggttcattcaacttcagaaacttggtagggaggacggcatggccgcacccatacggattatgatattggaggccgccatcgtcaaagggcttttattccgtacagccaaggacaaatggaatgtcacagagtaaaagtcttgggtcctacattggcaggggacctattcaatacttgtgtatatatatttctaggagaaactgacatgtattctgaaaaatactttttctctatatttttccctctgatttaaagacttttttttcctgaattgctgaacaactcactgtctttaatagcacttttgaaaatgttatctttctgagaaattgtatctttgttatccttacaccattgctctctatacctggatgaacctattgatgaagtaacctaccaagcgaccacctgaagagagaatttagggctcttgggacacttcatttaaagagaggcgaatgaaaaaaatataatcaagttaaaggaaaaaaacacaattactgagatcaatgtcagccagcccaactgggcagaattttcaggaagaggttgttcaatcaaataaacaaaaatatattctagaaggtgagtaatagcaatcataaaattaaaaaaatggctgattatgggaaataggaggcagggctgagtgaggatctgaaggtgaagatctgaaatgatccttcttttttaaaaaatagtaatttaaatatattgctttcgtagtttgtgccattttgtagttaccgattttacattctgtgttcacagcttctgccaccccatctctgcacttaaagccaccatattacttttaattacttcatacctcatttttagtccatttgaataataaaataagactgcttagccaatgaagcatttttttgaacatggtttcccaggaatagttgagttttcacattagtatctgaacctaactttgttacatgaagcatgaaacctgcttttattttaaaacatcaattatatatttactgtaagcaaatagtgtaaaatcaataaaaacacttatctttattatgtgagaaagtgtgacattttgtttgagttactaagaaattccccggacttagaacttttgaattttctccacttataaatctgagactattctttactgtgtcataggatttaccctacggctttggtacattttatttaaaaaaaggaaaatgcagagagtgaaaattgagatagaagtaggaggctttaagtacaacagccccgcatgtgtatgttcagggcaagttaaggcgtccctccactgggacatctgtatatctgtaggatgaggggtaactgcgccctcatactcttagtggggcaggcataccctaaggtgacacctactgagtcacaccttgtacaaatccatccctttgagtgcaaacggaacctgagatttgcttcttaccaacagaatatggcaaaagttatgggacttatctctattattagattatgatattaaaatctatgggaacttgaacatcatctgcaaatactggaaatatttctcagtttctaatttttacatttcttgcttatttttctggttttaccttgttggctataacctctttaataatgtcaagtaacagtggtgacagtgggcatccttgtcttgtttctgattcaaatgagaatgctcctgaattttccttatttagggtgagagttggtgttttaatagttatcttttatcatatgcatggtaattctagttgctccactgccttatcaatacttagtattgttagtctttttaatttaatatgttttagtgagtatctcatagtggtatctcatagtaattttaatttgcatttcccagatca

SEQ ID NO: 1561317 - DNA, 4001 bp, Homo sapiens
gccattcttcctcctgtaggtttccttcctggctgggcagagtcctaagcaggcagagctagaggagaacacagaagccattagagtctaggcctgctagatgttcaacactagcaggctgggaagcttcttcttactaaagggtaacaacatacacatagagtgtagttacaatttgcctccttatccaagaacacagtatatcctcaaattagaaatatagtatgcatttttcattttttcttggacttttttctagcctgaaccactaaaaaggcttatgactgctaacagctcaggaggaatgagcctctaaagtgcaaaactgtctctgaatatcatttacccgtgacagaaaccaggactcactggagaaatagctgagtctagtatagactaagaaatcttcaagatgagtttggaatatcttatatcacaccctcacgttcctcattgttagaatgggaccaatttcatagggttgggctgagttaatatcccgaaattacttagaacaataaggagtaactcataaggaccataaaggtgagcatatttgcatttcataataaaagggtgacattccagaacaacatttagtacacttagctgtatatgtatcaaaatctagtgctgcaaatcttatagcagagctaggactctgtcttcttaactcagtagcctaccttccaggccctttttgcctgcccgattttactttttaaacttttttgttgtaaacgaagacacatacgcattaatctaggcctaaatagggttaggatcttgagtatcactgtctgacaccttctaccgtgtcccacttaaggtattcaggggcaataacatgcacggagctgacatctcctatggtgacaatgacttctagaatgtcttctgaagcatctgcttgaggcttgtttttgagttaacttttcttttttagtaagtagaaggaatacattctaaaataacaataaatagtataaaaatatataaaccagtaatgtggtcacttattactattcattattatgtactgtatataatctactgtacataaccatatttactactgttacatgactggcagtgcagcaggtttaaatgacagacatgtgagtaatgtgctttacaatgttacactggctatgtcattaggtgattggaattttttagcactattaaaatgttatgagagcactgtcacatatgtggaccatcactgaccaaaatgtctttacacagtgcatgactgtactgccaaccaagaatgttttacctgccaaaaatggccttcagaaatgaaggagagataaaaacttccttggacaaacaaaagatgaggggcttcatcagtaatggagctgatttataggaaatagtaaattcttcagcttaaaagaaaggacacttagtaacatgaaaccatatgaaattataaaacccactggggtaaaggtaattatatactcaatccagattaccctaatactgtaacagtggtatctaaataacttatctctagtgtaaaagattaaaagataaaaatattaaaaagttataataatttgttaatatacaatatagaaagatgtaaattgtgacatcaaaaacataaaatgtgggaaatggaagagtataaattgtttgtatgcaatcaaagctaagctgttaacagcttaaaacagactattaaaactacaggatgttttaagcttcatagtagccacaaagcaagaacctatattatggagaaaagagaaagaaatcaaagcgtatcactacagaaagtcatcaaatcacaaaggaagacaagggaggaagaaagcaacaaaacatctgtacaacagccacagaagaatgaacaaaaaggcaacagtaagtacttacccatcaataattactttaaatataaatgtactcaggaggctgaggcaggaggatcacttgagagcaggagtttgagaccagcctaggcaacacagcaagaccgcatctctacagaaaacaatttaaaaaaattatttgggtgtggtggcatctgccagtagtcccagctacttggtgggctagggtgggaggattgcttgaatctgagagtagtgggagtatgatcatgccactgcactccagcctgggtgacagagaccctatctccttaaacaaaaaagtaaatggattaagttctctagtcaaaacacatagtggctgactggattaaaaaagaaagacctaaggtatatgctgcctacaagaagctcactatagctttaagaatgcatgtagcccgaaagtaaaaagatgggaaaagacattccacgtaaatggaaaccaaagagagcaagggtgagtaggaaagatcttataccagcttaatgttacacctcaagttactagaaaaagcagcagctaagcccaaagtcagtagaaggaaaaagaaactaagcccaaagtcagtacaaggaaggaaataataataaagatcgcagcagaaataaatgagagactaggaagacaatagaaaagatcgatgaaactgaatgttggttgtatgaaaagataaaccaacaaaaacctttagccagactacttaagattaaaatagacaagactgaagtaaaactagaaatgaaagagaaggcattacaactgataaccacagaaatataaaggatcatgagaccataatgaaaaattatatgccaaaaaattggataacctagaagaaatgaataaattcctagaaatatataacctgctaagactgaatcataaatagaaaacctgacaagatcaataatgagtaaggagattaaatcagtgaggaaaaatcttccatcaaagaaaagcccaggacttggtggcttcaccgttgaattctaccaaacatttaaagaatccttctcaaactcttccaaaaaaatggaaaaggagcccaaccaaactcctcattaaactcattttatgaggtcagcattacactgataccaaagccagacaaacactgtaagagcaaaaaactacaagccaatatccctactgaaaatagatgcaaaactcctcaataaaatactagcaaaccaaattcaacagtaccttaaaaggaccatacaccatgatcaagtgagatttatcccagaaattcaaggatagttcaagatacgcaaaatcaatgtgatacatcacatcaacagaatgaaggataaaaactatatcatcattagaatagatgaagaaaaagcacttggtaaaattcagcattcttctgtgataaaaaccctcaacgaattagttacagaaggaaagtacttcaacaccagtaaaggccataggtgacaaaaccacagcttacagccaattataaaaaattgaaagcttttcctctaagattgggaacaaggcaaagatgcccatcctcaccacttctattcaacatacaactgaagttctagccagaacaattacgcaagaaaacaaaaggcgtctacgttggaaaagaagtaaaattatgtttgtagatgacatgatattgtatctagaaaaccctaaagacaccatgaaaaaatgttaaaactaacatgtaaattcagtaatgcagggtaaaaaaaaatcaacatacaaaaattaaatgtatttctaacaaactatctaaaaaaaactatgaaaataatttcacttataataatatcaaaaagagtaaaatactgacaataaatttaaccaaggagatgatctcaacactgaaaattctaaaacactggtgaaagtagaagacacaaacaaatgggaagccacccagtgttcatggattggaagaatcaatattgtcaaatgtcacactatgaaaggtgatctacaaattaatgcaattcctatgaaattccaatgatattttttacagaaatagaaaaaacaatcctaaaattcatatggaaacacaaaaactccaaatagctaaagcaatcttgaacaatactggaggcatcacacttccttat

SEQ ID NO: 1561318 - DNA, 4001 bp, Homo sapiens
cagacaagccctctatcagtagtggcaaacttaaaaacattagcagtaattattgcttaggaagacacttaccctgtatttcactccatccttggctaccttccccttgctcgtcagactcttctcccaggccctcttcttgcttacttatacccagccctgaaaataacagtgaaaggttgcttgtagatactcgacgttttctcatacaccatgaaaatcgaacctccccctcgacgcaattacctcatcagtccccattacaacctctgacgactgccgccctagctggatccctaggattctaagtacaagacacccctttcagcactcctcatctttttactttgcatctccagttttgcctcgcacaaggtctctttttcctctgtggatcctctacctacatgtgtctacctgctaattggacaggcacatgcacactagttttccttactctcaaaatgcaatttgcaaataggactgaagagctccctgttcccctcatgacaccgacacgacaaaaagagttattccactaattcccttgtcagtttaagactttctgcctccactattgctctcggtactggaatagcaggcatttcaacctctgtcaggaccttccatagtctctctaatgaattctctgctagcatcacagtcatatcacaaacttcatcagtcctccaggcccaagttgactctagctgcagttgtcctccaaaaccgccgaggccttgacttactgctggaaaaggagaacatctgtatattcttaaatgaagagtgttgtttttacctaaatcaatctgacctggtgtatgacaacataaaaaaactcaagaatagagcccaaaaacttgccaaccatgggggagtaactgctgatgagtatgggattctcttttggggcaatgaaaatgttctagagttagattgtagtcatggttgcacaactcaatatactaaaaaccactgatttatacactttaaatgagatgaaatatatgattttatgtcaataaagctgttacagaagggaatgtctttaatctatcaaaaacacatagcaaacatgtaagtagtgacaagctgaaagctttctttctgagacctggaaggcagcaaggattgctccttctaatgtttcggaggtcgtaggcagggcagtaaatttgtagggcaggagtgggtcgtaataggattataaagggagaataaagttcttattcataaacgatatgtcaatatgtaaacatccaaaagaaactacaggtaaactgaaaactaaggtctgctgcttgctgcatacaaaacacaccctgagggctcaaaaaagcacaagtcccatagagggggatctggtcatacctaggaattacacattcatttatgctttgacccaacaacttgactttcaaaaataaaccttgaagacctaagtccacaaatacgaaaaaacatgcacaagcccactcagataggaactcaaatgtgtatcaggcactagggtgcatccacataacagaggggaaaaaaagggacgatctccacaaaccaataacgcgcatcccaagatatgccttctaacaacggaaagtgaggtccaagagagcattttcttgagaaaaaatagtctcctactggggacgacgtttaaagagaagggtacagaaagtggagaaaaggccccgccgacgcactctgaccacatgaacccacttgcctcctcccgggaaccaatgcccggaatggcagccccaagcccagcagtgccgggaggaaccaaagccggcggcctctgagaagaaacgccgcgatagccggaggctggggcgggaagctgcaggcaaggtctggagcagccggggctgcgcactgtgcccttgaccccttccctcccgattccgccggcctcactagtggggcgcacctggacctggcctgctgggacagcaaccctttctcagctgcaggcgacagctatgggagatggcgaggcgacggacgcccacttccgcttccggccagcagctgaaaggggtgggctgcccagctcgcacatttggcggattcgccctgaggacttgggaacggggcatcgcaggtgctcctgctcccttagggcgaaggctgggactgtctttattcattgcattagagtaaaataagaggcacaagccaattaacttgcttgggtctcaaagctaagtaaaagagtccacagaactagaatccgtactgtcttccccaagggaaaaagcaaatgtccccagaggaaaattggactctgcagccgcagagggaaaggggtccaattgctccctcccctcttcctgaccaaaggaagacccccgaggtcagagatgttttggtccggactccagtttaaacaattaagtccaggtatttaaaaaaaaacggagggtctctgtgagcacttgaaattatccgccaacaaaggagatcctgtttggcccaacagggtttgactcacatctatatgattggaaccttggaattaaaactgaaaagctcagtccggtggtagaaaaaaagatgatttttaaatggctttggagttattcactgttcagacatcccaaatccaggctttaaaaaaatctcaatagccgctctttgtcccttttccagacactcccatgaataagattcctactagacagaaggatttaagaatggttaagataatcattactttaaaaattattgttttgagattgagctttgcttgtcatccagactgtagtgcagtggcgcactgtgggctcagtgcaacctccgcctcccaggttcaagcaattctcctgcctcagcctaccaagtagctgggattacaggcggctgccaccatgcccggctaatttttgtatttttagtagagacggggtttcaccatgttggccaggctggtcttgaactcctgacctcaagtgatccacccgtctaggcctcccaaagtgctgggattaccggcgtgagtgcccggccagagaatcattgttaatgttattcactagagccattcagaactaagaatcctggttaaaggaaatctcaacccctcctggcagtctgtgcctctcacagagaccagctccataaaataactgcctataaacagaagatccttaaagcactagggattaattactaacattagatttagacattagggccattgtgtttaaaacaaaaatttcaatctacatccaaaaagggaaagattttaagaagttaggttcttttctttagcacatgattacagcctaaaaaggaactactaggggaagtgtgaggatatttacacactttcattgaccaaggactcttggctttgttctggggacaaagtgtgatggtcggaggcagaagtaaaatgactgttagccctcctgagctccatggcaaacacacagcctttgttaatgctggtcttggcctccacctgtattcatgcacgaggtagaacctctcttttttctagagaaaacgccaaggctgcatgcatgcagatgcaagggcaggctgcttgttcactggaatacagctacttcactgattacactgattccatttttaaattatttttttttttttctggagagggaggttggatagaggagaaggaagtttcagggagtcaaaggcccagaaactcagtggaatgactcttctcaccacctgttctgttccctgctgctgacaattcccactgagcccttcaagtgtctcccacacacaggacaagtactgctgctcctacctcctctcccatggacgcaaacattggtgggagcaatcattttatttttatggcaaagagaagccctgaggggacccacatggatgtcttcaaggtgacaggcagagcctgaggctctgaaaaaggctggcctaaaactactgcactagatgtgcatttcccgcttggacgaatctcatttgagaattaatgacatagcctttgcctacgt

SEQ ID NO: 1561319 - DNA, 4001 bp, Homo sapiens
gctcaggaagatcctgtctttccaccaaactgggcaccatcaggctgtgatcagggttccaatcacacaaagaccccagcaccctctgtctaaaactcatctccggcctcctgtttcccaaccaaacaccggtgtgtgtgcacaaggggtgcctgacacagtcccgcccctctgcagctgctcccccccacacacctgggcatcctcaggcagaatcagggtcctaggactgcccatgcctccccaatctgcccaaatgccagcacacgtgcagagtgttgctggagcagccccgtgcctcctaagaccagatccaaactggagcccccaggcctctattccacagccactgcacacgggccacccacctagactccctcctactgatacagccacagagcaggttcgtgctcacaatctgcatccaggacctggctcctctgcccgtctgggggcacaccatgctcctgagtcaacaatctacatccctcaccctgtgtctcaacctgcctgggacatctcaggtacccacagcctctgtgtaggttctggggtcaactgccccactatttgcccgcagccaggacactacaacaactaaacagtagcttgagcatacagctccataatcagccccaggacttgggcactcgccagcgtgggggttctcgagcctacgatacagcagctcaatgggaactgggccctttgtccttctcttgcccaatcatgacggcctgggtgttgtgcagtcagctcttcccgggaccaaatctgcagcacaggctctgtccctctactaacctgcacattctcacgcctgcaaatagcgtacccaagtaaaggtctcagcaacacctgcttcataacgatgctggcaacatactgcttcctccccagctaccaatttgatggcagctgttgcagctctgtccttcctggacttaaattctgtatctccaacccggagtctctgcccatcttgaatgctctagagctctgcactatcctacataggtccctactatcagttcaagtttctgttttccattcagacacccccaggacgtgcagggggccctctgcccagaacctgtttctaggccctgataccctccttcagcctgggagtttgctgcccatgggtaattcccaccaagggttcactagcaacactgcctcttctggcacaagaatctgcaactccaatctggtctctccaccaaccacagcgcccccagaccttggagaagcgcgttgtctgctctaggggcccagagccacctgctcggaatcttacctacaaccttttgcttcctacccaaatacctgatcaagagtaaagggacagtggcacagcccctcctctccagaaaccacaatctgcaatggagcactccatcaacccggacatcctcaggcctccactaaataagcccggcattggaggaggggagttctcaagatgtccccttacatcaatgcatgtgccctgtgttccagcaacctgggcatcctcaggccccagacaagagcaccacctgaccaagcacccgcgcatgcacgcagaggacagtcgcggaatatacagctgtatcagtaactccatcaaccccggtgacccgaggctaaagcgccacccgcacagataccaggtctccccgctacactcaccaccgcttccagcttcccgcgtagaccctgcgcatgcgcgcatcggacaccaagcgctgccccacgcccctaccaacctgggcgtccgctggcccgcagcccaggctgggcctgtcaccgcctcagtgcctagcacggctctgcggcaggacgaactcgggttaggcaaccccctgccccgattctgcaacacggccgactcgggttaagctagttcggtcccctctcctagtcagcatccgcaaggccgctgggggttaagtctgaagggccgagctgctcggcgacagcaagcgtccgcgcgcgggacaatggctgctcttgtggccgaacccggaagtgcacttgggctcggagagccagaactacaattcccagaagcctccgcggcgcggacggtcagtaggcggggttccggcttctccaaggaagtggggcgggggaccgggccagaagctaagagggcgtcctcgtccggggcccgggggggcgccacacctgtgcatgtgcaggtctagggggagcactaagaccagccgcggcgccgggaggccgaggccagtgcagcgacgcatggggagtcgctctggcgtgacgtcagaatccaatagaaatggcggggaccctttctgggtgccccctgcctgtcagacgctgcgcgcgaccccttgtctcctctagtcctaggggaaacctgtgagacagttgcgacatccccattttacagtggagggagcgtctaccgaacccttcaggaatctatgtttttacatttaataatactaaaatataatcattttatttttaaattttgagttctttctctgcctataaggcctgaaggatctgttccccccacctctccccttttctctgtttttgttttgttttgttttgttgttttgagacggaatttcgctcttgtcgcccaggctggagggcaatagcgcgatctcggctcactgcaacctccacctcccggattcaagcgattctcctgcctcagcctcctgaatagctgggattacaggcgccagccaccacgcccggctaatttttgtatttttagtagagacggggtttcaccacgttggccaggttagtctccaactcctgacctcaggtgatccgccctcggcctcccaaagtgctgggattacaggcgtagtccccttttctctttgccctcatttcttgcccatttgcttggcacattttccccattctccaacagatccagcagactccagcccctggtcgtttgcaggtgctctttgcactccctagcagcctctcctgagggattcatttggctctcaccgtctggtaattaggggaatatcatcttctcatgaggcattgccccaccacccgttgtgaacttgcaagcaaacgcttccctccccacatgctctgtgcctcccccttcatcttttatttttttctctaaagaacttttcactatctagcacactatatattttaattatttatttggtctactgtccgacctaccactacgatgtcaattccataaggaaaagcattttatcgatgttgatcactgctgcatccccaacacctaaaaaaaaaaaaaagagagagacctggcacataatagatgctcaataaatattcgttggctaaataaaggttcctgtctctgtattaaacactttaatatttcattaccaagcccaatcagcctatgaggtagttgtgttaattttcatcctaccagggaggtagctgaaaattggagccctgctgtatgaaaatacataattttttagtttttaaaatgcttgtcaaagcactcctgtagttttcttcacgtaaattctgacctttaaaaacaatgaattattactatttgaaatgtaatctctatccccaaagcttcttattattggttattgtggttgatcttttaaaaaatacttattttgtatctggttaacctactgcaatgttattaattcttacaatactccagttgactctcttggcttttctattgagacagttatctacaatttcatcttttccttaccagtattttaaattagacattctctttcatgttggattatattggctaccatttccaaaaaagtattactaaaagaggcattcttgtttgtgttcttttaatggacatatctctgaagtttgagggttaaatgtgacatcggtttctacattgaagtaagtagcttatttttttaaccttttattttgtaaatttcaaaacaaaagtagggactcaattaatgactccccaagacctatgtcatccaacttaaatattttcactcagtcttgtt

SEQ ID NO: 1561320 - DNA, 4001 bp, Homo sapiens
gcagaaagttctcttagacaatactgcactagatcatgaagtcctgtgtgtcagtgtacaccaaaatccatgtacaacttttcctaacagatacttcctaagtgtttagaagatgaaccaatgaatgattttggcattagttcactttagctgttacttttttcttgctctgccgccaggctggagtgcagtgacataatcatagctcactgcagccgcacaccacagggttcaagaaattttctcaactcatcaccctcccgaatagctggaaaaacaggcatgtaccaccacaccagtttttcaattctaattatctaacttctccaagaaaacagacttcacccaacatgtacatctgctactcacatcccctcctatgcaagcttcaccttccatgccatgattctgccccaccagttcgtcattactcatcttattcactccacaattacttactaagcatctatttggtgccaggtaaccctctgggtactgaagctataacagacaacaaaaaagaaaaaagattcctcccaccaggaacagacaatgagcatgtgcatatactgaacatacagtacatcagctagtgagtgacacacactgtggaaaacaacaaagcagtgatggaggagtggaagtgctaggcgagggaaggtgactgcgattgcaaatagccattcagggaagcttttctgagaaagtaaccacggaacaaacacacgaagaagataaggatgcaagtttgtgcgtatgtgggggaagaatattccacgtcgatggcacagcaactagtgacagtggctagagctcacaggaatgaggaggcagagaaggaaggtgggatcagaaaggtaatggcctaattgtacaaataggtcattgcagaagtgactcagttagagccactgaaaaattataggttgaggaatgacaggaatttatgtaacaataggaccacggtcacagctgtactgagaacagactgatgagggttaagggcagatgcagggaatccagctaggaggctaccgcaataatccaggtggctttattgctatcactaccggggtggtagtggtggtggtagtgctggggtaactaatggtcagattctgtatacagtgtatagcttagctccaactagaggatctgaatataggtataagtcaaagggaagaatcaaggatgactgcaagcatctcttcacttgagaccacatggtacagttttgacaaccataaaccgaataaccttacattccaaagttgcattgtgaattacagttttaaaatgttggcaagactagaaagtcttctagcagaaaactgtagaaaagaggaacactgggtgaggaggataataccttggagctctcctgtgggctccgtccttcctatactgaaaggaaccatggatccagtcccttaaatggacttggttaggtgggaacaggcaggagaagcaaagcaaacacacagtcctgataaagtgtttcaggaagatttgcggacacaccgacctacctgaggcattactctgcaatttccaacagccaacagagtcctctttccaggctcttatcttagagatgggcagtgtcctgagggcacagaagggcaggaaaaagcagtcatgaaaaatcaggcttatcttgcggcacctgtgacacaccataatggaaaggcacactggtaatcactctccagggcgccaatctctccctgggaactaacagggtgtttctccgcaagggctaaccatttaccaggtgccacctgcgaggaaaatcaattactctgtaaataaaatcctcataaaacaatggtaaaaactttatcagctcgttcagtcttcaccactatgcacggtgtgcgttcacatttttccagatctattttttaaacgatgacaaaactgaaattccaagatactgaacccatttgttcaaggttacacaactgtagagcgccggcttcatgacgacataacccaaagacaactgtggctggcgtctaaccacgcgcccacttcactctcacaacagcgccaagaggtcggcgccgtcatcaccccgcgtttacataggaggacatgaaggccaggaaaaccaaggcaccggccggggtcacaccgcggggcagacccagggcctgagccccgccgccgcccccgggactcatactggccggagtcctcagcagggcctcaccgtccccgcaggcgccccgcgtcgctggtgagcgggcaacggccgccgacctctggggacgacactgcccagaatcgtcccggagcctgggagtcgccgtcaggcctgaggctacagcggggcggacccagtgcgccgcccacagccgatcgacatttcccagaatcatccgcgcaggggacaaaattccaggcgcaacgaaccgcaggtaccggaagaccacacttcccaggagtctctgcggccgcgcggacctggggcgccgcgggcaaacagatctcggtttcctaaaaaactaaaccgcctggggctgtcgtcccagagcccggcagttaggaccatgcgggaagtgtcctggggcatatagtcatactgatgaggtgaaagatacacctcggaaccaagggccaccctctacttttaaggacaatggcgccgggaccaagaaactacacttcccagaaaaccgtgcggccgtggcaaactcttctgggtctagcgtgcgctcacactaatgtttatctcccgggacgtgggcagaccttgtaccaggcgagctctcgcctttgctagcaaaagagctcctctcttcccaaaccctgctactacgctgtccaccctgtatggtctttgaggtctttgaggtttttttggaattcacttgctggagactacagctcacagaacgccctgggctggattgtgccagctgtagttcgcgaaccaaggacatttcctggaaatgcatgcggccacgtatctgtgacagaaatggcagttctcacgtgcgttacgccccctggaaggacttggaaatacggaacttgagtgagcactgagaggacacagaccctcatcctgggaggagtcactcctcccgcagccatcagagcctgacaaccgcttctcaccagaggcgcttcttagaccctgaccttgcccggctcacccaaaggggcaatggccttctttgtatgcaagccagacagtctactgttgtatatttgaattttttactttatttttaatattttaattaaattttaatttaatgctgcctctacctctgagagagacagggagagatgggggaggcctggagtgggggccctgcggggcagggacaggggacccttcctcactttgcacaatctgggaaccctccccaagcggaacagccagctgcagtggaaaagcactggcttagtgggcttcgtcctggggacgaaggctgggagactgcagctgaaaggtgtgggctccaggagggccgcagggggcctagcagcagcgtcagggagcagaagtccgccctccctccatcttccttccttctctggccgccagagcgctctgtctccctcccacgcccacagctacaggtggagccggcttggggcggggggggggtcctcctagggcgaagagggccaggagccttcctgaggacctgaggctcctctgggcctcccagggctgggcctgtgatctgatctgctttgccctgggagggacgtgctcagtggtggggtttgtgtagctgtcactcattcacctgcctgtgctcagccactcacctgctactcccattggcacccacccagtacacatgtgggtcgtcagctgccatcaggagtagttcctgcctgtgtcacacacacccatcccacccaccacactgcaggttacaggattgccccacaagcgccaccatgcctgcctgaggttacctggcacacaagtatcctcacctgcatgacatgaccagatcgtgcactttctatgc

SEQ ID NO: 1561321 - DNA, 4001 bp, Homo sapiens
ttcaattcagcctgggttacaaagagagactttctctcaaaaaaaaaaaaaaaaaaggaaacaacccaaagacattctgagatggtgtctgtgccttacgaagataagaggagaggaacagaggtttttcactggagtatcaagtggttattctctattctatgtgaaatgttcagaaacagaacacaaatattttaaaaaaagttatccatgaccttgtgaaaagatgataaaccactaaaatactgcatctatgtgaaagaaaggatgaagaaatatactctacaataaagaaagttgatacaggaggctgaggcaggagaatcacttgaacccgggaggcagaggttgcaatgagccaagatcatgccattgcattccagcctgggcaacaagagcgaaactccgtctcaaaaaaaaaagaaagttgataatactgtgagttggagaaggggagttaatgtttggagatgcggaaaagtaattgaaaatttaagatgttactgcaaactgctgaagagttagggcggggtagcagggtggaggatttgagacccatacattaggaaaatgcaggaggaagccagtccctatagacagtgtgaaaaaatttaaagcagcagcaattagactgaagtgtgtttagtgctataagaaactacctaaggacaccaaaatcaaactcaaattgaggcaggaaaatagggtctggacgcagggaacataaggcctattcaaacttcagctatgaaaggaaatacctactccatagggcgtaagccaagtaaatgattttataaccttacttcatcctctccttttacatagagtataccccaagtaaccaatggaatcctccagggggtatttaaactcccaaaaattctgtaacggggcctttgagcccctgtgctcagccccgcttgcacactgtggagtgttaaatcccttcattccttccttgctttgtgcgttttgtccaattctttgttcaagacgccaagaacctggaccccctccaccgttaacaaaatgcaattcttcttaaaactttctggtaccaaaaccacaaatcatgactgggcgtttctcactcatgaatcgctgtttgctcaaactctttaaatttttttttttttttgagatggaatctcgctctgtcccctaggttggagtgcagtggcgtgatctcggctcactgcaaccttcgtctcctggggtcatgcgattctcctgcttcagcctcctgagtagcggggactacaggcgcatgccaccatgcccggctaattttttgtatttttagtagagacggggtttcactgtgttagcctggatggtctcgatctcctgacttcgtgatccgcaagcctcggcctcccaaagtgctgggattacaagcatggtccaccgcgcccggcccaaactctttaacagaaaaaaaaatccgcaggattcccccatgaccctcccgtggtccccgcaaaatctgaagagacgcggggctgcaggcgcggagctgcccagagagggctccagggtcggggcccacagtcgcccgcgcaggaacagaacaggaggacgcccggggtcccggctgccggcccagccgcaccctgcggccgaggggacgcagggacgagctgagacagagggattcgggtcccagatccaggaggcgcggcgaggaggcccagatcccaccacagccgcttccggccggttccacccagcccctcccccgtctggggactccggccccatacactcaccatttcccggcttctgggtgtcccggtgtcctctctagggctcccgtgaatagtgcgggtcacggtgcaggcggcagagcgacagaagttgtggcagagggacccggggcctctcggagtaggaaatctggtatcccgacaacaacctgcatagcaacaaaagtagaagctggaatgggcctcctccttccggacggaccgttggccgggctccgccccggcgcttctgattggacaaggtacaaggccccgccccctcagaactgagtgacggcagaagccctgggtaacgagccctgcaaagccggactgatcggttctagccacagcttctctctaagggacaactccttccctgagccctggtcattggatattttcttttcagccaaatttgctcctgatttttacacagggcactatcttcttcctcattcaatgggctgtcagtgcttcttcgtcctgcacagggttgtaagtgtgtgcagggaattccagactgagtgtccaatggagcgatgtgctgacctcagagcaggaaggggagcccagatcaggccaggcacgactgcaccaagaaggagaggcagttgtccttcaggggcccggaattagggatgagacatggccaaggctttcacacatctcaccccacctcacagtgtggaaactctccctccttccagaccttcatcttcatcggcagaaaactctcacttggtgattttaagcttctgacctaaataaactgtcaactgcataagccccttctccaggagaggtcccaaacagttatttccctgaacttgatctttacggattttcttcagatatgcaaattacagtctgaccccagggactctatgcatgtcaaacccaaaacactgctcccgaaaaccgccccagattccagatgtacagccgcagaaaggacagaactcctgaagtgcacctgcacgtgggtctcctgctttccagggcgctgcagcatgtcagaacccacactctttctggatctgctctgagcagctgcaagccacctgcaggggagggcggctgcccaggaagcacccagaactccacttcactccttggcaggatccatactagcctcagcgtcccgtccctggcgtcggtctctgctgccccctgcaggttattcacctgcttctcacatcattcatcagtttccatgagacaaacatcctcaatcccactgcgagaataacacacgagcaaagctctcctccagtgtgtatgtataaagtcgaggaggaagtgtccaagattatttaactgcatgaaagtgaggcagtagtggctgggcgctgtggctcaagcctgtaatcccagcactttgggagggcgaggtggctggatcacctgagatcaggagttggagaccagcgtgaccaacatggtgaaatcccgtctctactaaaaatacaaaaattagccgggtgtggtagagcccacctgtaatcccagctactcgggagactgaggcagaagaatcgtttgtatcaaagaggctgaggttgcagagagccgagattgcaccactgcactacagcctgggcaatagagcgagactctgtctcaaaacaaaacaaaaaaacacacaaatgtttagtcatgttacttatttctggtttccagcctgactttataacattcctgactctgggactctccagctctccagaattatgctttgaagaaaaaacaagatagagcacagggcccacatgtctcttataaactgtgaaccaaaatattacatagcagccatctgtcagaactgcttccaggctattgtcctcagtcacaatcctaaatcaaactcactttctttaacaaatttaattttttttcttcagtccacatgagtaatctaaaagaaacacatagacagaagaatctctttattatcatctttctaccaagtcaacatcaagcattaaaaaaatgtaaaacaaagtgaaaaccatccttctctgattcatcgtagacccagaatctgccagtcaccaacacctatcttcattttctctattacggccaacttttatctaagagatatcataggggcatatttaatagagtttgtcattttgtgttttatgaattttagaggtttttttgttttgttttgttttgaacttttatttgcattttcttttggctgaatttgtttgtctcttaagtttatgtttcttctggggtatc

SEQ ID NO: 1561322 - DNA, 4001 bp, Homo sapiens
cagacatagccatggcgggtatcttagtttttccccagatagtactgaatctcaggtccaagaaaaaactgaagggtgtctgaggacacatctccctataaagtttccaaagggaaaccttgacccaaaacattctgatatctatgtctacggaaaacagaagaaaaaatatttacaaacagaaaacaaatctttttaaatgtgccatcaaatgctttgtcaaaaaatgattacaataggtatcaaaatgtaaactaaaggacaaatagttgatcatgtgaataagggaggggaaattggcgtttgggaatgtcagaaggaactggaaattaagtattttactgcaagccagagtcaggctggagaaatagggggtggcagatagacttgaggtcctgcttgggacacatgtgaaaaatgcaaggaaacagcaattccttgtggggtgtgaaaataattaagtggctggcagttagactgaggaggctctagtttctaatttctacttttaaaaaatctaattcggccaggcacggtggcttaccctgtaatcccagcactttgggaggccgaagcaggtgaatcacttgaaatcaggagttcgagaccagcctgaccaacatggtgaaaccccgtccctgttaaaaatgcaaagttagagggcatggtggtgcatgcctggaatcccagctacttggaagtctgaggcaggagaatcatttgaacctgggaggcggagattgcagtgagcccagatggcgccactgcactccagcctgggcgacagagtgagacttggtctcaaaaaaaaaaaaaaaaaatctaattcaaatgcattttttgtaaattactacattgggggaaaaaatttcaggcttaacacactataaactgccaattaacctctgattacataaccaagaaacttccatcttgatgttacaaattaagaaaccacaaggccgggcgcggtggcttacgcctataatcccagcattttgggatgccgaggcgggcggatcacgaggtcaggagatcgagaacatcctggctaacatggtgaaaccctttctcaactaaaaatacaaaaaagtaaccgagcgtggtggcgggcggctgtagtcccagctactcggaaggctgaggcagtggaatggcgtcaacccgggaggcggagcttgcagtgagacaagatcgtgccacagcactccagcctgggcgacagagggaagactccgtctcaaaaataaataaataaataaaacaaaacaagaaactacgtaactgtacctaaccaattattgaatgtggttttcctcgttatgcaccttataaaactctttccgtcaaaccccttcaatagaccattaactacaacccatagctgggtgctctacaattttggaatcactctttgattaaattctttaatatttttgaggtgacttccataaatttttaataggagaaaacaggaactgggagcctcacggaccaaagctcttcccattcatgaacccacaccccaagtcaggattctcctctcacgaccctctcatggtccctgcacatctgggagagactccgcgctgcgggtgcagagcggccccaagagggctccaggccagggcacaatcacagcgcagggaagagacaggacgcccggggaccgggtgtcagcgcagcctccatcttatggctgaaccggactgaggtcgagctaggcaagaactcggggcacagatgtggagctgactgcggggaggcctgagtcccgccacagccacttcccaccggttccaagcagcccgggccactctctcagtgtgtcggacccggcacactcaccatttctaggcttccagggggtcctggcgacttagttgtggatctcccaatacctgcaggtcatagggccacagaggctgggactctaggagcagaggacacacagcagtaaggacgagaccttgacctccggctgcagcgagagacaaaggaccgaccacatcccggaagccgacctgtcccctccagctgcctgcctgattggacgttcccagcccagcatccctgattggataatgtttaaggccccgccctttcaggccctgagtgacagaagatgtgatcagatgctgggctgaatgaagaaagagagccagcgtaggctgcaacctttcaggcagggcttcctccctgagctgagccaggcccaccccagagcatgcgaatattctatctcttctttactctctctctttttaaatgtattcgaaatgtgaacgaatatattttactgccatgttaataatacataaaacttttgttccagagtaaattaatttttactttagtcatagtgtgttatcaatactaaaggccgggcgcgatggcttacgcctttaatctcaacagtttgggaggccgaggagggcggatcactggaggtcagaagttcaagaccagcctggtcgatagggtgaaaccccttctctactaaaaatacaaaaattagtcgggcgtggtggtgggcgcctgtaatcccagctactcaggaggctgaggcaggagaatcatttgaatccaggaggtggaggttgcagtgagccgaggttgggccattgcactccagcttgcgcaacaagagtgaaacgccatctcaaaaaacaaaacaaaaaaattaaacttattttagtaaaaccttataaataaatccatcaaatttgtcacttttccaacactctacattttcatatatattttataatctcacatttttttaactttttctattttattttaatagatttttttaacttgaaacaaccttaaattattattattattattattatggttgttgttgttttttgagacagagtcttgctctgtccaccaggttagagtgcaatggcatgatctcagctcactgcaacctccgcctcctgggttcaagcaattcttctgcctcagcctcccgagtagctgggattacaggcgccgtccaccacacccagctaatttagcatggtgacctgaacttgtagttaccagctattcaggggctgaagtaggagtattgcctgagcccaggaggttgtggctgcagtgagccctgatcaagccactgcactccattctgggtaacagagtgagaccctttcttaaaaaaaagacaaagcatataaccttaaacttatgggagtttggggctttttatttttgtcttaaattattatatttcaatagttttggggtatacgtagtatttggttacatggataagttcttttgtggtgatttctgagatttacgtgcaccaatctcccaagcagtgtgcactgtacccaatgtgtagtctttcatccctcaccccctctcccacccttcccactgagtgcccagagtccattatataattcttttatttatttatttatttattttctgagacagggtttcattcttgttgcctgggctggagttcagtggtgtgatctcggctcaccacaacctccacttcccaggttctagcgattctcctgcctcagcgctcccaagtagctaggattataggcatgccccaacatgcccggctaattttgtatttttagtagagacagggtttctctatgttggtcaggctggtcttgaactcccgacctcaagtaatcgcccgcctctgcctcccaatgtgttgggattacaggcgtgagtcaccgcactcagacccattatataatttttatgcctttgcatcttcatagcttagctcccacttataagtgaggacatacaatatttgggtttttatcccctatttcttttttttttttttttttgagatggagtttttttttgtgatggagtttgctgtgattacaggcatgagccactgtgcctggcctattttttgatgttttaattatggtcttttctgtttgtttgtttttgagatggagtctcgctctgtcgcccagactggagtgcagtggtgc

SEQ ID NO: 1561323 - DNA, 4001 bp, Homo sapiens
agagtgttctgctgttaatggaaaggttggtggttgaagaacagtctgtgtaaatagtggcaatgtcagtgactacatttcatgtcacagtctagcacaaataaatgttaggtacacgaagggagggaaaactgggtgccatagatctagaaagtcaccagacagggagaaggcaagtcaggtgggatctattaggcttactgtaagactactgatcccaaatccttacccaagatgcttttgggctgggacgataagggaagtaggcttgcactcagtccacaacatctacccagggaactggggaaggaggcagtgcctatagtccagatatgaggacagagctgctcctgaggaaaaggagaaacagagagcctagtccagggcacaagggtgagtatgagggccttacccagggaggacgtaagtgcaaagttctccagcatcacatcgaagtacaggtgtttctgagcctcatcaaggagatcccattcctcccaggagaagtacacggccacatcttcaaaggtcacacttccctagcataatagggattgatgaaaccatgaacagtctcaatttggaagactcaaaatccatgtccccatacattctcctcccaagatccccaagtcagaagagacaccagaccttggtgtcattgatccctgctgtctcttcacattcccattagtcactgtgttcattctgttttccactctgtatcctgtcaacacttgggttagataaatctccctcctctgatcccaaactccaacttcctcacaatagatgccaaacttcacagaaataaaggaaacctgcagttccctgaaccagctcagcctcacctccaaggagttccaaaagctggtacctacctgtttctatcataaattttcacccatctttccattggctgctccaaatggaaacattggcctggactcagggcccttagctcagggattctccagggttcccaaaccaaacgctgagagaatggtaggtgagtcccatgacaccacaaatctaaagaaaatatctgtctggggagggtggagggacattccagaccagtgaggggctgagatacctccacttacctgtgtaagtttgaaaagcacctctgtagctatgggaacctgtggaaagacgcaggcctcagaggaatgtgatcatggcagtgctccatgggcacaggccttccctgtacccttgccccggcccagagccacgtaactttgggtcgactgtctaacctgtgcgcctcggtccttagtgctgcctctcaccagttgtgtggccttggaaaaatattcaacctccctctgcctcaacgtcctcatccatctctaaagtcttttcttccactgaacagcctgcagaggatttttcaaatttaactcagatggtgtctctcgtttgcgcaagctctctatggctcccacggccctaagaataaaggtagatctctctcaaactttgttccctgcagtaacaatgtggagcccaggttcctgaatgcccccttctcggttgcccgtccaagccctgcacgcgccggtcctgtcccttgtccccctgcccaccacatcggatgtcagaaataggggccccacccacgagcctcagtgtccccgaccctgtgctacagagacgtgagctggtgcctctcacttgggacttaagaatctcggccgggggaggcccggagatcgcagcgctcaccgaagccgggtccctcagtgcggtcgccatccgagtctgtgggcggagctggaccgggagctgcgggcgacccggggggaacccgagcatcgctatccccaggccggcctcgcgggcggctctgcccccgaccctcagacctgactctcgcgccttcacggtccgtcacttcgatcccgatgcagcgtaccaaagcggctgacagacagaacggacctccgggagggcagccaaaatgaccgctgcgaagacgccacaagtcccgccctggggggggcgggggtagacccacacggaaatgcccctgtcttggattttcattggatcaaagtactgccgctcgacgcaaggctttctgggtaatgtagtctcccccaggctgcgacggagggcgccttgtgtgcagacagctgggagcgctaggaagctgcgtctgctgccttccagggcgactgaggggcttcggtgtttgaggtcttaagtaggttgacacttgaacaacacaggtttgagctgtgcgggtccatttacacgtaggcgttttttttccccaataaacgttacttcgagtgtgctccttttcctgcctcttccagctccccgacctcttgccccagagacagcaagacctcattctcttgcccagcatgaagaacacaaggatgaagacctttatgatgatccacttccacttaatgattagtaaatgtattttcccttccgtattcttttattttcctttttttaattgggtgtaatgtcaacgagcctcttacaattttcctgataccctttctctggtctgttttagtacaagtatagttcttatactaaaatatatataatgcatatatcatacaaaatgcatatatcatatatattatgcatatatcatgcatatatcatacaaaatgtgttaatcgactgggagtttatgtaattcataaggcttccgggcaacttcataaggcttccgggcaacagttggctattagtagttaagacctaggggagtcaaaagtaatacaagcattttcaattccgcaggggtcggtatccctgacccctgcgtcgtttaagggtcagctgtatatcagtctctagtgtagaggttcacttcagtatttagacatcatttcagattccatgcagcccaccccagcagatctccactggtagtgggaagcgaaaaaacgttatcttattgctcttcaaatgcatgcagcctgaagtgttaaagtcactttttgtaggttttgtcagggacaaaagacaccagacagggctacaatgggaagatagtggagggatagtgggcagccctgaagccaacggacaagggaagttccctgcttctggtgcccccagaaaacgctctcctgcctgcaaagtcagttttgttcataaaacatgaagctttaatacatgaatgttcattttccttgtataatcaaaacatttaatttttttttgagacagggtctcactctgttgtccaggctggagtacagtggaacaatcatagctcattgcagcctccacttcctgggctcaagtgatcctcccacctcagcctcttgagtagctggcactacaagcacaccaccacacccggctagttaaaaaaaaaattattgtaggaatggagtctccctatagggcccaggctagtctcaaactcctagggccatgcaatcttcttgcctcagcctcccaaactgctgagattacaagcatgagtcaccatgcccagacaaaagtttttaatgcataaaatatcaaattattatcattattttaaacagggcctcactccgtcgcccagaaagtttatattattttaaggtacatatatgcacattgttaaatgtacacatatacattttatatatattagatagatcaaattttacgtttcacaataaaaatgatcctttaggacaaattaataccagtaaaataaaataaaattaaaagttgtgaaatgattttatcaaatatataatgtatttgtttacacatttactacaaaaatttataagtggaatgactactattgtacatctggttagatctcacaatgggcttgtcattgtttttaggaaaaaggttagagttcttggctgggcctatattacagaaccaaccattacatattgcttcacctcctaccatgtatctcctctatatcctacacatgctgaatttcctcagatccctgaaagctgtgtgtgcattcacatgcagggatctttccaggttaccttttt

SEQ ID NO: 1561324 - DNA, 4001 bp, Homo sapiens
atccctgcactttgggaggctgaggtgggcagatcacctaaggtcaggagttcgagactagcctggccaacacggtgaaaactcgtctttactaaaagatggggtggtgtgtgcctataatcccagctacttgggaggctaagggaggaaaatcgcttgaacccgggaagtggaggttgcagtgagctgaggtcatgccactgcactccatcctgggcatgagagtgagactctgtctcagaaaattttaaaatgaattaaataaataaaaataagcttaatggttactatctttatatcctgcattcagaggtaattaagctttttttcttgtcgtatttctgcaatttctgaatgctccataatgatatggttctataagaatacaaaatatgtgtaataagtgaaaaaaaatagttgacaaagttttaaaagagtcctagagaggtccaagcccatgagccttgctctcaaggtccctccaatcaagtcctaacttgctttccccacctgattccagctagttcctctgcctcagtgagaatgtatcccagaaattatcagcttgggctctgacctggaccgcaaaggttccaaccccggctccacttcttattacttgggcaactatgggcaaataactcctgctccctttgtttcactctcatctttaatagacgaaatggcagtacctctccacagagctaccatgtggtgtacgtgaatttctttgtataaagcccttagaattgaagatagcaattaagactttcttatcaatgcccatgcccgattacagcatcctacaatagatgtgaacgttactgtaaaagaaaaatgacaagtcacactcgcgtggagctttgttgtcagtagtcaaggagtcactccgtctacctccaagcaatccttttagagaagtcaggatgcggaaacaatgctacaaaataccatggttgtgtcaccactcttgacaaaacggtcaagaccctcccctccttctgtggaaattggagatacccctccttttcctaaataagaggtcaaagacggccgggcgcggtggctcacgcctgtaatcccagcactttgggaggccgaggcgggcggatcacgaggtcaggagatcgagaccatcctggctaacacggtgaaaccccgtctctactaaaaatacaaaaaattagccgggcgtggtagcgggcgcctgtagtcccagctactcgggaggctgaggcaggagaatggcgtgaacccgggaggcggagcctgcagtgagccgagatcgcgccactgcactccagcctgggcgacagagcgagactccgtctcaaaaaaaaaaaaaaaaaaaaaaaaaaaaaaaaaaaaaaaaaagaggtcaaagactgtccagaattttccagcgttctgcagggatcagagagaagagccagctggagctctgacaccagcccagggacctgaccatttctcaggaaattaacaagagatcgccattcactataacaaaaactgttttaagactcttttatattacctctttcaattcccaagacaattctattaggaaggtcttaatatcccccatttaaagaaaagcaaaaagagtcccagggagattaagtaacaccccaacgttgtaccgggggaatcggccccgcgccagtagtggagggatgcggattgggcgagctgagagccccagaaacccccaaatagggcgaaacgtgacaggaccgagtccctcgggatgctaggacagccctaaacgcaagaaggctctgccgcggggatcgcaaaccgccgccctcacccttccaaacctttgctttccgacggtgcttcctttcctctaaatctatcgctagctcgttgagggttccgagagtaggtccaggaaattcagaagggcctgcgagacgcagaacagctcaaaatatcacagaataaagggtaactcccgcagccgtagctcccgcgactccacagagcgtctggactacatttcccagaattccccggatccgcctgcctgaccggaagtgcccgcaaccccaccgaccgttgggacacttcccagaatgcccaaggagtaaacgttcacagttttaccctccagggggaagtgttgcaactacacatagcttcttgaccacacttcttccaagtccccggagaagggaatcccccatccgaaacgcctatgtggtaatatggactcctgcactgagtgtcgtccttacctttctcttgagtcttcaagcaaaaatattacataaacaatgatttcctgattgaaatatccccaattattacagaagtattactggagagtgaacaaaggtggagataaaatcttcaaggaactgacaagaaattactgcttgaggatcagtagagaactgaaaagaggaaaatgtttagtataacctgatgatgtgaggctaaaactgatagtatgccgatgtaattttaatttacatttcctgtattgtaaatgaaatagaacatcttttcatattttcaaaggccatgattattattattattattattattggtaaattgttcaaaccttttgcctactgtactaatggctttttggccttttccctcatttttcaaatattgtttatacatttgtaaaataattcttttttcttgaaaatttctttttttttttttttttgaggtggagtctcgctctttcacccaggctggagtgcagtggcatgatctcggctcactgcaaactctgcctcctgggttcataccattctcctgcctcagccttccaagtagctgggactacaggcacctgccaccacgccaggctaattttttgtatttttagtagagacaggttttcaccgtgttagctaggatggtcttgatctcctgaccccgtgatccacccacttcagcctcccaaagtgctaggattacaggtgtgagccaccgcgcctggcccaaagttttcttttattagttttatagattgaggtcttagatttaagtttttaatccattctgatttgcttttttatgtggtaagaaatagaggtctagtttcattcttctgcatatggatatccagttttcccagcatcatttattgaagagactgtcttttcctcatgtgttctcagcacatttgtcaaaaattagttatccgtaggtgtgtggatttgtttctgttctctgttctgttccattggtctctgtgtctgtttttatgccagtactatgctgttttggttattatagctctgtagtataatttgaagtcggttttgttctttttggtcaggatagcctcaattattctgggtttttttgtggttccatataaatttgaggctttttaatttctctgaagaatgtcattggtatttttaacagagattgcactgaatctgtagattgcttgggtagtatggatattttaacgttactgattcttccaatccataaacatggaacatttttccattttttggtgtcctcttcaatttttttgtcagtgttttatagtttttattatagacaactttaacttttttggttaattcctaggtatttgactttatgtgtggctattaaaaatggcattacttttgattactattgatatagaaaatgcagtatatccatacattaaaatagtatcaaaaacaccatgagcaaaaagagaaagctgaagaatcatgccagattaatggagacaggagaaacgtgacagttaaaaacaattcataaaagtgggctaaactggaggcaaatcaattacaaggaatttaaattaaaaacagaataaatttaaatatggagtgtaggttaaataacatatgaacatgcacaggggacacacacagacctgcagaagccagtgcctcatccccatgctaacaccaccaccagcactactacacatacagtcaccagtggggggcccccctgcccccttgagccatgctgcctccaccactgctgtaagtgct

SEQ ID NO: 1561325 - DNA, 4001 bp, Homo sapiens
ggcacagtggctcacacctgtaatccctgcactttgggaggctgaggtgggcagatcacctaaggtcaggagttcgagactagcctggccaacacggtgaaaactcgtctttactaaaagatggggtggtgtgtgcctataatcccagctacttgggaggctaagggaggaaaatcgcttgaacccgggaagtggaggttgcagtgagctgaggtcatgccactgcactccatcctgggcatgagagtgagactctgtctcagaaaattttaaaatgaattaaataaataaaaataagcttaatggttactatctttatatcctgcattcagaggtaattaagctttttttcttgtcgtatttctgcaatttctgaatgctccataatgatatggttctataagaatacaaaatatgtgtaataagtgaaaaaaaatagttgacaaagttttaaaagagtcctagagaggtccaagcccatgagccttgctctcaaggtccctccaatcaagtcctaacttgctttccccacctgattccagctagttcctctgcctcagtgagaatgtatcccagaaattatcagcttgggctctgacctggaccgcaaaggttccaaccccggctccacttcttattacttgggcaactatgggcaaataactcctgctccctttgtttcactctcatctttaatagacgaaatggcagtacctctccacagagctaccatgtggtgtacgtgaatttctttgtataaagcccttagaattgaagatagcaattaagactttcttatcaatgcccatgcccgattacagcatcctacaatagatgtgaacgttactgtaaaagaaaaatgacaagtcacactcgcgtggagctttgttgtcagtagtcaaggagtcactccgtctacctccaagcaatccttttagagaagtcaggatgcggaaacaatgctacaaaataccatggttgtgtcaccactcttgacaaaacggtcaagaccctcccctccttctgtggaaattggagatacccctccttttcctaaataagaggtcaaagacggccgggcgcggtggctcacgcctgtaatcccagcactttgggaggccgaggcgggcggatcacgaggtcaggagatcgagaccatcctggctaacacggtgaaaccccgtctctactaaaaatacaaaaaattagccgggcgtggtagcgggcgcctgtagtcccagctactcgggaggctgaggcaggagaatggcgtgaacccgggaggcggagcctgcagtgagccgagatcgcgccactgcactccagcctgggcgacagagcgagactccgtctcaaaaaaaaaaaaaaaaaaaaaaaaaaaaaaaaaaaaaaaaaagaggtcaaagactgtccagaattttccagcgttctgcagggatcagagagaagagccagctggagctctgacaccagcccagggacctgaccatttctcaggaaattaacaagagatcgccattcactataacaaaaactgttttaagactcttttatattacctctttcaattcccaagacaattctattaggaaggtcttaatatcccccatttaaagaaaagcaaaaagagtcccagggagattaagtaacaccccaacgttgtaccgggggaatcggccccgcgccagtagtggagggatgcggattgggcgagctgagagccccagaaacccccaaatagggcgaaacgtgacaggaccgagtccctcgggatgctaggacagccctaaacgcaagaaggctctgccgcggggatcgcaaaccgccgccctcacccttccaaacctttgctttccgacggtgcttcctttcctctaaatctatcgctagctcgttgagggttccgagagtaggtccaggaaattcagaagggcctgcgagacgcagaacagctcaaaatatcacagaataaagggtaactcccgcagccgtagctcccgcgactccacagagcgtctggactacatttcccagaattccccggatccgcctgcctgaccggaagtgcccgcaaccccaccgaccgttgggacacttcccagaatgcccaaggagtaaacgttcacagttttaccctccagggggaagtgttgcaactacacatagcttcttgaccacacttcttccaagtccccggagaagggaatcccccatccgaaacgcctatgtggtaatatggactcctgcactgagtgtcgtccttacctttctcttgagtcttcaagcaaaaatattacataaacaatgatttcctgattgaaatatccccaattattacagaagtattactggagagtgaacaaaggtggagataaaatcttcaaggaactgacaagaaattactgcttgaggatcagtagagaactgaaaagaggaaaatgtttagtataacctgatgatgtgaggctaaaactgatagtatgccgatgtaattttaatttacatttcctgtattgtaaatgaaatagaacatcttttcatattttcaaaggccatgattattattattattattattattggtaaattgttcaaaccttttgcctactgtactaatggctttttggccttttccctcatttttcaaatattgtttatacatttgtaaaataattcttttttcttgaaaatttctttttttttttttttttgaggtggagtctcgctctttcacccaggctggagtgcagtggcatgatctcggctcactgcaaactctgcctcctgggttcataccattctcctgcctcagccttccaagtagctgggactacaggcacctgccaccacgccaggctaattttttgtatttttagtagagacaggttttcaccgtgttagctaggatggtcttgatctcctgaccccgtgatccacccacttcagcctcccaaagtgctaggattacaggtgtgagccaccgcgcctggcccaaagttttcttttattagttttatagattgaggtcttagatttaagtttttaatccattctgatttgcttttttatgtggtaagaaatagaggtctagtttcattcttctgcatatggatatccagttttcccagcatcatttattgaagagactgtcttttcctcatgtgttctcagcacatttgtcaaaaattagttatccgtaggtgtgtggatttgtttctgttctctgttctgttccattggtctctgtgtctgtttttatgccagtactatgctgttttggttattatagctctgtagtataatttgaagtcggttttgttctttttggtcaggatagcctcaattattctgggtttttttgtggttccatataaatttgaggctttttaatttctctgaagaatgtcattggtatttttaacagagattgcactgaatctgtagattgcttgggtagtatggatattttaacgttactgattcttccaatccataaacatggaacatttttccattttttggtgtcctcttcaatttttttgtcagtgttttatagtttttattatagacaactttaacttttttggttaattcctaggtatttgactttatgtgtggctattaaaaatggcattacttttgattactattgatatagaaaatgcagtatatccatacattaaaatagtatcaaaaacaccatgagcaaaaagagaaagctgaagaatcatgccagattaatggagacaggagaaacgtgacagttaaaaacaattcataaaagtgggctaaactggaggcaaatcaattacaaggaatttaaattaaaaacagaataaatttaaatatggagtgtaggttaaataacatatgaacatgcacaggggacacacacagacctgcagaagccagtgcctcatccccatgctaacaccaccaccagcactactacacatacagtcaccagtggggggcccccctgcccccttgagccatgctgc

SEQ ID NO: 1561326 - DNA, 4001 bp, Homo sapiens
ttggtgcaaacgtaattgcagtgtaccattacttccaatgacaaaaaccacaattacttttgcaccaacctaatagccaggcaaaatttactggaaatgtaggttctcactgcacactcaaacttgaaaaccctaggattaaaaaaccactcctggggcctgacattccattacagggggtgcccgtcctcacccactgagagcaggttcctgaagttctcaagcatcacatctcggtacagcttcctctgggcagggtccagcagccccagctcctcctcagtgaagatcacagccacatccttgaaggtcactgcctcctacaacatcaagcagatgtcacctcaatcttacggccaaagactattgggagacagcagcattgcactggcacaagggacaagtgtaaagttgttttggatcttgagagacataggtcagcttatagatttcctacttattctgtttgtgtcctgacaatgactgattaggcaataggggtttggaatggagactgcacacaccagtcaacagggtgtgtcctgaataaatagtgggtaaaggacatttactgagatgctatctctaactccacttcaggaaagcttgctgcagagttagagtgatatagtccaaatgctctgtttgagtcgcgggccctttgacgaaaatgagactgaggcaggagaatcacttgaacccgagaggcggaggttacagtgagccaagattgcaccactgcactccagcctaagcaacaagagcgaaactctgtaaaaaaaaaaatatatatatatatagagagagagagagaaagaaaatagtagataaggttaaaaaaattaaaaagcaaaaagcaaacaaacaaaaactcctatagaagtccaagcccctgagccttgcctcaaggtgccttcaatcaagtcctaacttacgttctccacctgttcccagctagtacctctgcctcaatgagaattgcattcaagagatgatcaactcaggctctaacctggactgcctaggtttcaactcctgctccacctgtgtctcacgcccatctttaaaatgaaaaaagcagcacctctccacagtgccactgtgaagatcatgtattttggggtataaagtacttggaataaagttaccaattaaggcttaatcattatcgacacccatgcccgagggacaaatcctacacactctcggttgaggtaagcatctctgtcaaagaaaaaaagccaaggatcactcacgtagagctttgccatcagtagccaagaagtcccttcctgcagctcttttagaaaggtcgggctggggaaaaagaaagctgtgaaacaccctgaccgttttgccgtcccccataaaagttaaatgctcccctcactttcctaaaaagaggtcagaaggcgtcagggatcatccagcgtcctgcagggatcaggcagaagggccggcgcccctgcagctggagctctgaccccaccagaggacctgacaggcttcgtgggaaattaacaagagaccaccagacaccgagtgacagggactgcttttaaggctctcatttgtgttacctctttcaggtcccaaaatgaatccattaggatggtccgaaaagtcccgttacaaaacaaacaaacaaacgaaccagcaatggaagataaacggacattaagtgacactccacaccacactgaaaggggctgcacacgtagggaggagggaggcggactaagcgaggtcaaagtagggcacaccgggccgcgccaatcccactccctgagaccctagcagagccccccgacgccagaaggctcagctgactggaacggcaatccccgcccgcgcccctccaaacctctgctctccgcccaggcttcttttctcctgaatcgatcattgggtggttgcgagccccaaggaaaggagactcgttcggaaggactcgcaagatgtggaaatgactcaaactactgtggtaaatgaaatagcaacgtcacagttggggaccggaagtgctcgagcctccacagagcgtgtggactccacttcccagaattccccggactcgcccgtgtgagacaaagggcccgcgactcaaacagagcatttggactatatcactctaactctgcagcaagctttcctgaagtggagttggagatagcatttcagtaaatgtcctttacccactgcttattcgggacacaccctgttgactggtgcgtgcagtctccattccaaaccactattgccattcctatcgcttccataaagcctaagaaatcaaatattttctttctctgccttcatctagctagaaattttcatgggacacaattttgggaagtgagacattaggagaagtgagctgtcctctcctgacaagaaatgtgcttggcaggctgtgagtacacgaggagttgaaagagtaaaaaggtgatcgtctcagtggactgtaggtattggcgaggttctaatattactgatgctagcatgctggtgggaccaaggtggaaatacaagtcaaagttgttggagagtagtgctgcaaattattatggaggaatatttgctagaaaatgacgaggtctaaaatatgaccatgggagagagtgtcccttgatatttcacatgaatctcaggtggattttttcatttctgagaaaaatgttactgtgattaaggattgcattgaatctatagatataggtattgacagccttgcaatatcaagtcgcccaatccattaataatggatatatctccatttatttgcgccttctttaatttttttttttttttttttgagacagagtctcactctgtcgcccaagctggagtgcagtggcacaatcttggctcactgcaacctccgcctcctgagttcaagcgattctcctgcctcagcctcccaagtagctgggattacaggcacgtaccaccatacctggccaatttttgtatttttagtgaagacaggggtttcaccaggttggccaggctgatctcgaactcctggcctcaagttattcgcctgcctgggcctcacaaagtgctgggattacaggcataagccaccatgcctggggtgccttctttaattttctttagtaagatgttgcaaaattcagtgtccaagtgtttcttgtcattggttaagacagttcctaagtaatttatttatttaatgctattgcaaagggaactattttccttttcagattaattgtttttgtatagaaatacaactgcttcttctatgtagatatttttcctgcaactttctgactttactagctctaagagtttttttttcttgtgaattctttagaatttttatatataagaacatgtcattagcatatagacaattttacctctgtttccaattttaatagctttattttctttttctatctaattgttctgcatagaacttccaatactacattgactaaatgtgggaaaagtggagaaaactcattgtgttcctgatattagaagaaaagctttcagtccttcaccattgagtatgacaatcagctctgagaatttccatatatagcctttattttgctggggtagtttattctccttctagttatttggtatttcaatcatgaaaaggtgctaggtgctgaattttgtgaaactgaatgttctgcattcactgacatgatgtgatttataccttccactctgctcatgtggagtattacattgatatttgtatgttgaaccataattatattcgccttccaggaataaaacagttcggtcactaagtgtaatccttttaatatgctgctggatcttgctggtattttgctggtgaattcttgcatcagtattcataagggatattggtgtataattttattgaattgtctttttctggtttggcatcagggtaatactgacctgacagaaggatcaaagaagtgttctctcttcttgcatttttgggaagaggttgagcagctatggtgtta

SEQ ID NO: 1561327 - DNA, 4001 bp, Homo sapiens
gaaaaattcttctgccttgagatgctgttaatctgtaaccctagccccaaccctgtgctcgcagaaacatgtgttgtattgactcaaggtttaatggatttagggctgtgcaggatgtgctttggtaaaaatgtgtttgcaggcagtatgcttggtaaaagtcattgccattctccagtctcgattaaccagggacaccatacactgcggaaggccacagggacctctgcccaagaaagcctgggcattgtccaaggtttccacccactgagacagcctgagagatggcctcgtgggaagggaaagacctgaccgtcccccagcccgacacccataaggggtctgtgctgaggaggattagtgaaagaggaaggcctctttgcagttgaggtaagaggaaggcatctgtctcctgctcatccctgggaatggaatgtctcggtataaaacccaatcgtacattctatttactgagataggagaaaaccgccttatggctggaggtgagacatactggcggcaatactggtctttactgcactgagatgtttgtgtaaagtcacacataaatctggcctatgtgcacatccaggcacaactcctttccttaaacttatttatgacagagtcctttgctcacatgttttccggctgaccctctccccaccattaccctatagtccttccacatccccctcaccaagatagtagagatagtgatcaataaatactgagggaactcagagaccagtgccggtacaggtcctcatttgctgagcgccggtcccctgggcccacttttcttcctctatactttgtgtctgtgtcttatttcttttctcagtttctcatttccaccttgtgagaaacacccacaggtgtggagaggcaggcccccttcaatatcaaactccaaatgaacaactatggaaatgtgacagctaaagacaacgcataaactggactttgaataggtgaagggtggggcagaggacagtcataaggactttaaatgaaaaatttaacaaattcgtatatggaactgcagattagataacatgatgctaggtaatatgctatccaacactatctagtaagtacactacaaatactagtattcttttaacacatctatctgacatgtaatcggtaacagtattatttaacataatatccaatattatctaccatgttatgtgaaaccctataaccagcccttcctaaatgcctcttaccaagacaccccacaattaccgtggtatgtgggcttccttgctgcagaaagctaccaatcagctgtctctggttacaggtatgttcctggtggtatttggttgatggtcatcaacaaagcaaacaggaaaaatgtaaacacttggcaaatttgggtaaagggtatatgagaatttcttatactgtttttgcaatttttctatagctttgaaatgatatcaaacgttttaaaatatcaggcaacaagagaccactcaccaagtgacagggacaactttaaggctttcatttgtattatctctttcaattcgcaaaacaattctattaggatgaccctataagcaccattttaaagaacagcaatgggaagtacagagacattaacattccacatcacactgcgagaaagagtgtacacactgcatacgtagggaggcggactgagcgaggtcaaagtcctggaaaccctcagagcagggcacacaaggccaccccaatcccaccccccgggaggcgagcaaagccccccgacgccagaaggctccgctgacgggaacaataaacaccctccccgccctcgcacctctaaacctctgctcttcgccaaggcttcttttcccctgagacgatcatcgatcatcgggtggttgcgagcctcaagcaaagggggttcgttcaaaatgtcctgcaagacgcagaaatggctcaaactaccccggtcattaaagcaggaacctcagactaggagaccggaagtgtcctctctgcgccagagtgtctggactccactccccagaattccccggacccgcccccctgagccaaagggcccgggactccgcagagtgtctggactatcgttcccagaattcaacggttcacctgccagagccaaaatacccagtgttccacgagccagtggactacacttcccgtaaaatggactactcttcccagaattctccggaaacgcctacctgagctgaagtatcaggaatcccgcaaggtgtctggactgcagagcctcagatgcaaaaggaaaatgtccatcacctcaccctttaggctcaagtgttgcgactacatggtgctcctcgattacacttcccgcaacacccacggggaacgaatttcatagccccaggttcctggtggggaatgcagactgttaccctgacagttgtccttcccagagtcctcgagcgaaaatattgaatagaaagaatttatgaagtctaaatgtctcccatgattgacaggagtgttcttggacagggaacaagcgaggagatacaatattcaaggagctagatagagtgactgttgagccgtcagatggctgaaaggaggctcagggtttaaagcaaggatatccaactccagggccacagacctgtaccggtccactgactgttaggaaccgggcggcacagcaggaagtgagcggcaggtgagggagcattatggcctgagctccacctcctgtgagatcagcccagcattacattctcataggagcgcggatcctattgtgaactgtgcgtgcgaaggatctaggtcaggcgctccttatgagaatctaatggctgaggtggaacagtttcatcccgaaaccattccccagtccgtggaaaaattgtcttccacaaaaccggtccatggtgctaaaacggttggggaccactggtttaaagaatgagccaggtagaatgggttgggaggggcaatgagaagccaggaaagcatcagcccctgtaactgaaaagtagatcagtggcttcccgtttgcaacgtccagttaacaagagggagatctggtataaagaaagtgatttattctagagctagcgtaggggaagtagcacaggtgttgtctttaagtgcacggcttggcttttagagcagaaagcaggcacttttaaaaggtaggggaggaagagggaaggggtctgtgtgctggcttggtgccttatctattaggcagttgagctggctttttcatgggcagaaataagttgtaaccagaagggagagagtagcaggcacgctttcaactgttgtctcttcaggcaacctcctggtgagtgagagttcagaggccagcatgctttagtttgtaaattgactgttaattctggaggagagttctggcttggagcacacagttagatgaactttccctgtaggaagtgtctggtgaaggggaggtaaaagtctatatttgcatttttaaagggctacataggaagtggggaactaagggaatgagaaaagagagagaaataaataagctgtctcttagaaaaatggtggttctcagttacagccctagtccagatgctgtggtaccactggtttgacaggaaaaacaaaattccagccaccaatggagaagctgtgtcctcatggaaaagctacatttaacattctcatggtagtaatatttctactttagatgtagaaacgctaaatttcagagaagttagtgaattgctaagtatcttaaagcaagtataactgttgaagagcttggcattggtatcaatctgacacccaatgtctgattcaatgccataaaactggagaagattctataggtgacggagcatgatttattattaagagtttcttcctttccatttcttggttaaaatatcttcattataggaaacaatttgaaaactggcatatgttagttgaaagacattaataatagtataaagctaaatcaggaaacaattcatctaaaattctcttttgaagataaa

SEQ ID NO: 1561328 - DNA, 4001 bp, Homo sapiens
acaaaacaaacaggaaaaatgtaaacacttggcaaacgtgggtaaagagtaaataagaatttcttaggctacttttgcaacttttctataggtttcaaatgacatgaaaataaaaagttttataattttaggaaacagtcataggaaaaataataacaataatgagattaatgagtatgatataacatgataattcactagtttagtctgtcagcatttggaaatttccatagttaaacacataagggggaaatattaagaaaaaaattataaaaatttgtaaatgttcataaataaacctataaatatacaaaaagaaagaaacacattacgagcttaacagttgctacctttacttcatggattcgtaggtaataaaaacattttgttcttttttttttttttttgagacggagtctcgcactgtcgcccagactggagtgcaatggcagatctccgctcactgcaacctccgcctcccagattcaaacgattctcctgcctcaccctcccgagtagatgggattacaggcgcccaccaccacgcccagctaatttttgtaattattttttagtagagatgcggtttcaccatgttggccaggctggtctcgaactcctgacctcgtgatccgcccgcctggacctcccaaagtgctgggattacaggcgtaagccaccgcgccaggcccattttgttcttaataaagaaaaatagaatgctgtacaatgacatggttctataagaatacaaaatatttgtaatgattgaaacaaaatagttgacaacatttttagaaactcagaaaatttcaagcccctaagtcttgctttccccacctaagtccaactagttcctctgcctcagtgacaacgtatcccaagagaagatcaaatcaggctctgacccagactgcttaggttccaaccccagctccacctctcactagtcgggtgcctatgcgctctgtgtctcactttcgtttttaaaatagaaaaaagcaatacttctccacagagccacggtgtggcgtaaatttatttgtataaagcccttagaatgaagttactaattaagacttaattattatcgacccccatgcccgaggacacaacctatacactctcggttggggtgagcatctcggtcaaagagccaaggaccactcacgtagagctttgccctcagaagccaagaagtccctccctgcagctcttctggaaaggtcgggttggggaacgagaaagctgtgaaacaccttgaccgcgtcgccgtcccccataaaagttaaatgctcctttcccttcatgaaagtggacgcaaccctcgctctcctaaaaagaggtcagaaggcttccgggatcatccagcgtcctgcagggatcagggagaagggccgaggcccctgcagctggagctctgaccccacccggtccttcgtgggaaattaacaagagaccaccagtcaccaagtgacagggactgctttaaggctctcatttgtgttacctcttccagttcccaaaacgattccattaggatggccctaaagtccccattttaaagaacagtaacgggaaacccaaggagattaacaccccaacgttatatcgagaagaagtggccacgcgcgtggggtgcagggggcggagtgggcgagctcagagccccggaaaccctgaaaccaggtgagacgcgacccaaccaagtaccaatgcccccgggaagcgaggacagacccaagcccaagaaggtgccacggacgagaacgcaaacagcggcccttgcccctccaaacctctactctccgacgaggccccttttcccctaattcgatcaccagttctttgaggatccaatgcgtaggtccaggaaattcagaagggcctgcaacgcgcggaactgccccaaactatcgcggaaaaactgcagcaacctcagtccccgagcggaagtgtccgcgactccaccgaatgtttggactccacttcccagaattccccgggacccgccagccggagccaaactgaccgcgactccactgagcgtctggactacacttcccagaattccctgggacccaactgccggagctaaaccgaccgcgattccactgagggtctggactgtactcctgcagcattacactcaaagggaagtgttgacgactactgggaagcccttgaccactcttcccacggggaacgaatctcgtacccccgagcgcctgttgggaaatgtggacttctaccctgagagtcgtccttccctctccctgggtgcctaagagaaaataccgtatagaaaggaattcctgaagtctaaacccctctagtgaggacaggagtgttactggaaagggaacaagcgagatgatacactcttcaaataagttttgccagtggtaagaaatggcatgtagttttaatttataactcttgtaaagatggcatattcttgcatattttcaggtgtcattattacattttttgtaaattgtccagatgttttgcccactttcttattgagtttttggttttatccctcacttttcaagcactgttcttatattcatgatattaacattttatctcgcaaatattttctcaacaaaaacgtttttttttattgttttatctatgcaaaacattttaatgtattttattatttaaaacatctctattgaggtgtaatgcacaaaacgtgaaattcaccattttaggatatatgtagtacaaataaaaagttaggaaacattttcatcaccccaaaaaccccatacccactaagcagtcactgtctaacactaatctctgtcctattgaattacctattgtggacatttcatataaatggaattatacattatggaaccttttgtttctgacacctttcacttagcatcctgcttcttttttttttttttgagacggaatctcaaaaaaagtgccaggctggagtgcagtggcacgatcttagctcactgcaacctccgcctcccgggttcaagcgattctcctgtctcagcctcccgagtagctgggactacaggcgcgtgccaccacgcctggctaatttttctgtatttttagtagagacggggtttcaccgtgttagccaggatggtctcgatctcttgacctcgtgatcctcccgcctcggcctcccaaagtgctgggattacaggcgtgagccaccgcgccctgccagcatactgcttttaaagttcatccacatcacagcatgtaccagtacttcataatattttatgtttctactacgatttgttttttttgtttgctttgtcttgttttgttttgaggtggggtttccctcttgatgcccaggctggagtgcaatggcacgatctcagctcactgcaacccccgcctcctgggttaaaacgattcttctgcctcagcctcccaagtagctggcattacagccatgcgccaccacacccagctaatttttttgtatttagtagagacagggtttcaccaggttagtcaggctggtctcgaactccttacctcaggtgatccgcccacctcagcctcccaaagtgctgggattacaggcttgcgccacaatttgtttatccattcattgattgagggacatttgggttctttccaccttttggctgtagtcaatagtgttgctacaaacagtggtgtacaagtatttgtttcatcacctactttcaattctttggggtatatacctagatatgaaatttagtgattcatatggtaattctatgttgggaaccacgaaacaattttccacagcaactgcaccatttttacattcccaccttcagtgtgtgagggtagtaatttctccacatcctctccaatacttattttgtatatatgtatgtataaaatatatatgtatatgtatatgtgtgtgtgtataaattgaaaacggggtctccctgcgttgtgcaggcagaattgcagtggctattcacagacaacatctcactactgat

SEQ ID NO: 1561329 - DNA, 4001 bp, Homo sapiens
aagtagataggtggtctctgcatatttgaggtgacaaagaggattaactataagtgagcacaaggaggcttaatgggggatgaaaattatttaaactgaattatggtgatgtttattccactccacaaagttcctaaaaatcattaaagtgtacacacgaaatgggtagtttctatgatatgtagaatacacctcaataaagttggacaaagcattggtaattgttcatccacatgtcatttaacttaataagactggattctggatctacactgatagaatatttatagttgaatgaatgaataagcaaatgaaggagaagggagagttcacctttacagtagaatgtgcactaataaatgtatttctccttacaaaattttatttaactaaaaaattagggagtgtatattgagagcaacttgaatctgtgttcctggggtaaaaaaaaaaattcaaaataattttacaatgcggaaatctgacaaacatgactttagccaagtgaacaaagttgagatcaccaatgaagtgacaaactgacatatggcccctgttatgttgcaataagaaatttaccacttcaggctgggcacggtggctcatgcctgtaatcccacactttgggaggccaaggcggttgaatcacctgaggtcaggagtctgagaccagcctggccaacatggtgaaatcccttctctactaaaaatacaaaaattagccggatgtggtggcaggcacctgtaatcccagctacttgggaggctgaggcaggagaatagcttgaacccaggaggtggatgttgcaatgagctgagatcgtgccatgcactacagcctgggcgacaagagcgaaactccgtctcaagaaaaaaaaagagagagagagatttaccacttctgtggtattccagcaaaaaatgcatattttgaagttaaacgtgaaatacatcagaaaaactccaaatgaacatctttgaccaaaataacttcatctatactcttcaaaaataacaaggataaaataccaagaaaaaacgatgaaagctatgctatctttcaagattaaagactagaaaaacatgacaactgaaagcaacacccatgcccgaagacacatcctatacactctcggttggggtgagcatctctgtcaaagaaaaaagccaaggatcactcacgtagagctttgccctcagaagccaagaagtccctccctgcagctcttttggaaaggtcgggctgggtaaggagaaggctgtgaaacactctgaccgtggtcgccgtgccccataaaagttaaatgctcctctcccctcctggaagtggatgcaaccctcgccttcctaaaagagaggtcagaaggcgtccgggatcacccagcgtcttgcaggaatcagggagaagggccggtgcccctgcagctggagtttcaccccacccggggacctgacaggcttcgtgggaaattaacaagagaccaccagtcaccaagtgacaggggctgctttaaggctctcatttgtgttaccgctttcagttcccaaaacgattctattaggatggtcctaaactccccatcttaaagaactgtaacgggagacccaaggagattaagtaacatcccagcgttttatcgcgaggaagtggccacgcgcgtggggtgcagggaggccgagtgggcgagctcagagccccggagaccctaaaaccaggcgagacgcgacccgaccaagtcccaaacaccccggggacgcgaggagagccccaagcccaagaaggctccactgacgagaacgaaaacagcggccccgctccgccaaacctctgctctccgacgaggtttcttttcccctaattcgatcaccagttcgttaaggatccaatgcgtaggtccaggaaattcagaagggtctcgcggaactgacccaaactaccagggacaaaactgcagcaacctcacagtaacggagcggaagtggcccgctactccactgagtgtctggactccacttcccagaattcctgagacaaactgaccgcgacgaccccgagcgtctggactacacttcccagaattccctgggatccacctgccggagtcaaattgaccgagactccactgagcgtctggactacatttcccagaaatcccctgattcgcctgccggagccaagctgaccgctactccactgagcgtctggactaccattcccagaattgcttgtatcctccttctggagccagtgtgtacgactccacagagcatttggattacactcctccgaatgctgaaggaaaaacgctcaaaatctcattcttcagggggaagcgttgccactccgaggtgcccactgggaacgaatcccaaagccacgagcgcctgcctagtggggaatgtgaactgttatcctgagagtcgtccttctctctccctggtccaggacagaaaatactgaatagacaggaatttctgaagtctaaacgcctccaatgataacaggagtgttattggaaagggaacaagcgagaagacacagtcttcgaggagttaagttttgctaatctaatggtaagaaatggtttctaaatgtagttttaatttgtatttgttcttttgtaaataaagtggaacatccgtgcatattttccgttgccactattatagtctttgtgaattggtcaaatagtttgcccacatttctattgagtgtttagttttttcccctccgttaagtattatttacatactcatattaacattgtatcaaatattgctcaaccaaaaagcttttttcctttgacttgtttttcgctatgcaaaacgtttttaacgtggtcgttttattatttaaaaaatatttttgaggtgtaattcacaaaacaaaattattttaaggcacataattcaatggcaatggcatctagtacgaatacagtgttgttaatatatacgagttaagaagccatcacttaggcagatagggtatgggagccctcggtaaggcttttctttttaatgaaaagcagccccaaattatttcccttcctaaggaagagcagcctgtaaaatccagctgccgcagacatagataccagcagttgtgccaatcatgttaaagatggcggctccatcttcccttctctttgtcagccacgtgcacagtaagaagctggcaagatgggccaatcaactgggaagcctatttgcataagaagattagggtggggcgaccagccttccccacgcactatgtaaacgtcataactgatcgaaccaatctatgacccctatgtaaatcagacactgcctcctcaaactggtctgtaaaactcagcacattcactgccagccgacccttttccgctcggagaccccttcctctatggaggaacccgtttctctttctcttcttcctattaaacctccgctcctaaactgaggagtttttgtgtgtccgtgtcctaaatttttctggcgcttaacgacgaaccccgggtttaaacctcagacaaagtagctgcttcattgtgaaaccaccacctcttgaattacaaaacatttttatcacccaaagaaaaccccatgcccactaagcaatcactactgttgtccataatcccattcctggggaaacatgaatctttctctcttttctattacctattttggacaaatcataaaaatgaatggaacattttgtttctaactccctttgcttagcataatatttttaatgttattcacatcataccacgtatcagtacttcattccttttcatagatgaatattttatgtttatactacaatttgtttctccattcatacattgacgcacatttggcttcttttcaccttttggctgtagtgaacagtgttgctacaaatgttcgtgtatacgtatttgtttcattaccagctttcagttttggttgttttttgtttgttttttgttttgagagggagtttcgcctcccgcgttcaagcgattctcctg

SEQ ID NO: 1561330 - DNA, 4001 bp, Homo sapiens
gaatctactccccaaagcctgggagaaatagatcttcaggactctgagtttctccattttgactctagacttgacagctgccttctactcatgtcatggtttttgcaaagaaacttgacagttaatatttagtgggaaagaaaaatcactggactgagtagggttctagtatggccagctcagttttatctgtgacatctggcagggtcagttttctagtcctgagtttccagataagaccttttcctgagcttctcaaactttaacatgcatctcgctcaccttgggatcttgttgaaatgcagatttctgggtcctatctgcaaaaatgctaaatcagaaggccttcggtagggctcaagaatgagcctttctacctgggtgatgccaatgttgctgctttgtgaaccacagtttgagtagtgttgcactgtactcagtccctctcccaaaacagcccctaataaacagaaatatatacaagaaaaacttgacagaaaggcactaaactatagttgttatctttataccctaaggtcatggggaatttacattttttaaatgtatttctgtgttttccatgattatgtgttacctctatattatttgaaacaaataaaactaataattgagaaaactatttttaaaaactcttttctttttttgagacagagtcttgctcagttgccgaggctggagtgcaccggtgtgatctcagcttactgcagcctcgcctcctgggttcaagcgattctcctgccccagcttcccaaactcctgggattacaggtgttggccaccacgcctggctaatttttgtatttttagtagagatggggtttcgccatgttggccagactggtctcaaactcctggcctcaagtgatctgcccgcctcagactcccaaagtgctgggattacaggcgtcagccactgtgcccagccactattttttaaaagtcatagaatagcccagaccttgagcaaagtccccacagtgaagtcccaacctattttcacatgatactagccagctgcctatggctcatgcagaacataccaaagaagactcaggtctagactcagactgcctcggtttcaatgctagctctgcctcctactagctaggtggctatgagcaaacaagttatgttcttatgtctcagtctcctcggaaaaagagtatcacttcacagagccactgtatagtggaaaggtgttcatttgtataaaccccttagaatggaacttagcaactaacgctaaattataatcacttctcatgcccaaatacatgaccccacacattctctgatttatgtgaataaaacaagaataacaacaagtcttactcacatggggttctgctgcctcctcctctgtgcagtgctttttgagaagtcagggctggggaagaaaaacaggctatgaagtaaccaggattgtgtcttcatcccggatacatcacagtggcatctcccaggaccagttagaagcaaccctctccttcctcaaaagaggtcagggacaatccagcttcatggactcacagaatttcgccacagaacgggagtttctaggaaaattacagtagtattggtaattcacgtgccaggcagttttacactttttgtattacctcgttttctctcaaaacattctattaggaagtttttgcttttattttccttcagaacagcaaacgaaggcacggggattaactaactcgctcaatgtgatactgtatgaagtggtagggctggctcattaggtgggggagtcacaatgagggagcgaacagcccgagagaccttcaaacccgacgaagcatcaccccagccgcccgaagccagtacgcccccaattctaacaagctccgcccagggaaacgcaaaacagcatcctggcccctcaaacctccgctcttagccgctactcctttttttccccaaacaaaagaccgctagctgctgaccacaagtgcatttcggggaagtttgaaaggttcctgagaagctgacctgaatcaccaaagccagggaaaagatggctgctacgtcgtcttcctgggcggaagtgcctgcgagtatcaggaggacctggactacgcttcccagaattccacagcactgccttcctcgagccggaagtgcctacaactacctagaacgattggacctacagttcccaggattccgcaggggaaacatttacagccttactgcagctgagctatgcgcgactacacggaactccggactacatatcacagaatgctggagttgggggaaaaacagaacagtaccgccctcctggactacacttccggaatgtccaagccttctgatgtggaagtgtccaactaccttgagctcctggttttcatttcccagaatccctcacttctctttaggtattattatggtctgagtgtttatggcccccaccaaattcgtatgtttaaatcctaactcccaagaagatattaggaggtggaacctatgggacgtgatcagatcaagagggcaatgccctcatgaataggattaatgctctcttataagtggcctgagggagctcctttgcctctttagttatgtgaggacacagccagaaggaccatgtatgacttagaaagcgggacctcaccagacactgaatctgctggcacccgatctggggcttatgtgccagcaatttcactcctaagtaaatacccaggagaactgaaagatatccacacaaaaacttgttctaaaaaagttcatagcagcattagtcataatagtcaaaaagtggagaagacccaatgtccatcagctgatgagtggataaacaaaatgtggtctagccatataatgcaatattatttagtaatgtgaatgaacaaaatattgattcatgttataacatagatgaactctgaagacattatgtccaatgaaagaagccagacacaagataccatatatggtatgattccatttatatcaaatgtgcagaataggcaagtccatagagacagaaagtaaattagttgtctccaaggctggggagatgtagttgggaatggggagtgactgtcaatatgtagggttttttttttcttacttttttagagacagcgtcttgttatgtttcccagaatggagtacagtggctattcacaggcatgatcatagcacactgcagccttaaattcttgggctcaagtgatcctcccgcctcagccccctgggtagttgagactacaggcatgcaccaccacacccagctcatgtaggggatttcttttgggagcagatgaaagagttctaggattagatagtggtaatcattacataatattgtggatcttttcaaagatagaaaaatgttatgtgacaatatcccctaaagcgttaaaatgtagctaaactcaaagctaagacagggaaatcccaacggccaaagatgaacaggcaagttaggcccacagatgaaaaaactgaatgatcccacaagggctgggcatactaggtaagagctaaggaattaatcttgtgtgtgaatgggagttagagtagccatgcattttgggagacatgaactatacaatattacaaatgaaacagttctctcctcttgactgtgaacaaacaacaaccaaccaaaaacaaagccagatagctcccagcttctacagctgtcttgtgactaacctgaaaactctggtcatgaggagggtagatgtagactgtacctacagtcttatcagttatggggcagaggggcaagaaattatttggtttagtctactggttttggttacaaattaccttgaaggaagatgacctaatgtggtatctggtgatacaaagaaagaaaaagaaagaaaagaatataggtactggatttctgaagccctttgttcagaaaagagttaacataggcctgagactgttgtacttaaaaggcctgcttgcaacatgctatagtttgatggtgttcccttgttaaa

SEQ ID NO: 1561331 - DNA, 4001 bp, Homo sapiens
acttgacagctgccttctactcatgtcatggtttttgcaaagaaacttgacagttaatatttagtgggaaagaaaaatcactggactgagtagggttctagtatggccagctcagttttatctgtgacatctggcagggtcagttttctagtcctgagtttccagataagaccttttcctgagcttctcaaactttaacatgcatctcgctcaccttgggatcttgttgaaatgcagatttctgggtcctatctgcaaaaatgctaaatcagaaggccttcggtagggctcaagaatgagcctttctacctgggtgatgccaatgttgctgctttgtgaaccacagtttgagtagtgttgcactgtactcagtccctctcccaaaacagcccctaataaacagaaatatatacaagaaaaacttgacagaaaggcactaaactatagttgttatctttataccctaaggtcatggggaatttacattttttaaatgtatttctgtgttttccatgattatgtgttacctctatattatttgaaacaaataaaactaataattgagaaaactatttttaaaaactcttttctttttttgagacagagtcttgctcagttgccgaggctggagtgcaccggtgtgatctcagcttactgcagcctcgcctcctgggttcaagcgattctcctgccccagcttcccaaactcctgggattacaggtgttggccaccacgcctggctaatttttgtatttttagtagagatggggtttcgccatgttggccagactggtctcaaactcctggcctcaagtgatctgcccgcctcagactcccaaagtgctgggattacaggcgtcagccactgtgcccagccactattttttaaaagtcatagaatagcccagaccttgagcaaagtccccacagtgaagtcccaacctattttcacatgatactagccagctgcctatggctcatgcagaacataccaaagaagactcaggtctagactcagactgcctcggtttcaatgctagctctgcctcctactagctaggtggctatgagcaaacaagttatgttcttatgtctcagtctcctcggaaaaagagtatcacttcacagagccactgtatagtggaaaggtgttcatttgtataaaccccttagaatggaacttagcaactaacgctaaattataatcacttctcatgcccaaatacatgaccccacacattctctgatttatgtgaataaaacaagaataacaacaagtcttactcacatggggttctgctgcctcctcctctgtgcagtgctttttgagaagtcagggctggggaagaaaaacaggctatgaagtaaccaggattgtgtcttcatcccggatacatcacagtggcatctcccaggaccagttagaagcaaccctctccttcctcaaaagaggtcagggacaatccagcttcatggactcacagaatttcgccacagaacgggagtttctaggaaaattacagtagtattggtaattcacgtgccaggcagttttacactttttgtattacctcgttttctctcaaaacattctattaggaagtttttgcttttattttccttcagaacagcaaacgaaggcacggggattaactaactcgctcaatgtgatactgtatgaagtggtagggctggctcattaggtgggggagtcacaatgagggagcgaacagcccgagagaccttcaaacccgacgaagcatcaccccagccgcccgaagccagtacgcccccaattctaacaagctccgcccagggaaacgcaaaacagcatcctggcccctcaaacctccgctcttagccgctactcctttttttccccaaacaaaagaccgctagctgctgaccacaagtgcatttcggggaagtttgaaaggttcctgagaagctgacctgaatcaccaaagccagggaaaagatggctgctacgtcgtcttcctgggcggaagtgcctgcgagtatcaggaggacctggactacgcttcccagaattccacagcactgccttcctcgagccggaagtgcctacaactacctagaacgattggacctacagttcccaggattccgcaggggaaacatttacagccttactgcagctgagctatgcgcgactacacggaactccggactacatatcacagaatgctggagttgggggaaaaacagaacagtaccgccctcctggactacacttccggaatgtccaagccttctgatgtggaagtgtccaactaccttgagctcctggttttcatttcccagaatccctcacttctctttaggtattattatggtctgagtgtttatggcccccaccaaattcgtatgtttaaatcctaactcccaagaagatattaggaggtggaacctatgggacgtgatcagatcaagagggcaatgccctcatgaataggattaatgctctcttataagtggcctgagggagctcctttgcctctttagttatgtgaggacacagccagaaggaccatgtatgacttagaaagcgggacctcaccagacactgaatctgctggcacccgatctggggcttatgtgccagcaatttcactcctaagtaaatacccaggagaactgaaagatatccacacaaaaacttgttctaaaaaagttcatagcagcattagtcataatagtcaaaaagtggagaagacccaatgtccatcagctgatgagtggataaacaaaatgtggtctagccatataatgcaatattatttagtaatgtgaatgaacaaaatattgattcatgttataacatagatgaactctgaagacattatgtccaatgaaagaagccagacacaagataccatatatggtatgattccatttatatcaaatgtgcagaataggcaagtccatagagacagaaagtaaattagttgtctccaaggctggggagatgtagttgggaatggggagtgactgtcaatatgtagggttttttttttcttacttttttagagacagcgtcttgttatgtttcccagaatggagtacagtggctattcacaggcatgatcatagcacactgcagccttaaattcttgggctcaagtgatcctcccgcctcagccccctgggtagttgagactacaggcatgcaccaccacacccagctcatgtaggggatttcttttgggagcagatgaaagagttctaggattagatagtggtaatcattacataatattgtggatcttttcaaagatagaaaaatgttatgtgacaatatcccctaaagcgttaaaatgtagctaaactcaaagctaagacagggaaatcccaacggccaaagatgaacaggcaagttaggcccacagatgaaaaaactgaatgatcccacaagggctgggcatactaggtaagagctaaggaattaatcttgtgtgtgaatgggagttagagtagccatgcattttgggagacatgaactatacaatattacaaatgaaacagttctctcctcttgactgtgaacaaacaacaaccaaccaaaaacaaagccagatagctcccagcttctacagctgtcttgtgactaacctgaaaactctggtcatgaggagggtagatgtagactgtacctacagtcttatcagttatggggcagaggggcaagaaattatttggtttagtctactggttttggttacaaattaccttgaaggaagatgacctaatgtggtatctggtgatacaaagaaagaaaaagaaagaaaagaatataggtactggatttctgaagccctttgttcagaaaagagttaacataggcctgagactgttgtacttaaaaggcctgcttgcaacatgctatagtttgatggtgttcccttgttaaaacttaatcccttcttgctttttcatcacttccaccatatgaggacatagcatctgtctcctccagagg

SEQ ID NO: 1561332 - DNA, 4001 bp, Homo sapiens
ttgcaaagaaacttgacagttaatatttagtgggaaagaaaaatcactggactgagtagggttctagtatggccagctcagttttatctgtgacatctggcagggtcagttttctagtcctgagtttccagataagaccttttcctgagcttctcaaactttaacatgcatctcgctcaccttgggatcttgttgaaatgcagatttctgggtcctatctgcaaaaatgctaaatcagaaggccttcggtagggctcaagaatgagcctttctacctgggtgatgccaatgttgctgctttgtgaaccacagtttgagtagtgttgcactgtactcagtccctctcccaaaacagcccctaataaacagaaatatatacaagaaaaacttgacagaaaggcactaaactatagttgttatctttataccctaaggtcatggggaatttacattttttaaatgtatttctgtgttttccatgattatgtgttacctctatattatttgaaacaaataaaactaataattgagaaaactatttttaaaaactcttttctttttttgagacagagtcttgctcagttgccgaggctggagtgcaccggtgtgatctcagcttactgcagcctcgcctcctgggttcaagcgattctcctgccccagcttcccaaactcctgggattacaggtgttggccaccacgcctggctaatttttgtatttttagtagagatggggtttcgccatgttggccagactggtctcaaactcctggcctcaagtgatctgcccgcctcagactcccaaagtgctgggattacaggcgtcagccactgtgcccagccactattttttaaaagtcatagaatagcccagaccttgagcaaagtccccacagtgaagtcccaacctattttcacatgatactagccagctgcctatggctcatgcagaacataccaaagaagactcaggtctagactcagactgcctcggtttcaatgctagctctgcctcctactagctaggtggctatgagcaaacaagttatgttcttatgtctcagtctcctcggaaaaagagtatcacttcacagagccactgtatagtggaaaggtgttcatttgtataaaccccttagaatggaacttagcaactaacgctaaattataatcacttctcatgcccaaatacatgaccccacacattctctgatttatgtgaataaaacaagaataacaacaagtcttactcacatggggttctgctgcctcctcctctgtgcagtgctttttgagaagtcagggctggggaagaaaaacaggctatgaagtaaccaggattgtgtcttcatcccggatacatcacagtggcatctcccaggaccagttagaagcaaccctctccttcctcaaaagaggtcagggacaatccagcttcatggactcacagaatttcgccacagaacgggagtttctaggaaaattacagtagtattggtaattcacgtgccaggcagttttacactttttgtattacctcgttttctctcaaaacattctattaggaagtttttgcttttattttccttcagaacagcaaacgaaggcacggggattaactaactcgctcaatgtgatactgtatgaagtggtagggctggctcattaggtgggggagtcacaatgagggagcgaacagcccgagagaccttcaaacccgacgaagcatcaccccagccgcccgaagccagtacgcccccaattctaacaagctccgcccagggaaacgcaaaacagcatcctggcccctcaaacctccgctcttagccgctactcctttttttccccaaacaaaagaccgctagctgctgaccacaagtgcatttcggggaagtttgaaaggttcctgagaagctgacctgaatcaccaaagccagggaaaagatggctgctacgtcgtcttcctgggcggaagtgcctgcgagtatcaggaggacctggactacgcttcccagaattccacagcactgccttcctcgagccggaagtgcctacaactacctagaacgattggacctacagttcccaggattccgcaggggaaacatttacagccttactgcagctgagctatgcgcgactacacggaactccggactacatatcacagaatgctggagttgggggaaaaacagaacagtaccgccctcctggactacacttccggaatgtccaagccttctgatgtggaagtgtccaactaccttgagctcctggttttcatttcccagaatccctcacttctctttaggtattattatggtctgagtgtttatggcccccaccaaattcgtatgtttaaatcctaactcccaagaagatattaggaggtggaacctatgggacgtgatcagatcaagagggcaatgccctcatgaataggattaatgctctcttataagtggcctgagggagctcctttgcctctttagttatgtgaggacacagccagaaggaccatgtatgacttagaaagcgggacctcaccagacactgaatctgctggcacccgatctggggcttatgtgccagcaatttcactcctaagtaaatacccaggagaactgaaagatatccacacaaaaacttgttctaaaaaagttcatagcagcattagtcataatagtcaaaaagtggagaagacccaatgtccatcagctgatgagtggataaacaaaatgtggtctagccatataatgcaatattatttagtaatgtgaatgaacaaaatattgattcatgttataacatagatgaactctgaagacattatgtccaatgaaagaagccagacacaagataccatatatggtatgattccatttatatcaaatgtgcagaataggcaagtccatagagacagaaagtaaattagttgtctccaaggctggggagatgtagttgggaatggggagtgactgtcaatatgtagggttttttttttcttacttttttagagacagcgtcttgttatgtttcccagaatggagtacagtggctattcacaggcatgatcatagcacactgcagccttaaattcttgggctcaagtgatcctcccgcctcagccccctgggtagttgagactacaggcatgcaccaccacacccagctcatgtaggggatttcttttgggagcagatgaaagagttctaggattagatagtggtaatcattacataatattgtggatcttttcaaagatagaaaaatgttatgtgacaatatcccctaaagcgttaaaatgtagctaaactcaaagctaagacagggaaatcccaacggccaaagatgaacaggcaagttaggcccacagatgaaaaaactgaatgatcccacaagggctgggcatactaggtaagagctaaggaattaatcttgtgtgtgaatgggagttagagtagccatgcattttgggagacatgaactatacaatattacaaatgaaacagttctctcctcttgactgtgaacaaacaacaaccaaccaaaaacaaagccagatagctcccagcttctacagctgtcttgtgactaacctgaaaactctggtcatgaggagggtagatgtagactgtacctacagtcttatcagttatggggcagaggggcaagaaattatttggtttagtctactggttttggttacaaattaccttgaaggaagatgacctaatgtggtatctggtgatacaaagaaagaaaaagaaagaaaagaatataggtactggatttctgaagccctttgttcagaaaagagttaacataggcctgagactgttgtacttaaaaggcctgcttgcaacatgctatagtttgatggtgttcccttgttaaaacttaatcccttcttgctttttcatcacttccaccatatgaggacatagcatctgtctcctccagaggatgcagcaactggatgccatattggaagcagaca

SEQ ID NO: 1561333 - DNA, 4001 bp, Homo sapiens
gcgcacacctgtaacccagttactcgggagcttgatgcaggagaatcacttgaacctgggaggtggaggttgcagtgagctgagatcacgccactgcactccagcctgggcaacaagagtgaatctccatctcacaaaaaaaaagaaaaaaaaagaaaaaagaaaattttcataataagaaaaaaactactacacagaataccaaacctattttgagaaacatccatagcatatactaaagggaaacacattaaagtgttagcagttttattataagtaatttaagttttctgaatataacatcactgtccaatagaaatatactgagacacataaataattttaaattttctagcagtaacatataaaaaaggcaaaaaaacaaaaacaaaaataggtgaagttaatttcaacaacataatttaagccaatgtatccaaaatattaccattttgacatataatacaaaaaattatcaatgagccatcttacattttttgtacaaagtttttgaaatccagtgtgtatttaacacttacagcacatctcaatttggactagacacatttcaagtgctcctagggcacacatggcttatagctactggattggatagtgcatctctataatgagcattcattacttctataactagaatatgacatattttgacatggaatgaaattaagtaagtgagatgttgcaggatttttctaaaaaattcaaaattcatcagtgcagtttttgaggtcttccacagtaaaatccatacctacattcccaaggctgatttccaacgactcaccggtagccatatggattactatttaagataactgaagacgactgtatcattgagattaagaccacagactcagaaaaaggaatagaaaataaacaacaacaaaaaccaaagaaacaaaaacaaacaaaaaagatcacacagtctgaaaaggaatgcttgggttcaatcccaaatccacctcttactatcagttgaataacttcgggaaagtatttaataacataaactctgcctaatttcctcataacaaaataacaagacctacttcatcaatagctatggtccacagacgaatgccttaaaatcaaagtggtaagatgttattggtaatactcatttccaagtagttttcctacccactctcacatttattcaacaaatatttcatcatttttcagtagtaacttactgagtgacggaaacttgattaactgaaaggacagaaaatggaacaacaaagtgcgttcaagagcaggtacctggggctatgctgggagaagccaagaagtccctccttcctcctctttgcaaattcggaggcggtgaataaaaggatgctgtcagcacgatggagtctctatcccggataaacggcggtaaacatccccacgcattggagcccgatgactcaatccttcttaaaaaaaaaaaagatctgtaaaagttcgggaagagctcggtctcctgaaggatacgacagaaaggccatggcataaagccctgacttttcttctctcttcactggagcttccagtaaaaagggcgcttgtgagggaatcactgtatcaatagcaggagccaacccagtatcaggtgccaccactgttctaaggtttgacccgtattatcttgtttaattctaattacaaccctacacagtaacgactatctttattgctattttaaagatgaggaaacaggagcgcggatcataggtaactcgctgtttattatacccacagaactagcggcgctgcttgccaagtgcgggaggagagcaaacttcccgccctcggcctctcggcctccgccgcggccgcgacctctccatcccaagactgatggctggggagcgcctattcccaagcacaggctgaaaaggttcaagaggggtcgtgggggtgcagggctgactcacctcccggacccaaaagatggtggcggcctcgctttccggggcggaagtggctctgcctgcccagagctcctgaactacccttcccagaaggcccgcgctcctgcggcccaattgtttccggacagagttctggaatacgtttcccagaacttccagaaggaaaaaccatccaggtgccgccctcttcgcgcttgaaaaaaaaaaaaacaaaaaaaaaaacggagcgagcgagtgagagagggttacggagagtgtgacaaaattctcggagctcccggactacaacatccagaatcctcttcacggcttattgctgtttagccaggctgaagcagttctctgatgtcagtggaatttaggtttttcttattaacaaaaagtaacagcaaatatgtgaagaattggagccctaaaataaaaaaagactcccagcactttgggaggccgaggcgggcggatcacgaggtcaggagttccagaccagcttggccaatatgatgaagccccgtctctactaaaaatataaaaattagccgggcgtggtggcgcgcgcctgtagtcccagctacttgggaggctgaggcataagaatcgcttgaaccctggagggtgcagtgagccaagatcgtgccactgcactccagcctgggcgacagagtgagactctgtctcaaaaaaaaaaaaaagaaaaaaaaaactattataagaaacagatcacgtgatcctgtactaatagaattatacccaccacttccaaaaaaaaaaaaaaaaagggcagaggaaaccctttaagtttttacatttaacaggatcgactaatagaaaaactactctttagatactaaaagaatgaaagagcaatcaaaaaatgcaacgaaggcagaatatattatggatttccacttttcttaatagcacagtcatataattcagaacaacttgcttactgaggatagctagacatagaaaacacaagctttggcatatggtagatcaactccacaaagcaactagggcctctgtaatcattcctcaaggagtttctgaatttgaaagatgaacaaatttattacttcagtgtttaaaccttgatctttatttgcttaaatgtataatggaattgatgtttccaagaattgagggttgaaagaagagagcaatacctaaaaatatccacatatctactacagtacatgtttgcagttctcatttactaaatatatattctttattctgttatatacaactatctcttataaagaaccaagtatgtgccaggaactagttcaaactattcagactatgggaccctcactacattttcacaacttttttctttttttttttgttctgttttgttgttgttgttgttgttgttgttgttagacagagtttggctcttttgcccaggctggagtgaagtggcatgacctcggctcattgcaacctccgccctcacacaaggttcaagcaagtctcctgcctcagcctcccaagtcgctggggttataggcacccccctccccaccacgcccagctaatttttgtatttttagtagagacggggttttgccatcttggccaggctagtcttgaattcctgacctcaggtgatccacccgccccggcctcccaaagtgctaggattacaggcatgagccaccacacttagcccattttcacaacttttttaaaacaaataatgtcctctagtttactctttgggatccagaggcagagagaggttaagtatatctcctaagatggaaatttgattattttcacctgcatgtctatccagtgcccttaagagaaggttcaaatgctttaacaagtcgcacaaacaggaattttccagatgctgtttctctcttggaatccactttccactctacatgtccagccatagtggattacttgtactcctacaaaaagcctctaattctttgtatttggtgttccttctgtcataacctgctactcttttccctcctgggtgacggtcttcatccatagcttaaatattccctgctctaataagacttactgtgggttctt

SEQ ID NO: 1561334 - DNA, 4001 bp, Homo sapiens
tcaatatactattaccattgacccaacccagcattaacctaggaatacaggaactcatgcatttagtaaatgtacattcagtgtctaacaacatcttaggagaataaacactagacatacagcagtaaattaagatggaaaaggtaattgttctcatggtgcttactttcgggtgggttaatctctctacaaattaggtgacctttggttgcaaaaagggctatgaagaaaataaagcaaacatgatagattcctgttttccaacaagaatgtaggtgctatcaggtgaacatatgtggcagctgtggaaagagcaacattaaatcaggtggtcagggacagtctctaagagctgcctgacaaataaatcagctgtgaaaaaagctgggatgagacaagtccagaaggaagcataagcgcaaagacctggtttctgtttagaaggtctcctggccaggtcttacctgttaagtttttttaactttttaaaccttagcaactcatctgtgacatggggataatagctaacatacaaacttgctcagaaaattcaatagaaatacattcatttattcaaatatttattggcaagcctggcactgtcctagacaccatggataaataatacctggcatatagtaagcactcagttaatatacaccatcacagttactctaattatttctaccctgcgtttcttcagcatggcgctgaaacagtgtaagcctttactgacccagtgacacactactaggagccaagaagagaatacactaaataaagacactgggaaattcctcaaacctcccccatttctaggggaaggcaggtgtggctaaggggtctgaatgaacatttgtgatatcaatgggatgaagaatgaggtcaccaagagacctggcattgccacaaaagagaaccaaagttcactcacctggagctctagtgtcaagagatgtggggttatttctccttcttttatacaattatctccgagaaacgaacaattccaagaaggaagcctgtgaaagaaaaatgaacagcaggataacatgatttaatcccaattcccaccacgccacagggggaaatctctcagtgccagctggatgtaatctaccccttcctgtaatctaccctcgctacttgcttcaggagccgaggaaaagaacctctcttcctacaggactcagagtacaagggacacgccattcctgatgcccaaagaaaccgtctacaagcctactttcactgcccctttcaggagacaaggagaatcaagacaaaatctcaagattttaatccagagctgactgtcacatgctgtgggacacttacaagtgaaattctgcctgtgtgtgcttaggcggctacaaaaagcagagccagcaacgatacagcaaaccaactcctaggacttgcacagcgcttaatacatttcaaaggataaaattagaacacagggaatcaacttcctgtttacagaaatgacttcgcagaaaactctgaaattactccacaagtgggtgggcggctaccctgagaaaattcatgtcatcgatccgcaactgacacagtggagtctcccgcactgcagatctcatctcaaagccagagctggcctcaaactgcttttccaagcctggactgcgagggctgccgacccgggcccaccccgcacaggcgctcagaatgttcgatacgtgcgcctccttacacccctgcctcaccaggccgagctcatggaaatccgtgggcttcgaccctccgccgcacgttgtcccttcacactggtcctatagagccgatcctaattcccatggcctgacagtacaaccgcatggagatgcacgtctctaagacgcctcaccactgcctaagaagcaatcaaggtgacgcgcccaccggaaacggaagtagtcgactcgaggtgtgggactacctttcccagaaccctccgcagcgcagtccgatcctaggggcgatggtgtcgtaaatgcgcgtccacctcgagtcacgcccactgcgaggcggcgggaggcggcatgcaaggtgtttctgagttgaaaagaatgtctttactcagtactaacatattcgcgttgtagcaaacctgactatattctcaaacaagcccatcatcccatcaccagggatataaagcattattgattttctggtgtaaaagccaactaaatatttatttcaaaagtagttcatattacatgtaaagaatggtttaaaaaaaattcttacttaatccctggtttatgtgagtaaatatgaattcttaagaatcccatttcccaaatggcatcataatattttgtaatcatttcttgccacaggtcatatatcgtggatagttctgtatgtcacaaaagacgtagagatacatagagataataaaaaaacacaaattatttgcaatacttgcctagcattctttagtttttagggaagttacccctttgtcctgcattgaacttacacttctaattttatgatatcaaaactacacacaatcactttctttaatattttcccaatttgatggactaaatatcctgtcttattttcccaatttgacagagtaaatatgcttattaccgattgcatttcattgtcatcttttattgtcatacactctctgtgtatgaatgatatcgcttctaagtgatgaattgctcccccagtttcaacatttataaagtagtttagaaaaaaaaaaaaacaaaaaacttcatctgacaaggtatatcagtcttttcatttgtggcttcttttttttctccagtatgaccaaaaagacattccttagcctgattcccaataagtgcatatctatattcatttcaggctctttcatttttcttttgaatcaccgcgtgattcatttaagtgtatgatatgaaaggaagatggagtttcctgtttcaccaaaggattgtctacttttcttaacaaaatttacataaatattaattctttcctttctgatttaaacggcatcctaatcacttactacattactatatatataatgaaatattttctgggatacaagtgtgttctgaagatagagattgctttttctgtgccatgatgaaaggtttcagttacagtgataactcatttccttatctctccctccttgttgtgtttcaaaaatttcatcctagaagttctagaactctctcttataaacagattatcgaattgttttgataaattctaaaaaattgccaattgactccaaagcatccaagcccttcagatatttggttccaaacccacccctctttgcttgggtagacacagtcctacttcccatcctgtgtcctccagttttacaaatgtctgaatttgctgctattgttcttccctctgtaagtccatcctttcctgtactattaaaatcttactccatatttaagacacaacttgaatataatttcctctatcgagtgtttttgaactctatatcataattcaatgaacagatcagtctgtgattgggagaatttcatgcgagtgtagtggatgttaaataccactctcagaacattctcatttccccgagaaatcaataaattatattactctgggatccagcaacacatggtttaaattgctggttaccacctttcacatggcctccatggtcagatctctaagtcatcaaaataattgactcttctttttctttattttctttatttacctttcatggctctggcacatgggaagcacttaagcaattcaatcaagtgtcttggccgggcacggtggctcatgcctgtaatcagagcactttgggaggccgaggcaggcagatcacgaggtcaggagatcgagaccatcctggctaacacggtgaaaccccatctctactaaaaatacaaaaaagaaaacaaaaaaaattagccgggcatggtggggggtgcctgtagtcacagctagtcaggaggctgaggcaggagaatagtatgaacccggga

SEQ ID NO: 1561335 - DNA, 4001 bp, Homo sapiens
cttacttgcaaaactaaaataatttaagtttttctctctttcacacacacatgcctatgtgaataaacttcaaagcccagtacgtggtacacagaaaatcatcaatatactattaccattgacccaacccagcattaacctaggaatacaggaactcatgcatttagtaaatgtacattcagtgtctaacaacatcttaggagaataaacactagacatacagcagtaaattaagatggaaaaggtaattgttctcatggtgcttactttcgggtgggttaatctctctacaaattaggtgacctttggttgcaaaaagggctatgaagaaaataaagcaaacatgatagattcctgttttccaacaagaatgtaggtgctatcaggtgaacatatgtggcagctgtggaaagagcaacattaaatcaggtggtcagggacagtctctaagagctgcctgacaaataaatcagctgtgaaaaaagctgggatgagacaagtccagaaggaagcataagcgcaaagacctggtttctgtttagaaggtctcctggccaggtcttacctgttaagtttttttaactttttaaaccttagcaactcatctgtgacatggggataatagctaacatacaaacttgctcagaaaattcaatagaaatacattcatttattcaaatatttattggcaagcctggcactgtcctagacaccatggataaataatacctggcatatagtaagcactcagttaatatacaccatcacagttactctaattatttctaccctgcgtttcttcagcatggcgctgaaacagtgtaagcctttactgacccagtgacacactactaggagccaagaagagaatacactaaataaagacactgggaaattcctcaaacctcccccatttctaggggaaggcaggtgtggctaaggggtctgaatgaacatttgtgatatcaatgggatgaagaatgaggtcaccaagagacctggcattgccacaaaagagaaccaaagttcactcacctggagctctagtgtcaagagatgtggggttatttctccttcttttatacaattatctccgagaaacgaacaattccaagaaggaagcctgtgaaagaaaaatgaacagcaggataacatgatttaatcccaattcccaccacgccacagggggaaatctctcagtgccagctggatgtaatctaccccttcctgtaatctaccctcgctacttgcttcaggagccgaggaaaagaacctctcttcctacaggactcagagtacaagggacacgccattcctgatgcccaaagaaaccgtctacaagcctactttcactgcccctttcaggagacaaggagaatcaagacaaaatctcaagattttaatccagagctgactgtcacatgctgtgggacacttacaagtgaaattctgcctgtgtgtgcttaggcggctacaaaaagcagagccagcaacgatacagcaaaccaactcctaggacttgcacagcgcttaatacatttcaaaggataaaattagaacacagggaatcaacttcctgtttacagaaatgacttcgcagaaaactctgaaattactccacaagtgggtgggcggctaccctgagaaaattcatgtcatcgatccgcaactgacacagtggagtctcccgcactgcagatctcatctcaaagccagagctggcctcaaactgcttttccaagcctggactgcgagggctgccgacccgggcccaccccgcacaggcgctcagaatgttcgatacgtgcgcctccttacacccctgcctcaccaggccgagctcatggaaatccgtgggcttcgaccctccgccgcacgttgtcccttcacactggtcctatagagccgatcctaattcccatggcctgacagtacaaccgcatggagatgcacgtctctaagacgcctcaccactgcctaagaagcaatcaaggtgacgcgcccaccggaaacggaagtagtcgactcgaggtgtgggactacctttcccagaaccctccgcagcgcagtccgatcctaggggcgatggtgtcgtaaatgcgcgtccacctcgagtcacgcccactgcgaggcggcgggaggcggcatgcaaggtgtttctgagttgaaaagaatgtctttactcagtactaacatattcgcgttgtagcaaacctgactatattctcaaacaagcccatcatcccatcaccagggatataaagcattattgattttctggtgtaaaagccaactaaatatttatttcaaaagtagttcatattacatgtaaagaatggtttaaaaaaaattcttacttaatccctggtttatgtgagtaaatatgaattcttaagaatcccatttcccaaatggcatcataatattttgtaatcatttcttgccacaggtcatatatcgtggatagttctgtatgtcacaaaagacgtagagatacatagagataataaaaaaacacaaattatttgcaatacttgcctagcattctttagtttttagggaagttacccctttgtcctgcattgaacttacacttctaattttatgatatcaaaactacacacaatcactttctttaatattttcccaatttgatggactaaatatcctgtcttattttcccaatttgacagagtaaatatgcttattaccgattgcatttcattgtcatcttttattgtcatacactctctgtgtatgaatgatatcgcttctaagtgatgaattgctcccccagtttcaacatttataaagtagtttagaaaaaaaaaaaaacaaaaaacttcatctgacaaggtatatcagtcttttcatttgtggcttcttttttttctccagtatgaccaaaaagacattccttagcctgattcccaataagtgcatatctatattcatttcaggctctttcatttttcttttgaatcaccgcgtgattcatttaagtgtatgatatgaaaggaagatggagtttcctgtttcaccaaaggattgtctacttttcttaacaaaatttacataaatattaattctttcctttctgatttaaacggcatcctaatcacttactacattactatatatataatgaaatattttctgggatacaagtgtgttctgaagatagagattgctttttctgtgccatgatgaaaggtttcagttacagtgataactcatttccttatctctccctccttgttgtgtttcaaaaatttcatcctagaagttctagaactctctcttataaacagattatcgaattgttttgataaattctaaaaaattgccaattgactccaaagcatccaagcccttcagatatttggttccaaacccacccctctttgcttgggtagacacagtcctacttcccatcctgtgtcctccagttttacaaatgtctgaatttgctgctattgttcttccctctgtaagtccatcctttcctgtactattaaaatcttactccatatttaagacacaacttgaatataatttcctctatcgagtgtttttgaactctatatcataattcaatgaacagatcagtctgtgattgggagaatttcatgcgagtgtagtggatgttaaataccactctcagaacattctcatttccccgagaaatcaataaattatattactctgggatccagcaacacatggtttaaattgctggttaccacctttcacatggcctccatggtcagatctctaagtcatcaaaataattgactcttctttttctttattttctttatttacctttcatggctctggcacatgggaagcacttaagcaattcaatcaagtgtcttggccgggcacggtggctcatgcctgtaatcagagcactttgggaggccgaggcaggcagatcacgaggtcaggagatcgagaccatcctggctaacacggtgaaaccccatctctactaaaaa

SEQ ID NO: 1561336 - DNA, 4001 bp, Homo sapiens
caggatggtctcgatctcctgacctcgtgatccacccgcctcggcctcccaaagtgctgggattacaggcgtgagccaccgcgcccagcaaaaatattttagatatcaggaaatagtcataaggataatgggaataataaaattgagcattatataatatggcagttcactagtttattcttttttttttttttttttttgagtctcactctgttgcccaggctggagtgcagtggcgtgatcttggctcactgcaacctccacctcccgggtttaagcaattctcctgcctcagcctctagagtagctgggactacaggcacgtgccatcacgcccggctaatatttgtatttttggtagagatggggtttcaccatgttggccaggctggtctcaaactactgacctcaagtgatccacctgccttggcctcccaaagtgctgggattataggcatgagccaccacaaccagcctcactagtttagtctctattagcaatatttaaaattttctatagttaaaagacatatgggaaaacacattaaaatataacaatttttaaaaaaatgtttatcaacaaatatagaagtagacacaaagaaagacaaaagaaatcaattagaagcttaacagttactacctttacatcttggatacatgggtaattaaaaaactttttctactctcatttctcctatttcagacttttccacaatgatacagttccacaacagtacgaaatacttggaaaacatgaaacaaaatagttgagaaatttttaaaaattcctagacgtccaagcccacgagccttgctctcaacgtcctttcaatcaggtcctaacttgctttccctacgagtccagctagttcctctgcctcaatgagaatgtatccaagaggtgatcaactcaggctctgacctggactgcctaggtgccaaccccagctctacctctcactagttggctgctatgcaccctgtgtctcactctcatttttaaaacaaagaaaagcaatacttcacagagccacagtgtggcctaaatttatttgtataaagcacttagaatgaagttaccaattacggcttaatgattatcaacacccattcccgaggacacactctcggttgggtgaacatctctataaaggaaaaaagccaaggaccaatcacatagagatttgccctcagtagccaagaagtcccctccctgcagctcttttagaaaggtcaggctggggaaggcgaaagttgtgaaataccctgactgcatcgcggtcccccataaaagttaaatgctccccgcccttcgtggaagcggacgcaactcgctttcctaaaaagaggtcagaaggcctcccgggatcatccagcgtcctgcagggattagggagaaggaccagggcccctgcagctgaagctatgactccacccggggacctgacctcttcgggaagttaacaagagaccaccagtcaccaagtgacagggactgctttaaggttctcatttgcgttatctctttcagttcccaaaaacgattctactaggatggttctaatgtccccattaccaaaaacagcaatggaaagtataaggacattgagtaacactccacgtcacactgcgagaaagcggtcgcacaggtagggtggagagaggcaggctgagcgaggtcaaagtcctggaaacgctcacagcagggcacagaggaccccgccaattccaacccccgggatgcgagcacagcacccccatcccagaaagcttccgtggacgggaaaaaaaccccattccccgcccccaccaaacctccgctctccgccaaggcttcttttcccttgcttggatcatcgatcatcgggtcgttgcgaccccaagcgaaggtgacaagttcagaaggacccgccagacgcagaaatggctcaaactacgcggttatgtagcaaccgcaggctcacacaccggaagtgctcgcgtctccacagagcgtctggactccacttcccagaattccccggttcaactgcttgagccaaagggtccgccattccatgaagttgatggactacagttcccagaattcactcgtccacccgcctgagccaacttgcccgcgactcagagtgtgtctggactccgcttcctccaatgccaaaggaaaatgtctataatctcactcttcagcgggaagcgttggactccgcggtggtccttgactacacacaccgcagtgcccaccgggaacgtattccatatctctgagcgcctggtggggaatgtggactgtgaccctgtgagtcgtccgtctctcttcctgagtctttgagcgaaaatagtgtatagacaggaattcctgaagtctaaacgcctcccacgatgacaggagtgttattgggaagagaacaaacgaggagataaaatcttcaaggattaggataatctgacgatgggaggttaaaactaacggtttaaaggatgagccaggtggaatggtttggcaggggcaatgaggagcaggaagacaccagcccctactccagaagctgtgggaccactggtttggcaggaaaagccacccccatttaagatcacagctactagtggagaagcggtgtcgtcatggaatagctatcttcccataaacttttcatggtattcatatttctccttagatgtagaaacatcaaatttcagcgaatgtagtgaattgctcagtacctcagagcaataatgactgatgaagagctaggcattggtatcaatcttacattgagattgtaaatgcagtaaaacgggaggattctataggtgaaggagcatgtcttataaagagttttcttcctggccaagcgcagtggctcaaacctgtaatgccaaccctttgggaggccagggcaggacgttcccttgagctcaggaattggagaccagacagggaaatacagggagacttcgtctctataaaaatttttttttaactggccaggcatggtggcctgatcttgggactacaagttccaagtactcaggaggctgaggtgggaggattgctgaagcccaggagtttgattgaggctgcagtgagctatgatgccaccactgccctccagcctaggcaacagatacctcaataattaaagatttttttttttaagtttcttcttatttcttggtgaaacataatttctttattatagttagcaatttaaaaactggcattggttaaaaaataataacagtataaagctaaattaggaaacaattcatctaaaaacctgctcttttgaaggtaactttttttctccctataaacatacattggcctataaaccaatattcttctttttaaaaaaaatggagtctactgtttacctatttttctaaactaaaaacttttcaaaattttgtttagacacaaaaataaggtgactgtgccaaacttttgatgccaaacatccgctctctgaaaattgagtgatcactattcatatgccagttatagctgtatccttgatctactctgccttcccgaaagataagatgtattgacacactcaatcgtagcatgcagggaactgagcctaaaaggttaggggcacttggcatcaaaggtcccttctgcttcccaggtccgtgcactctgggtctgtgttgggaggagcagcctctatgatctcctagatgcctttggggtcattcttccagtgttaatggacagcaggtcctggcttctgttgacatgaccaatccaaactaatctcctaaatcagttgcttatctctaccgttgttttatccagaacaggttttctaatttttttttccaaagtagataggctgtgaatttttaaaattcttagttctgtttcccttttaattaataattctgactttctgtggtgtccctcccacatgtgggaattctgggagatacaattcaagctgagatttgggtggggacacatccaaaccatgccattgatgacactgaca

SEQ ID NO: 1561337 - DNA, 4001 bp, Homo sapiens
cacgagttcgagaccagcctggccaacatgatgaaacctcatctctcctaaaaatacaaaaattagccaggcatggtggcgggcatctgtaatcccagctactcgggaggctgaggcacgagaatcacttgaacctgggagtgggaggttgcagtgagctgagatcgtgccactgcactccagcctgggagacagagggagactcagtctcaaaaaaaaaaaaaaaaaaaaagtgaaatcattcataaaagggtcaatccatagactgtggataatgtaaaccctatctatttatttattttaatagcagtgtcaggtatttactcaaatgtcatctcctcagagttcttccctgcaaatccttaaaaaaattttttttattatgactcttgagcatcccccagtcattgcctaaactgtgaaaccatttcttttcctctttttaatttttttgagacagactctcactctcttgcccaggctggagtgcagtgggatgatctcagctcactgcaacctctgcctcctgggctcaagcgatcctcctgcctcagcctcccaagtagctgggaccacaggtgtgtggctaatttttaatttttttgtagagatggagtctcactatgttgcccaggctgctgttgaactcctgggctcaagccatcctcccgcctcagccttccaaagtgtgggattacaggcgtgagtcactgcacccccatgggactgacatttctcagggctgaaggagagtggcacaaaggtcaagaacccactctgcctgagctcagcctgagctcaaactcccagttcaggctctttcctgttgttttactttgggaagataaatgttttacccatcagtgttgtcatctgtaaaacaggaattacaatattatctttgttctgaagattaagctaattaatgcatataaagcctatagaagagaccctggcactcaacgtattaacaaattttattattactcattcacgaacacatgcctaatccaacctctcatttattccataaatatttgagcatttgcccagcaggaaaaataatattgctaatgagtgtgggaaatctgttctccaactaagcagaaatagcaatagcatatattaagtcctctcacgttgggacaatgttaccaagagccagggggtcaacaccctcctctctgcagccctccggttagtcaaggctgaggaaggaaaggaggttggaagatatctaaactctgtttctggtccaggatgaatgacagtggacatccccaggcaccacatggaggtgagacacactcatgccttaaaagggaaggaaaaataaaaaagatggagagaaaattgacacccccgtccccccacgttaggaatccaggaacagcctcgcgaggtgcagagatcagagaagggcgagtagcgctgcacctggagctcagaacccactgcgggctcacagaagctttcagagactgaatgcctctcctctccaggaagaaataacagattggcaacaaccagccaccttttcagtgtgtgtcaggatcggtcctacgcatttttacatctatttatcttaagtaaatctcacgaaacccctaccagttaggtactactatgaaactcactttacagaggagaaacggagaaattaagaaactaccaagattatattgccagaagacagcagagcgtgtggaaggtggggaaggcgagggaacttgagcgcccgggagaccttcaaaccaaacgtgcgaccaggagccattcccaacttggagacccatgcaccgccctaaaaacaaagggcaagcaaaccgtcgtccccgccctctgcgacttcccttcactgagagcgagggcaggcacctgcgagtccaacgcccaggccaggaaagctcgccgtagatgcagaggttccgcgctgactcacctcccagaggggatagatgacggctgcttcgccctcctgcagcggaagtacacaaggttgcaacggcttctgcactacacttcccagaatgcccgagcggaaacaggctaccgccctgcccagccaagagggaccaagaggggccaggtgcagtggctcacgcctgtaatcccagcactttgggaggccaagggggggtggatcactaggtcagcagtttgagaccagcctggccaacatggtgaaaccccgtctctactaaaaatacaaaaattagctgggcgtggtggcacatgcctgtaatcccagctactccagaggctgaggcaggagaattgcttgaacccaggaggcagaggttgcagtgagccaatatcgtgccactgcactccagcctaggcgacagtgagactccagctccaaaaaaaaaagaaaaaagaaaaaaagaaaatcaagaagaagagaaatatttacagttctgtacggtattgatactgtaagtttacaccatctgtttacaaaataaaccatctttctgaaatggcaggcagctgcagcttcagacctcattctacagtacatatcaagcaattcaactttttcttataatgtcatgacttttctatgcatcttgggagcacttgcaacatcactagtggcagttcacataggtcccatggtagtattcaagttttatagtattgcactaaacacaataaaaaataagaaacctttagatcactttttactgtaatacgcaatttactagagagatgaactgctcactttgagatgattagcattacttggaattttaagcagatatttacacacatgagctcaccacaacagtgacaggagatagctattaaattattacagtagcacagcatgtactacagttaactttatgcaggcttgatttaatattgcatctttgttttacatttctcttgactgtgaacgtacagtctgtgtttgtgtgtgtaagtttttataagttttacctttttttaatagattcatgtatattttatggtagtaaatgataaaatagactaatatctacatatattttatgcattcatgatatacctaaatttttcttaattgtttgatatttctagactacacggcttatctgtgagctttttcaaattgttgcaaatttccaaaaaaaattgcaatatatttgttgaaaaaaaattcacatataagtggacccatgcagtttaaacctgtgttgttcaagagccaactgtattgtaatttggaaaaaaacaacatctaaattatatcttgaaaatgcttcttcccttatttcaatttaaatttttttttgtatccactcagcttgctcttgagatgataaatgcaatagaatgatcatcaatagatcaagtcaatgtggtatcaaaaatgaagtaatatttagcagccttgtaaaagcacatatatcaggacttcttgcagaggctttgtttccaatgtgattttctctagaaaggagaaagttgttttatttaagttatgggggtgggtattgtgtatagagtggggaactgcctttgatattttctatcacaaatttttttagctcagtcagcagaattttattattttagcaccaaaggaatcctgaatcatgttttgttttcatctcaaagtattttctaatttccctgtaacttctatccccatcggtttttatgagtgtgctgtttaatttccacacatttgtgaattttccagttttcctcattactgatttgagtttcatttttttgtggcctgagaatacatttcatgtgactttatctttctgttgatacgtgagattttttatttttattgagacctgttttgtggcctaatgtatgatctatcccagaaaatgtttcatgaccacttaagaaaaatatgtattctgctggttttaggtggggtgctttgtatatatctgctaggagtttggtttatgtttccaaatcctctaattctttattgatcttttgtctggttgttgtatccattattgaaagtgagatactgaagtctg

SEQ ID NO: 1561338 - DNA, 4001 bp, Homo sapiens
tttaggaggtcaaggcaggcagatcacttgaggtcacgagttcgagaccagcctggccaacatgatgaaacctcatctctcctaaaaatacaaaaattagccaggcatggtggcgggcatctgtaatcccagctactcgggaggctgaggcacgagaatcacttgaacctgggagtgggaggttgcagtgagctgagatcgtgccactgcactccagcctgggagacagagggagactcagtctcaaaaaaaaaaaaaaaaaaaaagtgaaatcattcataaaagggtcaatccatagactgtggataatgtaaaccctatctatttatttattttaatagcagtgtcaggtatttactcaaatgtcatctcctcagagttcttccctgcaaatccttaaaaaaattttttttattatgactcttgagcatcccccagtcattgcctaaactgtgaaaccatttcttttcctctttttaatttttttgagacagactctcactctcttgcccaggctggagtgcagtgggatgatctcagctcactgcaacctctgcctcctgggctcaagcgatcctcctgcctcagcctcccaagtagctgggaccacaggtgtgtggctaatttttaatttttttgtagagatggagtctcactatgttgcccaggctgctgttgaactcctgggctcaagccatcctcccgcctcagccttccaaagtgtgggattacaggcgtgagtcactgcacccccatgggactgacatttctcagggctgaaggagagtggcacaaaggtcaagaacccactctgcctgagctcagcctgagctcaaactcccagttcaggctctttcctgttgttttactttgggaagataaatgttttacccatcagtgttgtcatctgtaaaacaggaattacaatattatctttgttctgaagattaagctaattaatgcatataaagcctatagaagagaccctggcactcaacgtattaacaaattttattattactcattcacgaacacatgcctaatccaacctctcatttattccataaatatttgagcatttgcccagcaggaaaaataatattgctaatgagtgtgggaaatctgttctccaactaagcagaaatagcaatagcatatattaagtcctctcacgttgggacaatgttaccaagagccagggggtcaacaccctcctctctgcagccctccggttagtcaaggctgaggaaggaaaggaggttggaagatatctaaactctgtttctggtccaggatgaatgacagtggacatccccaggcaccacatggaggtgagacacactcatgccttaaaagggaaggaaaaataaaaaagatggagagaaaattgacacccccgtccccccacgttaggaatccaggaacagcctcgcgaggtgcagagatcagagaagggcgagtagcgctgcacctggagctcagaacccactgcgggctcacagaagctttcagagactgaatgcctctcctctccaggaagaaataacagattggcaacaaccagccaccttttcagtgtgtgtcaggatcggtcctacgcatttttacatctatttatcttaagtaaatctcacgaaacccctaccagttaggtactactatgaaactcactttacagaggagaaacggagaaattaagaaactaccaagattatattgccagaagacagcagagcgtgtggaaggtggggaaggcgagggaacttgagcgcccgggagaccttcaaaccaaacgtgcgaccaggagccattcccaacttggagacccatgcaccgccctaaaaacaaagggcaagcaaaccgtcgtccccgccctctgcgacttcccttcactgagagcgagggcaggcacctgcgagtccaacgcccaggccaggaaagctcgccgtagatgcagaggttccgcgctgactcacctcccagaggggatagatgacggctgcttcgccctcctgcagcggaagtacacaaggttgcaacggcttctgcactacacttcccagaatgcccgagcggaaacaggctaccgccctgcccagccaagagggaccaagaggggccaggtgcagtggctcacgcctgtaatcccagcactttgggaggccaagggggggtggatcactaggtcagcagtttgagaccagcctggccaacatggtgaaaccccgtctctactaaaaatacaaaaattagctgggcgtggtggcacatgcctgtaatcccagctactccagaggctgaggcaggagaattgcttgaacccaggaggcagaggttgcagtgagccaatatcgtgccactgcactccagcctaggcgacagtgagactccagctccaaaaaaaaaagaaaaaagaaaaaaagaaaatcaagaagaagagaaatatttacagttctgtacggtattgatactgtaagtttacaccatctgtttacaaaataaaccatctttctgaaatggcaggcagctgcagcttcagacctcattctacagtacatatcaagcaattcaactttttcttataatgtcatgacttttctatgcatcttgggagcacttgcaacatcactagtggcagttcacataggtcccatggtagtattcaagttttatagtattgcactaaacacaataaaaaataagaaacctttagatcactttttactgtaatacgcaatttactagagagatgaactgctcactttgagatgattagcattacttggaattttaagcagatatttacacacatgagctcaccacaacagtgacaggagatagctattaaattattacagtagcacagcatgtactacagttaactttatgcaggcttgatttaatattgcatctttgttttacatttctcttgactgtgaacgtacagtctgtgtttgtgtgtgtaagtttttataagttttacctttttttaatagattcatgtatattttatggtagtaaatgataaaatagactaatatctacatatattttatgcattcatgatatacctaaatttttcttaattgtttgatatttctagactacacggcttatctgtgagctttttcaaattgttgcaaatttccaaaaaaaattgcaatatatttgttgaaaaaaaattcacatataagtggacccatgcagtttaaacctgtgttgttcaagagccaactgtattgtaatttggaaaaaaacaacatctaaattatatcttgaaaatgcttcttcccttatttcaatttaaatttttttttgtatccactcagcttgctcttgagatgataaatgcaatagaatgatcatcaatagatcaagtcaatgtggtatcaaaaatgaagtaatatttagcagccttgtaaaagcacatatatcaggacttcttgcagaggctttgtttccaatgtgattttctctagaaaggagaaagttgttttatttaagttatgggggtgggtattgtgtatagagtggggaactgcctttgatattttctatcacaaatttttttagctcagtcagcagaattttattattttagcaccaaaggaatcctgaatcatgttttgttttcatctcaaagtattttctaatttccctgtaacttctatccccatcggtttttatgagtgtgctgtttaatttccacacatttgtgaattttccagttttcctcattactgatttgagtttcatttttttgtggcctgagaatacatttcatgtgactttatctttctgttgatacgtgagattttttatttttattgagacctgttttgtggcctaatgtatgatctatcccagaaaatgtttcatgaccacttaagaaaaatatgtattctgctggttttaggtggggtgctttgtatatatctgctaggagtttggtttatgtttccaaatcctctaattctttattgatcttttgtctggttgtt

SEQ ID NO: 1561339 - DNA, 4001 bp, Homo sapiens
ggctcactgcaagctccgcctcccgggttaacaccattctcttgcctcagcctcccaagtagctgggactacaggtgcccgccaacacgcccggctaattttttgtatttttagtagagacggggtttcaccatgttagccaggatggtcttgatctcctgacctcgtgatccgcccgcctcggcctcccaaagtgctgggattacaggcgtgagccaccgcgcccggccagagacgagtttttgtcatgctggccaggcgggtctcaaactcctggcctcaagtgatccacaggccttggcctcccaaagtgctgggattactcgggctgtgaccctgagtgcctcagttccataactcaggactcaggcatgacccaccatgccctgccctcttatactatttttgcaacttttctatagacttaaaattatataattactgtgttaaagtttttttaaaaaatcaggaaatagtcataggagaaataataatgagaagaataagaatgagcatgatagaatatggcaggtcactagtttattatctctttatctggaaatttccatggataagcagataaatagaaaaacattgagaaatgtataataaaaattttgtaaaacatttataagtaatataaacatggaaccactaaaacaaaatgcattagaaatttaaccattactatctttacatcctgatttcataggtaattacaatttttgtatcttcgtatttctgtaatttctgaatgcttcacagtgatacggttctattagaatgtgaaatatttgtaataaatgaaacaaaatagttgacagtttttaaaaactgagaaaactccaaggcaattagccttgctcttaaggtcctttaatcaagttctaacttactttccccacctgagtacagctagttcctctgcctcaatgagaatatatccaagagatgatcaactcgggctctgaccctgaatgcctaggttccaacccaagtttcacctcttactacttggatgaccagtacctctccacagagtcacgttgcggcttaaacgtatctaattgtataaatcccctagaattgaagttagcaattaaggcttaattattataaatgcccatgccctattacacatgctacaaagatacagtctctgtaaaagaaaaatgacaagtcacactcacgtggagctttgctttcagtagccaagaagtcagtccgcgcagtcctttttcaggctggggaaggagaaagctgtgaaacatcctgactgggtcgctgtccctgagaaaagttaaatgctcccctcccttcgtggaagtggacgcaaccctcgcctgcctaaaaagaggtcagaaggcgtccgggatcgtccagcgtcctgcagggatcagagataagggctgaggcccctgctgctggagctctgaccccaccgggggacctaacaggtttcgtgggaaagtaacaagaaaccaccactcaccaagtgacagggactgtttgtgttgtgtaacctattccagttaccaaaacgattctacaaagatggtcctaacgtccccattttaaagaacagcaaggagaggcccagggagattaacacgccaaccttgcactgtaaaaaagtgactgcgcgcctggagtgcagggaggcggagtgggcgagctcagagccccggaaaccctcaaaccaggcgagacgcgacccaaccaagtcccaatgccccccgcctcccgccgcgggacacgaggggagccccagcccaagaaggctccgctgacacaacaaaagccgccgccctcgccccaccaaacctctgctctcccacgaggcttcttttcccataaccggaccaccaggtcccagcgagccccaatcttaagtccctgacattaggaggggcccgcgagtcgcggaactggaagaaactaccgtggaatgtgccgtgacaatcgccccctcttccctggagcggaagtgcccgcgactccactgattggcgggactacatttcccagaattccccggatccccctgcgtgggtcaaatggaccacgactccactgagcgtttggattacactcagaatgctgagggaaaaacgttcagaatctcacccttcagggaaaagcgatgggactccgcggtgctccttgcctacgattcccgcactgcccatggggaacgaatcctatatcgctgagcgcttggtagggaatgtggactgtgaccctgagagtcgtccttccctctgcctgagtccttgagcgaaaatattgaatagacagcaattcctgaagtctaaacgcctcccaggactacggaggattattggaaagagaacaagcgaggagatacaatcttcaaggactaaatggggaatgactttttaggggtcagtagatgattgatgattgattactataaactgataatatgaggccaaaactaaaagttggaagagtgagcaagtacaatggtttgggagaggcaatgaagaacaaagaaggtgccagcccctactccagacgctgtggtaccactggtttggcaggaaaaacaatcatcatttgagagggccagtggggaagccctgtcctcatggaaaagctatcttctttcgtttacacttttcatggtattatgtctactgaagaggtaaaaacaccaaatttcagagaagctcttaaattgcccaatacttcaaagcaagtataactggtgaagcgcttggcattgatgtcagacacccaatgcctatgatttatttaatgcagtagcattaaggaggatcctatacgtgaaggaacatattttattttcttcctttatattttttggttaaaatatcgtcattatagttagcaatttggaatctggcttacattggttgatacaaataaataatagaataaagcaaaatcagaaaaaaacccatctaaaatctttcttcaagataaccaggggctgggtgcggtggctcacgcctgtaatcccagcactttgggaaggccaaggcgggcggaccatgaggtcaagagttcgagaccagccaggagaacatggtgaaaacccatatctactaagaatacaaaaattagccgggcatggtggtgcgtgcctgtaattccagctactcgggagactgaggtaggagaatcgcttgaacctgagaggcagaggttgcagtgagccgagatcatgccactgcactccagcctgggcgacagagcaagactctgtcacggaaaaaaaaaaaaaaaaaaagataaccagatttttttctccccataaacatacattggcctattgatatggtttagatctgtgtccccacccaaatctcatgttgaaatgtaatccccagtgttggagttggggcctggtgggaggcgattggatcaccggggaggtttctaatggtttagcaccatccctctagtgctgttctcctgatagagttctcatgagatctgcttgtttaaaattgtgtagcatctcactcctcgctcttttcctcctactctggccatgtgaagtgctggctccctagtcgccttgcagcatggttgtaagtttcctgaggcctccccagaagctgagctgatgctgccatgtttcctttacaggctgcaggactctgtgtgagccaatgaaacctctttataaattacccagactcacgtatttctttatagcaatgggggaatggactaatacacttatcaatctatatttttgttttttaaaaaatgaagtctcacattctagattcattttataaactaaaaaaataccttttcacaattgtgtttacataaaaacaaggttactatgctaaccacacaatgccacacatccccctctttgaaaattgactgactgctatttctatactagttacagctgtattgttgctctagtcggcccttccaaatgacaaaatttattgagatgctccatctcggccaggcgcagtggctcacgcttg

SEQ ID NO: 1561340 - DNA, 4001 bp, Homo sapiens
tatacgtatatattgtatacatttatataaaatatacgtatatatttgtatatataatacatatatacaaatatacgtatatttcttataaatatatacatatatatttgtatataaatataaaatatatacgtatatataaatatataattatatagaaatatattttagaaattaacagatatatatatatctctctgttaatttttatactattatattgaaataaaaggcaacaacctggcatataacaacattccaagtgcctttcgttcccttttactgttcccaaacaggaaaaatgtgtccaatctttgtgaaatgagatgtcattttaagaaacacaaaggcaaaccaaacttacctggaacttggtcatttttcccctcctccttctgggaaaaggcagagttccggggaagtgaacctgagggagggaaaggcatcatgagataggttagggatggcattagtcaccatggcacttttatgtgacacttcagagaaaggtccccctgtctctaggcagacacagttgcacacggcttagtgaggagaacgggagctagctcccagctacccctcggccccctcaaccagctgcttttgttcatgaacatttcatattaacagacctaaatcaaatacagctctctgtgtactccttctgaactttagtttccaaggaaatgagacacagacaggcaggggaatgtaacagagccaaaatgcctggcttcaaattttggcatttctacctattttcaactgatcagcagtataaaccttaagcgaattattaatctctctgtgccttaattcagttacctgtgaatggggacaataataatgcctgtattctctatttcctgcagcttctgacaagcaagtgctattatgcttcataaaactgcccttttgagtatgctttctagaaaatgaatcttttaagaaacccagaactcaaaaataattgctctgtcctgtgagttaccattaccctcagaaaagtctgtaactgtgattggttgtctaacataattagttccgttggtaatgatagttaaactgccacaggtttttttttcctccaacagatgtaattacttgcaaatgttactaagctggaggagcctcaagaaagtctctttttccacatgcatgaaagcaatgactaataaaaacctaaaactctctaagaaatggtgttacacttaagttaaccacacgggattattggttataaccacattatactgaacatttattagggcctcaggacacctctggcactctgcaaatccgtaatgacgatcgcttatctgagataaaacacacaggacattccccaggctccgctggaactaattcctgtctcctaaacaagaggctagaaaagtccaagaatccaggaacggccccacatcaggcaaggattagagaagggacagcggctccgtagctggatctcctagactcagaggagtttccaaacaacaggcgtctttttcagtattataacagaattaacggtggcatccaacattttcctatgcactggttttaagcttatttctataaaacctcatttaattctcacaagaacatcactgggaacgcactaaccctttacaggcacgaggaaactgagacaaggagagattaagtaacttgcccaatattttactgcgaggagcaggcaggactggctggtaggtgcgtgaggacggctagggcagcagaccctcaacctcgaaggacgacgcgagcccgcctcccacgcaagaggttctgccgaggggacgcaaactcccgcagcctcccaaccccgccctccagcgctggccgcggcttctcttccccaagccaaggacgggttcattgctggccccacgcctaggcaaagagggctcggagaagtcttggagacccggagctgactcacctccctgggagatatctcagatccgacctcgccttcctggagcggaagtgcctccgagtgcccacggttcgtggactccacttcccagaattcctaagcggaagcgtctcagagttctctcactcctggactacagttcccagaatgctccaagggcagcgcttcccaccagctgggctttgttttgactcaagccggttgggtttgagccacttctctggtgctactactgtgagattcgtttttgttttattcatttttaaaagctcatgagaaaataattgtaaaatttttaaagtgatgacatataaaaatgaaaagtgcagcttgtattattaaaataagttagaaaccaaaatttttcgcagaagcagagggtaggctaaaatgggaagcgtaaaagtgacttaggctgagctccgatggacgctgaacgttaaggaacaccagatctcaaacttgtgtcaaatgccggctccccaaatatcatcaactcaacctgttgataagacaaaaaacagaatttattgttgattgcagtaatggagaacaacacttcgacggagcgttggcaccttcacagagcaaagtgtcaaggcaaggttggaactgattgagaactggatgtttaaggcgggtctttcaatgcaagggattttattagtattgcataatgatcatgatactacagtccaggattggtggatatagcaaggatttttgaagcaaagaatcttaaattgcaatctattgacactttctttggaagagattgaaaatttgatgggtctctgtggaagttcccataatgaacaattaaacagtttgcttgggcaggaatctcctggaataaaggcctgctgatgaagacagctgaacaatcatgttagtgccgaaagtaaattgtgatgaaacgggaaaagttcacttctccctctcccagggcatgtgatggggtgtggctcgcttcttcgtgcccagccgctcaaacctctaggggagcatgcacacgggcaggttgtagggctccaaccccacggcagtgtctaggggtgaatgtttacagctcctgaagccccagtgggcgtgtgttatagggtgcttttttagttcagccatctgtaggaggcttgtgttagctcaattagacccctgacttatcgcaagcaagagagggctttctgtatcccagaggttcttgccttggtgtaccagaagaatcgcatcacacataggcttggagaaagagtgcaaggattggagaaaccttggagaacgatttgtaagtagctctcagcagaagggggagccagaagggagatggttttcgcctggagtcagcctctcagcggcctgggcgctcctccgactacccaggccaaactgcgttattccaccggttaatggcctgctggcctgccggtctcttcagtgtgctcttttgccgacccgctcccctcgacagcctctcgacagccagctgtttgtgtgtccgccaatgctctcctctcaacgtccagcagcttgtgtctctgcctgctagggtatcagggtttttataggcacaggatgggggcgtggtgggccagggtggtcttgggaaatgcaatatttgggcacaaaggcaggaatgcctgtcctcacctaggtccgtggccacaggcctgggggtagagccctagtcagggaccacacccttctcccctccagcacttccattcccctcttccgtatcagtgaggggcagggaaagaggatggagttttagtccttagtgtccaagttgtgtatatttaggggtcggtgacaaggagagaagggagtaaagtgtttgactcttttccctccattattcctcaaggtacctaagggctcatgacagtgttttgtttaatgtgctattcgttctaatatactaagaacccacaaaaaggcaatataaatattaagccagagaaatatcttgaacttcatttattttaaatgtgtactgttatggcaaacaaaagcagctccattggccgggaatctaagacaacgttgtaatatgggcatg

SEQ ID NO: 1561341 - DNA, 4001 bp, Homo sapiens
catcacaccagtcagaatggctatttttaaaaagtcaaaaaataacagatgctggcaaggttgcagagaaaagggaatgcttatactctacctcataattgggtatatacccaaagaaatataaattattgtattataaagatacattcatatgtatgttcattgcagcactattcacaatagcaaagacatggacaggccctatcagtggtagactggataaagaaaacacggtatggtcagatgcggtggctcatgcctgtaatcccagcactctgggaggctgaggcaggtggattgcctgagcttagaagtttaagaccaacctgggcaacattgcaaaatcctgtctccacagaaaatacaaagagaaaaattggccaggcgtggtaacaccagcgtgtagatcaagctacgtgaaaggatgaggtaggagagaattgcttgagccagggaggttgaggctaaataaggctgcatcactccacagcactctagcctgggcaataagtgacactctgtctccaaaaataaaataaaataaaagatttagtaaaaacaaaatatggtacataaatatcatggaatactctctggccatttaaaaataaatgatcatgtcctttgcaataacatcaataaagctgtagaccattatttcagaaaactaatgcagaaacagaaaaccagacattcgccatcacacccagctaatttttgtacttttagtagagatggggtttccccattttggccaggctggtcttcaactcctgacctcaagtgatccatccacctcgacctcctgaagtgttgttattacaggcgtgagccaccgcgcccggccccataaatttttaataggagaaaagggaaactgtgaaccctgacagatataatagattcctcttcaagggcctaactttcttgttccttgttcttaggaccaacttttttgtacctctttgtacctagacacccgctccgtaaacaacccaaaccgcctgttccaatctgcgacccgaaccccttccttatttggaaagtagccaatcgggtcagcctagattgtgaggtcagaccccggccaatgggggaaggacacagaggcaataacggcgtttagggttaaaaacccctttcaaactgggaggccgaggcgggcggatcaactgagttcgggagttcaaaaccagcctgaccaacatggtgaaacggcatgtctactaaaaatacaaaatcagccgggtgtggtgacgcatgcctgtaaccccagctactcgggaggctgaggcaggagaatcacttgaacccgggagacggaggttgcagtgagccgagatcgcgccattgtactttagcctgggccacaagagcaaaactccgcctcaaaaaaaaaaaaaaccttccttcctttcttctgtgtgctcttgcgatcaggtcggacgcgagcagcactcttcttcagaagtaaatatgccttcctgtgaaattttctaagtgctgggtagttttttgttttgtgttgttttgcggcaccaagcgcttgtttctaacaacctcacggaccaaagctcttcccattcatgaacccgcagggaaccgagtcaggattctcccctgacgaccctcccgtggtccttgcatgatctgggagagacgcggtgctgcgggtgcagagctgctgaaagagggctccaggccagggcacaatcactgtgccgggccccggatgtcaccgcagccgccatcttatggctgaaggggactgaggccgagctgggcagggagaactccggcggcagattgtggagctgactgtgaggaagcagagtcccgccagagccacttcccaccgttccaaacagcctctcccctctctcgggacgttggacccggcactcaccatttctaggcttccaggggtcccggggtttagctgtggctctcccaatacttgcaggtcacacggccacagaggacgggcctctataagcacaggacacagaacactgaggataaacctggagctcccgctgcagcgagaaacaaaggcccccagaaaccatgtggttcgctccagctgcgtgcctgattggacggtttccggcccagcgtccctcattggataatgcctaaggccccgcctccccagccgctgagtgacagatgtgatcagatactgggctgagtgaagaaagagtgacagcctaggctgcagccttttctttctttctttctttctttctttctttctttctttctttctttctttctttctttctttctttctttctttctttctttctttctttctttctttctttctttctttcctttctttctttctttctttttctttctttctttctttctttcttttctttcttttttccccccaccgagacggagtttccctcttgttgcccaggctagagtgcaatggcacgatgttggctcaccgcaacctgcacctcccgggttcaagcgattctcctacctcagcctcccatgtagctgggattacaggcatgcctcaccacgcccgtctaattttttgtacttttagtagagacagggtttctccgtgttggtcaggctggtctcgagctcccgatctcaggtgatccgcccgcctcggcctcccaaagtgctgggattacaagcgtgagccaccgcgcctagcctagctggagccttttcaaacggcttcctccctgagctgagcatcccatcccagagcatgggaaaattctatctcatattctctctctttttgaatgtattcaaaaggtgaacagaagtactttgctgtcatattaataatacatgaaatgtttgttcaagagaaagtcaacttttactttggtaatagtgtattatcaatactaaagctaattttaataagaccttgtaaagccaggtgcggtggctcaggcctgtaatcccagtactttgggaggctgaggagggcagatcactgggtcaggaaatcgagaccatcctggctaacacggtgaaactctgtctctactaaaaatacaaaaaattacccgggcgtggtggcatgcacctgtggtcccagctactcaggaggctgaggcaggagaatggcttgaacccaggaggcagaggttgcggtgagccaagatcgcaccactgcactcaagcctgggtgacaaagtgagactgcgtctccaaaaatgaataaatacataaataaaaccttgtaaataaacaaaatttgtcatttttgacctctcgagatttacatatataatttgtaatctcctgtaattttttaactatattttatttatatctacattctttttattttttcagtttgaaacaacctttaagtaatttcaaactgttataggagatagaaagaaatcatttagggacaggtgcgttggctcacgcctgtaatcccagcactttgggaagccaaggtgagtggaatacttgaggtcaggagttaaagaccagcctggccaacacagtgaaaccccatctctactaaaaatacaaaaaattaggcgggcgcggtggcgggcgcggtggcgggcgcctgtagtcccagctactcgggaggctgaggcaggagaatggcgtgaacccgggaggtggagcttgcagtgagccgagattgcgccactgcagtccagcctgggcgatagagcgaggctccgtctcaaaaaaaaaaaaaaaaaaaaaaaattagcctggcgtgctggtgcacatctgtagtcccagctaccacggaggctgaggcaggagaatcgcttgaacccaggaggcggaggttgtgtaaggcccaaggggttcacctggccctttgcctagacagagatgattcatcaagacaggggaatttgtggaggaaaagttaaatattaaatttgaactcaattaaacgtggacacaaacaattgtcacgaagtcctggaacaggttgtgtgagccttctgagttgttcattcagagctgtttcagtg

SEQ ID NO: 1561342 - DNA, 4001 bp, Homo sapiens
ggatcacctgaggtcaggagttttggaccagcctggccaacatggtgaaaccccgcctatactaaaaatacaaaacattagccaggcatggtggtgcgcctgtaatcccagctacctgagaggctgaggtgggagaattgttccaacctgggaggcggaggctgcagtgagcggagatcacgccagtgcccgcctgcctaggcaacagagcgagactccatctcacaaaaaacaaacaacaacaaaaaaaccaggctgacttctgggtaaaatattccctaatctagcatctgctttcaccatgttctatccctccctccccttcccactttttttctgaccttcttttcttcttatgaaagaaagtccttttctctctaacctttaaaattctccaatatcttatagctggtgctttccccttgctgcaatactcctttaaaattaagtaacttcatgctgcgcatgacggcaggtgcctgtaatcccagctactcgggaggctgaggcaagagaatcgcttgaacccgggaggcggaggctgcagtgagccaagatcgcaccactgcactccagcctgggcgactgagggcaactccgtctcaaaaaaaaaaaaaaaagtaacttcttgccaggcacagtggctcacacctgtaattccagcactttggaaggccgaggtgggtggattacctcttgtccagagttggagaacagcctggccaaaatggtgaaaccccgcaaaaattagctgggcgtcgggtcgcctgcttgtagtcccaggtactagggagcctggaggatcgcttgaatctgggagacagaggttgcagtgtgccgagatcgtgccactgtactacagcctgggtgacagaatgagactctggcacaaaagaaaaaaaaaaaaaaaaaaaaaacccacttacctaaatctaaatttgtcatatatcacaaaatctagaaacaacctcagaacaataactctattcccagaaaaagcctcccaaccccatttttgtgccaaccccaactgcatctgcctgtggatgtatagattttcagggctctgcagcttctctaagcataaaggttctgtccatggctattgtgagcaggctgggacatctgcaggagaggctccgccggcagaactaaactatccttagcttgagtcactgagttcaggcttctatttcccggtcaggccgaggcgggcggatcacttgagttccagaccagcttccaccatggcaaaaccacttctctactagaaatacaaaactagccaggcgtggtggcgcaggtatgtaatcccagcttttcggagggctgaggcacgagaatcgcttgagtctaggaggcgaaggttgcagtgatcgtgccactgcactccagcctgggcgacagggcaagactccgtctcaaacaaacaaaatgtttaagaaaagagactcgggagccccacctgccgcagctcctgccacgcacacaccaagtcaggattccgccctgatgatccgcctggcatccctgaacaatctgggaaatactcggggctgcatgcagagctgcccagggagctccagactgggcgccgcagggacggggctgaacgcggggatcccggctgcgggcccagccgccatcttgcggccagaggggcctggggctgaactgcgccagcagggacctcaggtcggaaacccgggagcggtgacgaaggcagtcccgccggtttcacagcccgctctctcctttcgggatgcccaaccccgcacactcaccctttcccagcttccaggatgtcctgacatcttagctgtgcgtctctccggacctgcagatcacagggcaacagaggccgtcacagagtccccaggggctcccgaggtggagaatgcagaagagcagagacggattccaagctctggtgggagcgagagacaaaggcccagccaaatgccggaaaccatgcactcctcttcaactgcgcgcttgattgggcggttgccgctccagcgccaaggattggataaggaccggcactctccccataccactcccacccccaccccctgcccccgccccgttcagcattagtgcgttttatgaacagaaaaacaggctaaagtaggtagggtaaaatgcacagggaattacagctaattaagaagtgagctgagacttgaaatgcacttgctctttcccttacctgggtctgcttgtataatgcatcttatttgctacttaagggtaagaaaagatcatttggattttttttttttttgagaccgagtttcactcttattgcccaggctggagtgcaatggtgcgatcttggcttactgcaacctccgcctcccgggttcaaatgattctcctgcctcaacttcccaagtagctgggattacaggcgtatgccaccacgcccgactacttttgtatttttagtagagacagggtttcaccatgttgcccaggctggtctcgaactcctgacgccacactggtctgaactcctgaccgcccgccagagcctcccaaagtgctgagattacaggcgtgagccaccgcgacccgcccatttggacatttttttttaacaacttttcaatcattttgataatgcaggaaagatcttcatcccatccctgagcccctttctaaccatgctgtaccacactgctgaccatatcgtgggatgtccatttggaatggggctggggtcgggggcagcagaggctgagaatggttaagcaagaattatgttacccaaatttgttcatcttagacaggctcctctatcgttccgtgtgaagtggctattccagggtaatcatgccctgactgcactgcatctcagtctgacttctcttttttaaaattactggattactctcactaacagggtatttcatcttccatttgaaaatggccaacagtcctttgtcggttgtcctgatttgatttgctagtttagaccctggaggtagaggttaggaaatattgggccacatcagaataccttattctcacttagaggatatataggaatttcttaatatctaacagttttctcaatagccattatatttaacaatgatagcttacagggcagaaaggggacacagatgacacaacctcagaaatttaatttggtcataagttttttttgttttgctttgtttttggagacaaggtctcactctggtgcccaggctggagtgcagtggtacaaccatagctcataattcggttgtaatggttcttttaaaaatgtttttggctgggtttgatggcaaacacctgtaatccaaacactttggaaagccatggtggaatgattgcttaagcccaggagctcaagaccagtctgggcagcatagtgaggctcagtttctagaataattttaaaaattggccttgtgtgatgttgcatgcctacagtcccagctacttgagaggctgaggtggaaggatcactggagattgaggctgaagtgacccatcattcggccactgcactccagcctgggtgacagagtgagacctgtatgtgtacacacacacacaaacatatatatacatacacccacagacacacatatatatgtgtgtgtgtctatatatatatatatatatatatatatatatatatatactcaaaataatatgtatgttgaaagaaattcaagcacagaagaaaagtgaaagaccatggtggggaatgtgataaaaggtgagtgtggctcctacagctcagtttccatcttaaggaactgccctcccacactgaaaccacaacccagcacatgccaattctcacactatttatactttgcccaaaggcaacagaaggaggtcaacatcatcatttgtgccatggaagtctattccccactgagaccttttaaaaatgttactgtcttaagccctcttccttccaataaagcctatacaaatacatacatacaagcctgaaagtactataaataaaatat

SEQ ID NO: 1561343 - DNA, 4001 bp, Homo sapiens
ttactaaaaacacaaaattagccaggcatggtggcacatgcctataatcccagttactagggaggctgaggcaggagaatcgcttaaacctgggaggcggaggttgcggtgagccgagatcgtgccattgcactccagcctgggcaacaagagtgaaactctgtctcaaaaaaaaaaaaaaaaaaaaaaaaaaaaagattaattggccaggcgagatggctcacgtctgtaataccagctcttggggaggctgatgcaggcggatcgcttgaggctaggagtttgaaaccagcctggacaacatagtgaagcccggtctctactaaaaatacaaaaattagccaggcgtgggggcgggcgcctataattccagctacttgggcgactgagacaagagaatcatttgatcccataaggcagaggttgcagtgagcctaaatcacaccactgcaccactgcactccatccggggtgaccgagcaagcctctgtctcaaaaattaaaataaataaataaataaaaattaaaacaggtatcaaaatctaccctaaaggacaaatagatgataaagtgaattagggaggggacattggcatttgggaatgtcagacaaaacgggaaatttagtattttcctgcaagccagagttaggctggaggaataggggatgaggggtggacttgaggccctgcttgggatacatgtgaaaatttcaggaaaaaagcagtcccctgtggagtgtgaaaataattaagtggcaggcaattagattgaggtggctctagtccccggatttctacttctaaaaaaaaaatctaaactcaagagcattttttggtaaattactacattagcggaaacaaaattcttgcttaaccaagaataagctgacaattaagctctgattacataaccaggatattcccaccttaaatgtaaaaattaagaaacgaggctgggcacggtggctcacgcctgtaatcctagcactttcggaggccaaggtgggtggatcacctgaggtcaggagttggagaccagcctggccaacatggtaaaaccccgtctctactaaaaataaaaaaattgtggtggcgggcgcctgtagtcccagctactagggaggctgaggcaggagaatcgcttgaacccaagaggcggaggttgcagtgagtcgagatcacaccactgcactccagcctgagcaaaaaagtgagactctgtctcaaaaaaaagaaaaaaaaaaaaaaaaaacgacaacctagattgctgtacctagccaattattgaatttggttttctttatcatgaaccttgtaacaatcttttcttcaggccccttccatggaccacaaaagtacaaaccacagctgggtgtggtacaatttttgaatcattcttttattaaagtatttaatatttttgcagtgacgcccataaatttttaatgggaaaaaagagggcctgggaaccccacagaccaaagctcttcccgttcatgaacccgcaacccgagtcaggattctcccctgacgaccctccccgggtccctgaacaatctgggagagacgcggggctgcgggtccacagctgcccagagagggctccaggacagggcacagtcactgcgcagggaagaaacaggactcctgggggtctggctgtcagcgcagccgccatcttatttctgaaggggactgaggtcgagctgggcgcagattgtggagctgactggggggaggcctgagtcccgccacagccgcttcccaccagttccaaccagccccctcccctctctcgggatgtcggactggcattctcaccatttctaggcttctagggggtcctggcatcttagctgtggatctccaatacctgctggtaacagcgccacagaggctgggcctctaggagcagaggacacagagcagtgaagacagacctgggactccggcgacagcgagagacaaaggccccgccatatcccggaagccgctttgtccagtccagctgtgtgcctgattggacagttcccagcccaacgtccctagttggataacgtttaaggccccgcctactcagaccctgagtgatagaagatgtgatcacaccctaggctgaagaaagagtgacagcctaagctgcagccttatcgggcagggcttcctccctgagctgagccaggcccaccccagagcatgggaaaattctatatcttttttgctctctctctttttcaatgtattcaaaatgtgaacaaacatattttatgtatattaataatacatataatttttgttcaagagaaaatcaacttttactttagtaataatgtattatcagcactaaagctaatttgataaaccgttataagtaaatccatcagctgggcgcggtggctcacgcctgtaatcccagcactttcgatggccaaggcgggcggatcacattaggtcatgtgttggagaccagcctgactatcatggtgaaacctcatctctactaaaaatacaaaattagctgggcgtagtggcacgtgcctgtaataccagcttctcgggaggctgaggcaggagaactgcttgaacctgggaggtggaggctgcagtgagcgtggatcgcgtcattacactccagcctggacaacaagagtaaaattccgtctcaaaaaaataaaagaaaaaaaaattagctgggcatggtggcgcacgcctataaccccagcttctcgggtggctgaggcagcagaattccttgaacccggggggctgaggttgcagtgagtcaagatcctgccactgcaccctagcctgggcgacagagcgagactttgtctcaaaaaataaaataaaataacaaaaataaagtccatcaaatttgtctttttgaccattctagatttttatacatattttatgatctcttatacttttttttattttttattttttgtctagacgaagtctagctctgtcgcccaagctggagtacagtggcgccatcttggctaactgcaacctctgcctcctgggttcaagcgattctcctgcctcagcctcccgagtagctgggattacaggcgtgcatcaccaaacctggctaattttttgcatttttagtagagacggggtttcactatgttgccaggctggtcacgaactcttggcctcaggtaatccacccgcctcagcctcccaaattactgggattacaggcgtgagccatcgtgcctggccattttttaaatttttatgttgtattttaatctacattatttttatattttcaatttgaaacaacctttaaataatttcaaagtagacaaaatgtttctaactttcttcatcaaaagcatattttgcttttgtttatacactgtttttttatttccaggagaggcttgctctttcgcccaggctgaagtgcagtggcgcaatcttggctcactgcaacctccgcctcccaagttcaagcgattctccagcctcagcctctggagtagctgggactacaggtgtaagccatcatgcccggtttatttctgtattttaagtagggactggaatttgccttgctgttcaggctggtctcaaactcctaagctcgaaatgatccacctgccttggcctcccaaagtgttgggtgttgggattacagacgtgacccactgcgcctggcctttgtttatacactctctataaaaaaattgttttacacctagaaatcttagtttttatatatatatatatatacccttaacaaactaatttttagtgaaacccctaggaagtaattttgaactgttttgtatcaatatttgtagataaaaaattttatgttttttaataaaagacgtttattcaaattttctgttaagtaacagatctaaatatagttagcttttctatatcatgttaaaaaaaattctgggctgggtgcagtggctcacgcctgtagtcccagcactttgggaggccgaggtgggtggatcacgaggtcag

SEQ ID NO: 1561344 - DNA, 4001 bp, Homo sapiens
aggcctccctgccaggctgtattccttgcctcagacatagccacacagaaccacaggtgaatcacagataaccatggccctattccacttctgtgctgcacttaccatccccttgagagtcatatatccacctaaagctcatttaaatcccagcctcactggtcgttcatctcacacacaatgactctcacaaatgaccacatgacactaacttaatcttccagcctgaatgaaacacccaggccccatcaagttatcacaaaatcctggatacccataaagtggtgaataagcacgagttttggcctgagtgtcctatgcgtttgcatccatctcatgtccattcttctcttgggagccgtggccactgccaaactacactgtcttttacataccttgccttcatgaccacttactctatcatcatcctcccagtcttggcccactaacagctttacaaccaaaacctggagcttgccccgcctaactgtgacccacagctcactaaccttggtgcgcacaacagccacatcttgaatatctgcaccctgaaccactccctagatttcaagaccggcacgttcatctgcccacttaacgcctccatttagtaggctctgaaagatctgactcttagcatggcataaacaaacctgatatccctagtgaatattactcctattgccaatttgttcatcttagttgatgaaacttctttccctacagctgctaataccaaaaaccctggagtcttctctgaaccctctgtttcactccctcaccacctacattatgtaatttagttgtcccttttgaaaccacacatccggaatctaaccacatctcctaaatcacgatcctgggccagtaaccctcacttggactagtctaccctgattttccttcctcctccctcaaccccccagtttgtgccccactgtgcacacagatgaagcctgtgaagaccttggtaaattacctcttttttctgattcaaacttgctattacctcctgaaaacacactcaacttctcaggcagccactgcagtcctgacgcctatcctcctgttctttgcttcccaccagaaagcaaggagacttgtggcttcataaatgcacccagctccgtactgcacctaagcatttgcacatcttgtacctttctggaaaaactttccacacccgttcacatggctgccagaaattggaacaactctatataccggctaacatggacataggaccctgggcttggggttcacccaaggtcttcagaactaagggctgggggaatggcactccacaacccagagaacctgtgggtgggagttagggctagtgagagactgggaaaccctccccttcctggcgtagatttcataaccctttacagccaagggaaacgtagaaagagccaggcctcagagaagagcatctatggcggtattagatgggctcaagccaccccgtagccccatgcctggccttggagccgggtgccctcgcaatggctgtgtcacctctgtgccccagggctcagtggcgcctctcatcaggggctccttgccagtcgcgccctcccttccctagcacaccaggtgttggaaacgggagcccctccggcgagcccccgtgtcctgtcctgggcagcagggccgcgagcaagcgccctcgggggtgctaggactagcgtggggagggcggggaaggcccagaggacgcggcacatacctgggccggggccgtcagctcggccgccgccatctgactctgtgagcggagcggggccagagaggatgtccttattccgggccgggcctgggtaccctgggcgccgccgagcctcagccacgcctctgtgcagcggggaagactcctctcgcgccttctcagtcagtcacggatgatgctgacccagcgctccggggctttctaccaagtaatcagtccagacaaatgccaaaacgaccgccacaaggaggacaacggaagtcccgccgcgaccgcgcgtgcgcttacggaaacaccacctttcggaggcctcattggctgaaggtcgccgtcgcccaacgcaggccattctgggtaatgttcccacaggcgcacggcgggagagtgagggtcgcctccacctccttccggaagtaaaggccaaacccctgtagggggcgctgggaaatggacactccaggttggggcggaggcgaggcttcgttctttcttaaaggagacgtacccaggtttctaccgattgctgtctgccagtgtttgtttggagacgtgtcatttcatgtgttcccagaggcacatatccagatgcacatattattacatacagtcagtcagtcacaaaatatatccactggttgagaaagcaaataaatatgactatgttgcggccgggcgcggtggctcacgcctgtaattccagcactttgggaggtcgaggcgggcggatcacgaggtcaggagatcgagaccatcctggctaactcagcgaaaccccgtctctaaaatacaaaaaataccacaaaaaaaaaaaaaaaaagaaaaattagctgggtgtggtggcgggcgcctgtagtccccagctactccggaggctgaggcaggaaaatagcttgaacccgggaggcagagcttgcagtgagccgagatcgcgccactgcactccagcctgggggaaagagcgagccactgtctcaaaaaaaaaaaaaaaaaaaaaaaaaaaaaaagactatgttgcaattcaaacgcatgcactcaagcactggagtcagttttctcagtctctgtatgtttgattagggacaagaaaaaaaacactccacacaggttcatgacaaagaggatgaaggtgggatgcggaggcaccctgcagcagcaggacataagtagatccctgtctctgggtccctctcgtgcctgtgtagtcaaacattgtgtccaattcactaagcaacacttgcatgaatctaatctcactttctccatgcctttatattcacttctttttaataatttgacatcaagctcagaaagagaacaacaaaaggaatggtattttgaaaaggcatgatggctagctagagcattaacaggtggaacaaagggtgctctgaatcccaaatgtagggtgtatcttaaattcaagatctcttctcaacgctgaaatgattatctttgcccccattagttacgctcttgttgcccaggctggagtgcaatggtgcgatctcggctcaccacaacctctgtctcccgggttcaagcgattctcctgcctcagcttcccaagtagctggaattacaggcgcccgccaccgtacccggctaatcttttttttttttttttttttttgtatttgtatttttagtagagacggagtttcgccatattggccaggctggtctcgaactcctgacctcaggtgatccacccacctcggcctcccaaagtgctgggattacaggcgtgagccactgtgcccggccctttgcccccattattatagggctgttctgcataaaaaattgatacgatatcagaaaaagaattgtaaaatacaaattacagaaagctactaataatgggtgtcgcttcgccagccagaaacctctgtggtcgcgcctctgcttgagttttgctcacacccgctgggcttgttccacccactcggcccagcaggctgcacctggatcccacacctaccaagggcgagccaggcgcggagccgcaaggggtgtgtgagcgagcaagtgaagggtccagccagtgcacacagccaggcacgctggctgctgcggcggggcgggcagctccaggcgctggcacaggcgccggctccttgcaagtctgcgactggaccagacatactgcaggcggcttctgctgcaggcaccagcatctagacgagggaaaaatggtggcgccggaaagctcggagacaccaagaacagcagaaccccaaagagggtgttgcagcatgtcacagccctg

SEQ ID NO: 1561345 - DNA, 4001 bp, Homo sapiens
tttttgcaatccagagttaggctgaagaaatgatgaagggggaggagggtaaaacttgagactctgcttgggacacatgtaaaaaattcagcggaaaaggccggacgcggctcactcctgtaatcccagcactttgggaggccaaggcaggcggatcacctgaggttaggagttcgagaccagcctagcccacatgaaacctcatctctactaaaaatacaataactagccaggtgtggtggtgggtgcctgtaatcccagctactccggaggatgagacaggagaatagcttgaacctgggaggcggaggttgcaatgagcagaaatctcgcccctgcactccagcctgggtgacagagtgaaactccttcttaaaaaaaaaaaaaaagaaaaacaaatcagcggaaaattagtcccctgtggcttgtgaaaataattaagtggcaggcaactagactgaggtggctctagtccctggatttctactttaaagaaatttaactcaaatgcatggtttttgttttgttttgttttttttgagatggagtttcactcttgttgcccaggctggagtgcaatggcacaatctcggctcactgcaacctccacctcctgggttcaagcgattctcctgcctcagcctccggagtagctgggattacaggcatgcactaccacgccccgctaattttgtattgttagtagaggcggagtttctccatgttggtaaggctggtctcgaactcccgacctcaagtgatccgcccgcctgggcctcccaaagtgctcggattacaagcgtgagccacagcgccggcctcaaacgcatgtttttataaattactaaattgggggaaacaaaattgaggcgtagccaactatacactaccatttaacctctgattacataacaaggaaatgtccaccttgatagtacaaattaacaaactatgtaactgcatctaaccaattactgaatttggttttctttatctcatgttattaaagtcttctcttcaagcccctgctatggacgacaaatgacaaaccatagctgggtactttacaattttttttttttttttttttttttttttgagacggagtctcgctctgtcttcaggctggagtgcagtggcgccatctcggctcactgcaacctctgacttcctggttcaagcgattctcctgcctcagcctcctgagtagctgggattataggcacatgccaccacgcccgctaatttttgtatttttagtagaggcggggtttcaccatattggccagaatggtctcaatctcctgacctcgtgatccgcctgcctcggcctcccaaagtgctgggattacaggcgtgtgccaccgcgcccggatttttgaatcactctttaattaaattctttaatatttttgcggtgacttctgtatatttttaataagagaaaagagagactcagaaccccacagaccaaagctcttcccattcatgaaccccgcaccccgagtcaggattctcccctgacgactctcctgtggtccctgcacaacctggggagactcggcgctgcgggtgcagagctgccgagagagggatccaggccagggcacagtcactgcgcagggaagagacaggacgcccggggtcccggctgtcagcgcagccgccatcttatggctgagggggaccgaggccgagctggccaaggaaaactcgggcgcagatggtagggctgactgcaaggaggcctgagtcccgccacagcgacttcccacaggttccaaccacccccttcccctctcccaggatgtcggacccagcactctcaccatttctaggcttccaggaggacctggcgtcttagctggggatctcccaatacctgcaggtcacagggccacagaggctgggcccctaggagaagaggacacagaccagggaagacgagacctgcagctcgggctagagcgagagacaaagtacccgccaaacccggaagccaccctgtccgctccagcttcgtgtctgattggacggtttccagcccagcgtccctgactggataacgtttaaggcctcgcccctttaggccctgagtgacaggagacgtgatcagatgctcggctgaatgaagaaagagtgaaagcctaagctccagccttttcaggcaggttttcctccctgagctgagccaggcccaacccaaaggtatttgcatttaaccttgtgtgtaaggtcatatgcgtttatacataatacataatatggccgggcgcggtggctcacgcctgtagtcccagctactccggaggctgaggcaggagaatcgcttgaacccaggaggcggagattgcagtaagccgagatcgcgccactgcactccagcctgggccacagagtgagactctgtctcaaaaaaaaaaagaaaagaaaaaaatacactatattgttattcacaaacaaaaataatctaataacaactattttaaaatttcagctttcctgaccttcctggcttctggttttttgatcaggcagcctgagattttaagaaggaggcaatcatggccgggtgcggtggctcacgcctgtaatcccagcactttgggaggccgaggccggcggatcacctgaggtcaggagttggagaccagcctgaccaatacgatgaaactccgtctctactaaaaatacaaaaattagcggggcatggtggcgggtgcctgtaatcccagctactggggaggccgagacaggtgaacccgggaggcaggagttgcagtgagccgagatcgctttgaactccagcctgggcaccaaaagcgaaactaagctccgtcaaaaaaaaaaaaaaaaaaaggaggcaatcttctgaaatagaatgtgagccaaatgtgaattttaaattttctagtagccaaactttaaaaagaaagaagaaataggtcaaactgattgtaacaatttcagtaacccaatatatccaaaatattactatatgagcaatgtgtaattattaatgtagcatgtatatagttagaactatatcattggaactaagtctgtttttttttgttttttttgtttttttttttttatttttttttgagatggagtttcgcttttgttgcccaggctggagtgcaatggcacaaagtgtgttctctgcctcctgggttcaagtgagtctcctgcctcggcctcctgagtagctgggattacaggcatctgccaccatgcccggctaatttttgtatttttagtagagacggggtttctccatgttggtcaggctggtctggaactcccgacctcaagtgatccacctgcctcggcctcccaaagtgctgggattacaggcgtgagccaccgcacacaggctactaagtctgttttttgcctttccagcacatcacagtgtagacccagccacattccaggcactcaggagccacacgtgaagtgcagctctgatgttgggtgggtaaagggcctgaataaatttattctgccagtgtgaaggaagggcctcttcctaacaacatctctcttcagtttggaggatggaaaagatggcggccatagaaagagcagagggcagcaggaataaattaaccacaagtagacaactgctggccacctttggcccaccttccttccagagatcagaaagggagcaaaggatgataggtccggaggagaagaaaactctaagtcttcatatctgtgcatactcttgacctgcagtgtttatatagagagaaaatagattaaatgcaaacatattttgctatttggccttgaacctaatcatcgggcctcctggattgaagtgattctcgtgcctcagcctccggaatagctgggattacaggcgtgtaccaccatgctcagctaatttttttgtatttttagtagagatggggttttgccatgtaagccaggctggtcttgagctcctggcctcaagtgatccgcccacctcagcctcccaaagtgct

SEQ ID NO: 1561346 - DNA, 4001 bp, Homo sapiens
gctggccaagatggtgaaaccctgtctctactaaaaataaaaaaattagctgggcatggtggcacacacctgtacctcagctacttgggaggctgaggcaggagaatcgcttgaacccaggaggcagaggtggcagtgagccgagattgcaccactgcactccagtctgggtgacagagtgagactccatctcaaaaaaataaaaataaagtgaatggaagtatatttacatataacctatgcacatcctcccatatactttaaaattatctccagattacttatcatacgtaatacaacgtaaatgtctggtaaatagttgttatactgtattgtttagggaatcatgacaagaaaaaaaaatctgtacacgtacagatacaaccatcgcaagcttaacaacagttatgattcatgtttgttgaatccgtggaagcagagcctacagacacagagggctgactgttcattcactgattcagcaaacatatacatttatgattatgtgtgctgagaaaccttggtttacaatttgtaatgggatataacaaatcaaaggatcaaacttacttagaagccttctctaagatgtaagtgccttagaacctggctagacagtgctataaattgctgaaacaggtacagaggggaaatagatggaggcagactgcaggaagaaggagccctttagacataaagagcttgaagttccctgtaacttccaggtggactgcacattgggcaattagataatatggattaggagctcaggacaagcctccagcagaaacagacatttattagtcatctgtattagatgaagccatggatggcagtgtaatgttgttgctgataggagtacttagatgatcaaggccagaaacttagaaacaccaatagttaggggaaaagcagaaactaagtcctgtcttctttgtatcttttactttttctgtatatttcaaaactattaaccctgttacttttttattttattgaaaaatatgttaagaataagtgtgacaagatacttgaatatgttgatatgttaagaataagtgtgacaagatacttgaagataggatacttctatctttgtatacacaagaaaagaatttcccctatatttacaaaaggctggggaaaccctgattaaattaggagtgagattgctgccctcactgacgaactagggagtttcttgacctctgcgctaaaggcaggacaagtagcttccaaattctgtgccgtctgcgctattggaaactacctcttaaagatattccttagttcagggtttctccaagcaactgcaccaaagtttctccaaagtattaagaaaagtcaatgcctactgggtgtacaggcacccagtaacaagtttttccgaaatcttgcctctttaaaaaaataatggaaaggtaatgctgattttgttttctactccacaataggtctgcttttatataaaaaatcacctttaaaattacttatccgctcaattccttagccttttccgtttcctattttccagaaaacgcatctttattattttagaaatgagaaaagtgaggcttagaggttactacctcacaaagccatccgtccatcctcacaaacttggaaccagtttctcactaactctgcaccctcaacaccccctcacactctcggtcacccacccgcgaacccacccgaactgtacccctgcccccagccacacaagctcggatcaccgcacatcatagaaggcgattcctcccctccatactcccagccccgtcgcaggcactgcaaatcctcccctccagcgtccctggcccgtttcagtgtccagaaacccaagtcccacagggccgaaacccaactcaccggcagacaaagacgaccatggcaagtcggagattccgcgcctgcgcactccttccgcgggcagcgctcccagaggtctcctgggctgggccaggccccgactcagaaccggacggaatcgagagatcttggcccgtcctccgtgccactcttttgagggtagactacatttcccagaaggttcagcggtttgagtcagcttttcgcgcgaacttttcctccgccagagcttgtgggactgtctccctggccggggcaggggtgtaaggccttagtcttagtttactctatccctgggattgggtagtggtgtaacatcagcttaaacacgctgtgctgactttatgtaacagccacggtgcgatactaagccaggaaccccaggagactctcagacacggttcgggaatgagggtaatccctttggctgggctcaagccgggcgccatcttgctcatcgcgggcgtggcgctgaactacatttcccagaaggcgccgcgccctcggcccctcccctcgcgactcccgcggctcgggggagagctgcacgcgacccaggtgctggcctctgagcgggtcggctcggagactacaggatcaggaggaggttggaggtgaagcgtctggaatccggtgcggaggttgagactgagtattaagtctgttcaggcggaacgcgccgagaagggcggttgtgaaattgtgtttttgtgaatgtatgtcctagcacagtgtgtgtgtgattgtgattgtgtgtgacaccttgtgtacggatgtggggaggactctgcgggtgtcccgtgagtccctgtgttaggactgttattgtgtgactgtgtaacgctgtgtgagggtgtgggttagctgtgactgtgtgcccgcggtgggtgtgtgattgtaactctgtgaccatatgttcgtttgtgtgcagatatagggagctttgtacttatgtagttgtgactctgtgtccttgtgtgggagtatggagggtgggtgcttgtgactttgtgtacagtggtgggtgtgtgactgtgaagcattgggtgtgcgtggagttgagactgtgtttgtgtgtctttgaccaaatgtcacacatagtcatatgtgagagcagaagacagctcggccccgtgatagtaaaggggatttttctatgacactgagttttgagttggaagccccagtttcctctgatagccctcccatggcgggggaggggaacgcagagtaagctctggccttgtcatttgggccctaggggaggtgtattgtctcccttctcatttctgtcctccaagagaggttccccagaggagaggaaataacggttgtgatatctaaaagccatgtttaaggtgccttgaagttttctctttgttcctgaaatgctttatttttccaggacctgattttttttttttttgagatggagtctcgcactgtcgcccgggctggtgtgcagtggcgcgatctcggctcactgcaacctccgcctcccaggttcaagcgattctccttcctcagcctaccgagtagctaggattacaggtgccggccaccacgcccgggtaatttttttgttgttgtatttttagtagagacggggcttcactatgttggcctggcttgtcttgaactcctaaccttgtgaaccgtccacctcggcctcccaaagtgctgggattacaggcatgagccactgcgcccggctgattttttttttcttagcaaatgcctaaaaggacttatcaagtaacctggaatcttctgttactctttggaaaaatcttcctaattttgtcttattaatatagcaaatggttcagtttatcatgtatgcttagtttggttttacctatatacatatgtagatatatatgcatatacataaatatacatacacatatttgtatatgcacatattgaaatgtatctcatgttttaagtgatattttaacttcctacataattgaaagctatttgagaatatattaaattgtagatactgttaattgttttgccacatatgtggctaacccaatatccattcccttctttattgctataaaagtcctgatcttgtttgctctgcttaaagaaaaacaaacagaaaacaaacaaaaaac

SEQ ID NO: 1561347 - DNA, 4001 bp, Homo sapiens
aaggcttcacatcctgtgtaaacacagtgactagaagttcctagctccaaacacttgaaactgacacttgacagctcttacctcaaagacagcatttcatttctctgagccttgatttctggatcaatacaataacacttcccaccagtaacagttgttaaatttaaagtattcaatgctcagtgtgctctgggatttttattaatcctttcacagtccctgcagtcaacaccatcatcaccttcacagtcaatgacttcatgctaaggaagcgctatcaattcacccagtcacacatctcaccaccatagataggatctaaacatggggttactatgattcacggtctaacagtgtaactccaacactcccccaacatcaaagcaaatctaatgcgatgaagttataagcatttccactcatttctaacattaagtctatttcaattagccctgaaaaacgtatctgtgggccgggcatggtggctcatgcatgtaatcccagcactttgggaggtcgaggtgggcggatcgcttgaggccaggagttgaagaccagcctggcaaatatggtgaaacccagtctctactaaaatacaaaaatcagtcaggtgtggtagtgcatgcctgtaatcccaactactcggcaggctggggcaggagaattgcttgaacctgggaggcagagactgcagtgagctgagagtgcaccactgtactccagcctgggcgacagagtgagaccctgtctcaaaacaaaaaaaagtatgtgaacacgggcacaaaaagctcagcattcctcactgaccccacagagcggcactggaagggctgcatctacttggggaacgacaggctccagaccagcttcccatgccctctgggatctccctgggtctcccagatcccccaaggaaattccacaatgaaccaaccatcggcctctttccttactgggttccgacagaacttgtctctgacgccaggatactttggggccacggaacacgagcggccaaggataatgcaggctgtagcgatgagagtaagggcatctgactggccacaatgtctgcagtagttgcggatggctagaacatccaggaaaagaccacacactgttgccctccacgtctcagcggccgcaggaaaaccatggcaaccttacacaccctcctgagcctccttaaacatacaacataccttgtctctgctcgcgcatttgtcggcttgctactgccctgccctccccttcccccctcaggcccccaattcatgctggaatgagacctggtccaccagagaatgcttgcaggccaaggatgatgggagtccccagaggaagcatcattcactcaacaacctacggagctccttccagtaggcccaacactccttacggccaggtataaattaagtggcaaaccagctccacacaccaaagcgaacgacgactgcgaagacaaatccaggggatacctgggctcccacccacttcggaaaccgcctcagcgctggcaaggaagcggcaaccgcgaagccaccgtccactcacctgggcccggtccgtcagcaccgctgccgccatcacgtcaccccctgggccgcagagctgggacagaggagccccgggcggcctgacggaccccacctgtgcccgaccctggccggttgcccggggcttccaggcgcgctcggggccgccgcctcctcggtggcaacggcgttccagacgcagggccgccgcctcctcggtggcaaccgcgttccagacccagggcgccgcccctggagaccgcggggctgaagggcgggggaggagagaccgcagcttgacggcgacccaggaacaaacccacggaaggggtcaggctcgtacaaaggtgcggcggggattcctatcctactcccctgctcggtcctgactagggacctgcaaagcggccccgaccggggccctcagtggctacagacctctccagacagaagtgcagaagaaaatggcgtccgcagcgagcaacccggaagtcccgcccccaccggcgtgagccgtcggaaacgtccccgtcctaggccgtcgttggcccagctcccgccgtacgcataatgcacagccttctaagtagtgtagttttcctcatgtgttcaacaacgggaggaacgcttcacggcgcaagttttcctcccagggaaaggcactccaggacccgaggagacgctccagacccacctctttacggtgggcacaactcgaggggaaggatggagggagggaaccgaggggcaagggttacattgcattcttctctcgggaaaatcggagctcgggagacagggactttccttcaggtcagggcacaggcaaaggcgcagaactgggtcctcagctcgcctggcgactgaccccctttcacatccctcctccccggatcatcatcttggaagacacaaaaaagccgaatgatcatctggaagccctgccccgacacgttgtgtgcgcaaactgccctcttttgagccttctttggaccagcacagcctctacgtgatgcagggagtcatgtatttggcccagaccacacaaaaagtggatttgcccacttctgaggtggggaggctgcaagtggaggaggttcggaggctcaggatggttagtttgaaatgtctacagaaccacaaagtatctctgtcacaggcaattcgacttacgactgaatgttggaagaaggtttgagcatgaatatatgaatttaggagttaccttacactgttatttcaagtcatgatattgagtgagaccatcaaggcaatgcatgtagatggagaagaaaatacacagagcatgagccggggaccaagtctacatcattaaatggttgatgacaatattaccagaaaggccaggtccttgcatctagatcctgctgcttgctgcacagaaggccagtcagcaagacaatgagtattgtcagggatgaaggctttattcggtgctgcagctgaggaaaatgggagatcaatctcaaatctctttcctcaactgactaaaactaggggtttatacatcagggaagaagtgtaactatgtttgagaaaacaggaattaggaaggggtaaggaagaggaatgggtcaacaggcagcagatggtcagttaggcaatcatcatgggtaaggggtatagcatctcgtttttccagatgtggtaatccagtaagtttcagtttctttatactatctgggaggcctgatgcttggtttcctgagaaaggaaatcagataagacaaataaaagtgtctcgagttttaggaaggggaggctcaatgtctataatgtgttgattcaaaagaaaccataaatatcagttctatgggacactggagctggtttcagttccctgtttctatttatcaattcctcaatcatggggaatctggacgtgatctttctggctgctttatgctgaggaggggtattgtgggtggctgcataccatagatgaccacgtggccactcagattaactcaaaggttaatctaacgctatagttttctttctttctttcttttttttttttgagacagagttttgttctttcacctaggctggagtgcagtggcacgatctccgctcactgcaacctctgcctcctaggttcaagcgatcctcctgcctcagcttcccgagtagctgggattacaggtgcccaccaccatgcctggctaatttttgtatttttagtagagacggggtttcaccatgttggccaggctggtctcaaactcctgacctcatgatccgcccacctcagcctcccaaagttgagccactgcacctggcagcactatagttttctttggaaacagtttttctctctctagtccctgacttccatcaaaagcaaatcacagcaggaacaacttacctgcaaaacaagcttcagtcccaccatacttatccaaactacagcaagaatcactgtttatacaattcctcctaaat

SEQ ID NO: 1561348 - DNA, 4001 bp, Homo sapiens
ttgaattaatttcttattcatgtaattaaaacacattcatgcttctcctattttcccttgatttacatcatttgtcagatatcacttactttggccaggcacagtggcttatacctgtaatcccagcattttgggaggccgaggtgggtggatcacttgaggtcaggagtctgagaccagactggccaacatgctgaaaccatctctactaaaaaaaaaaaaaatacaaaaatacaaaaattagccaggcatggtggcgcacacttgtaatcccagctactagggtggctgaggcaggaggatggcttgaaaacccaagaggtggaggttacagtgtttcagtgagccgagatcctgccactgcactggagcctggcaacagcgaaactctgtctcccaaaagatatcacttactatttcctgtcatacatttaagattaaattatcccaccacattgtttccccaaccaaagaaagaatactgactctgtcaaacctgggagtaatctttgatgcactcctctctctcaccatagaagtggagtcagccaattcacagaatgctttgcccagctcttatttccttccccttcagtatggctaaatcataccatatttttggtctcagcttgcatatcactcttttcttagcattgcctattccaaagaaaaatagagaaaataattctgtcctctactttacttacagaccttcatcaatttgtaatacacttatttgcttggttacatgacagcctcctccactagtttacaacctccctaagaacagccctaggctgaatttttttactatgccttaattaaccattcagacactcatccatttacaggatacaccaataaatgaaggatacatttaaacacggcacagaatacaatcagaactaccaaaatgtataactttctgaaagaacgagtgactgcgcaaaaagacaatataacggataaacagtgtctgctagttttaaagagactaaaagacatgaaacttggatacgtaatagatcccaaaacaatcaaaaccatatattggaacaaagtggagaactgtacctttttacacagggtacatattaacaacattttaaattttctggggtaatagtattatggttttaaaaggacatgtctttatccacaggacacgtattaccaagcatttaaaccttaagtgtcacgcctgcaatgttcaacttacttcaaagcctccattccttcttcctaaaagcccgttttgaagctctgtggggaggtacaggcctaggaagttcagataaaaagaatagctgagtattcttgcttttcttcagtagaaagacttctggtctacaaacgtttatattcacatagagaaataaccacaccccagatacctaaaaaatagctttatgtttctacctgaatgtagagtgtcaaaagtaaatacaggatgcgcaaagagaaaaacaaattctcagataaaacaggaggaagaagcccccgaaaccaactttcaccccagtactcaccgcgacgagctggactcgccaggtacgggagattggggggatgaaggaccagtcaacctgattcgaacgacgaaaactcgttgtttctggaaaaaaaaaagtcacaaagaattgctttggaagagtttgaagcggcaatcaccgtgtttgcaaaaatcgtgaggaagcgcccttacgacagatcccgaaacggctcctggcccagggccgtcgcagtgacaactcgagtggctttttgaacctggcggcgccaggaggacccgcgcggccccggcggacgcgagcggagcaggcaaggtctctctaaggaggcccctcggcggcctggggcaaaccggtactttcgccaccccttccaccgctggctcccacccgtcatccgacctcgccaaagctgtattaagcccaaacgccaccaggaagaaaacgggtttggcggcgcggagaaagcgccggaaaacacagcagcgctccgtgacgtcacttccgcctccagcctcaaacctggaggagcgctcgggaactgcaacctcagccgagctgaacaacctcaggcagagagattctggtttactccccagtggctacggagacgccttggaggccttggagtctgctcaccttgagggatggaggccaaaaggggcccagagcacaaggctgaggttagaaccagccctgcggacggggctaacctagggtggggtcggtggtgttggcaaagttagaggtgggggctcccccacaggatgtgcacaatgctcacaaaaagcttttattctcacctcctcccacgttcctagcaccctcaaaatgatgcttcctttgataatcctgccagtccatgatatggcctatctcctccattcattcaatctagttttagttttttattttgtttttgtttgagacagggtctcactgtgtagtccaggctggcgtgctgtggggcgaaactcatgggctcacgccatcatcccgcctcagcctcccgagtagctgggtctacaggcgcaggccaccatgcccggctaattttttttcccccagagttgaggtatgttacccaggctgatctcaaactcctgggctccaacaatcatcccgcctcagcctcccaaaaggctgggattacaggcgtgcaccacggcgccgggcccaattcaacttgaggccaatatttccccttatttcatttatctggacgccatgctaaattctaatagttgattcctttgtgtattcaatatgctgatactttttgtaaatgttgatttttttttctttgactaatatattgttttctgagatcttacagtgagttccagggcctcgttgtaaaataccgcgttgtaaaatagcactgatatcaggcattcacttctgcaggagtgattctagtttctccagaaatcgtttttgctgtgctttgtagtgggtggcctttatggagttaataaagttattttgaacactgttttactaacatgaagaactgttcatgtacattatcaaatattttgtgaatctactgaactggtaactattttgcagttaatttttcaactcaaaaagattttcttttttaagtttcctctcttgcattaagaagtcttcataaactctagattacatatagatttcctaattttcttctgcagcatattactttaaaaacattgaaatctttcatactcatggaatgtgtttcagtatgtggtgtgggatagtggatacaatatctctttcctccagaaacacggccaattattgtagtaccacatattgataaactgtccttgatttactgatttcaaattccatgtttattaaactataaattcctatgtatacctgtatctgattctagactctatgccagtaatacatttacttatgccaatatcaagatcataatcttttcattccagtggttttgtatcaactaataatattccgtggtaataataataataatggtagcttttttgtttgtttgtttttgagacagtcttgctctgtcacccaggctggaatacagtggtacgatctcggctcactgcaacctccacctcctgagttctagggattctcctttctcagtctcctgagtagctgggattataggcacgcgccaccacgctcagctaatttttgtatttttttttttttttttttttagtagagatggggtttcgccatgttggccagggtggtctcaaactcctaacctcaggtgatctgcccacctcagcctctgaaagtgctggtgtgagccaccgcacctggcggtagctgttttttaaatcttactaccctaaatgcttaatagacattaaatttttacgctcccaatgatgtggctattattgtgatttttcccttttggtttttagaccagctgtattgagatacaattcacatataaccaacacagttcacccacttaaagctatataattcaatattttt

SEQ ID NO: 1561349 - DNA, 4001 bp, Homo sapiens
cgccaccacgcccggctaattttttgtatttttttaagtagagacggggtttcactatgttagccaggatggtctcaatctcctgacctcgtgatccacctgcctcggcctcccaaagtgctgggattacagacgtgagccaccgcgcccggccccctatttcttattcatttgaaaattctgactttgggagtggtgcgtatgcctcctagggaattctctgagctgcaccatcacacccaagccgtcagcccctacccagggccctgatgcttctttctatctccttcacctgtcagggatccatcctcacctgtcttttctacttgttattgaactctgctgctgtcacctcttgcttgatgccaatttatctgctgaaatctaaacataagcctgatccctgcatagacctttgggaggccgagatggtcggatcaccttaggtcaagagttccagaccagcctggccaacatggtgaaaccccgtctccacaaaaaacacacacaaaaaataaaaataaaaaaaaaattagctgggtatggtggcacacgcctgtagtcccagctactcggggaggctgaggcaggagaatcacttgaacccaggaggcggaggttgcagtgagccaagatcgcgccactgcactccagcctgggcgacagagggagactccatctcaaaaaacaaaaaacaaacaaacaaaagacctgtcaattactcttcccaatataaaggatacaagcaagagccttaacctggccttcagaagcccctacaatctggtctctattctaactacacccttggaaaaccaagcaacctgcggttccaccatcacgcaggatctctcatgcccaaccaatctctaccccctccccgaggtgctctggaggatgggggtatctcagggaaggtggtatctcaccaccatccgcatcctcccaggtgcagtagcggactcaaaagctgaaggaagcctctactcacacaggaccaggccgtcggaagcctggaggccatagtttcctccttctcaatgtgtctctggtggaagtgggcagagtcctgaggaaaccgaagttgggaggggagggagaggcttaaggtgtccgctggggagctaccgcagcctccgcccaggaacggctccctcagcgggaaatgacaagtccacccaaactggaaaacgcccagagtgagtcataggactcccacaggactggataggaccagttttcccctccccgagaggacaccgagcctcctctgtcccgcgcatcggaggggatcgcctccctggcccagaccccacgcttccggaggcgatctgttctctccaccgcggcgccccgaaagcactgtctcccctcggggttccgggtcaccgaccccatcccacagagcggcgggaggactgcaggcacggccggctcagggtacccgagctcggcggaaaatgcagaggccgcgctcgcccccaactaacggttctggacccgcccagcgcagcccccgacggacgcaggtttcgcgcggcactcacccggcgcgcgccgcacaatggcgcccgtcggccggcggcgaagtgcgtcagcccgccgtcccgaactacaactcccagacgcccccgcggcgcgccagcttgcctcacccagcggcggccatcttgactggccggttaggggcggcaggcgaagccggggacagcaggaggaggatactcgtcgatgtccctcggcggtccagctaggcaaggggaggcctctggtgagggacgctaggccgcagggccccacactaatgtgggcggcgacccgagctgggagagagtcgtgccctgccacgaaggcgaccactcttggggcagagcagaagctggagaaaggaaaggcgctggacaggggtcaggccggaagtgctggaatgggtgatgcttggttgggtggcggtgggggcgggattaattatgacgtcccttgggaagaggaagggcgggtagggccggaagtgcagggggcgggcctaactggccgtccatctgggtggaggggcggggacagggagggcggggagaatgtaggaggcggggctagagtccacgcaacttttggggaaggagggggactggaagacggaagtcgcggggggagtggggagaggtactgaagttccaccagtttcaaagtcgagaaagaaggggaggactgggagagccggaagtgtgcaggagttgggactgacggcacttatgtttctgggagatgggtcctgcctgaaagtgagggtggacagggccaagtgtccactcaaggtcagggaggggagggaaactcggaggaccggaagtgtgatgggaacgtggccaaacgtccaccctagttctggggattagaggaagggagtaggaaggtcaggggtgtgcaaggggaaggagggaagactaggtggaccacaagtgtgatgggaatgaggccaaacgtctaccctagttctggagagatgatcagggctaactgtaccccaggcattggggaggaggagcaggatcctctgcctagtgtccccctgtggtccagtttgctcctggaagctgaggtgctcatgtctagggagaggaaacctaagtctgtagctgtccaggacctggtgtgtgccacccatccttgggcccagggtgctctcatcttccttgggagctcaggacaaggaggtattctcttggcttcctcaaggaccgacatctggtgttttcttatcttccttaggtcccaggtcccagtatggtcttgtcttcttgggacctgagggccctaatgatctctctcagtgctcaggaccctgtgtcctctttcttgatatttcctggcaggtctcagcagccctctgcctccctctggtggtcgtgtacactgcctgctaaacttgttccacgggttgttggtttttttggtcactgtggaggatccaacctcaggctacacattgtttaattgttgctgttagtgtgttgattttggcataggagtatttactcagagactgtgcagatatcttatagtctaataatatttcattggatttttcgtgtctattatagatacaacaccatccccaattaataagtaatttgatatcttctttttccatatttcaactttaaaaaattaacattgtatagtcctagctagtatgacagagctatgttaagtagtcatgtttactaatagtcttgttttgttctggatttgaataggatacgtctagcccttcataatcacaaggaagcaaacccccttggaaattcttttttttctttctttttttttttcttgagacagggtcttgctctgtcaccccgactggaatgcattggtgcgatcacagcttactgcagcctccacctcctgggcccaagtgatccgcccaccttagcctctcaaatagctgggacaggtgcacaccaccacacctggcttttttttttttggagacagagtcttgctctgtcgcccaggctggagtgaggtggcacaatctcggctcactgcaacctctgcttcctgggttcaagcgattttcctgcctcagctgcccaagtagcttggactacaggtgtgtgccaccatgcctggctaatttttgtatttgtagtagagacggggtttctccatgttagccagcctggtctcgaactcctgacctcaggcagtctgcccacctcagcctcccaaagtgctgagattataggcatgagccaccccgcctggcctcttttgtacttttttgtagagacagaaacctcactatgttgcccaggcaggtggaaattcttctaatgatttctttctatttatgtggtataggataaaacctgatttttgattaaaagaatttgtttttgagacagggtcttgttctgttgcccaggctggagagcagtgctgcagtcatggcttactgctggcccaacctcctgggctcaagtgttcctcccatc

SEQ ID NO: 1561350 - DNA, 4001 bp, Homo sapiens
catgggggcctggaagggctaatgggatggactggtcttatcatcccatccttaaaattagagaagcatctttcacatgcctgggttaaagaaaattcttttgaaaggttctgatgaaattgactcccaacattgaattcttccttacaagaaaatcacactaacatttataaaatgcagcagtgtaaacacacagctcttgaccttgaaaacagggtcaactgtagaactaagacataagcaaattatttcaatcaagaatacatgggtggacagctgaggtggttcacacctgtaattccagcactttgggaggtggaggtgggtggattacctgaggtcaggagtttgagaccaacctggccaacatggtgaaaccctatctctactagaaatacaaaaattagctgggctccatccttgcaacttatttaacctcttttttttttttttttttttgagacggagtctcgctctgtcgtccaggccggactgcggactgcagtggcgcaatctcggctcactgcaagctctgcttcccgggttcacgccattctcctgcctcagcctcccgagtagctgggactacaggcgcccgccaccgcgcccggctaattttttgtatttttagtagagacggggtttcaccttgttagccaggatggtctcgatctcctgacctcatgatccacccgcctcggcctcccaaagtgctgggattacaggcgtgagccaccgcgcccggcccttatttaacctcttgttggtccttctccccaatctttagatcgtcctcaatctccatagatttccacctcttctcccctctctgctctccctgttaaattctctcttctctgttataaccccctggacccagtctggcaccccagatccccaggtgtcctccccgctgtgcttctccctctgttctccttgccaccagcaccactctgctctgtctgacccggctccacatccctcctcctctccctcactctgatgagcctccacatttctgcccctctccctaccttgctgtctgtccttcatctctctgtacatctagcttttctctacatttctccagttgcttttctcctcctgctttcttatcttttatcacttttgctgtctcttggcaaatccctcaccatcctctactttgccatctgttatgggtctttctcattcttcttttctctgtctcaggttttctactgctctcttagtccctctctctgtctcctgatccctttggcccacacgatcacacgagggtttggagtaagacacctgcatctcggagaagcgcattttcccagagctggagctgggcgggcaagaacaccccgcgtcacaggacaagccccaggcacctctccaacgcgggctcaggggaagcggtgactgcggaggggagatctggggagcagcagggcccagcaagaggaggagggaggtggggagcgacgacgccttcggacaagggtgggatccgcaggatcccaggaccacagaacgcagccttcccgggactggggtcgccgcgctgtgctccaggaacccaggaggatgaggctgggaggcgcacagggtgggaatacacctctagggtgaggactttaaaaagagccgtgcggaaggagtcaaaaaaaggttttgagcaggaaaactacgagataggaagtgtatacattgccctgtagcagaaagacccgggacgggaccagcctcagggcgactttaaacctaaaaagaaggggcttccggactcccagtagaacatctccatttgctctgagtgaacgaagaaaggggagaacttccaggtctagggggaccccacatcccatgtacagaagtgccggggacctgggaagctcagacttaacaccacacagagcaaaactcaccgcccgccgcggcgtcaccgtcattccacgggatccgcttcctggtctgcgcgaatctgcgcgcgcaggacagaaaccaggcctgggtggagccaacgaggaggcgagcggggcccgggtgaggtgtgggcggggcgcgaagcggcgagaccttgccctttagaacccgcagagggcggggccggagcgggacctgtgagtctcagcctcctcccaggccatgttctcaggcttttgaacccgggagatacagcttgcattgggccgagatcgagccactgcacaccagcctgggcaacagagccagactccgtctctaaaaaaaaataaaaaaataaaaaaataataaaaaaaaaatttgcttgtgcgagacagggatacaacattactcttttccgtgtggatatccagttagttgtcccagcacatttgtaaaagagatctattactttctcctttttatttacatttttttcttttctttttcccttttttttttttttttttttgaggctatttctctgtcgccctggctggagtgcagtggcgagatcttgactcactgcagcctctgcctcctgggttgaagcgattcttctgcctcagcctccggagtagctggcactacaggcacacccaccatgcccggttaatttttgtattttgtgtagagacaggatttcgccatgttggacaggctggtctcgaactcctgacttcaagtgatccgactgccttggcctccccaagtgctgggattacaggcctgagccactgtgcctggcccaggaaatactctttactttgctttttaaatgttgagaaaatacaactgaaaactaaaaaatcttccccgaaatgagaaatcatcttcatgacaaaacaggaagaaataagaactattctattaatgaataagccttagaccagaatgtgttgggaaatagaggcaaacagctaagaggttgaaaagagagaaagaaacttcattgttctatgcaacccgttaagtacatgttttcaagataaacactaatcagtcctcagggaagattagttgacaacagccttggtcgcacatagttcatcctggctgtacttggtaatggaggtgactatctgtgtcagctagttagcttcatgcagagagaggggaattactttaacccacgtctttttgacaagtgtgagttttacaacatggaggcaggtgccgtctctagtgaggctgctacagtccgacagaaactgacgtcagcagtaaataataaaatttagaatacataattaactatagagtttattggaacacaaagcttgaggatagccacctggaaacgtcaactccaaatgaagggggcccgtgttcccaagtagagacgttaaggtttcacacacagggaaagacagagaagctttaccagaatcacattttccattcaaggccagtgcataggctgcagcaaattgattggttatggattgatacacttcaaggaaggttactttatcactccataagaagggacaatgatgccaacaggttagtcttcctaattatttacaggtaaactttttttaaaatttatattaggaaactaaattttattgcactttttgttttgttttgttttggtttggtttttggtacggagtcttgctctgttgcccaggctggagtgcagtggtgcaatcttggctcactgtgacctccatctcccgggttcaagcagctctcctgcctcagcctcctgagtagctgggattacaggcacacgccaccatgcctggctaatgcttttgtattttcagtagacacggggtttcaccatgttggccaggctggtttctaattcctgacctcaagtgatccacccaccttagcctcccaaagtgctgagactacaggcgtgcgccaccgcacctggccagtaaaactcttagaagttgcgcctgcacaccactggactcaggttgcatgaccacgttcctctcaaagctcagaattatttaaatgtccgtagctttaaatttgaaatatttgatgtttgaattatttaacttcctactgagatataggtacta

SEQ ID NO: 1561351 - DNA, 4001 bp, Homo sapiens
ctgcctcagcctcccgagtagctgggactacaggcgcctaccactacgcccagctaattttttgtatttttagtggagacggggtttcaccgtgttagccaggatgttctcgatctcctgacttcatgatccacctccctcagcctcccaaagtgctgggattacaggcgtgagccactgtgcccgaccccagggccttatttttaactacaacatagtacggcttcttacatgccacagaaagctggacttcaaacaagtcatgcttggaaatgttacagatttctatctaaagattatctgaaagtccccactcttgttggtgcaaattacaaatccctatgttcaaagctcaatcatatttccacccctaaaagcctcacaaagcagacaacattgtcatttactgccagaaacattcccttacttaaaatcccttataccttgcctttctttaagcatcatgactatgggccaggcatggtggctcacacctgcagtcccagcactttgggacgccaaggccagaggaacacctgagcccaggacttcaaggttgcactgagctatgactatactactgcactcagcctgggcaacagagtgagaccttgtctctaaaaaaagttaaaaaaaaattttaattatgactacagaaaagataaaaaataatgtttatataacaccacctaattactaatctcttcaaataatcatagtataaaataatgctctaatagcaatctacaagaggtgcctttctataactcttcagtgcatcataatgcactgaagtatttgaacaatttgccatatgaacaggtgggtaagaattgtggagaagaacaatagggggccactgggaggaaatatgtaccagcatggcgggtcatgtaactgggaaaacccagtcaagatatttcaggccaaggaaagaaaatgttctcatgacctagaagcaaaggtaattgtatgtgtatgtatttaaaaagtatgtataaaaaacctcacctgaaccttgatttctaaacatgcaaaaatccttttctcctcttcaaactccttcttagaaatctggcaacctggcagcactgggggaaaaaacagtaacatgagacatcagcatttctagcgcgtcacagacttaattaaaaaagaaaaagaagagcaaaacaccctctggggccacttctgccttcatccacacaaaaccaaacggaatgaaaagggaggctagagtctgtctctgtgttgagggcaattcttggggacagaggtctgcttgcaatggctctgaaacatgtagctcaccaccaaagagctcctagaggcccctcttctaggaatcccacctctagaacttccccatcaggtcttgacaagatcctgtcccgcggacacttccagatctaaaattctcatccttcttgcttgaaacgttcattatggggcttagcatagacttctttcttgcggtcatttaattgtggcaggcccgaagacaggctaaagggaacctagagcatttggtcaaagcaaatcacatttacaaatacggccacgcaccctgtcagcccgtcacacattcacaactgcacccacctccgtggggacacgccccgtccctgccacgccgtctgagacacactgtccctcggctgctcgcgtgcacacaggcttgaggatccggacacgacacgctctgtccgtgacccagccctccccacctccagcacccccgatgccacccccaccctcactgccggttccagtcgggccccagtaaagccagccgagccctcccagcttcacccgggctgattacttctacagacacgaccaactcaccatgcagagtccaagaaccttaaggacaccggaaaaggacccagagacctgtggttagtttggacccagaggctgatgggaaacaagagcctggaaatgctcgcaggctgggagaggagcttctggcaggcaagctcgccccgcccctaaaaggcctgtgccccggagacttctgggaaatgtagtccacagcggcagagtctccggaagttgaaacctggacagcagggatgctcccagcatgcaacttggcttcacctgtcaaaggcgcttttttcgaagacgcccgggagctcttgcttttgcttgagggtctttggtgttgactgagagcgaattaaaaggttctcagctttcgctaaggaacgcattctggagtctagaacaggcgaagatgggactggggtgtctggggacttagacgtgagcgagcaagggaatccggggtaagttcgctggaaatgacctgcgcgacactaccagtttacctgggtatgagcgcctggaacagtgtctggcaattgaacagatgggtgtgtcttgctgtgagggagtttcttagttcgattcggtgtctgggaccctgcgtggacctgtttatgttcatgggatgttttctaaatttatgcctgtgtgagtctgttttattaggtgtgagatgaactgtgttacagattttatatgccgctgttgaaagacaacaataagtggtagtgagtggatattgtgaccgtggagacttatggcagtgcaaaggcggccataaacaatgcacaagcaatccagcatggctgtgttccaataaaacttgatggattataaaatttgaatctcattttttatagagtatgaaaccatttattctgaagcacacactcatactccaaaaacaatactatatattccctctctctctctcctgtgtgtttgcgtgtgtgtgtgtgtgggtgtgtgagagagagaaaggttttaaaggagacaactaactgattctgaggttagggcaaaaagattggggctgtggttggtgtggtaagaacctttggatataaatacttttttaaaaaagaattgtctaaaaatattaaagcgaaattttatattaaaactaacagaaagaaaaggaagttactttttaggggctctttctggtcactgatatcacctctctcatcctctgccatctctcacctcctggtctctcttgcttatcaagagaagactagagctcttggatcccagcttttcccctgcctcagctgaggccactaccctggttgactcccatggtgacatggatgcctcatccagtatcgtgggtctgagtcctcatctgcagggtccttgagctttcctcggcacccatccccgtttcccatctgggacttcattatcatcagcatctgctccacctccaaaaccactggtggaagcagcctcctctcttcccatgttacttgctcaatgactcccacaagtactactctgaatattttgggggtctgatttttttttaattttttatttccataggtttttgggaaacaggtggtgtttggttacatgagtaacttcttcagtggtgatttgtgagattttggtgcacccatcacctgaacagtgtacatggcacccaatttttagtcttttatccctcaccccctttccaccctttcccccaagtccccaaagtccactgtgtcattcttaggcctttgcatcctcacaccttagctcccacttatgagtgagaatatacgatgtttgattttccattcctgagttgcttcacttagaataatagtctccaggccgggcatggtggttcacacctgtaatcccagcactttgggaggctgaggcagctggatcacctgaagtcaagaattcaagaccagcctggccaacatgatgaaaccctgtctctactaaaaatacgaaaattagccgggcacgctggtgggtgtctataatcctagccattcaggaggctgaggcaggagaattgcctgaacctgggaggtggaggttgcagtaagccaagatagcgccattgcactacagcctgggcaacaagagggaaactccatcttaaaaaaaaaaggaaaaataaataaatccaggcaaatgcattaattcattcctttttatgg

SEQ ID NO: 1561352 - DNA, 4001 bp, Homo sapiens
cctccaccgcccgggttcacgccattctcctgcctcagcctcccgagtagctgggactacaggcgcctaccactacgcccagctaattttttgtatttttagtggagacggggtttcaccgtgttagccaggatgttctcgatctcctgacttcatgatccacctccctcagcctcccaaagtgctgggattacaggcgtgagccactgtgcccgaccccagggccttatttttaactacaacatagtacggcttcttacatgccacagaaagctggacttcaaacaagtcatgcttggaaatgttacagatttctatctaaagattatctgaaagtccccactcttgttggtgcaaattacaaatccctatgttcaaagctcaatcatatttccacccctaaaagcctcacaaagcagacaacattgtcatttactgccagaaacattcccttacttaaaatcccttataccttgcctttctttaagcatcatgactatgggccaggcatggtggctcacacctgcagtcccagcactttgggacgccaaggccagaggaacacctgagcccaggacttcaaggttgcactgagctatgactatactactgcactcagcctgggcaacagagtgagaccttgtctctaaaaaaagttaaaaaaaaattttaattatgactacagaaaagataaaaaataatgtttatataacaccacctaattactaatctcttcaaataatcatagtataaaataatgctctaatagcaatctacaagaggtgcctttctataactcttcagtgcatcataatgcactgaagtatttgaacaatttgccatatgaacaggtgggtaagaattgtggagaagaacaatagggggccactgggaggaaatatgtaccagcatggcgggtcatgtaactgggaaaacccagtcaagatatttcaggccaaggaaagaaaatgttctcatgacctagaagcaaaggtaattgtatgtgtatgtatttaaaaagtatgtataaaaaacctcacctgaaccttgatttctaaacatgcaaaaatccttttctcctcttcaaactccttcttagaaatctggcaacctggcagcactgggggaaaaaacagtaacatgagacatcagcatttctagcgcgtcacagacttaattaaaaaagaaaaagaagagcaaaacaccctctggggccacttctgccttcatccacacaaaaccaaacggaatgaaaagggaggctagagtctgtctctgtgttgagggcaattcttggggacagaggtctgcttgcaatggctctgaaacatgtagctcaccaccaaagagctcctagaggcccctcttctaggaatcccacctctagaacttccccatcaggtcttgacaagatcctgtcccgcggacacttccagatctaaaattctcatccttcttgcttgaaacgttcattatggggcttagcatagacttctttcttgcggtcatttaattgtggcaggcccgaagacaggctaaagggaacctagagcatttggtcaaagcaaatcacatttacaaatacggccacgcaccctgtcagcccgtcacacattcacaactgcacccacctccgtggggacacgccccgtccctgccacgccgtctgagacacactgtccctcggctgctcgcgtgcacacaggcttgaggatccggacacgacacgctctgtccgtgacccagccctccccacctccagcacccccgatgccacccccaccctcactgccggttccagtcgggccccagtaaagccagccgagccctcccagcttcacccgggctgattacttctacagacacgaccaactcaccatgcagagtccaagaaccttaaggacaccggaaaaggacccagagacctgtggttagtttggacccagaggctgatgggaaacaagagcctggaaatgctcgcaggctgggagaggagcttctggcaggcaagctcgccccgcccctaaaaggcctgtgccccggagacttctgggaaatgtagtccacagcggcagagtctccggaagttgaaacctggacagcagggatgctcccagcatgcaacttggcttcacctgtcaaaggcgcttttttcgaagacgcccgggagctcttgcttttgcttgagggtctttggtgttgactgagagcgaattaaaaggttctcagctttcgctaaggaacgcattctggagtctagaacaggcgaagatgggactggggtgtctggggacttagacgtgagcgagcaagggaatccggggtaagttcgctggaaatgacctgcgcgacactaccagtttacctgggtatgagcgcctggaacagtgtctggcaattgaacagatgggtgtgtcttgctgtgagggagtttcttagttcgattcggtgtctgggaccctgcgtggacctgtttatgttcatgggatgttttctaaatttatgcctgtgtgagtctgttttattaggtgtgagatgaactgtgttacagattttatatgccgctgttgaaagacaacaataagtggtagtgagtggatattgtgaccgtggagacttatggcagtgcaaaggcggccataaacaatgcacaagcaatccagcatggctgtgttccaataaaacttgatggattataaaatttgaatctcattttttatagagtatgaaaccatttattctgaagcacacactcatactccaaaaacaatactatatattccctctctctctctcctgtgtgtttgcgtgtgtgtgtgtgtgggtgtgtgagagagagaaaggttttaaaggagacaactaactgattctgaggttagggcaaaaagattggggctgtggttggtgtggtaagaacctttggatataaatacttttttaaaaaagaattgtctaaaaatattaaagcgaaattttatattaaaactaacagaaagaaaaggaagttactttttaggggctctttctggtcactgatatcacctctctcatcctctgccatctctcacctcctggtctctcttgcttatcaagagaagactagagctcttggatcccagcttttcccctgcctcagctgaggccactaccctggttgactcccatggtgacatggatgcctcatccagtatcgtgggtctgagtcctcatctgcagggtccttgagctttcctcggcacccatccccgtttcccatctgggacttcattatcatcagcatctgctccacctccaaaaccactggtggaagcagcctcctctcttcccatgttacttgctcaatgactcccacaagtactactctgaatattttgggggtctgatttttttttaattttttatttccataggtttttgggaaacaggtggtgtttggttacatgagtaacttcttcagtggtgatttgtgagattttggtgcacccatcacctgaacagtgtacatggcacccaatttttagtcttttatccctcaccccctttccaccctttcccccaagtccccaaagtccactgtgtcattcttaggcctttgcatcctcacaccttagctcccacttatgagtgagaatatacgatgtttgattttccattcctgagttgcttcacttagaataatagtctccaggccgggcatggtggttcacacctgtaatcccagcactttgggaggctgaggcagctggatcacctgaagtcaagaattcaagaccagcctggccaacatgatgaaaccctgtctctactaaaaatacgaaaattagccgggcacgctggtgggtgtctataatcctagccattcaggaggctgaggcaggagaattgcctgaacctgggaggtggaggttgcagtaagccaagatagcgccattgcactacagcctgggcaacaagagggaaactccatcttaaaaaaaaaaggaaaaataaataaatccagg

SEQ ID NO: 1561353 - DNA, 4001 bp, Homo sapiens
cgacctcaggtgatccgcccacctcggcctcccaaagtgctgggattacaggcgtgagccaccatgcccggccaatatcaggaaacatttaccaaaaaaaaaatgagataacgatgagataaattaggatgagcatgatataacatgtaagttcactagctatttccctcttggcagtgtttccaaatttccatagttaaacacataagggaaaacacatttttttaatcataaaattttgtttaaatgtttataaataaatatgcaaatatgccaaagaaagaccaaaaagaaatgcaccgggtgcggtggctcacgcctgtaatcccagcactttgggaggccgaggctggtggatcatgaggtcaggagatcaagaccatcctggctaacacggtgaaacctcatctctactaaaactacaaaaaaattagccgggcgtggtggcgggcgcctgtggtcccagctactcacacaggaggctgaggcaggagaatggcgtgaacctgggaggcggagttagcagtgagccgagatcgtgccactgcactccagcctgggcaacacagtgagactctgtctcaaaaaaaaaaaaaaaatgcactcgaagtttaacagttactatctttacatgctggattcatgggtaattataaacttgtactactcgtatttctccaatttctgaacgctccacaatcataccgctgcataacaagtgaaatatttgtaataaatgaaatagttctaatgaatgaaatagttgataaactcccagaacagtccaagcccataagccttgctctcaaggctcccttcaatcaagtcctagcttgctttccccactagattccagctagttcctctgcctcaatgagaatgtatccaaaagattatcaactaaggctctgacctgtaacgcccaggtttcaaccgcagctccacctcttactgcttaggtgactattctcagataactcctgctcctttgtatctcactcatctttaaaactgaaaaaagtagtacctctccacagagccacggtgtggcgaaaatgtgactacttgtataaagctcttgggataaagttaccaattgaggcttaattattatcaacacccatgcctgaggacacatcctacactcttggtcggggtgagcatctctgtaaaagaaaaaaagccaaggaccactctcgtggaactttgccctcagtagccaagaagtccctccctgcagctctttttgagaatcaggctggggaaggagaaagctgtgaaacaccctgaccgcattgccgtccggcataaaagttaaatgttcctctcccttcgtggaaatggaaacaaccctcgccttcctaaaaagaggtcagaagcgtccgggatcacccagcgtcctgcaggaatcagagacaagggcggggatccctgcagatggagctctgaccccacccggggacctgacaggcttcgtgggaaataaacactaagaagagaccaccagtcactaagggaggggctgctttaaggctttcatttgtgttacctcttccagttcccaaaacgatttcattaggatggtcctaaagtccccattttaaagaacagcagtgggaggtacagggagattaataacatcccaaccctaaattgtgagaaagtagcctcacaggtgggatggagggaggcggactgagcgagctgagagccccaaaaaccctcaaaccaggcgagacgcgtcccgaccaagtcccaacccccagcctcatgcccggggacgcgaggacagccccaagaccaagaaggctccgctgacaagaacgaaaagagaggccgttgtccctccaaacctccgttttccaacgagactccttctccccttagtcaacttccaggtggttgcgagccagcatcgtaaggggacacgtttagaaggaccgacaagacacaggactgacaccaaactaccaccgaatgcactgcagcaacctcgccccccgggagcggaagtgcccctaccccgcgcagcgtgtgaactacatttcccagaattccccggatacgccgtcctgagcctacttgctcgtcattcaacagatctcctgcgctacacttccttgaatctcaaaggagacgttctatagtatcaccttccggcgggaagcgtgggactccgcggtgctctttgactacacttcctgcaatgcccacgaggaatgaatcccatagacccaagcgcctggtttggaatatggactgtggccctgagagtggtccttccctctccctgcgtcctcgagagaaaatattgaatagacaggaattcctgaagtctacacgcctcccatgatgacaggagtgttactgaaagagaacaaagcaaggagatacaatcttcaaggagttagcggggagtgactgtggagcggtcaggagatggctgaaaggctaatatactagacgctaatagtatgaggctaaatctaagagcttaaataatgggccaggaaaaatggtttgggagaggcattgagtggggcaccagcccctggtacaaccagacactgttgtaccactggtttggcaagaaaaacaaccacagtttaagtgtttaagagggctgtaagagttaaagagaaaaaaaaaaaaaacacgaaaagcggctcaacagtcaaagacaggttcgttttggagaataaaccgagagggccttctggccgattgcagtcaggagcgctctctcttacggactaagagtatgtattggctttagggagagagagcttaccacaggcttagaatgtttctgtattggggagaagtctgttgtggggttggaatatctctggttggaggggaagttatcttgggactgacatctctccaatggaagggaggttatctcggtgctggcatgtctctggtcagggaggggtttatcttatggttggaatgtttctgattggagatgtcatttgtggtttatggtcatgctgaccttagccattaggctgatgccctttggatttaggcagtttttgatcaacgcgaactttaaaatggcagtgtttgtccaagatggcgatgctcctgccctgtcaagggccaatatggagggccaattgccctcctggaaaagctatcttcccacttttaaagttttcatattaatattctttagacgtggaaatgccacatttaagagaaattaaactgcttagtattgtgaaaggaaaatatcttgggcccccaaaatcactaaggaaatctcaagctggaaatcgcttagggcaaacctgcctcccattctattcaaagtcactcctctatctgtccttgctatcacgagaacagcatgggaaagacccactcccatgattcaattacctcctactaggtccctttcatgatatgtgggaattatgggagctataattcaagatgagatttgggtggagacacagccaaaccgtatcagtatgtgtagatttcttattttccattattacttaaaagaaagcacgtttctaactcttctatggtcatgtaacaacatatcctagaaatcacttcatgtacagtacattctttttagtgctgcgtaaactagaaaatccagaaataaatttctacacctacagtgagctcattttcaacaaaggtgctaagtatatatattgggaaaaggacagtctcttcaataaatggtgctagaaaaacatgatatccacatatagaagaatgaaacttcaaccctgttgttcaccatatacaaaaataaaatcgaaatggattaaagacttaaatctaaaacctcgaactatgaaactactacaagaaaacattggggaaatgttccaggacattggtctgggcaaagatttcttgagtaataccccaaaagcatagacaaccaaagcaaaaatggacaaatgggatcacgtcaagttaagaagcttctgcacagcaaaggaagcaatcaacaaagtgaagagaca

SEQ ID NO: 1561354 - DNA, 4001 bp, Homo sapiens
tgaagcacacatccacacacatgcactcacacatatatggttgggggtttggtttcctgaatttctggcttcagacactacctgcctgtatcaagtcagggccgtggcacgaaccagacggcacattgaaatttgaggagagtttaataaacagacggcttacaatggtgttggctcggggtaaggaaatcacaatggataaggctctatcctggggagtgacagggaggtgccattataatacctgggccttaagaggtaaggggagggagcagtccctggagcctggaactaagaggactgtgtggccagggccacccaaactatgacctgttgtttagaagggcagctaatctgtgacaatcctgcagagagagaactgggggacaagatactccaactcacacttcttcctctctccaaactttcctgttgagacttcccattggccaaagacaagcaaggccagaaggcaatggcggcctttcagggcagacagcagggtggaaaaggtggggagccaaaggcatgggacacatggcacctcaagactcttgttttttccctatctgccaaagtccacacagctctcgcacacaaatgcctttctcatccctcaccctgacaactactctgatctgaggaatgcatcaggaatgagaccagatgcccatatcaacttcttcagggaatgaagacctagaggaaaagtgcagctgaatctggaactgcaattgcccagaaacacgatcagaaatgtaataaatgctgctattacacctaaaataattaacactaaatctctaactttatcaaatatacagagagtgttcaaacttcaaatttgttgagtgtaatttaacaacttatatttgctaatgtgctttataatactcaaagtccctactccctggctcacagcatgtgaggtgagaatggagttaataatttggggcagttcttttcttttcttttttctttgagacagagtctggctctgtcgcccaggctggagtgcagtggcgtgatctcagctcactgcaagctccgcctcccgggttcacgccattctcctgcctcagcctcccgagtagctgggactacaggcgcctgccaccgtgcccggctaattttttgtaattgttttttgtagtagagacggggtttcaccgtgttagccaggatggtctcgatctcctgacctcgtgatccgcccactttggcctcccaaagtgctgggattacaggcgtgaggcaccgcgccaggcctgggacagttcttttcaaaatgtattcggtgacattaaactctggagttattacagtattacagtctgagttgtttctttattgccaaaagccagaacctctgccttgaagtcataaatgccccaatggagtcagagctgccaaaatccagagttcagacccaagacaactccccatccaagaacctaggggtgctgagccagaatcgcccccaccaaactgagcgagaacagccgaagccatcctctatatccagagactagctgcttaagcaaatccctcatcccattcagggacgcacagtccagccattactccaaaaccctgagccagcgcccctctgccctcatccagagatgcacatcccaagactgaccctaagcttcgacccgaggaggcacagcgcaagtcgctgtcacgaaacgtgaagatgcactgttttgtcaaacccagggctgctccccaaaccgagcccacgctcgagcccacgctcttcccatcctatcccgggtaggtcgggccgctgaacttccctagtctaccccacctacgaggccttatcattggttaccagtcccctcttccactcctcctacttcagtccacagggacgggtcacagctgcacatcctacactcctactcctggctacgcctccaagaggggcgcggtacagacgggactcaccccagcgtcccaaacaatgtcgcccgcagcgtgcgtccagtaccatggcgcatgcgcaaggaggcctatggcctacaatccccagaaagccccgcgcgcagcagtggccattcgcaaggctaccctggtgaaggtggcctttgacttccgtgcatttggaagtcctttgacttccgtgcattcgtctaaaataacgacaatcataataacgataaaataatgaaatgttaaataaatcactatcaacgatgaaaagaagtttcaatattttactacttggaaatgggcactttaccgttttagtgaagacttttataagttcttattttataggcatgtcttttaacgttaaaaccacgaaacttttcaattaacactcacttaaataattccctccccgccccccaccatgttttatttctgttgatgaaaactctggataatctacacttgcgatataacatagccctgtaatttatttcctagtctcagaagaagcagaaggaattaacaactattgtctgaatccttaacaggggaattgcaggagtactgagagtgtcctaaaagagacacattacaacataacaagaaaacgcgggaagttttcagattctttttgaaaatttgcccttgttgagacttaggctttattttacttcatgttattgcatttaagatttaagatttctattaaagaaaaatttgggtaccctaaatggggtaagaaaattgaataggaattccattagaggcccacagttttagcctggaggaaagccctgataacgtgtgagaacaatctgtctcctaggaaaggtcacctggtcctgctggcagagtctctgtttggaatatctggctggcattcccttttccacgcaccctcaagctgtaggggtggtgaggcggttccagtcctagactagatagagaagtgaagacccccacctctacgcaatgggcaggaaatggttgaataatatccaactatagcttgacatcgcagcttagggcacataaagggacagtgcaattgttttggcttatctctgtcttttgatgtttacatgtttgatgttcttatatattgctctaagttgaaggattacttgatttaatttgacatacttgaattttaaaaaacgagttcaggaacatttttatttttgacctaatacaaggttaatttttgtgacatctgtgtctgttggaaaacaatgtgtcttctctatcagatggatatgcatacatttatattttccccagacttgctaactgtgctatttaaatttcctacatgcttatttgtgcttacttagattttttcattatgcatctgtcaacgattgaaaagtgcatgtcaaaaaggttcccagtctgggcgtggtggctcaagcctgtaatctcagtactttgggaggccgaggtgggcagatcacgcggtgaggagttcaagaccagcctggccaaggtggtgaaaccccatcgctactaaaaatacaaaacttagccaggcatggtggcaagcacgtgtagtcccagctacttgggaggctgaggcaagagaatcacttgaacccaggaggtggaggttgcaatgagccgagatcatgccactgcactccagcctgggcgacagagcaagactctgtcaccaaaaaaaaagaaaaaagaaaaaagtgaaagaaaaaaaagcctataatggtaaatttgtcattttcctctctatagcatttgctttatttatttatttatttatttatttatttatttcctttattttttttttgagactgagtctcgctctgttgcccaggctggagtgcagtggcgccatctcaactcactgcaagctctgcctcccaggttcacaccattctcctgcttcagcctcccgagtagctgggactacaggtgcccgccaccaggcccagctaatttttttgtatttttagtagagacagggtttcaccgtgttagccaggatggtctccatctcctgaccttgtgatctgcccacctcggcctcccaaagtgctggg

SEQ ID NO: 1561355 - DNA, 4001 bp, Homo sapiens
ccaccctctgcatggatctcaaattgagcccccaaacctgaatttggatttctatctggaccttcggggtactctcagtggacacttcctaggtgaactagcctttccatttttcaaattctagagtcttggatgggacaacctttgtgatacaaccagtcctgggtcaagagcacaggcctgcattcaaattcagacttctctgctccctaattgtgtgaccttgggcaagacatagtcctctgtgtgcctcagttgctagaattcagggaccctagagatcccctccctttcaagggtggttgtgacctcgcttggggaatggttgagagctttggtccacataagcgctcaaacagcagagcctgtgaaaccaaggtgcccatgattctccaagccctgtagtgttttgttccagcgattccatcacagcccctcgctcgctcctccaggccactctccatgctccagctctaaagctgattcaatcagtcacaagcccctcctctttcccaccaccagaccctccctggcccaaccctaaataattccacttctcaaaagtctcagaagggcaagggccagggggctggaaactaggtttggattaagccctgcagccaacactgaccaaaagctcaccgagggtcaagccccatgtgaaggcttttaattccctcccaagagaaggaacccgggtgtccagcacccgggagctcgctcaaaccaggggattcccagcacgcggggctgggagattccatcaccgagggaagccagaagccccttccttggctctgaacactcagctgtactagcacctcaatcagaattgacagagagagacaggagggggtggcaacctccccattccagctggcctccactccccctccccccggccgctgccctccctagaggtcccctcctactgccaccctggtccagccacctggccagttatttctggccaaggggaaggagaagtgaaaccaggttggggtgtgtgttggggggggcaaaatcccgggctagtcttctggggctggccacaccctgtaggcggccctccttccctgcccagtccccccccgccccccctccaccgccaccactggtccctgccctaggacgggcaggccctggccacgcctaggctgcacccgatggggagcgagaaaggggaagtagtgctcagtgccctgccgtccagcccagcccctttccagcaggaagcccagccctcgaacttgagagggggactgcacccggctttactcacctgagccctggccgcggctggggcctctgaagagctgacagcccagcttcttgtggtccatgaaggcagtgatggcctccaacgggaaggtctgcaggcagcggccgcaggtcaacagatctgggtgtttgtcggtccagggctggcggtctgcagggaggaagcgggtggtgagcgtggggtggggccaggatgggggctgagggtgctgaaggagaggggaaaccgaaggtcagaagggggcctgaggggcaggacggggcgaaggagataaggcagggcgaggggcccatgcccaaagggaagggtcccacccgagggtcaaaggtaagggaggctgggcccagggcccggggtgctcaccgggatagttcggggtcaacggcgtccacagggtccacgggttccgcgggccgagggcgaggagggcggccccggcgggcatggggccaggggagtggtggggttcgccgccgaaccgccccgccgaggacacctccttcggggagaagggccccagccttggggcctgttggggctgcgcgtctggctcgggcttgagttcgatgacgaggtcctgcatttccatctcgtcgtctgggttggcggcgggcgcgggctctactcggcggggcgcgctgccggccttgcggcgggacatgagtcgcgggccgggcgagcgagcgggcgggcaggcaggcaggcgggcgggcggaggacgcacgagcggaggacgcgcggaccgtgcgcgctcaggtgagtgactgcggcgacccgccgcgaactcttacacgtgctggccgggcccgtggctccgcctaccagggcggggctcatgggaggggaccgagccgccctgctggggccctgacggcggcctaactcaatctaggcagtgtcccgtgcgtttggcttagtgaccaaatttaatcacaccgagttcccacaaggcattgaaacagctatccctgatcccgttttagggcgggtgaaactgagacacggcatgcccacacgcacccccaagcgagaaaaatagtcggtcacgtttcttattaggtgcctgatagtaatctgggctatttcattaaatgcattacaataaaaattcattttgcaagcattcactgagtgcctcctgtgcgccaggctctgtttgaagccctgagaatacaggagggaataaacagaagataatctttgtttgcacggagttcagacggtgggggaagacactataaacataattacgtaaaatatagatggcccttcatgatgaccagtgccatggagcaaaagaaagctggaaaggcggagagggttactggggttgagggattcaattttctcccctatgatgggaaagggcatggtggagctgaggctggagggaaggaagcccagccagtgggcctgggcattgaggaattacaaggaaagggagaggcaatacgggttggggattgagttcagtgaaaatatgggggcagatccaagcaatcttttgatcgctttaaggtcttttggttttcctgagaccggagccttaggagggttttgagcagaggaggactgtaatcatacacatcgactctgttcctagaccagaagtcgccattaaaaccaaatagccaagcagctcacctgcctccactccgcctccttgaacttccctcccctaagcagttctgtctgctcactgtttgaagtggcatcgacaccctgccccaccctcaatccctgatgagtattcttttcttcctggcaccgactgcacgacagtatagaacggcttgtggactgtcctctcccccacccaatgcaagccccctgaggtcagggcaagaacctgtcctcccccagctgtcctcagcccagatgctgatttcagatgctgatctcttggagttctgcacattgttattcaggtctgggttccattgtcctcctgagagcagagggccctgaccaacagtatctaaagtagccccaccctgctgaaggccttgcaaattacactccatgacctccatctgtccccagttccctcttggatctcactttctccatctgtcaaaggaggtagggcaggttggaactagagggttatctgaggtggtttcttcttcactgccgcctcctctgatcaccctttttttttttgtaatttttaatttttcaaaaaaaattatttttaaatagagacagggactcgctttgttgccctggttggtctgaaactcttggcttgaagcgctcctcctgcttcagcatcccaaagtgctgagattacaggtgtgagacactgcactcagcctcagaccacccaattttaagttccatggcaacccagccacccactatcccattgcccttattttactctttttttttttttttttttttgagatggagtttcactcttgttgcccaggctggagtgcagtggcacgacctcagctcactgcaacctccgcctcccgggttcaagtgattctcctgcctgagcctccggagtagctgggattacagatgcccggctaatttttctatttttagtagagacagggtttcaccatgttggccaggctggtctcgaactcctgacctcaggtgatccacccgcctcagcctcccaaagtgctggaattacaggcgtgagccaccgtgcccggcctattttattctttatacatcactttgatcaaaccctgaagga

SEQ ID NO: 1561356 - DNA, 4001 bp, Homo sapiens
gttttttcttatacatacacacctatgattaagtttaatttataaattaggcaccataagagatttttatttttctgtttgtttgtttgtttgagacagggtctcactctgttgcccaggctggagtgcagtggtgtgatcttggctcactgcaacctccacctcctgggagcctcccaagtagctgggattacaggtgcccaccaccacgcctggctaatttttgtatttttactagagacagggtttcaccatgttggccaggctggtctcgaactcctgacctcaattgatccacccatctcagtatcccaaagtgctgggattacaggcgtgagccaccgcacccggccaccataattgagtaatagcaataactaataataaaatagaacaactataatagcatactgtaataaaagttatgtgaacatggcccctctctctcaaaatatcttattgtaccaaaatcacctattttcagatcatggttgactgagggtaacaaagtgaagaaagtgaaactgccgattaagggggcactactgcattggagttattacgtaaacattatacatcctttatttcattttaattaaacacttgtttccacttaatttaatttatgtatctatctatctatctatctatatatatatatatatatatatatatatatatatttttttttttttagagaagggatctcgctctgtcgcccaggctggattgcggtggtgccatctccactcactgcaacctccgccgcctcccagcttcaagcacttctcccacctccgcctctcaagtagctgtgactacaagcgcacgccaccatgcctggctaatttttatatttttagtagagacggggtttcaccatgttgccatgttggtggtctcgaactcctgagctcaggcaatccacccgcctcagcttcccaaagtgctgggattacaggcatgagccatggcacccgacctgtttccactttttacttaaaacgtaagtttctctggcatgctttcttttaattctaactaaaaaattaagagcaactcttctttaaaaacaaacaaataaaaaaccaacagaaaagattctctgacatttcaatttcctctgtcccctagcagctagagagagagagctactgctgtgggataatgcaaaattgaagaaccttaagaaaaagctgggtcctatttctgtgcaatatggagattgatggaaatgtttacagctgtcatcttgctctcctttcttacataattttgtcattagttaagtaatctgcacaacagatcctttgaagtccttttccctgcactgataattttcagatgacattgctctcatctttaaaaggtgtaaatactttatacagttttttccaaacaagaagaggcttcctggcaatcccatttcttcccgctgcatgcaaaaggtatcataactatcgtttcctttttaaactgagagttgaagagtcttttgctcctttacataaatcaattacagtgattttatccaaaatagtaacaaatattaatagctcaggttcgcatggaggccatgcacccagtcttcgcggatgcacaccggccccggccgacgcaccctccctgccctgccgctcccgcactcgccggcccgggatcctcgcccggtccacccaacgctcacgcatgtctcagtccgggttccgcgccgacacaggtctgcagagctcccggtgctgtgttcgtttgcagaaattcaagttgcccggcggggctgctccaacctcggagctgggcgctgacttctccctcgatgaactccaaagctcgctgccgggtcaacgaccacaatgaactggcgaggaggcagagattgaggtcgttccagtggccgctgagaaatgtagtttcaggctacattggccggatagctgcagcctctgggaaatgcagtcctgagccgtcacaccgccgagcatgcccggcgcagtccacaaggccgcccaccggcgcccggagacttctgggcgctcccgtccggctgagaatgcgcaggcgcaggcgctcgagttgctgggagccatagacctcgaagctggggcgtctgacacctgaggcccgaagtaggtggccagcttcttagagggccaacccagggcattaacacaccaggtcagaaaaagcaaaaacaaaaacaaacaaaaaatgataatctataccaaaatatgttattactttaacacaaaaatatgaaaactaggtgtttgaaattatctttccgtactgtttgcttttcgctacagaaatgctattatttaacagaatattaataggattaatagtggcaattagactaatcacgtgtgagaaaaatatatttctgtcctctgatacaggaattttaagtttctattaaatatttaaattttgtgggttctatctaagatgctaaatgtaagaccttttaaaaggagaatgtaaataaggctaatcaaacagatattaactatatgtaataggcatttatctttctgtcccatcatacgtttaggagatatttactctttctggttccttttccagtaacacctctctgtattagctgcctgtagcctttatggcattcttcttttggtttatgtaatgctaaaactgaatacaggcaaacgtgaaattcaccttgactgtcagctccgctttttgtttgttttgtttttgttttgttttgagacagggtctccctctgtcgctcagactggaatgcagtggcgctatctcggcttactgtaacctctgcctcccaggttcaagtgattctcccacctcggcctccagagtagctgagactacaggggcgcgccactacacctggctaatttttgtatattttttgtagaaatggggttttgccatcttgcccaggctagtctcgaactcctgggctcaagcgatccacccgcctcagcctcccaaagtgctgggatgacagggtgagccaccgcggccagccgagctctgttcttattaagcccacattacagtgattcctggagtcagtccagggtgatgacattgataaggaggtggggaaggggagtgctggggagggaagggcggggtccctttaaatgatatggaagggggaaagggaggtgctgggtacaggagggtgtggtccctggctagggctccacccctggccctgtgccaactgacctaggtgagggcaggcatttttgttttcctgcccaaatgttgcgtttcccaagaccaccctggcctgccacgcccccatcctgttcccgcccccatcctgtccctataaatactctgagaccctagcaagcagacacacaagccgctggacatccagaggaacatgttggcggaagaagacatgacagacgctggcacgcgggcaggccacccaccagaaggacgcggagtttggctggggcagtccaaggagagccggtgctgcggagcagcccgattccaggggaaaaccatttcccttctggctcccccaactgttgagagctacttccactcaaaaccctgcagtcatcctccaagcccatgtgtgatctgattcttctggtacaccaagacaggaaccccgggatatgaaagccctctgtccttgcgataacgcagggatctaattgaattgactaacataagccgcctgcggacagctaaagagcatcctgtaacacgcccactggggcttcagctataaacattcacccctagacactgccatggggtcagagccccacagcccgcccgtctgtatactcccctggaggtttgagcagcgggacactgaagaagcgagccacacccccatcgcacgccctgccagggggacaagggaacttttctcttatcaacatcaacctaagtagcctcgcatcaaaagcatttgactgtcaatagttaggattttccctaccagcagtagcaagtttttagccttattggaattagtttcc

SEQ ID NO: 1561357 - DNA, 4001 bp, Homo sapiens
tgttctgagaaagtaaccacggaacaaacacagaaggagataaggatgcaagcttgtgcgtatgtgggggaagaatattccacgtggatggcacagcaactggtgacagaggctggagcgcacaggaatgaggaggcagagaaggaaggtgggatcagggaggtaatggcctaattgtacaaataggtcattgcagaagtgactcagttagaaccactgaaaaattttaggttgcggaatgacaggaatttatataacaataggaccatggtcacagctgtactgagaacagactgatgagggttaagggcagatgctgggaatccagctaggaggctaccgcaataatccaggtggctcggactggggtggtagtggtggtggtggtgatgggctaactaatggtcagatgctgtatacggtgtatcgtttagatccaaactagaggacctgaatatgagttataagtcaaaaggaagaatcaaggatgactccaaacatctcttcacttgagaccacatggtacagttttgacaaccataaaccgaataaccttacattccaaagttgcattgtgaattacagttttaaaatgttggcaatctagaaagtcttctagcagaaaactgtagaaaagaggaacactgggtgatgaggacaataccttggagctctcctgtgggctccattcttcctatagtgaaaggaaccatagatctagtcccttaaatggacttgattaggtgggaacaggcaggagaagcaaagcaaacacacagaggcctaataaagtgtttcaggaagatttggggacacaccgacttacctgagacattattctgcaatttccaatggccaacagagtcccctttccaggttcttatcttagagatgggcagtgtcctgagggcacagaaaggcaggaaaaagcagtcatgaaaaatcgggcttatcttgcggcacctgtcacacaccttaatggaaaagcacactggtaatcactcgccggagcgtcaatctctccctgggaaggaacagggtgtttctccgcaagggctatttaccaggtgccacctgcggggaaaatcaattattctgtatacaaaagactcataaaacaacggtaacaactttatcagctcgttcagtcttcaccactttgcaaggtgtgcattcatattattccagatttttttttttttttttttgagacggagtctcgttctgtctccaggctggagtgcaatggagcgacctcgactcactgcaacctctgcctcccgggttgaagcgattctcctacctcaacctctcgaatagctgggattatagacacgtgccaccacgcccagctaatttttttttgtatttttagtagagacggcgtttcgccatgttcgttaggctggtgcggtggcttacgcctttaatcccagcacttcggaaggcggaggcgggcggatcgcttgaggtcgagttctaaaccagatttattttttaaaatgaagacaaaactgaaattccgagatactgaacccatttgttcaaggttgcacaactgaaagcgccggcttcatgacgacataacccaaaaaaaactgtagctggcgtctgctctcgcgcccacttcgctctcacaacagtgccaagaggtcggcgccgtcatcaccccgcgtttacacggctcaacaggaaggccaggaaatgcccaaggccccggccgtggtcaaaccgcgcgcggacccagggccttagccccgccgtcgccgcgacccacacttgccggagtcctcagcagggcctcaccgtcccgcaggcgccccgagcccgcgcctccgcggacctgacgcgccgcgtagctggtgagcgggtaacggcggccgacctccgggaacgacactgccccaaaccgttccttagcttggaagccgccgccaggcctgaagctatcgcgggactgacccagtgcaccgcccacggcgaaccacatttcccagaatcctccccctgcggtacaaatgtcccggaagccgcgaaccgccggcacccgaagaccacacttcccaagggtctctgcggctgcgcggacctggtgcgccgcgggcaaaccggtcacggctttgtaagtagcttaaccgcctggggccgtcgacctagagccggccagctaggaccatgcgcaaattgtcctggggcacacagtcgtcctctggtgaacgatacaactcgaaaccaagggacaccctctacttataagggccatggcgcccggaccaagaaattacatttcccagaaaactgcagccgtgccaaggtcttccgggtcattcctgcgctcacacaaacgtttccctccgagacatgggcagcccttgctggtaccgcgcaagtgctcgccgttgctagcaaaggggctcctctcatcccaaaccctgccgctatgctgttcaccttcaggtctttttttttttttttttttggcactcatttgcccaagacgataactcacaaaacgccctgtggcccgactgtcacgactgtagttcgccaaccaagggcatttcctggaaatgcaaggggacacgtatctgtgacactaatggccgttctgacgtgcgttacgcccctggaaggacttggaaatactgaacttgagtgagcactgggaggatggagaccctcatcctgggaggagtcactcctcccgcagccatcacagcctgacgccccctctccccagaagtgcttcttaggcccacccaaaagggcaatggacctctctgtatgcaagccagagcagtctactgtttgtgtatatttgggttgtttactttctttttaacacttaaatgttaattgacttcaatcatttttaaaattataaatagtgtcgctatagacttttttgtacttattaagtactgacctgcatgatcttcgtgaagcagtgcttctgttaccagaaaggggtccggatccgaccccaagagagagttcttagagctcacgcaagaaaaaatccatgggagagcacagtgcaaagccaaagcaagtgtattaagaaagtaaagaaacaatgggtactccattgttagagcagcagcttgggctgctggactagggatacttgtatttattgcttgatgatgtgctaaacaagggtggattattcatgagttttccaggaaagaggtgggcaatttcaatttctcggagctgagggcttcccagctttttgaaccatacagggtaacttctgaaccttaccatggcatttgtaaattgccatggcactgatgagcgtttctcttagcgtgctaatgcatataattagcatataaccgagaggtgaagccagctgggcttctggatcaggtggggccttggagaacttttctgtatagctgaaggattgtaaatacaccaatcagtgctctgtgtctagctaaaggtttgtaaatgcaccagtcagcactctgtaaaaacggaccaaacagcactctgtaaaatagaccaatcagcgctctgtaaaatggacaaatcagcaggatgtgggcggggccaaataagggaataaaaacgggccacccgaacaaccagcggcaaccgcgctggggtctacttcccaggtgtgggatgtttgttcttttgctctttgggtctgcactacctttatgagctgcaacactcaccctgaaggtctgcagcttcactcttgaagccagcgagaccacaaacccactgggaggaacgaacaactccagacacgccgtctttaggagctgtaacactcactgtgaaggtctgcagcttcactcctgaagccagcgaaatcatgaacccaccgggaggaacaaacaactccagcacgactccagacgcaccgcctttatgagctgtaacacacaccgcgagggtctgcagcttcactcctgaagccagccagaccaggaacccaccagaaggaaccaattccggacacataacaagcagcagtgagg

SEQ ID NO: 1561358 - DNA, 4001 bp, Homo sapiens
tggcccatgccatatgcacctccatgacatccctcatcccccatgccactctgcaagcagtgtccaggaagcgctcgcgtcttcacactatccaccactgccgtccaggtgcctaagcaacagacccagttttctctcagtgtccagtttcaactttcttactgaataacagcattaccaccatgatttgaagataccccatcccactccacacactggccaccatttttttcaacttcttcaacagaacccttccccagaactaaaaacctgtgtgttttcctgaggcctcaactaagatgacaactgagacctcttaacctaaacatgaccaaagcctaactcctgatataaccactaaaaatcatacctgctgccaacttctctatctcagttgatggcattttcataattttaccagctacagcaaaaacaaaccaaccttagggtcatccacgactctcctctctttcacctttcgcatcaaaaaatccaatcaccctactttaaaaaacagaaaatttaccaacttctctcacctccacagccacacctctagaccagacaccatcaacactactgcagtagctgctccctcatgctcacagtctgttctcaacctgaaagccagagagagcatgttaaaatctgagtcagatcatctccctcctctgctccaaatctcccacgacttttaccacactcaagacacctcggccagccattcctgcctaactccttcctctgatacctgtttccaacaaaggtaattaagacctgagattccctgagcgctccaaactcaatcctacaagcatttgagcgtacctgttcctaggtctgatatacttttgcagtactcatcccattggtcgccaggtggggacttctccacataactccatacaactcatggcctggattcaggacactaaactagaaatgacctccattcactgccccctgtctcaagtgaagacagtcatgtgaagaatcccaggatatcatcactatgtctcatcagagaatctggtcagccttccttataaaatacatacaaaacccaaaacccatacattctctaacctctgctgccaccactctggcccagaccatcaacgctcacctggactatttcagtagacttcatcttgatctccccgtctaccctataatccctagtctacccactctgcagccagagggagccttttaagaactgcgtcagaggacctcccttctctgtaccaaaccttgcatgactcccagcaccctcagaagagaggaccagctcctcgggcggccattccaggcctacctctgaccccctagtccctgttctcaccaggcacagagagttcccggaactccccaaactcattctcctctccatgcatgcatttgtacgaactgcccctgcgccttcgagtccgttccacaccttatgccactgatgaggggagcggaacccctccacataatgcgacggagtgagcaccctgaagtgcgcgatgagagcgaacatcccaggacacaccaaccaggccggggtgcgcttgagggatgcccccactcacctgaacccggtccatcagcaccgccgctgccatgagaagcggatgaacagtctgtgccctgtgggctcagccgaaaccccacgcctccaccgcgctggacgccctcgggctgagtgtagcactccaagtctcaatctacccggtgtaaaaacgctcacaagactaaggcggctgcttctgggggagacaaggacaagaggacgtgtgtggaggcctcggtaagagcccagccccggcagacacctccgcgagaggccgcccgtcccacgacaggggtcatggattgtaacaaaagcgcgaaggaaggtcctgcagtcttcactgtctttctttgctaggttccacgagagccgcgtagaaagccgacccgatctctagaactcagccttcacaaccagaatgcacggaccgggcataggaaaaatacgtcacgacggcgacgccagaagtctcgcccctgcagcccagagcagcaggaaacgcccagtttctgggctgtcattggctgcacgccggctaacaatgagctgggcacagatttctgggtaacgtagtttgtaccctgcatccaaccaggcaacgagcgcctttcgggttctcccggatgtctgccaagaggcgtcgtgcagggagggggagaaaagactgggaaaacgatatctcggaggccacagctgcttttaaagggtatgcaccctgatttccatggccacctgggacaatgccacgccactgaagtcgccagcaagggacccattcttcaatcctgcttctgaggccctgggaaacctgcttcacctctctcagatttggggattgaaacgtattaataaattgaacgttgtctgtatttcgtttgtgggcctttttgtaaaacattgaatgtccttctaatttttctaacatataaagaaaagagatgtaattagctacctttctgctggctgtacaggaagcatggtgcccgtatctgcttctggtgaggccacagggaacttttattcatggcgaaaagtgaaggaggaacttacatgtaacatgacgaaaacatgagcctcttctaattcattgcttcccaatttgatatgtagttttacagcatcagcttcactatgaacttaaaaaacctgtgaattcttggacccaacctataccttctgataaactctggggatgggaccctagctgaagttcaagaactggaggtcttttaaagtcattagccaaaaacaaaacaaaacaaaaacaaacaaaaaaaaatcagtaagatgaaaaacactacaaccaacctcattaggaatatgggaagtgaggtaaaaagtacttaacaccaggcctggcacatcgtgctaaatacatacaagctgttatcagtcttcctcaacacaaggttctcacatacactgctttaggaagataaatcaaagatccaccttttcaggatcagtgtgattttgaaaaaaaaagaaaaaagtacaattattccctcactcatcaaatagcatcatagataatagttataatttttttttgagacagagtttcactcttgttgcccaggcttaagtgcaatggcacgatctcagctcactgcaacctctccctcccaggttcaagcgattctcctgcctcggcctcccgagtagctgggattacaagcatccgccaccatgcccggctaattttgtatttttagtagagatggggtttctccgtgttggtcaggctggtctcgaactcctgacctcaggtgatccaactgcctcagtcttccaaagtgctgggattacaggtgggagcccctaatggttataatttttgcacaaaagcacaccaatatatcaatagactcatttaattgaaaaaaatcacatgcaagagggtttcataaactacaggtaggtctatcgtccagaagacacattcttataggctgtatgattcaaaacacagaactatcaagactaattgctcttcataatttttaactccactgtccacttaagagtcactgtagttaaaattttataacctggtttattttatgagatgacatagaaataattcatatctttgagaaaaaatatatatacacacatacacacagcatttatatatatatacacatgtagtttatatacacacatacataattatatatatgtataatataaattatctgtctccactcaaagccaatataaatttaggtgtcaggaacacatggaataacatacggagtcagttacagatataactgccagcagatttctatgcacgacaaatgcactggctaagaaaaactgaaataagactatttgaagcccaaaatgagaaatttaatggataaaaataactggcataaaataacacttttaagatccttcttaaggttgaaggaaagtgatcccaggtgatggtctg

SEQ ID NO: 1561359 - DNA, 4001 bp, Homo sapiens
tccaaactccagtcaatgacaagggaagtccccacccagtccagcacaaaaaacaaacaaacaaacaaacaaacaaaaaagacaatttatcgtctgtataaaataaatatttgtattttccttttgaattgtacacattttccttgtctacgaagaacatccaacaaactacacaaaagttagacttttctgagcaccaaaaaacaaagttcccaagaataaatataacaaaaacaacctaaatcctttttgcaggtacttataaaactttactgagccggacatcgtggctctctcctgcaatcccagcactttgggaggccaaggccggtggatcacctgaggtcaggagatcgagaccagcctggccaacatgttgaaaccccatctccactaaaaatacaaaatttagctgggtgtggtggtgggtgcctgtattcccagctactcgggaggctgaggcaggagaaccgcttgaaccagggagacagaggttgcagtgagccgagattgtcattgcactccagtctgggctacaagggtgagactccatctcaaaaaggaaaaaacaacaacaacaacaaaaaacactttattgaaaggcattaaagaagatgtaaataaatgatgtaaatcaattaactgcaactcaatggcataaaaacgacaatattcccaaagttcaaatatagattcaccacaacttgaaaacaaaagtccagtatgtggaatttggtgaactgactagaatttaagccatgacattcctgaaaaagaatggctaggtgtaagtacttcatctacaagatatttagaaatctctaaattacaaaggtgtgcttgaatcaatacagaaaaagattgtttccaaaaatactgaagcgcctgagttcattcacaaataattaccaaaatttaggaaatatattttctggaaaagatgtatacgcagtcaaatccacggagacagtattggtgggagaggaggatgcagtttagaagaggcacacagctttctgagatttaataatctctttcttggcctggtttgtaaattcgctttactgttgtccttttaagtgtgtgtaagtctgcgtgtgtgtgtaatcatactttttttgcatgtatgtcctattttccagtgttaaaatatgtgcataggaaaggacacaccacaaaataagacggtaaaattcaatggaaaatattaataatcacgataagtataactggactaactcaagttaattaacaaaatgttgaactgaatagtaaatatacatataggctatttacaagagtccactaaaattaaaataaataaaaaagtgcaaccagaaggtcttaaattaaaaatataaaaggtactcaaggtaagtgctaataagaacaccaatgtgctgacattcacgagataaaattgactacagcgcagaaagaaggtgatttctcctcgcgatgtccaaatcctgacgccccccaatctcctgaactgcccccaaactcttgaattcacttcagccgggcttttccgcccccaccagagacttagggcttttcaggatcaggtgaccaatgcttctctcatcactagctgcaatggtccaattttatccttcgcgtccccagcttttcatatcgctgatcgcgagatctaaacgcacccctcgtctggatgcctagctctttagcccccgaccctcgtaccctcttagtcctcaccgccagataggcctcccgtgacccctggaactgagggggagaagggttaaggaaagcagggcttacacgactgggaataggatcgggggagcggaggtgacggaagccgccgccgatgcgaagagaagttcatacgggaggtccagtctggcgtggggacacgaggggtccccaacaggccgaaagaattcgccgctgacccctccttggcccatgtgtctcggggcaatcgactccagagagtaatggcttccgcttcactgccgccttccaattctcgcgggacttcattggcggcgtctaatacggaagcggggcggagaggatgctgggaattgtagttttgaagtttggattggcatggcggccgtgccccggtggaatctgacggtccagcatatttctccaatttctactcaagactcaaattttcaaccacaacccacagcattttgtagccatcgtagtggtaaaggttgaatcaggcaagaattgtcatctacatgacacaactgggggacatttgcatgacgagcagaatatttgaattgccttaaatgcctctctataaactgctcgtatgttggaatggagaaaaagtaatagaaattgtacagcgaagaaattggacaacatctggaccaggtgatcaaatcaatatcaccagtgagggtcagatggagaccacgtgcctctgaatgacaccttgggaagggcgtaaaatcaccatcacctgtgtggtgttcatcctgcatatctgctattttgtattttttgacccacatcttcccattttcttccccaactgcctcattctttatttctgtgtatttgagctgtctctcttgattaaaaaaagttcctcatgtaagtgacgtcatgcaatatttttctttttgtgtctggcttatttcacttagcgtaatgtcctccaggtccacccatcttgtgataaatgtcaggacctccttctatttcaaggttgaataatattccgttatatatattatatgttttatacaatggaatatatattatatcatatttattataattatgtattatgtgtattattaccgtatattatataatatatgctaaaataatatatgtatgtatgttatatatattatggaatatatattatatataatatatattattttagcaggaggagtctgcatatacaaaattccagaatcaggctgggtacagtggctcacacctgtaatctcaacactttaggaaaccaaggcttcccatgtaaccagtaggggcagaattatataggcaggagagacagatggttagtattatccagggcaggtattataaaagacagagagaaggaaatttgaggttttggaaaatatattattgaggggatggaccatggtgcgtatatatatatatacacacacatataaaatgtatgtatggaatatatatggatataagatattcatatataatatataatctatattacataacgtaatatatatttcataatacataatatatacaccataatatatagcatatatacatataataatacatataatatataatatgtatttcatatagtatattatatacatatattacatataatatattacatgatatataacataatgggaatatctattatgtaataggtatatatttatatacaacatattatattaatatttaatataatatgaaatatatatcaatattatatgatattaatgttgacatcatatataaatacaaaagagatagaatattattcagactacatagctgctattttgtatttcgtattcatgtgagcatcaatggacattcaggttgtttccgtaacttggatattgtaaataatgctacaatgaaaatgaaagtgcagacatcgttatgaggtgattatttcatctcttttaggcatatattcaaaagaggaattgctgggtcatatagtagttctgttgtagatttctttaagagcctgaatactgttttccacaaaggttgtaccagtctgcattcccaccaacaatgtactagggttcactttgcttgatgccctcgccaacattcatctctcatcttttttttcctttttttttttctttttgcaatggagtttcgttcttgtttcccaggctggggggcaatggtgagatctcagctaccgcaacctccgcctcccgggatcaagcgattctcctgcctcggcctcccgagtagctgggcttacaggcatgcaccaccacgcccaactaattttg

SEQ ID NO: 1561360 - DNA, 4001 bp, Homo sapiens
ggcctggaggacagagaatggcttgaattcgggaggcagagggtgcagtaagccaagatcatgccactgtactccagcgtgggtgacagagcaagactccatttcagaaaaaataataataatagttataggtggaataagaatatggctttatcctctaggataaaaaagaagtaccgctgccatatttgagaaaaattgtaaccagttttaccacaaacacctgtttcacaagcctctccacaggaaccccacagtctccatgagcgtaatgtgctaagaatggtctaacgaatctcctgctattatttaggttgatttcctattcttaaaataatgataggatcattcttgtatcattcatatctatgtatgaagtttccattctaattagtaagattttttgagtcagaaacacagtaagtcactcaattacctaaaaatgtactataatgtcaggcagaaaagatttcctattattggtctctctttctagaatttaccatgcactttgtgcacattaatatgtgacttccattggcagctgctctaatcctggtccacggagagctgacagagcatccagatgtggcccctgaacaatccctgctacccaacagcactgacaccatgggaccctcaccccgtctccatccatgtctgggtgtgagtccttcccaggaccatgcccagtgcagcctcttcccaacttcatgtcacttggtcacaggagataaaatctaagtgagataagagggactgagggaaggcatgggtgattgtgagcaaacctgtcaggcaggatgcttcagactaagagaagattcccaactccaggcgccagcatttctgaaaggaaggagacagaacaatccaccgagaatatcatctcacctgagaaagagccatccccgactcctttgctttcctcttcctcttctgggtttcttcctcaggtaccaagagtctttagaagtcaatcctaaatgttagaaatatgttgtttatcactgagaatcaacacaccccctccccataacacaatgacacatacaaaggaggcctcaccctgggaaatatggtcccctctgctgcccactgccccagggatgataaactcctacaggaaaactcccactaccctactggaggagtccacacacacgctgcagcagtggggagctgggctgggatgagctccccttcagggcacagactcagacctaaccaaaccccacacagaggctgggtgtggtggctcatgcctgtcaccccagcactctaggaggccgaggtgggtagatcgcttgagctcaggagtttgtgactagcctaggcaacatggtgaaaccccatctctacaaaaatacaaaaagttaggaaggtatggtggtgcacttctgtgtgtctgtggtcccagctacttagggagctgagatgagaggatcacttgtgctcaagagttcgagaccagcctggccaacatggtgaaaccctgtccctactaaaaatacaaaaattgggccgggcgcggtggctcatgcctgtaatactagcactctggaaggccgaggtgggtggattacttgaggtcaggagttctagaccagcctggccaacatggtgaaaccctgtctcttactaaaaatacaaaaagtagctgggcttggtgggcatctgtaatcccagctactcgggaagctgaggttggaggatcacttgaacctgggaagtggaggttgcaatgggccgagatcgtgcaactacactccagcctgggtgacagagtaagacttaaaaataaaacaaaacaaaataaaataaaataaaacaaaactacaaatacaaaaattagccaggtatggtggcgggtggcacgcacctgtatctcagctacttggtaggctgaggcacaagaatcacttgaacccaggagacagaggttgcagtgagccaagatcaggagactgcactcacagcctgaaggacagagtgagactctgtttgaggaagagaaaaaaaaaagcgtttctgatgtgatagagataataaaacctgagtaacatgatagagattgatgggcagagggaatttcagatgggggtgggagggcatgggagacagctctgagcctagacctgaaggagcagaaagggagatggctgtgatcatttagggacatagggtaagaacggggaaaatgacctgagacaggaagggttttgatgtttggggaaagagataagcaaatgtgactggggcggagggagtcattagattagggcaagctcccaggaggaggctggacactggcaggggccctggacacagggctgtggagccacactgatgagttgggcttttgtcctggggaacacgggaagctggtggagggttccctgccagggactgatgtgacctgctttacatttagctgtgatatcctcagagtggggacatattcaccgagttaccctgagaaggtctgagatgagtgagaaggtgtgtctgaattcttacatgggggcccagaagggctaatggaaagggttggtcttatcacctctctttgaaaattagagaagcatctttcacatacctgggctaaagaaacttcttttgcaacgttctgatgctattgactttcaacatttaattcttcttacaagaaaattatagtaacatatataaaatgcagaagtgaaaacacacagctactgaccttgaaaacagggaggccaggcagggtggctgaggcctgtaatcacagcactttgggaggccaaggcaggcagatcacctgaggtcaggagttcgagaccagcctgagcaatatggagaaacccccgtctctactaaaaatacaaaaattatctaggcatggtggctcatggttgtaatcccagctactcaggaaggttgaggcaggagaatcacttgaacccggaggcggaggttgcggtgagctgagattgcaccattgcactccagcctgggcaacaagagtgaaactgtgtctcaaaaaaacaaacaaacgaacaaacaaaaaaagaaaatagggaaagagggtcagctgtagaactactatataagcaaatgttttcaatcaagaaaacatgggtggccagatacagtggctcatgcctgtaatcccagcactttgggaggtcaaggcaggtggatcacctgaggtcaggagttcgagaccaacctggcaaacacagtgaaaccctgtctctactaaaaatacaaaaattagccaggctccatctccacaactcatttaatctcttgctgctccttctccccaatctttagatcatcctcaatctctatagatttccacctcttctcccatctctgtgcatcctctgctctccctgttaaattgtctcttccttgttatacctccctggccccactctctggcaccccagatccccaggtgtcctccctgctgtgcttctccctctgttctccttgccaccagcaccactctgctctgtctgccctggctccaaatccctcctcctctccctcactctgatgagactccctctttgctgtccctctccctaccttgctgtccttcatctctctgtacatctagcttttctctacatttctccagttgcttttctcctcctgctttcttattttttttttcacttttgctgtctcttggcaaatccctcacccatcttctactttgccatctgttatgggcctttctcattcttcttttctctgtctcaggttttttactgctctctctctgtctcctgatccctttggcccacacaatcacaggagggtttggacaccttcatgtcagaggagcccattttccaggggctggcactgggcagggaagaacaccttgtgtcaccatataggccccaggcacctccccaatgcgggcctgggcaacagagcaagactttctcaaaataataataataacaataataattatgtatatatattgcaaatgctgtgtt

SEQ ID NO: 1561361 - DNA, 4001 bp, Homo sapiens
gagctaaaaaaaataaaaattgcataaacatctcatgttttaagaaagttcacgaacttgttttgggctgcattcaaagccatcctgggcagtgggttggacaagcttagtttaaggtatggctgtgagccaggaccaagctccccatcccaacagccaccttccatgatgtccctcagacactcaccctccttccctgggttctgcccccaccatcttcagatggcacttccctcacatgtctgggacccctcccctctgccctccctgaccagaccccagatgccttcttggcctccccactggcaacgccatacacaagcaagctagaacaagtcctggctgggccctcagctgccacaccaagagcagccccaggtgtccactcgtgactcagcatgaccactcatgaccctccccagatgcacccttcctgctcttgtagcaagaaactgtgagtcccagcaggggcttcccaggcatacccatcactgggaccctcccctgctgagcctgcttgcctgacatttccaggctgctcatccagcctgagggactggatgattctcaccagtcgccacaggggagcagcctcaacaacctgtgaacacagaggaactcaatcccttcctcctttcacccggtgtcccctttcttcccctctctgttgccaccctcccctcctcagttaggtgctaggctcttcccaatagccccaggcatcccagctggtcttctttaccctcaagccataactgcccacacctggctgagtccctgcccattcctcagtccaattcataggccctgtccacagcccaggacgccaacaacgtcaggtccagtgacatgaccaacctgggacatcccagactcttgatctttcccctgaaggaaacctgctttcctttcaattctcctttctatctacagcagctctcttcttccaggcgctcaggctgaacaacatggggtacttagttcttcaaacagcccacacctgatgcatccgcagatccaccagaattcacctggtcgcccacctccactgctgcccagactgtggcagtcggttcttcccttcatgccgacacccctgcatgtctgttctccacgcaacaaacggtggaaccgttttaaagtcctcagaggatgtcctgattctgttcaaaacttctatgtctcccgacgccctcgagataaagcccactccctcgcctgatactgcagccgcacacatcccctctactccagctccacatcgagagagctcagtcccagaagcacctgggcttcggctcccctcccaggttttgcacacgcaggactctcccctcggagcctccttcgggacctcagccccctggctgcccgaactcgggagctcaccagtgccctggacgcaggagtttgcactgacccccgcaacccccccagggcagggagaggaaagacgactaggcgaggtctaggaagcggcctccctccgtgagggcgcggtctgtgtgagcagggactcccctgcttccccgacgcgggcttgtcagcgccaccgccgccagcggaacccgcagctgggagggaagaaaggcgtggaccacccagcctttccccgccagcagcgtcccggggccgccccgcgcctcagtctccccggccatcatggacgtggaacgcccagcgcgcagcctcctgggctgccgcacggtgggagagcgcatggctcccgccgcggcccgacagtcccctggacgcccacgacgcactctgagaaacagaggcttgggggcgcggccggcggccggcgcccttgatcacgacgcgtgcgcagggcgggcccgacgcgggccctcagccagtaccttcctcgccgccagcctcgagcaccaggaaccccctggaaaccggacccgacccgcggtccccagcccagaccaccggtgtggcctgacgcgggcggcgaagtgacagtcccaccgccggaagtccagcccttcggttctcattggcccagtgcgcgccgcggacgcttgcgtacagccttccgggtcacgtggttcccgcctgtttccctgcgtggaggcggggccactaccggtctccttggcaacgtccaagcccctgccgcgcggggcgctgggaaatggagtcgcgcggcggcctcgggttttcaagggcttggtggcgctggtggattcgcccggtgtgtagtcctgccttcggcattccaggtgtcctcccaagcagtcccggagactaaaccctgcaggtgcgaaagcagaaactgccgaggttccaagaggcaacaccagcagtgagcacggaggagaaaatgcaccgggtagcgcaggtggaggtggaggagccgatgcctggagctccgggttcccttcccagctctgcctctcactgactgtgcgtcctgggcgcgggtttgacctctctgtgtcaatgtcccgtaaaggtttaaggtccgttttcaacctttacaccaagaattctcagcccgtaagcctacatttgtcttaagtatgagactgttcctcgacacttgcccaaagcatctgttttccttgtaatttggatgggcagaagttaattccccagatttgcttgtccttagaccatctagatcttgtcttgccccacacatcacaatattcattcttttttccttttttcttgggactcatttaagttttttttttttttttttaacagggtctttgttctgttgcccgtgctggagtgcagtggcacaatctcggctcactgcaacctctgccttcaggttcaagtgatccccccgcctcagcctccgtagtagctgggaccacaggtgtgcgccaccatgcctggctaatttttgtattttttagtagagatggagtttcaccatgttggccaggctggtcttgaactcctgacctcaggtgatccgcccacctcgttctcccaaagtgctgggattacaggccaatttaagtgtctttgacacataaaaacgaaaggcagagcagtctcaatgtagactgtcttgtttggcagataataaaaggttctttgtcttgtttttggaacctgtagacagttctcagctgtccagttccttaactctttttgcctccctccctctatacctacctccatctataactatctctctgtcaactgtcagctataactgtccacctaattgattctacttgtaaatccttgtagagcaagggagctcatcatgtttggaatgttttaatataaattttgctactttgaaagaatttaagaacatttcaggactgggcgcagtggctcacacctggaatctgagcactttgggtggccaaggtgagcgatcactggagcctaggagtttgagaccagcctgagcaacaaaatgtgaccccatctttataaaaaaatataaaaattagctgagcatggtcttgcatgcctgtaataccagctacatgggaggctgaggtgggaggattgagttcaggagttggagtgtgcagtgagctatgatggagcccctgcactccagcctgggtaagagagagaccctgtctcaggaaaaaacaaacaaaaaccctgagggggaaaaaaaaaaccccaacacttagaagtattaaagttcagggccgggcgcggtggctcacgcctgtaatcccagcactttgggaggccgaggcgggtggatcatgaggtcaggagatcgagaccatcctggctaacaaggtgaaaccccatctctactaaaaatacaaaaaattagccgggcgcggtggcgggcgcctgtagtcccagctactggggaggctgaggcgggagaatggcgtgaacccgggaagcggagcttgcagtgagccgagattgcgccactgcagtccgcagtccggcctgggcgacagagcgagactccgtttcaaaaaaaaaaaaaaaaaaaaaaggaagtattaaagttcaaaaaccctgaagaaaaaaaaccccaacactta

SEQ ID NO: 1561362 - DNA, 4001 bp, Homo sapiens
tgtccctccttccttgggttccaccccgagattatcttcaggtggcacttccctcacctgtctgggacccctcccctctgccctcctggtccaggccccagatggcttcttgacttccccactggccacccctacacaagcaggctagagcaagccctggctgggcccttagctgccacaccaagggcagccccaaatatccactcgtgactcagcatgaccattcatgaccctccccagatgtgcccttcttgcttttgtaataagcaagggtgtaagtcccagctgtggaccccccaggcatgcccatcactgagaccttcccctgctgcgcttgcctgacatttccaggctgctcatccagcctgagggactggatgatccccaccagtcgtcataggggtgcagccccaagaacctgtgaacacaggggaactcaatcccttcctccctccacatggcgccccctcctcaatttatttatttatttatttatttatttatttatttatttatttatttttattttggagacggagtctcactccgtcacccaggctggagtgcagtggggcaatctcggctcactgcaagctccggctcccgggttcacgccattctcctgcctcagcctcccgccaccacacctggctaatttttttggatttttagtagagaccgggtttcactgtgtgagccaggatggtctcgatctcagcgctcccgcaatttctttcccacattgctgccaccctctcctattcagccacctgccgaactcctcccctgatagcctcaggcaccccagccggttttctttaccctcaagctgtaactccgcacgcctgactgctcatcgccttcttcagtccagtttataggccctgtcctcagcccaggacaccaacaacgtcaggtccagtgacatgaccaacctgggacatcccagactcttgatctttcccctgaaggaaacctgctttcctttcaattctcctttctatctacagcagctctcttcttccaggcgctcaggctgaacaacatggggtacttagttcttcaaacagcccacacctgatgcatccgcagatccaccagaattcacctggtcgcccacctccactgctgcccagactgtggcagtcggttcttcccttcatgccgacacccctgcatgtctgttctccacgcaacaaacggtggaaccgttttaaagtcccaactcagaggatgtcctgattctgttcaaaacttctatgtctcccgacgccctcgagataaagcccactccctcgcctgctactgcagccgcacacatcccctctactccagctccacatcgagagcgctcagtcccagaagcatctgggcttcggctcccctcccaggttttgcacacgcaggactctcccctcggagcctccttcgggacctcagccccctggctgccggaagtcgggagctcaccagtgccctggacgcaggagtttgcactgacccccgcaacccccccagggcagggagaggaaagacgactaggcgaggtctaggaagcggcctcactccgtgggggcgcagtctgtgtgagcagggactcccccgcccccccggcgcgggcttgtcagcgccaccgccgccagcggaacccgcaactgggagggaagaaaggcatggaccacccgggaccgccatccccgccagcagcctcccgcggctgccccgcgcctcagcctgcccggcagtcatgggcgcagaatgcccaatgcgctgcctcctgggcttccgcggggcgggagaacgcgtggttcccgccggggcccgaccgcccccgggccgaccacgtcatactcgaagataccgaggcttgggggcgcggccggctgctcgtggtccgtaccttcctggccgcccgcctcgggccccgacccgcgcgccacagcccagaccaccggtgtggcctgacgcgagcagccaagtgacagtcccaacgccggaagtccagcccccagagctcacattgccccaatacgcgcgcagacgcttgcgcacagccttctgggttatgtggttcctgcctgtttttcggcgcggaggcggggccattaccagtctccatggcaacggctaagcgccgccgcgctgggcgcctggaaatggagtagcgcagctgccgcgggtttccaagggctccgtggcactggttgagtcgcccggcaggttgtcccgcgttggggattcccagttcctggcacccacctaagcagccctggagactaaaccctgcaggtgtgaaagcagaaactgcggaggttccagaaggcaacaccagcaggtagcagggaggagaaaacgcaccgggtagggcaggtgtaggtggaggagcagatgcctggagctccgggttcccttcccagctttgcatctcactgactgtgcatcctgggcgagggtttgatctctctgtgtgtcagtgtcccgtaaaggtttaaggtccgtttttcaacctctacaccaagaattctcagcctgtaatgacactacccgcttgtcatttgtcttgattctgtgattgttcttggacgctcgcccaaaacttgttttccttgtaacttggacgagcagaaggtaattccccagccttgcttgtccttagaccatctagttcttgctttgccccacacatcacaacatggatgctttgttccttttttctctggaccaatctaagtgtctttgacacataacaacaaaaggcagggcagtctcaatgtagactgaccatgttgttggcagagaataaacgattctctctttgttgcttccctgtgagggtcttgtttttaggatccttagacagttctcagatgtcaagtacgttaattcattttgtcttcctctatacccacctccatctataaatatctgtctactgtcagctataactgtccacagaattgattctacttgtagatccctatagtgtaagatagctcgacaatttttgaatgtttttatttaaatttttcctgctttgaaagaatttaagaacacttaagtactattgtgatttaatcaaatgcttagaggcattattaacatttcaagcaatttttttttacttttttttttttttttttgagacagggtctcactctcttacccaggatggagtgcagtggtgcatactcgggtcactgcaacctccgcctcccatgctcaaacagtcctccaacttcagcctcccaagtagctggaactacaggcaggagccacgatgcctggtgtattagtctgttttcacgttgctgataaagacatatctgagactgggtaatttataaagaaaaagaggtttagtggactcatagttccacgtggctggagaggcctcacaatcatgacagaaggtgaaaggcacgtcttacatggcagcaggcaagagcaaatgagagtcaagcaaaagaggaaaccccttatgaaaccatcagatctcgtgagacttactcactaccacaagaatagtatgggggaaactgtccccatgactcagttacctctaactggggccccttccacaacatgtgggaattatgaaagctacaattcaaaatgagatttggttggggacacagccaaaccatatcattctgttcctcgcccctcccaaatctcgtgctcacatttcagaaccaatcgtgccttcccaacagtcccccaaagtctacttatttcagcattagctcaaaagtccacagtccaaaatctcatctgagacaaggcaattcccttcttcctatgagcctgtaaaatcaaaagcaagttagtcacttcctagatacaattggggtacagccgttggataaatacacccattccaaatgggagaaattggccaaaagaaaggggctaaaggccccacgaaagtctgaaatgcagcaggacagtcgaatcttaaagttccaaaataatctcctctgactccatgtctcacatccagg

SEQ ID NO: 1561363 - DNA, 4001 bp, Homo sapiens
ttccagtaactcagccaaaaaaactaagtgtatgtaaatatatgtctgtatcacacctgcctctgcaacacctgctgtgtgtacaagtgtgtgtaaaatataaaaagaaaaccctatgtcagaggcgtttgaaccaaagcaaacctccatcttaaatggggactgggtaaaataaggctgaaacctactgggctgcatttccagacagttaaggcattctaggtcataggataacacaggagatttgcacaagatacaggtcataaagaccttgttgataaaacagcttgcagtaaaggtggctaaaacccaccaaaaccaagatggcaacgagagtgacctctggtcctgctcccactagcaccatgacagtttacaaatgtcatggaaacatcaggaagttaccctatatggcctaaaaatggtaggcatgaataatccaccccttgtttagcatataatcaagaaataaccataaaaatgggcgaccagcagttcttggggctgctctatctatggagtagccatttttttattcctttactttcttaataagcttgctttcactttactctatggactcgccctgaattttctttcccaagatataagaaccctctgttgggttatagctcgggaccccctttctggtaacacctatgcatgtgtctcaggcagggagaagataaagataaagctaatgtggcaaaaagtgttaataattttagaatctggatggttttagaagtgttaaactattcctgcaacttctatgcaaatgcggaacttttcaaaatgaaaagttgggtgaagagagaggtaaacaagcagtagaatggaggaaagtcacttgctgtgggaaaaaagaaaaaacagacaaaaactgggtattcaaaacgtacttcaacaagcccaagttcctatagccaaattttttaacttggcaaaaaataaaggaccttttcaggctgatggtaattttaataaaggtttaggttgcatttgtcaaaattcatcaatggtacagggaatatctgtgcatttcactgaaagtcaattttggctcaaaaaatttaaaaaagcactactgaactctaattcatggtaagcatagtgaggtgtttgagggagaagtgttgtgatatctgcaacttactttgaaatgtttccaaaaataggtggattaatgaatggctgaaaggatggacagaaggaaagataagggatacagtaagttcagcagacgttaaccgggtcgttcactgcacaagtctttcagcttctctatctaaaccaacattttatgtcataaaatattgagactggaagactgcacaaaggaaatatgccactaaaccaagggaaaagacagcaaaatggtcactaaacacgtgcaaaaatgcggccctcactgagaattgcagtaaaacatgattttgcaaatatcaaatggaaaaacacacaggtgatctaacaccttcgagactcaaggggaagcggctcagcccactggctcacggccgccaattcagccggaggccgacccaagcctacactgcccctcacacctgacagaaaagctgcagactcgggggttacccccggagacggaccaggacacccagcaggcgtggcaaaacagtctctatgggagggcgggctagagatgcgagcgcggaactcacgggtgacgctaaggaaagagcgggggcgtccagaccagccccggagcgacctcgtcctcagaggagtgaccccaatcgccacggagcgtccccacccaccaggagaactacgcccctggccagaccctcgccctagcgggcccgacatgcccaccacccaggtgaaacccacccgcggacgcgcccctcgccgccccacaaggacccggcggacctccacccgccaagacttccctccgcaggaaacggaggcagcgcagggctcagggatgcgtcggcacttacggttggcggccggcggcagccatgttccgggcgattgcgcttgcgcggctgccgggacaaggatgtgcgcgtgcgcggagtccccgagcttcccccgcccaacgctggggcggccgcgggtaccgggttattcattaccctggcgtggacttgcctcggggcggacgcgcaggcatttactttctcctatggtctcctctgatttttaacccgatgctatcattcttttgttatagagccttccttttatttactgcataatttcctaaaatatttctttatctataatctttttttgagataataatgttaaaattcagaataagtacactcattattcattggcaatataattatttactgggtgcgtggctcacgcctgtaatcccagcattttgggaggcctaatttgttaaaatgactagatctaagaaatgtaaacaaagccagtaactttcctctgtagtaacaatagccggttgaaaatgaaaactacacattttcattctttcagtggttctcttaaactttagcatggggaagcctaaatatttactgacagggaagagagaaactgtggtatgtgcaacggagcaatagggggtggttaaaacaaacggactgggctcacctaaggtcaggagtttgagaccagcctggccaacatggtgaaaccccgtctccactaaaaatacaaaaattagctaggcgtggtggcaggcgcctgtaatcccagctcctcgggaggctgaggcaagagaatcacttgaacctgggaggcggaggttgcagtgagctgagatcgtaccatcacactccagcctgggggacaagagggagacttcgtctcaaaaaaaaaaaaaaaaaaaaggactaacttatatacaagatagacagttctccaaaaacagttcgaaaagtaaactgtgcacttatccacatgatacaacttacctggaaataaaagacacaaaatctatatgttatacagagattgatacataagtagtaaagtaacaataacatggaccagatagattgtccaacctcaagaaagtggcaactgaggggaaagagttggggaggagacaaaggagacctcagttacacctgtgatgcttgataggaaaaaacaaatcaaaacctgaaaatctgactacatgttaacacaggtaaaatctcgatgatacatgggtgtcatctttattatttatagattattctattactctccgaacctctccgcaggttgaaatacttcacaattttgaaatgaaaattagaaaaaaaattctaagccataatagtgattaaattgtcactcacaatagtgatggttggagcaacttggaaatcaattagcaaaagcaataaaggatcttcatgaagaaaatacaaaaacctcattaacagacctgaagttaagttcagaacacactgacatattattcctgaatggaaagtatttttttaatttctccatgaaggccgtatcagaccaggcacagtggctcatgcctgtaattccaactctttgggaagccgggctggggggatcacctgaggtcaggagttcaagatgagcctggccaacatggtgaaaccccatctctaaaaatataaaaattggctgggcacagtggctcatgcctgcaatcctagtactcggtctcaaaaaaaaaaaaaaaatcttcacaaaactactaaacaaaagtatagcaattccaattcaaagactccccccgcccccagctcacagaataaaacaacttaaagatcatatggagaaaagtccaacagtatctggttaaaagaacagtcggagaccggacgcggtggctcacaactgtaatcccagcactttgggaggccgaggcaggtggatcacttgaggtcaggaattcaagaccagcctggcaaacattgtgaaacctgtctctactaaaaatacaaaaattagccgggggtggtggcgggtgcctataatcctagctactccggaggctgaggcaggagaattgcctgaatcct

SEQ ID NO: 1561364 - DNA, 4001 bp, Homo sapiens
aataatatactaaaatgtcatgttggataaggtatttacaaaaatcttattcaatggaatttgtaggcaactgaagcatttccttcatttactattgttaataactattagtagtgtttaatattatgtcaggtgcatttttctttcttacggttataactaaacttacttctttgtagctgcagagtattccatgaaatgaacgtggtataattacttaaccatttccaccatcctgaacaataattgtggtcaaggtacacagccttcgattgtagaccaatgggtctaaatgtctttggggcatgtccatccttcttaatgccatgaaattacagagtatctccttagggtggtggtggtgggggacagatacactaacactgataatcacatacagtaaatatacacagaatgtcccttggaaagttgtaagtggagttaaaggcaggccctcaggttaaggataacagttctaggccatttgaggctgtggttcattttgtgaacctgcaaacacccatcccagttaccttcatatgtacgttgctcctgatgtacagacatccagacttagcacaaaacagcagcactcactgtgcactcccactcaggggtgcgcgtctatgggttttatgcgtgttaatgcatttcaccctcctcacaagcctatcttcagaaggctcaaaaagctaagaggcagaaacaggactcaaatcttggtcatctacctttaatgtttggtcttaagtcttataaacacatatcatttaatataaaaaaaaaaggatactcacctgaccctttcagatgtttaacgattcgtcttcctcctcggggatgctttttctgaaggatgctggcctggggaaaacagaaccggaagggtaacacctgccatacctaataaaaccaatgagaaatacgaggccccgagatggagtttctgggagattcctgaagagcacgctgtggcgattgagatgatgacgcgtggagctgcccccctccctgtctcccacatcagggacctgtccctctacaggaggaattctactcctgaggccaccgtcccctgtcactcaggtggcctgcatgcacagcacttctggctctgaaagcgtcacctcatggctgtttctgccttcttgctggtgaatttccaggcgaggctcaggcgctcacgtccctccgcggcccttgttctcaggcaggtaccgcttggttaggaggtgaaggcaggggaagcagcagagacgctggagctacaagttgcactgtcacacacacctgcatcactcagaaggcccgatcatccatcccagcacagagacgctgaagctacaggttgtgttgtcacacacacctgcgtcacccagaaggcccgatcacccatcccagcacaagtctgcacagctcagcctcaccacagctcactctgtcctgagacacatctgcgcccctcatacccactaacgcccagcacggccatgctacgggccccaccaccccacacggtgcagaggtgcatccgtgggccacggagacccgtcccgaccgctgcccccgcacaacccccagagcgcacctcacggagcagagtcccagggacgcaccgccgaggttcacaggcacgggctgcgttgacccaaagcctctggagcacccccggtcaccagttatggggagagcccggctgtgtcaccccacactctccagcaagtgcgtcaccgtcagaagccccgtgcccgtctcccctcggagccacgcgcaccaatctcacctgcgcggactggcggagatgcagcggctgcgtcactggtgcaaacgcgcacccagcacggcccccatcgcccccaatgacgctcgcgtgcacccgtgtcacagttacggggacagggccgccgcgtcagcctcgtactcccacgcaagtgcgtcacacactcggtcccgccaccccctggaggccagcgcgcatgcgcacgcgcacccagcggccgcagcgcgcagacagcagcagagcccgacacgcatgtgcacacagacccctacacgtatgtgcacgtacccagaccccgacacgtatgtgagcgtacacagacccccgatacatagcgtgctcagctgttgacgtgcctgtgcgggcacacagaccctgacgggcgtgtgcgcacgcacagatgccgacacgcatgtgcagacacaacagagcccgacacacacgtgcgcctgcacagatgctgacacgcggacacactgacacgtgtgcgtgcacccctcccatccctttccctcctcccactctcccaaagccgcagacgcacccggtagtcccccaacgctggggcctcgggagagggtgaggctagaagaggacgcggggccgtcgggggaaaccagagccccaagccccgtgttccagcatgcagcacggcgtactcctggatggtctctgggaaatgtagtccgggacggtcccaggcaggggcctcagggcgcgtcccaggtcggtgccggagcgggcagccccaagctaagcccttcctggtccctgcagacgccccttcccgactgggaaaggagctgtgtcaccccagctgggaccccgtctggcctcttgagtggggtgatgccgggcgagccatggctgtcctcagaagggtatcctctcctagcccctctggagcgtcacctggaattctctgcaggccgctagcacaggctgccggagctgctattcggtgtcccttgcttgctgcattgtaaacaatgtacaggtagcagttatgccccgtgagtcccgctctcattccaagtactaacgtcacagggtctacaggatgttgcaggtacttaaccacagtctcattttgactcaaaatcccactttttggtatttatgccaaggaagtagctatagttgtacacaatgttgaagtatgttcacaaaatgctttttttctgaaaatctttttctcttttaattagatagactttagattcatatgtagttacaagaaataaaattgagagatcttgtgtacctttcacctggttacctcagctggtgattgtagtatataataccacaaccagaagattaacattgatgtaatccactgacgttacccagaatttccagagaataattttttgtttgtttgtttgtttgttttgagacggagtttcgctcttgttgcccaggctcaagtgcaatggtgcgatctcggctcactgcaacctccgcctcctgggttcaaggggttctcctgcgtcagcctccccagtagctgggatgacaggcatgcgctaccacgcccggctaattttttttgtatttttagaagagacggggtttctctatgttggtcaggctggactcgaactcccgacctcaggtgatccgcctgcctcggcctcacaaagtgcaggaattacaggcgtgagccaccacacccagtcgagaataatttttaaaaatgaaaatcttgcagtggaggataaaggaaaatcagattaaaccatggtctgttatacaatgacatagagtacatttcctaataatactgactcattaattaagaaaacttctgaagaatcaacaagggaaaagggtaggttaaaatggtacatataatttgagcagacatgttttggtgaaattaacacaggctctgtggtctgatttgagggtgttaatctgagctctgatagttattaacttcacagtgtggtaaagtttcctcactggtaaaaccacaagaaagatagtacaatgtatgactgtttgaacaggatcatccacatgaaacacacagtcatatataacaattaagataaggtagctgttattactaaaaaatcagtaacatatctcaatccattttcataaaagtaacaagtctgctatttccttttaactagggagacagagacatgatagttccttaaaaaatctagtttaaagattcttatcagctaggtgcagtggctcacacctg

SEQ ID NO: 1561365 - DNA, 4001 bp, Homo sapiens
tggtctcaggcttccagcccccagaactgtaagaaataaatgcttgctgtggccggacacggtgggtgatgcctgtaaccccagcactttgggaggtggaaatgggaggattgcttgagctcaggagtttgataccagcctgggcaacatggcaagaccctgtctctataaaatattaaaaaattggctgggtgtggcgcctcacgcctgtaatcccagcactttgggaggccgaggcaggcagcagattgcttgagctcaggagttcacgaccagcctgggcaacatggtgaaacattgtatctaccaaaaaaaaaaaaaaaaaaaaaaaaaaaagagccaggtgtggtggctcacacctgtagtcccagctactcagaaggctgaggtgggaggattgcttgagcccagaaagcagaggttgaagtgagccaagattgtgccactgcactccaacctggatgacaaagcgagaccccgtctcaaaataaaaataaaaatatacagccacatgtggtggcacacaccagtagccccagctacttgggaggctggggtgggaagattgcttgagcccagggggctgaggttgcagtgagctatgatcacaccaccgcactccagccttgatgacagagtaagaccctgtctcaaaaacaaaacaaaacaaaaacaataaaaaaggcccaacatggtggctcacatctgtaatccaagcactttttgaggccaaggtgggaggaaagcttgagctcatgagatcaagaccagcctgggtaacatagtgagaccctgtctctaaaaaaaaaaaaaattaaaaaaaaaaagtttgcccttttagtcacacagtctatggtactttgttatcacagactgaatcaactaagacaagaattaagaggtgtgtgcaaaatagacaagagacagtttagtacagagaatatgtgcttaataaatgtgaccaggctcctctcttccttcactgaataatcagtcgtcatcttggataggatatttacaaaacgtctaattcaataggatttccttttttttttttttttttttgagatggagtctcgctgtgttgcccaggctggagtgaagcggtgcgatctcggctcactgcaagctccgcctcccgggttcccgccattctcctgcctcagcctcccgagtagctgggactacaggcgcccaccaccactcccggctaatttttgtatttttagtagagacggggtttcaccgtgttagccaggatggtctcgatctccagaccttgtgatttgcccacctcggcctcccaaagtgctgggattacaggcgtgagccactgcgcccgccgactaagtctcataaacacatatgatttaattaaaaaaaaaaaaaagatactcacctgacctaagatgtttaacgattcgtcttcctcctcggggatgctttttctgaaggatgctggcctggggaaaacagaaccagaagggtaacacctgccatacctaataaaaccaatgagaaatacgaggccccgagatggagtttctgggagattcctgaagagcacgctgtggtaactgagatgatgaagcgtggagctgcccctctccctgtctcccacatcagggacgtgtccctctacaggaggaattctactcctgaggccaccgtctcctgtcactcaggcgccctgagtggagagcacttctagctctgaaagcgtcacctcatggctgtttctgccttcttgttggtgaatttcctggcagggctcaggcactcccgtccttccgcggcccttgttctcaggcaggtaccgcttggttaggaggtgaaggcaggggaagcagcagagacgctggagctacaggttgtgctgtcacacacacctgcgtcacccagaaggcccgatcatccatcccagcacagagaagctggagctacaggttgtgttgtcacacacacctgcgtcacccagaaggcccgatcacccatctcagcacagagacgctggaactacaggttgtgctgtcacacacacctgcgtcacccagaaggcccgatcacccatcccagcacacagaagctggagctacaggttgtgttgtcacacacacctgcgtcacccagaaggcccgatcacccatctcagcacagagacgctggagctacaggttgtgctgtcacacacacctgcgtcacccagaaggcccgaccaaccatcccagcacaagcctgcactgatggctcagcctcaccacagcacacactggcctgagacacatctgcgcccctcatacccactaacgcccagcacggccacgctgccggccccgccactccacacagtgcaaaggcacatccgtgggccacggagacccgtcctgatcgccgcccccacatatcccccagagcgcacctcacagaacagagtcccggggacgcactgccgaggttcacaggtgcgggttccgtcgccccaaagcctcgggagcaccccagccctagttatggggagagcccggctgcgtcaccccacaccctctccagcaagtgcgtcaccgctagaagctccgtgcccgtctccccttggagccatgggcgccaatctcacctgcgcggactggcggagacacagcggttgcgtcaccggtgcagaagcgcaccgagcacggcccccatcacccccaatgacgcttgcgtgcacccgtgtcacagttacgggagatagagccgccgcgtcagcctcgcactcccacgcaagtgcgtcacacagtcggtcccgccacccatggaggccagcgcgcatgcgcaccccggactcgggaggggcctcccgcacccagcggccggagcgcgcaggcagcagcagagcccgacacgcatgtgcgtgcacacagatcctgacacgcatgtacacccagaccgcgacatgcacgtgtacgcgcacacagacccccaacgcatgcgtgtggccagaccttgatccgcatgtgcgaccagaccccgacacacatgtgcgcgtgcacagacgctgacacatgcacacactgacacgcgtgcgcgcccttcccactccttccttctttggcctctcccgaagccacaggcgcactcggcggtccccctacccccatgcttggcgcgcacccctgggttcctcctaggaagcgaatgccctactcaggcccaaacacacaggggcttcgggaaggggtgagaggcttgaggagggcgatgtctggggaaaccagagccccaagccccgtgtcccagcatgcagcgccttaagttcctggggggcctctgggaaacgtagtctgggccggtcccaggcaggggcctcagggcgcgttccaggcaggcagccccacactgagtccatcttgctccctgcagacgcccgttcccggctgggagaggggctgtgtcaccccagctgggagcccgtctggcctctgagtggggtgatgccgggtgagccatggctgtcatcagaagggtatcctctcctagcccctctggagcatcacctggaattctctgcaggccgccagcacaggctgcccgaggtgctattcggtgtcccttgcttgctggattgtaaacaatgtacaggcagcagttatgcccagttagtcccgctctcattccaagtactaatgtcacagggtctacaggatgttgcaggtactacttaaccacagtctcattttgactcaaaatcccactttttagaatttatcccaaggaaatagctagagtagtacacacatgtatgcccaagatgtttggagattatcttgtgtgggaaagtttttcttttaaattgatacaaccgtagattcttaggtagttgtacacataatactgagaaagcctatgtatctttcacctggttacaccaattggtgattatagtatacagtataatatcaccgccaggacattcacaatgacatcatccattgatgttatgcaaatttcaagacactaatttt

SEQ ID NO: 1561366 - DNA, 4001 bp, Homo sapiens
ctggtaccctcttctcagacttccagcctccagaactgtgagcaataaatgtttgtggtttcagccaccggtctatggtactttgttacagactaaggtaagaataaattaaggagtgtgtgcaaaacacaatagagtatggtacaaaaatgcgctcaataaatgtggccaggctcctctcttttgaaggattcatgaataatcctaaataatatactaaaatgtcatgttggataaggtatttacaaaaatcttattcaatggaatttgtaggcaactgaagcatttccttcatttactattgttaataactattagtagtgtttaatattatgtcaggtgcatttttctttcttacggttataactaaacttacttctttgtagctgcagagtattccatgaaatgaacgtggtataattacttaaccatttccaccatcctgaacaataattgtggtcaaggtacacagccttcgattgtagaccaatgggtctaaatgtctttggggcatgtccatccttcttaatgccatgaaattacagagtatctccttagggtggtggtggtgggggacagatacactaacactgataatcacatacagtaaatatacacagaatgtcccttggaaagttgtaagtggagttaaaggcaggccctcaggttaaggataacagttctaggccatttgaggctgtggttcattttgtgaacctgcaaacacccatcccagttaccttcatatgtacgttgctcctgatgtacagacatccagacttagcacaaaacagcagcactcactgtgcactcccactcaggggtgcgcgtctatgggttttatgcgtgttaatgcatttcaccctcctcacaagcctatcttcagaaggctcaaaaagctaagaggcagaaacaggactcaaatcttggtcatctacctttaatgtttggtcttaagtcttataaacacatatcatttaatataaaaaaaaaaggatactcacctgaccctttcagatgtttaacgattcgtcttcctcctcggggatgctttttctgaaggatgctggcctggggaaaacagaaccggaagggtaacacctgccatacctaataaaaccaatgagaaatacgaggccccgagatggagtttctgggagattcctgaagagcacgctgtggcgattgagatgatgacgcgtggagctgcccccctccctgtctcccacatcagggacctgtccctctacaggaggaattctactcctgaggccaccgtcccctgtcactcaggtggcctgcatgcacagcacttctggctctgaaagcgtcacctcatggctgtttctgccttcttgctggtgaatttccaggcgaggctcaggcgctcacgtccctccgcggcccttgttctcaggcaggtaccgcttggttaggaggtgaaggcaggggaagcagcagagacgctggagctacaagttgcactgtcacacacacctgcatcactcagaaggcccgatcatccatcccagcacagagacgctgaagctacaggttgtgttgtcacacacacctgcgtcacccagaaggcccgatcacccatcccagcacaagtctgcacagctcagcctcaccacagctcactctgtcctgagacacatctgcgcccctcatacccactaacgcccagcacggccatgctacgggccccaccaccccacacggtgcagaggtgcatccgtgggccacggagacccgtcccgaccgctgcccccgcacaacccccagagcgcacctcacggagcagagtcccagggacgcaccgccgaggttcacaggcacgggctgcgttgacccaaagcctctggagcacccccggtcaccagttatggggagagcccggctgtgtcaccccacactctccagcaagtgcgtcaccgtcagaagccccgtgcccgtctcccctcggagccacgcgcaccaatctcacctgcgcggactggcggagatgcagcggctgcgtcactggtgcaaacgcgcacccagcacggcccccatcgcccccaatgacgctcgcgtgcacccgtgtcacagttacggggacagggccgccgcgtcagcctcgtactcccacgcaagtgcgtcacacactcggtcccgccaccccctggaggccagcgcgcatgcgcacgcgcacccagcggccgcagcgcgcagacagcagcagagcccgacacgcatgtgcacacagacccctacacgtatgtgcacgtacccagaccccgacacgtatgtgagcgtacacagacccccgatacatagcgtgctcagctgttgacgtgcctgtgcgggcacacagaccctgacgggcgtgtgcgcacgcacagatgccgacacgcatgtgcagacacaacagagcccgacacacacgtgcgcctgcacagatgctgacacgcggacacactgacacgtgtgcgtgcacccctcccatccctttccctcctcccactctcccaaagccgcagacgcacccggtagtcccccaacgctggggcctcgggagagggtgaggctagaagaggacgcggggccgtcgggggaaaccagagccccaagccccgtgttccagcatgcagcacggcgtactcctggatggtctctgggaaatgtagtccgggacggtcccaggcaggggcctcagggcgcgtcccaggtcggtgccggagcgggcagccccaagctaagcccttcctggtccctgcagacgccccttcccgactgggaaaggagctgtgtcaccccagctgggaccccgtctggcctcttgagtggggtgatgccgggcgagccatggctgtcctcagaagggtatcctctcctagcccctctggagcgtcacctggaattctctgcaggccgctagcacaggctgccggagctgctattcggtgtcccttgcttgctgcattgtaaacaatgtacaggtagcagttatgccccgtgagtcccgctctcattccaagtactaacgtcacagggtctacaggatgttgcaggtacttaaccacagtctcattttgactcaaaatcccactttttggtatttatgccaaggaagtagctatagttgtacacaatgttgaagtatgttcacaaaatgctttttttctgaaaatctttttctcttttaattagatagactttagattcatatgtagttacaagaaataaaattgagagatcttgtgtacctttcacctggttacctcagctggtgattgtagtatataataccacaaccagaagattaacattgatgtaatccactgacgttacccagaatttccagagaataattttttgtttgtttgtttgtttgttttgagacggagtttcgctcttgttgcccaggctcaagtgcaatggtgcgatctcggctcactgcaacctccgcctcctgggttcaaggggttctcctgcgtcagcctccccagtagctgggatgacaggcatgcgctaccacgcccggctaattttttttgtatttttagaagagacggggtttctctatgttggtcaggctggactcgaactcccgacctcaggtgatccgcctgcctcggcctcacaaagtgcaggaattacaggcgtgagccaccacacccagtcgagaataatttttaaaaatgaaaatcttgcagtggaggataaaggaaaatcagattaaaccatggtctgttatacaatgacatagagtacatttcctaataatactgactcattaattaagaaaacttctgaagaatcaacaagggaaaagggtaggttaaaatggtacatataatttgagcagacatgttttggtgaaattaacacaggctctgtggtctgatttgagggtgttaatctgagctctgatagttattaacttcacagtgtggtaaagtttcctcactggtaaaaccacaagaaagatagtacaatgtatgactgtttgaaca

SEQ ID NO: 1561367 - DNA, 4001 bp, Homo sapiens
gtggggcagtgtctagaagccagcaaaagcaaggacataaaatacctcccacagggcaggctcggtggctcacacctgtaatcccgcactttgggaggctgaggccggctaattaatcacctgaggtcaggagttcgagaccagcctgatcaacaaggagaaaccctgtttccactaaaaatacaaaaattagctgcggatggtgacatgtgcctgtaatcccagctactcgggaggctgaggcgggagaatcacttgaatctgggaggtggaggttgcagtgagccaagattgtgccactgcgctccagcatgggcaacagagcaagcctccatctcaattacagaaaaaaaaagactatctcctagagcctccaagcacacacacctcctagagctctgccaaagagcctccaagcacacacatgtcctccgtgagaggacacagcaagatggtgacagtctccaacctggaaaagggccctcatcagaacctgaccatgctggtaccctcttctcagacttccagcctccagaactgtgagcaataaatgtttgtggtttcagccaccggtctatggtactttgttacagactaaggtaagaataaattaaggagtgtgtgcaaaacacaatagagtatggtacaaaaatgcgctcaataaatgtggccaggctcctctcttttgaaggattcatgaataatcctaaataatatactaaaatgtcatgttggataaggtatttacaaaaatcttattcaatggaatttgtaggcaactgaagcatttccttcatttactattgttaataactattagtagtgtttaatattatgtcaggtgcatttttctttcttacggttataactaaacttacttctttgtagctgcagagtattccatgaaatgaacgtggtataattacttaaccatttccaccatcctgaacaataattgtggtcaaggtacacagccttcgattgtagaccaatgggtctaaatgtctttggggcatgtccatccttcttaatgccatgaaattacagagtatctccttagggtggtggtggtgggggacagatacactaacactgataatcacatacagtaaatatacacagaatgtcccttggaaagttgtaagtggagttaaaggcaggccctcaggttaaggataacagttctaggccatttgaggctgtggttcattttgtgaacctgcaaacacccatcccagttaccttcatatgtacgttgctcctgatgtacagacatccagacttagcacaaaacagcagcactcactgtgcactcccactcaggggtgcgcgtctatgggttttatgcgtgttaatgcatttcaccctcctcacaagcctatcttcagaaggctcaaaaagctaagaggcagaaacaggactcaaatcttggtcatctacctttaatgtttggtcttaagtcttataaacacatatcatttaatataaaaaaaaaaggatactcacctgaccctttcagatgtttaacgattcgtcttcctcctcggggatgctttttctgaaggatgctggcctggggaaaacagaaccggaagggtaacacctgccatacctaataaaaccaatgagaaatacgaggccccgagatggagtttctgggagattcctgaagagcacgctgtggcgattgagatgatgacgcgtggagctgcccccctccctgtctcccacatcagggacctgtccctctacaggaggaattctactcctgaggccaccgtcccctgtcactcaggtggcctgcatgcacagcacttctggctctgaaagcgtcacctcatggctgtttctgccttcttgctggtgaatttccaggcgaggctcaggcgctcacgtccctccgcggcccttgttctcaggcaggtaccgcttggttaggaggtgaaggcaggggaagcagcagagacgctggagctacaagttgcactgtcacacacacctgcatcactcagaaggcccgatcatccatcccagcacagagacgctgaagctacaggttgtgttgtcacacacacctgcgtcacccagaaggcccgatcacccatcccagcacaagtctgcacagctcagcctcaccacagctcactctgtcctgagacacatctgcgcccctcatacccactaacgcccagcacggccatgctacgggccccaccaccccacacggtgcagaggtgcatccgtgggccacggagacccgtcccgaccgctgcccccgcacaacccccagagcgcacctcacggagcagagtcccagggacgcaccgccgaggttcacaggcacgggctgcgttgacccaaagcctctggagcacccccggtcaccagttatggggagagcccggctgtgtcaccccacactctccagcaagtgcgtcaccgtcagaagccccgtgcccgtctcccctcggagccacgcgcaccaatctcacctgcgcggactggcggagatgcagcggctgcgtcactggtgcaaacgcgcacccagcacggcccccatcgcccccaatgacgctcgcgtgcacccgtgtcacagttacggggacagggccgccgcgtcagcctcgtactcccacgcaagtgcgtcacacactcggtcccgccaccccctggaggccagcgcgcatgcgcacgcgcacccagcggccgcagcgcgcagacagcagcagagcccgacacgcatgtgcacacagacccctacacgtatgtgcacgtacccagaccccgacacgtatgtgagcgtacacagacccccgatacatagcgtgctcagctgttgacgtgcctgtgcgggcacacagaccctgacgggcgtgtgcgcacgcacagatgccgacacgcatgtgcagacacaacagagcccgacacacacgtgcgcctgcacagatgctgacacgcggacacactgacacgtgtgcgtgcacccctcccatccctttccctcctcccactctcccaaagccgcagacgcacccggtagtcccccaacgctggggcctcgggagagggtgaggctagaagaggacgcggggccgtcgggggaaaccagagccccaagccccgtgttccagcatgcagcacggcgtactcctggatggtctctgggaaatgtagtccgggacggtcccaggcaggggcctcagggcgcgtcccaggtcggtgccggagcgggcagccccaagctaagcccttcctggtccctgcagacgccccttcccgactgggaaaggagctgtgtcaccccagctgggaccccgtctggcctcttgagtggggtgatgccgggcgagccatggctgtcctcagaagggtatcctctcctagcccctctggagcgtcacctggaattctctgcaggccgctagcacaggctgccggagctgctattcggtgtcccttgcttgctgcattgtaaacaatgtacaggtagcagttatgccccgtgagtcccgctctcattccaagtactaacgtcacagggtctacaggatgttgcaggtacttaaccacagtctcattttgactcaaaatcccactttttggtatttatgccaaggaagtagctatagttgtacacaatgttgaagtatgttcacaaaatgctttttttctgaaaatctttttctcttttaattagatagactttagattcatatgtagttacaagaaataaaattgagagatcttgtgtacctttcacctggttacctcagctggtgattgtagtatataataccacaaccagaagattaacattgatgtaatccactgacgttacccagaatttccagagaataattttttgtttgtttgtttgtttgttttgagacggagtttcgctcttgttgcccaggctcaagtgcaatggtgcgatctcggctcactgcaacctccgcctcctgggttcaaggggttctcctgcgtcagcctccccagtagct

SEQ ID NO: 1561368 - DNA, 4001 bp, Homo sapiens
caaaacaaaaacaataaaaaaggcccaacatggtggctcacatctgtaatccaagcactttttgaggccaaggtgggaggaaagcttgagctcatgagatcaagaccagcctgggtaacatagtgagaccctgtctctaaaaaaaaaaaaaattaaaaaaaaaaagtttgcccttttagtcacacagtctatggtactttgttatcacagactgaatcaactaagacaagaattaagaggtgtgtgcaaaatagacaagagacagtttagtacagagaatatgtgcttaataaatgtgaccaggctcctctcttccttcactgaataatcagtcgtcatcttggataggatatttacaaaacgtctaattcaataggatttccttttttttttttttttttttgagatggagtctcgctgtgttgcccaggctggagtgaagcggtgcgatctcggctcactgcaagctccgcctcccgggttcccgccattctcctgcctcagcctcccgagtagctgggactacaggcgcccaccaccactcccggctaatttttgtatttttagtagagacggggtttcaccgtgttagccaggatggtctcgatctccagaccttgtgatttgcccacctcggcctcccaaagtgctgggattacaggcgtgagccactgcgcccgccgactaagtctcataaacacatatgatttaattaaaaaaaaaaaaaagatactcacctgacctaagatgtttaacgattcgtcttcctcctcggggatgctttttctgaaggatgctggcctggggaaaacagaaccagaagggtaacacctgccatacctaataaaaccaatgagaaatacgaggccccgagatggagtttctgggagattcctgaagagcacgctgtggtaactgagatgatgaagcgtggagctgcccctctccctgtctcccacatcagggacgtgtccctctacaggaggaattctactcctgaggccaccgtctcctgtcactcaggcgccctgagtggagagcacttctagctctgaaagcgtcacctcatggctgtttctgccttcttgttggtgaatttcctggcagggctcaggcactcccgtccttccgcggcccttgttctcaggcaggtaccgcttggttaggaggtgaaggcaggggaagcagcagagacgctggagctacaggttgtgctgtcacacacacctgcgtcacccagaaggcccgatcatccatcccagcacagagaagctggagctacaggttgtgttgtcacacacacctgcgtcacccagaaggcccgatcacccatctcagcacagagacgctggaactacaggttgtgctgtcacacacacctgcgtcacccagaaggcccgatcacccatcccagcacacagaagctggagctacaggttgtgttgtcacacacacctgcgtcacccagaaggcccgatcacccatctcagcacagagacgctggagctacaggttgtgctgtcacacacacctgcgtcacccagaaggcccgaccaaccatcccagcacaagcctgcactgatggctcagcctcaccacagcacacactggcctgagacacatctgcgcccctcatacccactaacgcccagcacggccacgctgccggccccgccactccacacagtgcaaaggcacatccgtgggccacggagacccgtcctgatcgccgcccccacatatcccccagagcgcacctcacagaacagagtcccggggacgcactgccgaggttcacaggtgcgggttccgtcgccccaaagcctcgggagcaccccagccctagttatggggagagcccggctgcgtcaccccacaccctctccagcaagtgcgtcaccgctagaagctccgtgcccgtctccccttggagccatgggcgccaatctcacctgcgcggactggcggagacacagcggttgcgtcaccggtgcagaagcgcaccgagcacggcccccatcacccccaatgacgcttgcgtgcacccgtgtcacagttacgggagatagagccgccgcgtcagcctcgcactcccacgcaagtgcgtcacacagtcggtcccgccacccatggaggccagcgcgcatgcgcaccccggactcgggaggggcctcccgcacccagcggccggagcgcgcaggcagcagcagagcccgacacgcatgtgcgtgcacacagatcctgacacgcatgtacacccagaccgcgacatgcacgtgtacgcgcacacagacccccaacgcatgcgtgtggccagaccttgatccgcatgtgcgaccagaccccgacacacatgtgcgcgtgcacagacgctgacacatgcacacactgacacgcgtgcgcgcccttcccactccttccttctttggcctctcccgaagccacaggcgcactcggcggtccccctacccccatgcttggcgcgcacccctgggttcctcctaggaagcgaatgccctactcaggcccaaacacacaggggcttcgggaaggggtgagaggcttgaggagggcgatgtctggggaaaccagagccccaagccccgtgtcccagcatgcagcgccttaagttcctggggggcctctgggaaacgtagtctgggccggtcccaggcaggggcctcagggcgcgttccaggcaggcagccccacactgagtccatcttgctccctgcagacgcccgttcccggctgggagaggggctgtgtcaccccagctgggagcccgtctggcctctgagtggggtgatgccgggtgagccatggctgtcatcagaagggtatcctctcctagcccctctggagcatcacctggaattctctgcaggccgccagcacaggctgcccgaggtgctattcggtgtcccttgcttgctggattgtaaacaatgtacaggcagcagttatgcccagttagtcccgctctcattccaagtactaatgtcacagggtctacaggatgttgcaggtactacttaaccacagtctcattttgactcaaaatcccactttttagaatttatcccaaggaaatagctagagtagtacacacatgtatgcccaagatgtttggagattatcttgtgtgggaaagtttttcttttaaattgatacaaccgtagattcttaggtagttgtacacataatactgagaaagcctatgtatctttcacctggttacaccaattggtgattatagtatacagtataatatcaccgccaggacattcacaatgacatcatccattgatgttatgcaaatttcaagacactaattttttttttttttttttgagatggagtttcactcttgttgcctaggccaggattacaggcatgagccactgcacccagccaagacagtaatttttaaaaatgaaaatcttgcagaagatagaggaaaatatcacagtagagtacagaataaataaattagtctgttatataatggcataaaatacatttactaatagtgatactgattcatgtaaattgaaagacggtatcattaattactaagagaggaaggtaggtttgaaagggtatgtataatttgggaggagatattttggtgaaattaagaacataggctctatgttcttaatttctataactttcagaatgtgaatctgagctctaacagttattaactgcttgtttcctcactagtaaaattgggataataatactataaggtatgactgtctcagctattaaatatcagaatatctaatacatacggcaatatgtaaagattttttaagtttgtggttactattgaagatcagtaacattacactgatcctgaatccagttttaaaaaagaaactcatctgctgtttttaatttttttgaaacagggtctcgctttgtcacccaggctggagagcagtagtgcaatctcaaccacactgcaacctctgcctcctaggctcaagtca

SEQ ID NO: 1561369 - DNA, 4001 bp, Homo sapiens
tataaagtgttagaattaatctcttctgtaccatcagattcttagacaatttttagacattttagaagagggtaggtcaatggagtatacacggaggaatgacctgcaccgccctgtcacatcccttggggaggaattagtgggataaatgactatttgggaagaaatgggcccaaggaaagtaaatagtcttaagttgtataaatacaaatcattgaatgaacaaaaagctaactcacctgaaaccttactttaggacatataacacttcttcttcctcctccgggatgcttttcctgaaggccagctggccggaggggaaaaggaagataagaatgaggcaccaggacctttctggatcacaagctacgttagaaaatagcgcacacgtccaggcgcggtggctcacaactgtaatcccagaactttgggaagccgacgggggcggatcatgaagtcaagagatcgagatcacctatgccaacatggtgaaatcccgtctctactaaaaatacaaaaattagctgggcatggtggcgtgcgcctgtggtcccagctacttgggaggctgaggcaggagaatcgcttgaacctgggaaccgagatcgcaccactgcactccagccctgggcgacagagcaagactctgtctcaaaaaaaaaaaaaacaaagaaagaaaatagggcacacttgtccccagaccacagttaaaatcaatcagaaataagagggcacaggcatgtgagtttttcagagaaatgctggaaaactctaggaactggggttctgaaacatggagctgcccctctcaccacctccccgcctcccatgtcaggtacctctttcttccccaaaaggaattctattcttgaggttacttcctcttgtcgtccaggtagtgtgcacggagagcacttctggctccaaaactgccatctcgtgacttgtgaagccttcttcttggtcattttcacaatagcgtagagcctctcacgtcactttgggaccactgctccctagcaggtaccacatggctggaaggccaaggcacaggaagcaacggagacactagaaagacaggtgacatggtcgcacacacctgtgctcactcaaaaggccatgcacccaggcccgatcccgaccagtcacagccgcacactcgctggccctttcacacccacagacgctcacaccagagggacactgcctgtccctgtcaacctgacagaagtgcaaaggcacatttcagagacacggagacccgtcctggccgtgccacctctgcagaccccaccagcattgacctcgcacagaacggaggtgcagagacacagcccggctgcgtcacccctacagatgcccttacagcccggcgctatggccctcatagacgtctacacacacctgtgtcacagtttatggggacagagcccggccgcgtcaaccccgcatgcatcacggcttaggggaacggggcttgttcgcattaccccacagacgaagacaattatctcagtcactgggccacggcggggccccaccaggcagcctctggcttattcacacacacacacacacacacacacacacactcacacacactcccacttccctgctcgccgctcccgaagcctcaggccgaagcttcttcattttagggcctccgcgtcccgagtggctccctcaccgccattccccgcggaaccctgccctggcttcctcctgggaggcaaatagctcccggctcgaggcctaaccacacccagcacatcaggaggtgaaacaaggtctcaggcgcagttgggataagatccaggagaaaccatttttaaaaatcccgcgagcatgaagcacgcccctcagccggccacccggctcgctcctcattggactgtgccccaaggccctctgggaaatgtaatgcgaaaccagagaagcttcgacgcagctggaagggcgcccgtcagtgtttcccagcatgcaactctacacggcgcaaatggagccgtgacccagaggcctctgggaaatgtagtccataacccggaaatccacagagttggaagcggctgtcaggatttcccagcatgcaactctacgcgaccctaagggcgtcctgccttgagggcttctgggaaatgtagctcataacccgggaatcgacgtatctggaagggcgcccatcagtgtttccctgcaggcaactgcacacggccctaatggagccatgccccagagacctctgggaaatgctcactacgcgggaatccttagcgctggaagcgcggccgtcagaatgcttttcgtcggtgtctcctcccactgttagagcagctgcaccccccatagacttctgggaaagcgtatttcagactggcagaatcttcaaatgctggaagccctgtcggccttctcctgccctgaaactttgcttgctcctaaggcgcaccacaaaaaattcctgggaaaagtggttcaggctctaggggcctacagttataattgcttacaacttgcatttgggatccgtccatagggaaggcgtgtccccgcgtccttctgggaaggaaatgtagtctgaaacgaccagaaatcacgcctgtaatctcagcactttgggaggccgaggcgggtatatcacctgagatcaggagttcgagaccctcctgcccaacatggtgaaaccccatcgctctaaaaatgcaaaaattagccaggcgtggtggtgtgtgcctgtaatcccagctacttgggaggctgagggaagagaatcgcttgaacccaggaggcagaggttgcagtgagccgagatcacaccactgcactccagcctgggcgataagagtgaaacaatgtctcaaaataataataataataataataagcccggaaagcttaaaagctgtgatttgggaaaagttcaaaaatttcccagcatgcaacatggccctccttagaaaagagctgtgcctccagagcgttcttggaaatacagccccgagctggaaatgcctctagaaagtgttaggtagggtgtttacatgtgagattttggggacgtttcagcactgccctttcccccaccccccagtagattggggagctccaggcatgtgtgtagggaccttgagtaggttccacgggagtgacctggtcctgactgggtctgtgccaaggctctctctgtaagggcaggactttgcgtttcgttctctgatgctgtcccagacttgggagcactgcctggctcttcagatgtctctgtgagtgttaccttggtatgggcgggagaggcctgggctgtatggcttgctgcccggcaggatattgacaagatgttcttatgatcaggcggtttggccctttttccggtgggatctcatcaggatgttccttggacctttgccaagaaagatatgatagggatggtttttgtagttgggcctttgcccagtaggacatgatgagaatgtttctttaattgggtctttgttcgccttgtggtcaggtggttaggcaggatatttctcactgcctgaacccctgtgaaatgtttcactttgaccaaggtctgcaaaagagcagggggcttccgaaatggtgcaatttagacaaacactggggtgtgagatgctttgccctaaaaaatatatgctgttgttgggagagaatcattggtgggtgtgactggatttgtgattgtgtggactcatcagggagcctcctggagctcaggtaagggagggcgcctgtgaggtttttggccttcattatgacatggatgagattgtatgtttctatgaacgtgtgggtaagactactgtatagagtacccttgacataagtaactccatcttagaaaaagactccatcttgcattccacagggcactttgccaacagggacaagatgttttgcttaataaataaataataaagactgcatccaaccagataaggatataaacaagcacattcttccaccatctgtcctccccagag

SEQ ID NO: 1561370 - DNA, 4001 bp, Homo sapiens
agaatgactcagtatagctagcctaagaaggaatatgcccacgcacacacaaaacacagtatgaggccaggtatggttgctcacgcctataatcccagcactttgggaggccgaggcgggtggatcacctgaggtcaggagttccagaccagcctggccaacatggtgaaaccccgtctctactaaaaatacaaaaattagccgggcatggtggcgggcgcctataatcacagctgcctgggaagctgaggcacgagaattgcttgaacccaggaggcagaagctgcagtgagccgagattgtgccactgcactccagcctgggtgatgaagtgagactctgtctcaaaaaaaaaaaaaaaaaagacaatatgacaccataaaaatcaaatataagaataacttaaagtgcctgtctttcataagacataatcacacaagtttcaggtacctttaagaaacaatattaattctttttaaaaaggcaaggcaagcgcatatattctttgtggaaacaaacacctcactcgtaaaactgaaatctgatgcatgattttcctctggagttaattttttcctgatttctcagtagacacgagctttaaccccattattaaaaaagacatcccacttatggccaactcaatttgaatttccagtattaacaaagtttatatcgtcttttccctgaagttccattagttttgaagctctgtgattcacatgcttgggggaaggactggagccaacttgaaaagatctgaataacagtcttaggttttcttgataataatatttgtgaaataactgagaaacggcttttcttaacctaacagtgagaaacttgatgcccacagcagaagtaaaagtcgtctcaaacatagaaaataaagaaaaacaaaaacaaaaaaaattaagaactcctccttttgttgttgtttttgtttttgagatggagtcttgctctgtcacccaggctggagtgcagtggcacaatctcagctcactgcaacctccgcctctggggttcaagcgattctcctgcctcagcctcccgagtagttgggattacaggcgcccaccactacgctcggctaatttgtgtatttttagtaaagacagggtttcaccatgttggccaggctggtctcaaactcctgacctcaggtgatccacccgcctcggcctcccaaagtgctgggattataggagtgagccaccaagcctggccaaaagctttcttatgagaaagaaaaaaaagaagaaagaaaaagttatggaaaaggaagagatgcaaagccaagctaacagatattaagctaaaagacttcaaattgtcagtctccaaaagaaatctctcgtcatctaattcattccttaatggaggatgcattcaattttttaagtaaatttggccaatcaattaaaccagtttgcacatgtggacccagacctcactttccagttgcaaagctagataatattaagtatcatatcaaataaaacgtgaattactaattcgcagttatcttgcatactgtaggcaaggtagggccgtctttatgcactttccctaaaaattgggaaggacaggtgagagctggggccggtgtcaccacatttctgagctgtgggacctggactgtttgggatttcccttttgacaggatgacagccctgtctgcccggacggggggtacctgagagcgagagaccgggcggcgggcgcccagatgcgaggccctgactgtgtgggcctcacgccggccaccggctgatcgcagggaggaaacccctcacacaggcggagctgttctaggccctccagtccctccccgcgccagccgagccctccccgccctccccgccctcccgaggggccgggccacacctgcaagccagccggagacactcccaccgtgccgtgccgcaccgcgccgcgccgcgcagcacagctcagccgccgtcggccgccgccgcgcgcacttccgcttccggtctcggggccgccgggaacggaagtggctgtggctcaggctgttgtggccagggtagccttaggcggcggcagagaaactaacgtcttctttagcctccaaggagaaattctagtattcttacccgggggatgaggttaggctctggagtggggtcccacagagcatggagggtggtgctgggggcggagcctatgtccgagagacagggataggggtggggcttaggtcccggggcaaaagtggggcggggcctgtgcgcgggggcggggtggagtgtggcttgccctccgatggctgatgggcggggcttgcaccccaatggcggagtgggcggggccttggtttgcagggtggtagtaggggcgggtcgtgcgcctcaggggcaaaaatggggcggggcttgtgcttggggtgggaatgggagctgaacttgcattcggaaggcgggatgaggggacctgggcttcaagggttgagaggggcacacccgacccctccccgggtctctttagggatgctcaatatttaacttacccttttctccttccttttccccaaccccttccacctttatccatgggcttaatccaatcccctacaaaaatatacccatacttaagattgtttttgtatatttttatacggctgacccttaggcaacgggagttggggcgccaccctgtgcagtggaaaattcacttcttttgactcccccaaaacctacctactaatagactactgttaaccagaagctttaccaataacataaagttagttaacacatattttgtatattatatgccatattcttaaaataaactaagctcagagaaaagaaagtgttattaagaaaatcatgaagaagagaaaatatatttactcttcgttacgtggaagtgatcgtaaagatcataaataaacgtcttcatcgtcagcttcaccctgagtaggctgaggaaagggaggggtttgtcttgctgtcccaaggaggacaaaggtagaaaaaaatctacctataaggggatagccacagttcaaacccttggtgttcacgggtcaactaactgtctttattctaaaaataggacgatgtatttttgtttcttctacagcttgcccttctcactaaaaataagatgtgtgaatctaagacatagatctgactttttaaaaactatttattatgtagtatacatagtacatacctatgggaaaagttcaaacgggaggctcactctattcctaaattttcctcccctgaaacaaccactgtcactagttccctggtattctttatatatcaagcacatgtgcagtcatgcaccacataacaaggttttggtcaaccacgaaacacatacacagttgtgatcccataaggttataatggagctgaaaatttcttatcacctagtgatgttgtaactgtcacaatgttgcagtgcaacacattactcacatttaaaaaggttttaaaaatatgaaaagaccgggcgcggtggcttacgcctgcaatcccaagactttggaggccgacgctggtggatcacttgaggtcaggagttcgagaccagcctggccaacatgatgaaacccccagtctctactagtaatacaaaaattagctgggcatggtggcatgcgcctgtaatcccagctattcgggaggctgaggcaggagaattgcttgaacccaggaggtggagggtgcagtgacccaaggtcttgccattgcactccagcctgtgcaacaagagcaaaactccatctcaaaaaaaaaaatgaaaaatagcttatagaataaggatataaagaaagaaaatacctttatgcagtacaatttatctgtgttttaagctaaatgttcttacaaagaagttgggccgggcggggtggctcatgcatgtaatcacagcacactttgggaggccaaggcaggaggatcgcttgagtccaggagttccagatgaccagcctgggccacatagcaagacactgtctc

SEQ ID NO: 1561371 - DNA, 4001 bp, Homo sapiens
aataatcaacactcctcaagaatgactcagtatagctagcctaagaaggaatatgcccacgcacacacaaaacacagtatgaggccaggtatggttgctcacgcctataatcccagcactttgggaggccgaggcgggtggatcacctgaggtcaggagttccagaccagcctggccaacatggtgaaaccccgtctctactaaaaatacaaaaattagccgggcatggtggcgggcgcctataatcacagctgcctgggaagctgaggcacgagaattgcttgaacccaggaggcagaagctgcagtgagccgagattgtgccactgcactccagcctgggtgatgaagtgagactctgtctcaaaaaaaaaaaaaaaaaagacaatatgacaccataaaaatcaaatataagaataacttaaagtgcctgtctttcataagacataatcacacaagtttcaggtacctttaagaaacaatattaattctttttaaaaaggcaaggcaagcgcatatattctttgtggaaacaaacacctcactcgtaaaactgaaatctgatgcatgattttcctctggagttaattttttcctgatttctcagtagacacgagctttaaccccattattaaaaaagacatcccacttatggccaactcaatttgaatttccagtattaacaaagtttatatcgtcttttccctgaagttccattagttttgaagctctgtgattcacatgcttgggggaaggactggagccaacttgaaaagatctgaataacagtcttaggttttcttgataataatatttgtgaaataactgagaaacggcttttcttaacctaacagtgagaaacttgatgcccacagcagaagtaaaagtcgtctcaaacatagaaaataaagaaaaacaaaaacaaaaaaaattaagaactcctccttttgttgttgtttttgtttttgagatggagtcttgctctgtcacccaggctggagtgcagtggcacaatctcagctcactgcaacctccgcctctggggttcaagcgattctcctgcctcagcctcccgagtagttgggattacaggcgcccaccactacgctcggctaatttgtgtatttttagtaaagacagggtttcaccatgttggccaggctggtctcaaactcctgacctcaggtgatccacccgcctcggcctcccaaagtgctgggattataggagtgagccaccaagcctggccaaaagctttcttatgagaaagaaaaaaaagaagaaagaaaaagttatggaaaaggaagagatgcaaagccaagctaacagatattaagctaaaagacttcaaattgtcagtctccaaaagaaatctctcgtcatctaattcattccttaatggaggatgcattcaattttttaagtaaatttggccaatcaattaaaccagtttgcacatgtggacccagacctcactttccagttgcaaagctagataatattaagtatcatatcaaataaaacgtgaattactaattcgcagttatcttgcatactgtaggcaaggtagggccgtctttatgcactttccctaaaaattgggaaggacaggtgagagctggggccggtgtcaccacatttctgagctgtgggacctggactgtttgggatttcccttttgacaggatgacagccctgtctgcccggacggggggtacctgagagcgagagaccgggcggcgggcgcccagatgcgaggccctgactgtgtgggcctcacgccggccaccggctgatcgcagggaggaaacccctcacacaggcggagctgttctaggccctccagtccctccccgcgccagccgagccctccccgccctccccgccctcccgaggggccgggccacacctgcaagccagccggagacactcccaccgtgccgtgccgcaccgcgccgcgccgcgcagcacagctcagccgccgtcggccgccgccgcgcgcacttccgcttccggtctcggggccgccgggaacggaagtggctgtggctcaggctgttgtggccagggtagccttaggcggcggcagagaaactaacgtcttctttagcctccaaggagaaattctagtattcttacccgggggatgaggttaggctctggagtggggtcccacagagcatggagggtggtgctgggggcggagcctatgtccgagagacagggataggggtggggcttaggtcccggggcaaaagtggggcggggcctgtgcgcgggggcggggtggagtgtggcttgccctccgatggctgatgggcggggcttgcaccccaatggcggagtgggcggggccttggtttgcagggtggtagtaggggcgggtcgtgcgcctcaggggcaaaaatggggcggggcttgtgcttggggtgggaatgggagctgaacttgcattcggaaggcgggatgaggggacctgggcttcaagggttgagaggggcacacccgacccctccccgggtctctttagggatgctcaatatttaacttacccttttctccttccttttccccaaccccttccacctttatccatgggcttaatccaatcccctacaaaaatatacccatacttaagattgtttttgtatatttttatacggctgacccttaggcaacgggagttggggcgccaccctgtgcagtggaaaattcacttcttttgactcccccaaaacctacctactaatagactactgttaaccagaagctttaccaataacataaagttagttaacacatattttgtatattatatgccatattcttaaaataaactaagctcagagaaaagaaagtgttattaagaaaatcatgaagaagagaaaatatatttactcttcgttacgtggaagtgatcgtaaagatcataaataaacgtcttcatcgtcagcttcaccctgagtaggctgaggaaagggaggggtttgtcttgctgtcccaaggaggacaaaggtagaaaaaaatctacctataaggggatagccacagttcaaacccttggtgttcacgggtcaactaactgtctttattctaaaaataggacgatgtatttttgtttcttctacagcttgcccttctcactaaaaataagatgtgtgaatctaagacatagatctgactttttaaaaactatttattatgtagtatacatagtacatacctatgggaaaagttcaaacgggaggctcactctattcctaaattttcctcccctgaaacaaccactgtcactagttccctggtattctttatatatcaagcacatgtgcagtcatgcaccacataacaaggttttggtcaaccacgaaacacatacacagttgtgatcccataaggttataatggagctgaaaatttcttatcacctagtgatgttgtaactgtcacaatgttgcagtgcaacacattactcacatttaaaaaggttttaaaaatatgaaaagaccgggcgcggtggcttacgcctgcaatcccaagactttggaggccgacgctggtggatcacttgaggtcaggagttcgagaccagcctggccaacatgatgaaacccccagtctctactagtaatacaaaaattagctgggcatggtggcatgcgcctgtaatcccagctattcgggaggctgaggcaggagaattgcttgaacccaggaggtggagggtgcagtgacccaaggtcttgccattgcactccagcctgtgcaacaagagcaaaactccatctcaaaaaaaaaaatgaaaaatagcttatagaataaggatataaagaaagaaaatacctttatgcagtacaatttatctgtgttttaagctaaatgttcttacaaagaagttgggccgggcggggtggctcatgcatgtaatcacagcacactttgggaggccaaggcaggaggatcgcttgagtccaggagttccagatgaccagcctgggccac

SEQ ID NO: 1561372 - DNA, 4001 bp, Homo sapiens
aaaaaaaacaaaaaaggggacattcaaatggccaagaatcaatgctcaactttattagcaataaaggaaatttaaattaaatataacattagacacccaccagattggcaaaaatttaagagttttatgatgtctagcatggatgtggagctaagaaaactcttgtaaactgctggcataagtacagtatctttagagaacagtttggcaatgtttggtaaaactgaagatgtacaaaccctacctattagcactttttttttttttttttgagatggagtctcactctgtcaccaggctggagggcagtggcacaatcttggctcactgcaacctctgcctcccgggttcaagcgattctcctcagcctcccaagtagctgggactacaggcgcgtgccaccacgcccagctaatttttgtgtttttagtagagacggggtttcctcatgttggccaggatgatcttgatctcttgacctcgtgatccgcccgccttggccccccaaagtgctgggattacaggcatgagccactgcatccagccactatcagcaatttaatcactaggtatatattctaaagaaatgcaagcaaatgtgtaccaaaatatgcgcacaaaatgatcatagtcacactgcctgtagtagccaaaaattacaagacaaatgtccatcaagagtagaaggataaggccgggcacagcagctcacgcctgtaattctgtctcaaaaaaaaaaaaaaaaaaagaaagaaagaaaaaaaaaagaaaaagaaaaattaaaaccatctgacaaatcagtaagggaaaatcaggtgtgggaggtggggtttgaagacaccacattttctcaaaatggaaactccagggatcaggtcatctcataggcaagaattttcaagagaaggaaagcaactatgtcctgacaaagaaaaagggatttttcttaaacaagaggacaggacaagctaccttgcaggtgccttgtggatgttcaacagccattctttactcctgttcggaggcctctatccaagcagggcagggctgaggaaggagaaagcagtcaggaaacatcaggttcttctgagagggagttggtttgactatgtcagaagttatctttgctcagcccctactgcccatcacctacagaggaaggtcagagaagtctagggcatcctgcttaatccgggcatcacagacaacggtagggtcaatgccgttctgggcagaacctgtccctgagctcacaggggtctccaatggctgaagtcacaaagacaaagactccccatacctacattggctatacggacacatagtcacacaaactcactcacaccgcagggacataaacgtcacaggcaccccaaacctaaacacaacacacaatcacacactcatacacaccacgggggtagacacggacacaaccacagagtccgtgggcatctctcaaattcccagtgacatacaccttggggtcacaatgacaacaaattcacacgcaccctccatcaacaatatcaccaacgcgcgcgcacacacacacacggaagcagccacaaacctcaaaattaaggcatactacacacagttcggcaaatggtagtaaacacacacacacacaccccaaggggacatacagtcacaaccgcggtccaggaacctcacactcgcaaacacagtgcccaacccggtcacaattaaactctactcacacccgcacaaacataaacaaaaagtcctcctccccgccctcacagttccatacacggtcgcacagacacacgcccccagtcacaaccgtacacactcctcacaatcgctccttagcctgttccccacgcagcccacacaggtcgggagttcctgtcgcgccaggctccgagccgcctcacttacgcctgttcggatagggtcagctccgttctactagaatccacacaagtcgaccctagctatctcacaaagccccaaggccgcttgcccaaatccgcgggaagatcccgcccactcctcaagagacaatctagttatcgcgggagagtgccctgggcctagaggcttctgggaagtgtagtccagaaagcgacaggttgccgaaagctacagcccagccatcccgattcccctggcgcggactctggcaccaacaaaactatctctttgaggtgagctgcccatcggagccttccgggagtctcacctgacaaggagtccctagaccaagctttagtcaggctcctctgagccctttttgcttggccaggcctcctccatagcctgcgaacagcacttcagcaagaatccagctaagccagtttagtaacaatccccccactcttgatacttaacttcctcttagtaatttagcatcctttaactccttcacccagcccgttagctataaatctccagctgctgttgtattggaagttgactattgcaatagtctttaaccaagtccttcttgcctgtttaagtcctctggggcaagctttctttcaccccgcccagcctcagagggcggctcccgggcttccgcccctcctcgggagacatactggaccgcagggtctcctgggaaacgtagtccaagcctcgccggggatagatgggcccaactaaagtgtgctgcgttctctgggtcctgaggcggcagtctggccgcagtgaccagactaactgtgccccggaggctgcttggaattccacttaacgctggaagcacgcagacgctcttgaggcgggcagctgcgtagcgtgtggaggagccgggagagcgcaccccaatgtggcacctgagcgtctgggaccgaaccagcatggggagtcggaaggggacaaatccgcgatcccagtcatgcatgtgagactgggcaaaggaaggctcgagtgtgtgtgagaccgcggtgggcctgcttgtgctggtgggatgaggggtgtctgggtagttgagtgaaagaaaccgcgtgcgggtcagattggtgtgtgtgtgagagaagtgaggtcaagatgtgtgcagctttgggcgtggggaggtcatattgagtgtgtggaggtggggggggcaagatcgtgtatggatctgtgtatgagtgtgtgtaatcacctgaatgtgggtcactgcgtgggtagctgatactatgactgtggaggaatctgaacctccaagtctcattttctctttaaattgtgataacaaggttgtatcttcctggtgcagcagttttaaaggggggaagctccattactgatataataaaatagcattttttatgtaaacatttaacattcagacatttcttctgaactagagtacaaaatcagttatgagtactccaagtagtttaaaaaagaaacccgtcataatagatgcatatggggaagataaatagtgaaaggggaacttccttttcactatactcttgttaaatttttaaaatcaatgtgaggactcatttgaaaacaaatataaaattaaaaaactgacagaaaggggagctaggaggaaatcaataattttttaagctagaaactttgggaggtggtagaggttgccgaaatatgatggcaggaagtgtatgacaacaggaaatgctgatgtaaaatataatcctgaagcttttaacaatggcaggaagggccgggcatggtggttcatgcctgtgatctcagcactttggaaggctgaggcaggaggatcacttgagctcaggagtttgagaccagcctgaacagcatactctctacaaacaaaacaaaacaaaaaaaccaagcatgagtgcggtggctcacgcctgtaatcccagcactttgggagactgaagtgggtggatcacttgagcccaggagttcaagaccagcctggccaatatggtgaaaccccgtctctactaaaaatacaaaattagctgggcgtggtggtgtgcacctgtaatcccagctactttggaggctgacgcaggagaatggcttgaacccggcagacagag

SEQ ID NO: 1561373 - DNA, 4001 bp, Homo sapiens
ataataactggatacacactcgggagaaaaatgaaattcaatcctaccctataaaaattccaggtggtgtaaagacctaaacattaaagcctaccctagaaagctttcggcttggccaggtgcggtggcttatgcctgtaatcccagcactttggaaggctgaggtaggcagatcacctagttccaggccagcctgaccaacatggagaaaccctgtctctactaaaaatacaaaattagccaggtatggtggtgcatgcctgtaatcccagctacttgggaggctgaggcaggacaatcacttgaacccaagaggcggaggttgtggtgagccgagatcatgccattgcactccagcctgggcaataagagcgaaacttcgagtcaaaaaaaaaaaaaaaaaaaagaaagaaagaaagcaagcttttggctttaagaccaaagaaaatcttcattatcttgaggtagacaaaaatttcttaaacaagactaaccataggaaatgattttattacaatgaaatccagaacttctatttgtcaaaaggcaccacatagagtgaaaagtcaaaccagagcaggtgaaaatacttatcacacatacaactgaaaaaagattaatttacagaagatatatacacatatgtacaactgccgtaaatcagagaaaaacccaattaaaaattggtcaaatatttgaacaacaccttataaaaggggacattcaactgcactccagcctgggcaatagagactcagtctcaaaaaaaaaaaacaaaaaaaacaaaaaaggggacattcaaatggccaagaatcaatgctcaactttattagcaataaaggaaatttaaattaaatataacattagacacccaccagattggcaaaaatttaagagttttatgatgtctagcatggatgtggagctaagaaaactcttgtaaactgctggcataagtacagtatctttagagaacagtttggcaatgtttggtaaaactgaagatgtacaaaccctacctattagcactttttttttttttttttgagatggagtctcactctgtcaccaggctggagggcagtggcacaatcttggctcactgcaacctctgcctcccgggttcaagcgattctcctcagcctcccaagtagctgggactacaggcgcgtgccaccacgcccagctaatttttgtgtttttagtagagacggggtttcctcatgttggccaggatgatcttgatctcttgacctcgtgatccgcccgccttggccccccaaagtgctgggattacaggcatgagccactgcatccagccactatcagcaatttaatcactaggtatatattctaaagaaatgcaagcaaatgtgtaccaaaatatgcgcacaaaatgatcatagtcacactgcctgtagtagccaaaaattacaagacaaatgtccatcaagagtagaaggataaggccgggcacagcagctcacgcctgtaattctgtctcaaaaaaaaaaaaaaaaaaagaaagaaagaaaaaaaaaagaaaaagaaaaattaaaaccatctgacaaatcagtaagggaaaatcaggtgtgggaggtggggtttgaagacaccacattttctcaaaatggaaactccagggatcaggtcatctcataggcaagaattttcaagagaaggaaagcaactatgtcctgacaaagaaaaagggatttttcttaaacaagaggacaggacaagctaccttgcaggtgccttgtggatgttcaacagccattctttactcctgttcggaggcctctatccaagcagggcagggctgaggaaggagaaagcagtcaggaaacatcaggttcttctgagagggagttggtttgactatgtcagaagttatctttgctcagcccctactgcccatcacctacagaggaaggtcagagaagtctagggcatcctgcttaatccgggcatcacagacaacggtagggtcaatgccgttctgggcagaacctgtccctgagctcacaggggtctccaatggctgaagtcacaaagacaaagactccccatacctacattggctatacggacacatagtcacacaaactcactcacaccgcagggacataaacgtcacaggcaccccaaacctaaacacaacacacaatcacacactcatacacaccacgggggtagacacggacacaaccacagagtccgtgggcatctctcaaattcccagtgacatacaccttggggtcacaatgacaacaaattcacacgcaccctccatcaacaatatcaccaacgcgcgcgcacacacacacacggaagcagccacaaacctcaaaattaaggcatactacacacagttcggcaaatggtagtaaacacacacacacacaccccaaggggacatacagtcacaaccgcggtccaggaacctcacactcgcaaacacagtgcccaacccggtcacaattaaactctactcacacccgcacaaacataaacaaaaagtcctcctccccgccctcacagttccatacacggtcgcacagacacacgcccccagtcacaaccgtacacactcctcacaatcgctccttagcctgttccccacgcagcccacacaggtcgggagttcctgtcgcgccaggctccgagccgcctcacttacgcctgttcggatagggtcagctccgttctactagaatccacacaagtcgaccctagctatctcacaaagccccaaggccgcttgcccaaatccgcgggaagatcccgcccactcctcaagagacaatctagttatcgcgggagagtgccctgggcctagaggcttctgggaagtgtagtccagaaagcgacaggttgccgaaagctacagcccagccatcccgattcccctggcgcggactctggcaccaacaaaactatctctttgaggtgagctgcccatcggagccttccgggagtctcacctgacaaggagtccctagaccaagctttagtcaggctcctctgagccctttttgcttggccaggcctcctccatagcctgcgaacagcacttcagcaagaatccagctaagccagtttagtaacaatccccccactcttgatacttaacttcctcttagtaatttagcatcctttaactccttcacccagcccgttagctataaatctccagctgctgttgtattggaagttgactattgcaatagtctttaaccaagtccttcttgcctgtttaagtcctctggggcaagctttctttcaccccgcccagcctcagagggcggctcccgggcttccgcccctcctcgggagacatactggaccgcagggtctcctgggaaacgtagtccaagcctcgccggggatagatgggcccaactaaagtgtgctgcgttctctgggtcctgaggcggcagtctggccgcagtgaccagactaactgtgccccggaggctgcttggaattccacttaacgctggaagcacgcagacgctcttgaggcgggcagctgcgtagcgtgtggaggagccgggagagcgcaccccaatgtggcacctgagcgtctgggaccgaaccagcatggggagtcggaaggggacaaatccgcgatcccagtcatgcatgtgagactgggcaaaggaaggctcgagtgtgtgtgagaccgcggtgggcctgcttgtgctggtgggatgaggggtgtctgggtagttgagtgaaagaaaccgcgtgcgggtcagattggtgtgtgtgtgagagaagtgaggtcaagatgtgtgcagctttgggcgtggggaggtcatattgagtgtgtggaggtggggggggcaagatcgtgtatggatctgtgtatgagtgtgtgtaatcacctgaatgtgggtcactgcgtgggtagctgatactatgactgtggaggaatctgaacctccaagtctcattttctctttaaattgtgataacaaggttgtatcttcctg

SEQ ID NO: 1561374 - DNA, 4001 bp, Homo sapiens
ttacaggcatgagccactgcatccagccactatcagcaatttaatcactaggtatatattctaaagaaatgcaagcaaatgtgtaccaaaatatgcgcacaaaatgatcatagtcacactgcctgtagtagccaaaaattacaagacaaatgtccatcaagagtagaaggataaggccgggcacagcagctcacgcctgtaattctgtctcaaaaaaaaaaaaaaaaaaagaaagaaagaaaaaaaaaagaaaaagaaaaattaaaaccatctgacaaatcagtaagggaaaatcaggtgtgggaggtggggtttgaagacaccacattttctcaaaatggaaactccagggatcaggtcatctcataggcaagaattttcaagagaaggaaagcaactatgtcctgacaaagaaaaagggatttttcttaaacaagaggacaggacaagctaccttgcaggtgccttgtggatgttcaacagccattctttactcctgttcggaggcctctatccaagcagggcagggctgaggaaggagaaagcagtcaggaaacatcaggttcttctgagagggagttggtttgactatgtcagaagttatctttgctcagcccctactgcccatcacctacagaggaaggtcagagaagtctagggcatcctgcttaatccgggcatcacagacaacggtagggtcaatgccgttctgggcagaacctgtccctgagctcacaggggtctccaatggctgaagtcacaaagacaaagactccccatacctacattggctatacggacacatagtcacacaaactcactcacaccgcagggacataaacgtcacaggcaccccaaacctaaacacaacacacaatcacacactcatacacaccacgggggtagacacggacacaaccacagagtccgtgggcatctctcaaattcccagtgacatacaccttggggtcacaatgacaacaaattcacacgcaccctccatcaacaatatcaccaacgcgcgcgcacacacacacacggaagcagccacaaacctcaaaattaaggcatactacacacagttcggcaaatggtagtaaacacacacacacacaccccaaggggacatacagtcacaaccgcggtccaggaacctcacactcgcaaacacagtgcccaacccggtcacaattaaactctactcacacccgcacaaacataaacaaaaagtcctcctccccgccctcacagttccatacacggtcgcacagacacacgcccccagtcacaaccgtacacactcctcacaatcgctccttagcctgttccccacgcagcccacacaggtcgggagttcctgtcgcgccaggctccgagccgcctcacttacgcctgttcggatagggtcagctccgttctactagaatccacacaagtcgaccctagctatctcacaaagccccaaggccgcttgcccaaatccgcgggaagatcccgcccactcctcaagagacaatctagttatcgcgggagagtgccctgggcctagaggcttctgggaagtgtagtccagaaagcgacaggttgccgaaagctacagcccagccatcccgattcccctggcgcggactctggcaccaacaaaactatctctttgaggtgagctgcccatcggagccttccgggagtctcacctgacaaggagtccctagaccaagctttagtcaggctcctctgagccctttttgcttggccaggcctcctccatagcctgcgaacagcacttcagcaagaatccagctaagccagtttagtaacaatccccccactcttgatacttaacttcctcttagtaatttagcatcctttaactccttcacccagcccgttagctataaatctccagctgctgttgtattggaagttgactattgcaatagtctttaaccaagtccttcttgcctgtttaagtcctctggggcaagctttctttcaccccgcccagcctcagagggcggctcccgggcttccgcccctcctcgggagacatactggaccgcagggtctcctgggaaacgtagtccaagcctcgccggggatagatgggcccaactaaagtgtgctgcgttctctgggtcctgaggcggcagtctggccgcagtgaccagactaactgtgccccggaggctgcttggaattccacttaacgctggaagcacgcagacgctcttgaggcgggcagctgcgtagcgtgtggaggagccgggagagcgcaccccaatgtggcacctgagcgtctgggaccgaaccagcatggggagtcggaaggggacaaatccgcgatcccagtcatgcatgtgagactgggcaaaggaaggctcgagtgtgtgtgagaccgcggtgggcctgcttgtgctggtgggatgaggggtgtctgggtagttgagtgaaagaaaccgcgtgcgggtcagattggtgtgtgtgtgagagaagtgaggtcaagatgtgtgcagctttgggcgtggggaggtcatattgagtgtgtggaggtggggggggcaagatcgtgtatggatctgtgtatgagtgtgtgtaatcacctgaatgtgggtcactgcgtgggtagctgatactatgactgtggaggaatctgaacctccaagtctcattttctctttaaattgtgataacaaggttgtatcttcctggtgcagcagttttaaaggggggaagctccattactgatataataaaatagcattttttatgtaaacatttaacattcagacatttcttctgaactagagtacaaaatcagttatgagtactccaagtagtttaaaaaagaaacccgtcataatagatgcatatggggaagataaatagtgaaaggggaacttccttttcactatactcttgttaaatttttaaaatcaatgtgaggactcatttgaaaacaaatataaaattaaaaaactgacagaaaggggagctaggaggaaatcaataattttttaagctagaaactttgggaggtggtagaggttgccgaaatatgatggcaggaagtgtatgacaacaggaaatgctgatgtaaaatataatcctgaagcttttaacaatggcaggaagggccgggcatggtggttcatgcctgtgatctcagcactttggaaggctgaggcaggaggatcacttgagctcaggagtttgagaccagcctgaacagcatactctctacaaacaaaacaaaacaaaaaaaccaagcatgagtgcggtggctcacgcctgtaatcccagcactttgggagactgaagtgggtggatcacttgagcccaggagttcaagaccagcctggccaatatggtgaaaccccgtctctactaaaaatacaaaattagctgggcgtggtggtgtgcacctgtaatcccagctactttggaggctgacgcaggagaatggcttgaacccggcagacagaggttgcagtgaactgagatcgcaccactgcactccagcctggatgacagagtgagactccgtctcaaaaaacccccaaaaaacaaggggacctcctctttcggctttggagccaccacccccccaacccccatctctgtatgggggaacttcttccttctgtcttctcccttccttcttgcctattaaactctccgctccttaaaacaaaacaaaatacaacaaacaaacaaacaaaaagacccaaaaaacaaaaacaacaaaatttggactatacaggcaagcgatctatacctaatgtggctctgttgctctagttctccagcatcacattcctgtacagctccatctgaacatcttttaattatggctaaggctcttggttgagtgaggcaatcacatttttgtatgtttaccccaccaatgtctcctaaaaaacagaaaaaagaaaacgcctgtggggtagtccgggaaataagctgtttgaactcagccctttgtgtttctatgaaggcttcat

SEQ ID NO: 1561375 - DNA, 4001 bp, Homo sapiens
accctattccaggaaaagggaagtgggtggactcaaaactaaatgagcgaagtcactgccctctggtttgaatagtgattgcaaatgaagctataccctaatactaataattgtcaaatgcacgtgttacgcattttacataaaggagtttcttccattctcatttgcaactgcataatttaagtaaacgtattttaaatgtgttgcattattttaaacccagaaaccaatgtcacaatgtcatcatcacatctaatcaacgcaccactcacctggactcagggtccctctcttgcttccatactgtgtgtttccctccctcatcctctacatagctctcattctcacattagcttattttttattttctgtgtttttcccctggttctttgcgcgtcgttctgagcccctctcatctcctgctatttctccccttcttcctccgcttgcacctgttctgtcccattctggggccttgtttcaactctgattcctctttctccccagtcttttcattgtccccagtctccatatatttctgcctctttcttctcccatctctgctccctctgttgaatctcctcttcccttctacacctcttgccccactctctggcacccccagatcccaggcctccccctgctgtggttctccttctgctctcctcgtcaccggctgtcccctcttgctgtcccagcaccacgctgcttgtctgccctggctccaaatccctcctcctctcccggactctgtctgaggagcctcccactttctggccctctccctaccttgctgtccttcatgtctctggacatcgagcttttctctacatttccccagttgcttttctccttctgccttctcagctccttctcttaccatctgcaaatccctcgcccatcctctactttgccatctggttacgggtttccctcactctttcctctcagtttttctacttctctctctgtctctgcccctttctctacctgctaatccccttggtccacacattcacaggaaggtttggactaagacgcctgcatcttggaggagcgcattttccaggggctggagctgggcaggcaagaacaccgggtgtcacaggacaggccccgggcacctccccagcgcgggctcaggagaagcggggactgcgaaggggaggcctggggagcagcagggcccggcacgaggaggagggaggtggcggggcgacggcgccttagaagaggggtggggtctgcaggatgccaggaccaggcagaggacgcggcctcgccggtaccggggctgaggagctgcgctccaggggccgacgagggcgaggctgggaggcacccagggcgggaatccacctcgcgggcgaggactttaaaaagcccggggcgggaggaggggtcaggaaagggttttaagcgggaggaagacgcgaaaggccggggacagggagaagcctcagagctacttcaacccaaagagaagcgactccgaacccacaccgcgagtcagctggggtggagggcgcggtgcggggatcttaaggtctgtagctgccgggcgcagtggctcacgcttgtaaccccagcactttgggaggccgaggcgggcggattacctgaggtcaggagttcgagatcagcctgggcaacacggtgaaaccccgtctctactaaaaatacaaaattagccgggcgtggtggcacatgcctgtaatcccagctactcgggaggctgaggcaggagaatcgcttgaacctgggaggcggaggatgcggtgagccgaaatcgcgccattgcactccagcctggacaacaagagtaaatctccgtctcaccaaaaaaaaaaaaaaagaaaaaaaaaaaggtctgtagcgagcccgggaactggctgcggaaacggggcacggcggttcgcaagtttaatccatactgagggacactcacgctcggcggcgtcacccgcacccaacacgatccgcttccggaactgcagaaaactgcgcgtgcgcggaaaagagcccgggcactctgggggcggggcctggggagaggcggggtctgcggacgaaacgctggggcggagctggggcggggtctgcgcttccctcagcctgcctagcccgcagtctcatttttcccggtttagaaacgctggagtgttcactatgtccccgggagcaccgttccaatttgaagcagttttaaggtgaaagaatagacttacgtggaccacttatgatagaaaccaaaatgatttcctcttaccaagttgaaaacggtttatgttaaaattgtttgccggcgggttggacccagtcctgctagggagtctgctgcagctcaggaacggggatctgggaatcggggatctcggtctgggaactgggatcttagtggaggatccacgaggcacggcgattggatccagcaattcctgcaattaaaatgtatttaatttaactaaaatgtctggaaattatctctgaggatgattcaaagtagaatgggaaatgcagcatcctacctggacggatatgcaatttaatgcagtagcccaacagaacctcctttacatttcaaatccccattctccccagtggaagagtcaagcctgtgctcaattcatgggaaggttaaggccgataagttagatcaccaagggctgctttattgttctttaaaacatatatttttgtaaagatgggagtctcggcccaggctggtctccaactcttgacctcaagcaatcctcctgcctgggcctccaaaattgctgggattacaggagtgaactactgtgcccagtcaactactgatttaaaccatgtgaatttttaaaaaatagagataaactgcattatttttgcttatattcgttattccgttccacacttgaaatgacttaaccacaaacaactttgacataatctttctttgcatcaaaatatgcttaaatcaataatttctaaatatcatgtaatttcaaattcactttatgggcattctgaagggaacttgacacagtactttttattttaaaattgtaatctatattgggtctatttttttgttttctgtttcttaatgttctatcagatgtggataacagagtgtggaaaatagtcaccacatgacaattggatttattttcgcctaaagaatagttttccagtatttctaacgtaccatcccagtacattgactgaactaaagactcacagggatacccttttttcatgtttatagagaacctagtttatacctgctattgtcttatgtacattttcatgtcacacaattttatctccaaacaacacccttatttatatacaccgtatagttttcactttaacaaaatattaaacgtttcatctgggttacaatatatgaaagaaaaaaataaaagggaaaatcatattaaaaaataaaaagtaattttactacaattgaacataaaccatgaaatatattgctcaataccataaactgaaaataacatttccatagcctttggagaaatgcccttccagtaaaactgcttaatcatatttattatgtaagaaacttttccacagattttcactgagttagtataaaaacatcttaggcattataactaaacaggatttcaaaaacattttcaacagttgtgttatttttaatgagtcctatgggtacagcggaagaataaatgtagaatattactatcaagaaaactagggcagggcgtggtggctcacacctgtaatcccagcactttgggaggcagaggcgggtggatcacttgaggtcaggagttcgagaccagcctggccaacatggtgaaactgtctctactaaaaatacaaaaattagccaggcgtggtggcacatgcctgtagtcccagctacttgggaggctgaggcaggagaatcacttgaacctgggaggtggaggttgcagtgagccgagatcacgccactgcattccagccccggtgacagagcaagcctccgt

SEQ ID NO: 1561376 - DNA, 4001 bp, Homo sapiens
caggaaaagggaagtgggtggactcaaaactaaatgagcgaagtcactgccctctggtttgaatagtgattgcaaatgaagctataccctaatactaataattgtcaaatgcacgtgttacgcattttacataaaggagtttcttccattctcatttgcaactgcataatttaagtaaacgtattttaaatgtgttgcattattttaaacccagaaaccaatgtcacaatgtcatcatcacatctaatcaacgcaccactcacctggactcagggtccctctcttgcttccatactgtgtgtttccctccctcatcctctacatagctctcattctcacattagcttattttttattttctgtgtttttcccctggttctttgcgcgtcgttctgagcccctctcatctcctgctatttctccccttcttcctccgcttgcacctgttctgtcccattctggggccttgtttcaactctgattcctctttctccccagtcttttcattgtccccagtctccatatatttctgcctctttcttctcccatctctgctccctctgttgaatctcctcttcccttctacacctcttgccccactctctggcacccccagatcccaggcctccccctgctgtggttctccttctgctctcctcgtcaccggctgtcccctcttgctgtcccagcaccacgctgcttgtctgccctggctccaaatccctcctcctctcccggactctgtctgaggagcctcccactttctggccctctccctaccttgctgtccttcatgtctctggacatcgagcttttctctacatttccccagttgcttttctccttctgccttctcagctccttctcttaccatctgcaaatccctcgcccatcctctactttgccatctggttacgggtttccctcactctttcctctcagtttttctacttctctctctgtctctgcccctttctctacctgctaatccccttggtccacacattcacaggaaggtttggactaagacgcctgcatcttggaggagcgcattttccaggggctggagctgggcaggcaagaacaccgggtgtcacaggacaggccccgggcacctccccagcgcgggctcaggagaagcggggactgcgaaggggaggcctggggagcagcagggcccggcacgaggaggagggaggtggcggggcgacggcgccttagaagaggggtggggtctgcaggatgccaggaccaggcagaggacgcggcctcgccggtaccggggctgaggagctgcgctccaggggccgacgagggcgaggctgggaggcacccagggcgggaatccacctcgcgggcgaggactttaaaaagcccggggcgggaggaggggtcaggaaagggttttaagcgggaggaagacgcgaaaggccggggacagggagaagcctcagagctacttcaacccaaagagaagcgactccgaacccacaccgcgagtcagctggggtggagggcgcggtgcggggatcttaaggtctgtagctgccgggcgcagtggctcacgcttgtaaccccagcactttgggaggccgaggcgggcggattacctgaggtcaggagttcgagatcagcctgggcaacacggtgaaaccccgtctctactaaaaatacaaaattagccgggcgtggtggcacatgcctgtaatcccagctactcgggaggctgaggcaggagaatcgcttgaacctgggaggcggaggatgcggtgagccgaaatcgcgccattgcactccagcctggacaacaagagtaaatctccgtctcaccaaaaaaaaaaaaaaagaaaaaaaaaaaggtctgtagcgagcccgggaactggctgcggaaacggggcacggcggttcgcaagtttaatccatactgagggacactcacgctcggcggcgtcacccgcacccaacacgatccgcttccggaactgcagaaaactgcgcgtgcgcggaaaagagcccgggcactctgggggcggggcctggggagaggcggggtctgcggacgaaacgctggggcggagctggggcggggtctgcgcttccctcagcctgcctagcccgcagtctcatttttcccggtttagaaacgctggagtgttcactatgtccccgggagcaccgttccaatttgaagcagttttaaggtgaaagaatagacttacgtggaccacttatgatagaaaccaaaatgatttcctcttaccaagttgaaaacggtttatgttaaaattgtttgccggcgggttggacccagtcctgctagggagtctgctgcagctcaggaacggggatctgggaatcggggatctcggtctgggaactgggatcttagtggaggatccacgaggcacggcgattggatccagcaattcctgcaattaaaatgtatttaatttaactaaaatgtctggaaattatctctgaggatgattcaaagtagaatgggaaatgcagcatcctacctggacggatatgcaatttaatgcagtagcccaacagaacctcctttacatttcaaatccccattctccccagtggaagagtcaagcctgtgctcaattcatgggaaggttaaggccgataagttagatcaccaagggctgctttattgttctttaaaacatatatttttgtaaagatgggagtctcggcccaggctggtctccaactcttgacctcaagcaatcctcctgcctgggcctccaaaattgctgggattacaggagtgaactactgtgcccagtcaactactgatttaaaccatgtgaatttttaaaaaatagagataaactgcattatttttgcttatattcgttattccgttccacacttgaaatgacttaaccacaaacaactttgacataatctttctttgcatcaaaatatgcttaaatcaataatttctaaatatcatgtaatttcaaattcactttatgggcattctgaagggaacttgacacagtactttttattttaaaattgtaatctatattgggtctatttttttgttttctgtttcttaatgttctatcagatgtggataacagagtgtggaaaatagtcaccacatgacaattggatttattttcgcctaaagaatagttttccagtatttctaacgtaccatcccagtacattgactgaactaaagactcacagggatacccttttttcatgtttatagagaacctagtttatacctgctattgtcttatgtacattttcatgtcacacaattttatctccaaacaacacccttatttatatacaccgtatagttttcactttaacaaaatattaaacgtttcatctgggttacaatatatgaaagaaaaaaataaaagggaaaatcatattaaaaaataaaaagtaattttactacaattgaacataaaccatgaaatatattgctcaataccataaactgaaaataacatttccatagcctttggagaaatgcccttccagtaaaactgcttaatcatatttattatgtaagaaacttttccacagattttcactgagttagtataaaaacatcttaggcattataactaaacaggatttcaaaaacattttcaacagttgtgttatttttaatgagtcctatgggtacagcggaagaataaatgtagaatattactatcaagaaaactagggcagggcgtggtggctcacacctgtaatcccagcactttgggaggcagaggcgggtggatcacttgaggtcaggagttcgagaccagcctggccaacatggtgaaactgtctctactaaaaatacaaaaattagccaggcgtggtggcacatgcctgtagtcccagctacttgggaggctgaggcaggagaatcacttgaacctgggaggtggaggttgcagtgagccgagatcacgccactgcattccagccccggtgacagagcaagcctccgtctcaaaaaa

SEQ ID NO: 1561377 - DNA, 4001 bp, Homo sapiens
gcctgatccttgtcattgagcaaagaaaatatactcagatgcaacaggaaagaccctcaccaataatgagcaaaagaaggctgacacaaaaaaagagtgatgtacaattccactgatatacagagtttaaaataggcaaaactgtattaactacaatgataaataatgattaattatataaagaaaagcctaaaatacttttcggtgtgagaatggaaaaagactcacagaacaccactggtgtgctgaccatattctatttcttgacctgggcaatgactgcttatacatatattgcctccatgataattaaattgtacatttaaaatatataaatgtagaaaaattaacaaagtaaaggaagagatcaaccataccaaacagtttacctccaggaaaggtgttaactccagacaacacaacgggtgaattttacaggtgggtaataaaacaagaacgtccactaacaccctattttcctactttatactggaaagttgagccaatgcattaagataagaatgaattataagcattacaaagtaagacagaaaattaatgttattttcaggcgatatcatcacgaacatggaaaaagagattcaagaaattacatatttaaaaaagaaaatgctccctcagaaactcccaggcagattttcacatacatagttggctagaattgcaccatacgcctaagctcatttccatgtcaaacctatcactagcaatggcaattggaaccagcaagattggctaagaccaacaaggccttactaagaaactgggatttgggtcgccttgccacagggatgaatacttcacgaaatggagattctgttaagaaagtgtgaatataaggcgggcaagcaacactcactatatattaagaagtgaaggccgggcgcggtggctcacgcctgtaatcccagcactttggaaagccaaggtgggcggatcacctgaggtcaggagttcgagaccaacctgcccaacgtggtaaaaccctgtctctactaaaaatacaaaaactagccgggcgtggtggcgtgggcctgtagtcccagctactcaggaggctgaggcaggagaatcgcttgaacccgggaggcggagattgcagtgagccgagatcgcgccattgcactccagtctgggagacaaaagtgaaactccgtctcaaaaaataaaaaaaataaataaaaaataaaagaagtgaatgcagaggttggcaacattttcgattttgccggccacgaggtctctgtcacaacaactcaaccgctgcctttgcagccatagacaatatataatcggagggtatgactgaacttgaccccccgatctgtaaatagccaccccaaggatcagaagagtagatatatggtttcgaactaatgctgggggctgtgtcgccttttgccccagtaaccgaggttcgaacctcaacccaggacccagggctccaaagtctcgaaagcttcagccctcacaagcctttgtaccacagacactggccccatgcctcttactcatccgaaccacggaccagacactctacagcgatggacatcctcccagactccaacatcactgagttccaaattaaatcctgaacccgaagcagacgccgcatcgatcctaatcgccacctccatcctttacaagcagagtgatccataccttgacagttaggacacggccgttgatcactacagacccttagtcactgtactcacaccaaaggcacgcggaccacagacagggggatcacagactcccaccaggtacctcccaaatgcctataccccggcgctccccagtcttcctgccaaaaactatgtggtccagggtacaccacgtcctcagatctcccaaaccttccactgagacaaaacctgaactaggacaaaaaactttcagggacaaaaccacacactgacctctattttctccagatacacaagaagggcctcaacgttacacttccgtaaactgctcctacttctggagtcctcgcacgggtttatggtccacctacggcggccgaggagaacctaaaatgtttaaaagagcaaggacaagcgcatttacggcatttcctactctgtaaaatggccgcgcccatagccgtggctcctgacggcagccatgtttgaaaattggacgcacagaaggcagtggcaggtttttgagccaggagccagggaagaagagaagtcactgaaatcgcctcgtttcctggcacttaaagtcttgcgaaagggggcagattttcagagactcaggctttatcaggcaaatatggggcaagctaaattgcctttagcgcttttccatccactttgttaaatttaaaaaaaaaggttttgaaaaagacaagtaacagtgcagccaggtgtaggtatcccagagaatgaattggaaatggaaaaggtaacagatcaggtagaaagggaaaaggcaacacatcaggtaggcagacacccacgggaaagcgtctggcgaaaattagcttgcaggaagcggtttttaagaacagaaaaatagcaggtattcgggggggcgggtggtgaagaaagaaaaaaattataattttttttgagacggagtcttgctctgtcgccaggctggagtgcagtggcgagatctgggctcactgcaacctctgcctccctggttcaagcgattctcctgccttagcctcccaagtagctgggactacaggcacgcgccaccacgcccagctaatttttgtatttttagtagagactggctttcaccatgttggccaagatgatctcgacctcctgacctcgtgatctgcctgtctcggcctcccaaagtgctgggattacaggtgtgagccaccgcgcctggcctcgaaaaaatgattattatttacaaaaaagaagaagaagaaggaggaagaggaggaggagaaggaagagaaaagaggagaaaagaagagaaaagaggagaggagaggagagaaaagagattttgagaatgaattacgatgtgagcctggccacgacagactaaaggaattgggcctcctagaaaggccacttttagtaaaggtgccaatgggaagagcagagccagaattgagagtataaaaatattgttaagagtttttgacaaaagtgccaagacaattcaataagaatagtcttttcaacaagcggcactgggataattggatatccacatccagaaaaatgagttaggaccctcaaaccatacacaaaagttaactcaaaatagatcatagatctaagtttaagagaaagtataaaacttagagaaggaaaagggagataatcctcatggacgtgagttaattctgagaggagagtaaaggatgacccacaaaacaaaataaaattaataaagtggacttgatttttttttaagtttgtgcttctaaacacaacatttaagaaagtgaagtggggcacggtggctcacacctgtaatcccagcactttgggaggccgaggcaggcggatcatctgaggtcaggagttccagaccagcctggccaacaaagcgaaaccagtctctactaaaaatacaaaaattacccggacgcggtggcgcgcgcctgtaatcccagctactcgggagcctgaggcaggagaatcgcttgaatccgggaggcggaggttgcagtaagccgagatcgcgccactgcaccccagcctgggcgacagagcaagactcctcggtaaagacaccacttcgtcaccctgaattactctgatttttatgggtacaatgagaatagtggacctaggaagaaaaagtttttaaatagaaaccttcaggacagatttggacttgaaagactgacaggaagtgtttccagcatccagttagtctcaaagcaaccactaaccttcaactgcacacctgaaagcctccagcctcattacattctcaaacacagacaagccccgtcttcctctaaataaaattgccttcaaattcaattt

SEQ ID NO: 1561378 - DNA, 4001 bp, Homo sapiens
tccaacctgggctcctcttgtgggaagctggggtcctgtggaggagacagtcctagcttcctacccccttgctgggcgtccccacatggggaacagtgtgggtgtcagcgtttctgtgctcctgagcacatggcctgaattcttgtcccatacttggaggcggcagattaatttagggggcgagttctggtagggaggcccccctccagcagcagcattctgagctctagaacccatgtctgggggataagaatatggaacaaataacatcaggtatccctcccaagtcactggggaaagacaagaagactctggcttgccctctggggaaaagaaaacctgaattccagagctcacagctccaggtgggagtcagtgtcaaatcctctctcttagacagatcggaaatgccctttcctacagccagatagtgagcatggtagagtgatatttgggacccctcctggtgaggagggatgggtagggagactcatgaaccccataggcaggatggtggggacagttgttagtatacctgttttatttatttatttatgtttgagatggggtcttggtatgttgcccaggctggactcaaactcctgggctcaaatgatcctcccacctcagcctcccaaagtatggtgattacaggcatgagccaccatgcccggccagtatacctgttttccctattggctagaaggtcctgcattttaacttctagctggaggataggcaaaaataatacctggggaccctctgaagttaatgggggaacgcctgagtcatctcctcccatggctgggacatggcgggtagtgtcagcacacttgtagcccttcctgcaggaaggatcctgaactgaattgccagcttgtggctaggggcagactgggaggtagagggacaaaagctggaaccacttctggggagcaatgggagcccaggatgacctgccgggaggatgccttgagctccccaccccatggctgggtgttgaggtgtcaacaatgaatgatctgctcctgggagaagctgtggggggacctgtggctccccttctggggaaaggaatacactgagccacaaccccatagctgggagtgtgcaggcaaacagagccgagttcctggacggcggtcctcaacccagaccccatagttggagagtgggggaaacaagacctgggacccctcctgcatcaggggcagaggaacccttagattgcctccaggggaaggagccccctgaattcccatctcttaactggaaggtgggaggagaaatcacttaagtctttcctgagttcccaggggtgagggcaggtggacccctggatcacctccagggaaaggagcttccagaactgcagaccccaagactggaggggcaagggaacaatcgctgggacccttcctagggtcctgggggaagagggaacccctaggtcccccttttgaggacagggcctcctgaactccagaccccaggcgggaggtgggaacaatacctcgaatcaggaggggagggggtcctggatcgcctcctagggagggggcgtcctgagctccagaccccagagctggcgggcgccccccaccccgcccgattgaaggctcccaacctcctggccctttccccccgggccccagcggcgggatgggtgcgctaggccggagctggccgcagagtcccctccccatcgctcccgcgacccccgctcgcctgggccagggccggcggcgcgcagggcgggggacgattagaggtcgccccgggctgcgccccgcgcctggagctcccccgcccgcccgccccccacccagccccccgccccggccccagcccgctcgcagggacactcacccggcgcccctcgcccctgcccggcccgccgcgcccgcgccggccgccggctccccccgggcccgcaggaagccccccgcccgccagccccgccggcggccccctcggcccagcggccccgccaggcgctcccggggagcgagaggggccggccgagggccgcagcgggagctgctgggacttgtagttcgcccgcgcccgccgcggccgtcgccatcgctgcccccgccccccgggcaggcctttgtccccggccaggccaccccgaccgcgcggccgcgcctttgtctgcaccgtgccccgcccgcacgcagccctggccccatccctagtctcctcctgggcctgtctcagtccctctgtggccctggccctatctctttctctccatccctgtccctctctctgtctctctccgtccctatctctctatctctgttcattctctgtctctgtccctgtcttcccatctctgttcctttctctgtgtctctgtccccatctctttctctgtgttccaatctctttgcctctgttgctttctctgcctctatctctctctgtgtctgtctgtctctctctctctgtctctgcctcctgcccatgtctctgactctatctttgttcgtaaaactctacacatgttgttcttggagacttgcagcgcacataggcacagccaagcctctcagctctgcaatctaaaaacatgtctatttttgcttaacctggccttcctccaatttttcctttttgcatggtgaaacccgtcaccctttctgggtaacacccgccaaggcacagatttgggatattcctcctctagtgttttcagcctcctacccagatggtgggtcaccgctgtccctggaggcctccaagtgctagatgtgagtgatggtttccggagaaccctacgccgggccgggaagggctcggggcaaactttccttggagacacagatccccgctgccagccaggagagagagtggaaatcagctcctgatggctgggccgcgatgttctccactaaatataaacaatggtcacagaatataaacaatgatgaggcaaggccactctgtgaccatgtctgaaccaagatagagacatgggccctgtgcaaccacaaaaatgagttctcatccccctctccaagtgaacacaaatgactgccacttcttaccgacgacaattccaacccaactgccatcctcccacctctgagacaaaaatcactgaaatacctagtcagcaaagcgctcccaggttcccgacaataccaccctagtaattctctgtaaaaccacccagtataggctgggtgcggtagctcatgcctgtaatcccagcactttgggaggccaaggcgggtggatcttgaggtcaggagtttgagaccagcctggccagcatggtgaaatcctgtctctactaaaaatacaaagattagccaggcgtggtggcaggcacctgtaatcccagctactcgggaggctgaggcaggagaattgcttgaacccaggaggtggaggttgcagtgagccgagattgcaccactgcactccagcctgggcaacagagcgagactccgtctcaaaaacaaaaacaaaacaaaaaatgcaaaccaccaagtacaagcccaaattctataagatactcctctgtccccatgtcctccttatagagacaccctatggttccttcttccttcctgaaccttctagatgtgtgttagactcagcctgagacctgctttccatctttccgcagagcccacagcagatctgagagattggagataacttcaattggattatgcccctggttccttatcctgacacttcctggatgatcccattacaaatacatgtgatgacatctgttgtttctttggctcagaatctaacagtactttcttttcctttgtggggtcccctccactactccagatgcacatgtgtctaacaccccttcccagtcccacgtgagctggactctaatcaaagggcccctatcccctggccacaataattaggtatgggttgagaaggtgacattggaggttctcactctacttctggggttatgagccacagggggctcattctgcctgcagccactttcccca

SEQ ID NO: 1561379 - DNA, 4001 bp, Homo sapiens
gagggaacactgtgtttttccctctgcagctctgccttccatctacctctaaccacaggtttactgtgtatttccaaacggttcttcttggactttttgccaatttacactgatagtagtggatgagaataccttcccaagccctgatgaagacagttgacaacttttaaatctttgcctatctggtctatgttgtagttgagaataatcttttttttttttttttttgagacagagtttcactcttgttgcccaggctggagtgcaatggtacaatcttgactgaccgcaacctccacctcccgggttcaagcgattctcctgcctcagcctcctgagtagctgggattacaggcatgcaccaccatgcccggctaattttgtatttttagtagagatggggtttctccatgttggtcaggctggtctcgaattctcgatctcaggtgatctgcccaccttggcctcccaaaatgctgggattacaggcatcagtcactgcaccaggcccgcaaaataactattttaattactacagtgagactggacttattaaaaatctatcaaatactttttattatcttagcaagcctaagggagtaggaaacctcactcatatacaagtgttgaaagtggtagttatgccaggcacagtggctcacacctgtaatcccagtactttggcaggccgagggggcggggggaggggatcacttgaggtcaggagttcaagaccagcctgggcaacatggtgaaaccccatctctactaaaaatacaaaaactagccgagcgtggtggcacaagcctgtagtcccagctactcaggaagctggggcaggagaatcacttgaacttcagaggtagaggtggcagtgagcagagatcatgccactacactccagcctgggcaaaagagcaagaccttgtcttaaaacaaacaaaaaacaacaacaaaagtggtagttatggtaaaaaaaaaaaaaaaaaaaaaatttcctgcatgtccccaatggaatgctattcatttcaacatactggttttagttaatatggtgtttccaggaaatgaatctgggaattatgaaaatcatctcttcccctctgatactgttatctctattttatttgctaaattgctacttagttacagttttggaggcaggcttaatggctactattcagataatcaagtcttacataaccaactagccatggtcataacagagttcctcaatcattcaaatatttaggtcactaaggccacaaaaccaccagaagtaacagtaggttacaaacacatgcagagtcacagtcaatcaaacatccttcagagaaccaccaacctacaggccccacttgtcattcacaacctcagacagcagctaacacgactccaggcagtcacaaccacacctacaaatcacttgcaattctccacactcaaaggcagtctcaaatgcgactcacacctaatctaaaaatagacacacgcagaggaaacctcgcgcagcaacactactccgttcacttttcacacacaatcggccacaacatcccaaagagaggcaagcacctaaaatgcagcaggttgggcgcaggaggccacccctattcagcgcgcgcccgcgcgcgcgaacacacagcgcccgctccgcgcggggacccgccgccagcgatggcgcttccgcgggatcagaacgggcaaaatcccccttcgcggagctcgctccgggtcaccctcaaggtcacgcccatggaccacgcccgaggcccggctcgtacagatcggagcgtctggataccgcggtcccggtttcctcctcagaatttccaggcccggctcggactcttggttacctccctggcctccccacccggttccgcgtccttagacagctctcccggaacggagctcccagtgccctccttggcctcctcagcacccctggcacccaccaagcctcacccccggcccagggtgagtcgtctgcgcctgcgcactcgcgcgtgggcctgagctcccaggagtctccggggcggcccgttagtcgccgcgcggtgctagctgccggcgctcccctccgtttgcacccacggccgccctattgcggctggcactacgcttctgccaggaccccggctcccttttccgttgacctggtgttcgttttccatgtggtgagttgaggtgacccgggtctggatgcgagaagagctcacggcaggggacctgggttcatgggacgcggagagggtttgtggaggcagaagccccaggcctgtgtgcaagtcacctgctggggagggagactgtgtgattgtgtttgtgtgtgccgttctgtggctgcgtccgtgtgtggtggtgtgagtgggcgcgcctgtgatggtcccgggggggcggggggtgtgcacagcagggggtgtgtgtgcacagcaggtgcacagcccgggacagccctgactgtccccgattgggcccgcgggactgagtgggggcggggccgtttgtgtgacggcgctgagcggtgactatgaatgtgtcatgctgttatcagtgatcctgtgacagcgctgttgtgacccactggagactgtgatcaaaactggcctggtgcagcttttgtagagtttgatttctgcagttctggggctcaggaatacgtggacaaggtccccgtatggctcgatctgtgtctgtgaagactctgagaccttctgttctaaagcatggcccctgtcgctttcataatgcataatacacagtggcatgcagcctcgccaacctctggggccaattttaagttacgtggtttcttggagtttgttatactgggatttctttcactgcctcagtcatttcaccttataaccacgttgcacagtgtgcagtcaaatggctatcgaaaagaaagttggatatttgagatccagaatgaagtttccaactgaaaaagcacagccttgtgtttcacatggacaaggctgtgttctgatatgcacagcctcgtgtttgatatggagatgttagagctggaattgctcccaaggcaaggttctgggaagatatgatattgaggccccaggagtaggattcgtttctccaaagattttgtgtgtgtgtgtgagatggagttttgctcttgttgcccaggctggagtgcagtggcgcaatctcggctcattgcaacctccgccttccgggttcaagcaattctcctgcctcagcctcccgagtagctgggattacaggcatgcaccaccatgcccggctcatttttgtatttttagtagagacggggtttcaccatgttggtcagactggtctcgaactcctgacctcaggtgatccacccgcctcggcttcccaaagtgctgggattacaggcgtgagccaccgtgcctagccaaaagatcccttttggaagctctgtgggggcaagttgaatattgcagatccacagcattttcatagctgtctaaaggaaattattgtgaatacagaaacatttcagtcccaggctttggtgaacctgacttttctttatgaagggaagagtcaacaatattccagtctttctcatacttccatctggtcatattcagcatgggttatggaagcttgccggtggtgaagaatgtgttcttatttagcctgtctgggctccaagaaaggctgagtatattgtgattccctttctttccacattttgctgtattccaagagaagagctctgagagaagaaaagcattgtagttgcacattttaaagcaaagctggaggtcattttgatttttttctttgttttatgaaatgcatttttgtttttcaggatgtggaataacttcatttgaaatgctcaccaaatagtgacttatctatttacctggtctctagtccttctcttcccagttactgatgacattatgaagacagatctccttctttccagtacctcatcagatgcccttcctagagttaattttcatataacaccttga

SEQ ID NO: 1561380 - DNA, 4001 bp, Homo sapiens
gaataaaaatagttatactaaaaataaattataattatatataaatattaatcattagtttgtagcattactctttattccaataataatctttgttctacaattataacctaaaaaaacccaagccatacagagatagaaactaaaggaacacagtacagagataaaaactaaagggacacgataaaaagtgaccaaaaaacaaaaatgcgagccctctgttatgcccagactgggccactagagggctccttggtctaccggtaacgccagtacctgggaaggcacctgttacttagccgaccttggtctagcggtagcgccagtaactgggaaggcacccgttacttaacagaccgggaaaaggagtctccctttccctgggggagttaaaaaacactctgctccaccatctcttgtaaaaacgcctgacgttagtcaggcccgcccacagccatccagaggcctgtcttcctgtgatgctgtgcttcagcggtcacgctcctggtccgctttcatgttccgccctgtacacctggctctgccttctaaataacagtaacaaaattagttacaaattttgtttgacagtaacaaaactaaagtctttaaaatacatttaaaaaattatgacgtaaactgtcccctctctctctctgcctcggctaccaaatagggaagggccccctgtctggtggacacgtgactcacgcgaccttaccgatcactggagatgactctcactccataccctgcccctttgccttatacacaataaataacagcgcgaccaggcattcggggccaataccggtctctgtgtcttggtgatagtggtccctcaggcccagctgtcttttcttctatctctgtcttgggtctttatttctacaatctctcgtctccacacacaaagagaaaatcccacaggccctgcagggctggtatcgcctaggaagtaaacattctattagcaatattaaacccctaataattatatagtgatattaacaagggagatttaagttttttaaaaaatgcctggccggatggctgggcgcggtggctcatgcctgtaatcccagcactttgggaggccgaggcaggctgatcacccgaggtcgggagttcaagaccagcccgaccaacacagagaaaccccgtctctactaaaaatacaaaattagccgggcgtggtggtacatgcctgtaatcccagctactagggaggctgaggcaggataatcgtttgaacctgggaggcggaggttgcggtgagccgagattgcgccattgcactccagcctgggcaacaagagcgaagctctgtctcaaaaaaaaaaaaaaaaaaaaagcctggctgggtgcagtggctcatgcctgtaatcccagcactttgggaggccgaggcgggcagatcacgaggtcaacagatcaagaccatcctggccaacatggtgaaattctgtctttactaaaaatacaaaaattagctgggcatggtgacgcacgcctgtagtcgcagctacttgggaggctgaggcaggaggaccaggaggcggaggttgcagtgagctgagatcgtaccactgcattctagcctggcaacagagcaagactacatctcaaaaaaagaataaataaataaattttaaaaatacgactaccccaggtcaatatatcttatagtgaaactgcagatttcaccatgcaaaaatttaaagcacacatcttgtccaataaatgaacttacaaaaattaaaatctatattaaaaatagaaacttacatgtctgttgaagtataaaaagggactcagtctcatgatcaacagcttaggaaacttaaatgcacattgctaagtgaaagaagccaattcaaaaagactacatactgtatgattacaacattctggaaaaggcaaaactatggagacaataaaaagattaggagttgacagggagggaggatcagtcagggcacagaggccttttagagcaatggaattaatgtggatgacatcataatggagataaatgtcattacacatttgtccaaacccctggatgtgtaacaccaggagtgaaccctaatgtaaactatagactctgagtgtccatgtgggttcattagttgtaataaatgtaccactctggtggaggatgttgatgatgggggagaccatacgtgtgggggaaagacgtgtatgggaaatctctgtaccttctgctcaattttactgtgaacctaaaagtaccctaaaaaataaagcatattaaaacaaataaacaactacaaaaaagtaagtcctgtcacatgctacatgtttgaaccctgaggacattatgctaagtcagggattcaagcaatgtatttataaataactggtggttcaaagaataaattgcaatggaagttaaaaatattttacgaggtcaggagatcgagaccatcctgggcaacatggtgaaaccccgtctctactaaaatacaaaaaaaaaaaaaaaagttagttagacatggtggtgcgcgcctgtagtcccagctacttgggaggctgagacaggggaatcgcttgaacccaggaggcggaggttgcagtgacctgagatcgcaccattgcactccagcctggtgacaagagcgagactccttctcaaaaaaaaaaaaaaaatttaaactgaatgataataaaaagtaacatgtcaaactaatttatcaaagcattcaactaattcattattatattgtatcccgttactacttgggtttgtgtgtgtctactgactaactgcagtgaatcccctttctatcttggggtattgtgactggaaagaagccagtcacaaaaagacaaatactattataaatgattccacttacagaggtatctaaggtagtcaaactcatagaaacagaaagtagaacagtggctgccaggggctggggaaagagggaaatgggacattgtagcttaatagttataattcagtttgcaagatgaaaaagttctaaagatctattgtacaatatgaatatacttaacactggaatgtacatttaaaaatgattagcttggtgtggtggttcacacctgtaatcccagcactttgggaggccaaggcaggtggatcacctgaggtcgggagttcgggaccagcctgaccaacatggagaaaccctgtctctactaaaaatacaaaattacctgggcttggtggcacatgcctgtattcccagctactcgggaggctgaggcaggagatcacttgaacctgggaggcagaggttgcagtgagccaagatcgcaccattgcacttcagcctgggcaacaagatcaaaactcatctcaaaaaaaaaattattaagatggccaggcgtagtggctcatgcctgtaatcccaccactttgggaggccaaggcaggtgatcacgaggtcaagagttcaagaccagcctcaccaatatggtgaaaccccgtctctactaaaaacacaaaaattagccaggcatggtggcacccacctgtaatcccagctactcaggaggctgaggcaagagaatcgcttgaacccggaaagcagaggctgcagtgagctgagatcatgccactgcactccagcttgggcaacagagtgagactccgtctaaaaaaaaaaaaacaaagattaagatggtaaattttacattgtcttttataccacaattaaaatgaaaacaaaatcattgaaaaaaaaaaaaaagctagctgggcatggtggcacattgtctgtagtcccagctacccgggaggctgtgatgggacaatcacctgagcctggaaggtcgagtttgcagtgagctgtgactgcaccactgcactccagcctgggtgacagagtgagaggcccgtctctcaaaaaaagaaaaaaacaaaaaaccagaaaaatctacatgttcaatgaagtataaaaagggacccagtataatgatcagtggctcagattccaatgagcttattt

SEQ ID NO: 1561381 - DNA, 4001 bp, Homo sapiens
agatccctgaggaatcgccacactgacttccacaatggttgaactagtttacagtcccaccaacagtgtaaaagtgttcctatttctccacatcctctccagcacctgttgtttcctgactttttaatgattgccattctaactggtgtgagatggtatctcattgtggttttgatttgcatttctctgatggccagtgatggtgagcattttttcatgtggttttggctgcataaatgtcttcttttgagaagtgtctgttcatgtccttcgcccactttttgatggggttgtttgtttttttcttgtaaatttgtttgagttcattgtagattctggatattagccctttgtcagatgagtaggttgcgaaaattttctcccattttgtaggttgcctgttcactctgatggaactaccctggaggctctggctgagtactgatatgaatttacatgtgagcaaactaatgaggcaaaggaaagcaccaccatataggggtaggcagaacaatacctgaaagtcaccaagggtagttaggggatagttcctgtttccaccagccaggagtggtaagttggccctaaggctctacaactacttttcccctgaaaaaactccctgattctaagtacagcaggagttaaaagaacagcgtttacaaagaggtagctgagcattatcaaactgaaaaccagcagtgacccatttaattcctggttgtattactgtcatcagcctgcattctatcagactaacagaggaaaacataaataccctctggtggaagatagcatcatctgaaacctcttcagttattttatatgcaatgcccagcatacaatcacaactactagtaacttgaagatgcattaacaaatgacaaataacaagattaaaagaaagaaacaataaagaagcagacccccagatgatacaaaaaatgaggcataaaagaattaaaaaattaactatgattaaaatgttccaagaaaacagatgaaaatttagtaataaaaggaaagcaaataaaagaatgaagatttcaacaagtatttggaagttataaaagagaattaaattgaatttctggaactgaaaaagacaatatctgacatgaaaaacccctctttagaaaacagaataagtgagctggaatacaggtcaacaggaaacattcaaactccatcatatgaaaaatagaggggaaagagaggagaaaagcagataaggacatgaaaaagttgtgggatatgctcaaaaggtctaacataggtgtaattaaagtcccagatgggaggagagaatggtcacctatcttccaaaaactgaacaaagactgccccttctgcatggaatctatcagatcactggaagccaacaggccaactgctagaactacaaaaataacagtaaaaaagagaataatcttaattcattctactactataaaaattatggaggctcttttgtggtaaagagaaaaccatggttttttatgtaggaagattagcaattaaagtatttacagacattctgaacacacatataatttaaaatttgtttttgctgatagtgtctttgcagaaaaataccagaattcaaacctctagtcatttagaaaaagaagtaattataggacagggcagaggcaggcataaaggcaagtgaagaatagtgaagattcaggtgctgaatgggggtgcccattccacctaacaaacttcaaatatgcccatttccacctaacaaactttgagaatatggagcagaaatgtagctggtttcttggcatagaccataaaatatacaacagagaaggctgatattctagagagcatattgtacatcattttgtgcagatattcttacccaatgagaccaagttagtataattctccaacatcacatctctgtacaaatccctctgatccgagtttaaatattcccactcctcctgagagaagtctatggcaacatcgctgaatgtcaatggcacctgaaatgacaaacctgtgtattatttgtaaaagtaaagaagacttttcaagatggaacattaaattgcaataaaggggcaatatgtaaaaagaagtagtctagagttacaagatgatgacatggttagataagagtaaataaattagcatgtcttaagtagagtgcccacacaatcttaaggaatcctgttggagcacacaaaattttcttagtaatattagagaaaaatccaaatatataaaaataaatgaagtcaccaaactttccaaattaaatagtatatataagcacaataccttctacgtacctaagccatataatattaataaatacaagttgttacagcttttctcttcgaggaatatgaaaaaccatgaattgataactaccccctcccccaattgtattataaaatcttttccagccaacacggaataacagggattgaatttaccttcttgtatgaaacaactgaaaatctgaacaaaatatattaaaccatggttttcaagacagaaaacattgcgcaatgatacctgaaagacaagtaacaaatgaggtgaaacctacagtcacactagtttactgtaaggagacaatttctaggctgtggcacagggagcgggaacctaagcaaagcccactggattccactgagaacaagaaaagtacaaaccaatatccatcatggacacagatgcaacgattccaaacaaagttttagcacatcaaatctaacagtatataagaaagggaactctattatgaccaaggctcaatccaagcctgtctcacatttaaaaatcaatcaaggtaatgcaccatattcacaaactacaaaagaaaaaccgtatgaacatatcaatagatgcagaaaaggcatctgacaaaagccaacatccactgctgatatccttggtgaaacaagaaaagaagggaacatccttaacccaatgaatgacatctataaaaaacccatagctaacatcacatttgatagtgaaaggctgaatgctttcctccccaaatcaggaatatagcaaggatatctactctcaccacttctattcaacattgtactagcggttctagccagtgcaactcaggcaagaagaagaaataaaaagcatctagattgaaaaagaagtaaaaatctctttattcacagataacatgattgtctatatagaaaatctaatagaatctaataaaaattcattaaaactatcaagtgagttagcaagctgagaagatacaagctcaatatgttaaacataaatggcattttaattagcaacaattggtggaaattaaaattaaaaatactgaatatcaaatgaaaaatataaaatacttaggaatcaatctaacaaaagatgacaatactaatactctcataactacaaataattactgagaaaaaacttaaaagatctaaacaaatagaaagctataatatgttcatcagtcagatgactcttacctttgcaaacagatccacagattcaacaaaatctcagtcaaaatcccagcagaggccaggtgcgatggctcacccctgtaatcccagcactttcggagggtgaggcaggcggatcacctgaggttgggagttcgagaccagcctgaccaacatggagaaaccctgtctctactaaaacatacaaaattagccaggtgtggtagcgcatgcctgtaatcccagcttctcaggaggctgaggcaagagaattgcttgaacctgggaggtggaggttgcagtgagccaagatcacatcattgcactccagcctgggcaacaagagtgaaactctgtctcaaaaaaaaaaaaaaaaaaaaaatcccagcagagcttttgtaaaaatagacaaggtgattctaaaattcagatgaaaacacaaaggatctagaataacctagacaacattgaagaagagcacagttggaggatcaaccctactaattggaaagcttaacgtaatactacaataataaagag

SEQ ID NO: 1561382 - DNA, 4001 bp, Homo sapiens
gttaggcggccggttttccacttgggaggtaaagcctggctgggtggggccacgcccacgtatgccccgccccatccagggagttgagggcggggcttccccaaaggcccacccacatcaagtcccgccctccaacaccctgaccaggaagggaggaaggcctggagcccacacatagggtgaggctagggcagggcggagctcaagaggtcagggtctcacttgaagtagcgattgggtttgtagtgcagtttgctgtgagccaccagctcctgcatgctggggaaggtctcggtgcagctcagggctgagcagcggaagagcttgcctggtagggatgaaggacagagaagtggagacaggtggccaaggctggctccgaggggctccgcctgtttcccaccctaacctgcctccccattaccagtcctggccctaccttccagggactgtgtgggcgggcagtgggttcgcagatgctgtgccaggtcacggacgctgggaaaactgaggcagcagccagggctggagcaagggatttgcttccctgcaggacgcacagaacagtggtcactggtcccttcctcactagtgctgtccctgaccccagggttctgccccagagaagcaaatatgatgtgctggggcctttactctctgcctaccacaacagactggtctgccacagtgcaggggctggactggccaggctcaccattggagccacagcctggcatccaccggctgctccgtaaaatgatgagtggcatccctctagaaaggccctgaggttagagattctctacgtctcgcttctattgtttcagggactgtgattccccagaagaccccatcacagatcacctggaggtgggcgtcgtctgggaggccgcaggtcctcgctggtcccggagactatgctggtcaggccagggctgggtccggggccaggctggcagctgtctggggctggggaggagccctgctgcatccctccagcccctccacgttcccacactggcggtgtggctgcctgctcagggcctggctcctccgacatggaggaggaaggggctgcagctggcacagccggggacaacacctccttgtcggtctcactggagctgggctctgcagtggccagcatgtctgggatgggccctgagggtttctcctcctggtggaaggaagaggcggagagaacccttctgggctctgggtcaacccagtcggcccccatcctaaggaatcaccagcaggagaggataggggaatacgtaagggtggactaagctctttttttctttttataaagatggggtctcgccatgttgccctcactggtcttgaacccctggtctcaagtgatcctcctgcctcagcctcccaaagtgctgggattagagtcgtcagccactgcactggcccggattgagctccttatgcatacgggagaaacatctgctctcctcaactaggataggtgggagccccagtatgcacacaagcgtggcctagagggagtgggcggggccaaggctacggaggcggggctatgggcaggcatggactgggaagatgctagaggagctagacatggattgtctgaggaccgagaccggccggcctcgagcagtgtggacaatcttggaggtgctgggggcccggatgtaagaagtttaggggcggagtcctagcctgacgggcgtggtccattccgggccgggcccggaagtagggcgctctccgagtgacagccagcggcggacgggtgcccggatgtgggggcggggtcggccggaggctgtaggcgcgacagggccgctccccgccagtccccgcagctccgccgcgcccgcgaccccggtgccgcgctcaccatcttcgacacggctcggcctcttgtttctgcggctccggcggctgcagcttaggcggcggccaccctctgggcagtgcgagttcgcgctcacgtcagcgccattttccacctctcagctctcgcgagactgggggcggggcctgcgcagggcgctcggagagggggcggggcctgagggcagagtcaccctggagctcaggtcggacgctggtgcaatcttgctatctatccccgggcagtcagcgcgcacttcagcagactccgtgcacggagatccgggatgacctcgctgtcctagtcttcaaagtgggcaccttcatccctctagtcttgtcccaagatcagccctggacaggcgataaacagcagttctttctttatattttttatttttttttgagacagagtttcgctcttgttgctcaggctggagtttaatggcgcgatctcggctcactgcaacctccgcctcctgggttcaagcgattcttctgcctcagcctcccaagtggctgggattacgggcgcccaccaccacgtctggctaattttttgtatttttagtagagactgggttttaccatgttgtccaggctggtcgtcacctcctgacctcaggtgatccacccgcctcggcctcccaaagtactgggattacaggcgtgagccaccgcgcccggccagttctttattttttatagtgttgagacagggtcttgctctgtcgcccaggctggagtgcagtgatgcgatcatagctcgctacagccttgacctcctgggttcaggcgatcctcccatctcagcctcccgagtagctgggattactggcgtgtgccaccatgcccagctaatttttaaattctttttagagacagggtctctctgtgtgttgcccaggccggtctcaaactcctgggctcaagcgatcctcccgccttggcctcccaaatgttaggattgcaggcgtgagccacctcgcctccccttgcactcacattttaaaatggggaaacagcatcgctcgagccagggacgtcgaggctgcagtgagcgtgatggcaccactgcactcctgcctggtcgaaaaagcgagacccccatctctaaaagttaaataaaaatggggaaatagtaaatcaacaagtgcaaaaacaatcttttgtcctattcagagcaatgaaggaaacaatgaaatgtcgaagtgatgggtcagggaagccactctgaggaggtgacttcggagctgtctccagatgatcaaggagtgagctggtggaaagcccgaggagcagggggctctaccggatagctggtggtgatgtcctggagtggggcaggacgggcttattttggtcaaagagcagcgaggtggccagggcaccactggagcagagtggaggcggggtgtggaggtcagaaagcgaatatggtgcgcggcaggtcacgcagggccatgggagtggtgcagagagaggagtgtggtttatgttgtaaccactgatgaatttttagcagggggaggcgcatcatctgattcctggcagtcacttggagtaggatgggctgttgagagggcggtaaggtagatctaacatcttagatctctctgctgccatatcatctaagatgagatcatcttagatctcatcatgctgccattcaagaggtattcgttgagttctaggcaactgtagggttttttttgttttgttttgttttttttggacgacatcttgcactgcacccaggctggagtgcagtggcgcgatctcagctcactgcaacctccgcctcctgggttcaagcgattctcctgcctcagcctcccaagtaacagggattacaggcatgtgccaccatgccaggctaattttgtattttcagtagagatggggtttctccatgttggtcaggctggtctcaactcccgacctcaggtgatccgcctgcctcagcctcccaaagtgttgggattacaggcatgagccactgcacctggccacaattgtaggttttatgtgcagtgtatttccatctgcaaagcaagttgtacctatgcactttttttttttttttttgagacagagtctcactctgtcccccaggccgcagtgca

SEQ ID NO: 1561383 - DNA, 4001 bp, Homo sapiens
caggcatgagccaccatgcccagcctcaacacttttaatgttccttttgagcaacgttgtccaatccgcagcccaggaaggctttgaatgcagcccaacacaaattcctaaacttccttaaaacattttgagattttcttgcaacttttttttttttttttttttttttttttagctcatcagctattgttagtgttagtgtactttatgtgtggcccaagacaattcttcttccaatgtggcccagggaagccaaaagattggacacccctgctttagagagacactatgtagtgacagtctttcactttctgcccagctttactctcccactcccccttcccctccccctgccccaacgccagggaaggggaagaggatgacctgtggaattaatgagtcaagtcacttccctctgccttaacagggattgcaagtggaagctaacttctgatgccataattataaaatgcaccagccttaatagacaggagctttgcaattctcatcatctgtgcattttaaacttataaagacagaaatcaacaggtcaaaaggtagtcatcacatccagtcagttcacaactcacctggacctggggtccccctctttcctcattatggtgtgtttccctccctcgttccgtacatcgctctcattctcaccttctttctctagctctttccttcccctttattttctccctaggattctgctcattttgagcccctctcctctcctgctgctcctccccgtcttccctctattctttctcttccacttgctctttccattcttgcaatgtatttaattcctctttcttcctaatcttttcattgtcccagtctccacatatttctggctctttcttccccatttcagcactccctgttaaattccctcttccctgttacacaccgttgtccccactctttggcacccccagatcccaggcctccccgtgctgtggttctccctctgcttctccttgtcatcggctgccccctcttgctgtcccggtaccacactgccctgtctgccctggctccaaatcccttctgctctcccccactctctgtctgaggagcctcctcctttgctgcccctctccctacctggctgtccttcatctctctggatactgtgctttttctcgaaatgtgtctagttacttttctctccctgctactttctcggcttcttcttccactcttactgtctctgaaaatctctaaccatcctctactttgccatctgtttattggtttgcctcattccttcctgtctcaggttttctactgctctctctgtccctcgatccctttggcccacacattcacaggacggtttggggtaagacgcctgcatcctggaggagcgcattttccacggggtggaggagggcaggcaagaacatcgggtgtcacaggacaggccctgagcacctccccagcgcgggctcaggggaggcctggggagcagcggggcccggcacgaggaggagggaggtggggcgcgacagcgccttcagacaggggtggggtctgcaggatcccaggaccaggcagaggacgcaaggctccccgggactgcggctgcagctgcggcgctgcgctccaggggccgacgagggcaaggctgggaggcacccaggacgggaatacacctcttgggtgaagactttaaaaagcccggggatgggggagggggtcaggaaaaggttttaagcgggaggaagaagcaaaaggccggggacggggagcagcctcaaagcgacttcaacccaaagggaagcgactccggacccacactgcgaggcctgtattcacctggggtggagtgtacggggattttaagggccgtatcgaccctggacatcggctgtggaaatgggaaacagggagcgcaggtttaatctacacagagggtcactcacgctcgacgccgtcaccttcacccaacgcgatccgtttccgggcctgtaggaaactgcgcatgcgcggagagaagagcccgggcagcctgaaggaatggctggagtgggcggggtctgcgccgctttaaggtaaaaaaatcagagttgtgtgggccacttatggtggaaaccaaaatgttttccacttaccaagttgaaaacggtttatgttaaaactattttgcctgcaggttggacccgatcctgctagggagtctcctgcagcttagcagtccgggaactgggatttcggtggggaatccaaaactagcagtgattggatccataaaagttaccaaaaaacaaaaatgaagtgtctggaatcactccactggatttcaagactaccaatataggaaaggtaataaaaactgtgtggttttggggcaataaaagacatatggattgatgcaatacagtaagagagtacaaaaatagcctctacaggtacttccaactgatttttgacaaagttaccaagggaattgaatgaagaatttttaaaaactggtgaggggctaacttaatatccacagcaggaaagaagtcatctctactcaaacttcacaaccgtacagacattagttcaacattgaccatagcctaaatgtaaaatatcaaaccataaaatggtatcctgtaggagactgaaagaaaaaattactcacaataaaatcgtaagaatcaagagcttgttcaaaaattcttagccatagcagcaaaagcatgattcattaaagaaaaaaaaaatcaactggtatttaccaaattaaaaacttttggtctgtgaaagaccttcagacgatgaaagaaaaggtatttgatatggtttggctcagtgtccccatcaaatctcattttcaagtataaacctcaggtgttgagggagggacctggtgggaggtgactggatcatgggggtggttttccccaagccgttctcatgatagtgagctctcaggagatctcatggtttaaaaatctgtgatagttcctcctttgatcgctctctctcctgctgcaagcaagacgtgccttgcttcgcctttgccttcctctatgattgtaagtttcctgagggctccctagccatgcggaactgtgagtcaattaaacctcttttgtttataaattacccagtctcaggttgtcacaggagggtttaggcagtgtgaaaatggactaatacagtactgaataatagaaaatatttgcctaccatatatctgacataaaactggtatgtggaatgtataaagaatcctagaacgacttaaaaaaaaagcaaaataatcaaattagaaaatggatagaactatgaagagacatttcactgaagcagatatactgagataaatgggcacataaaaagatttccaacatcaccatccatcaaatctcagacctcagcatattctgctttctccatgtgaacccctggatgctgtcagagatcatgagaaacacaggagcttctactgaacagtccagttgatgtgtattagcaacctgtaattgtttttggaaacgaacaatggaaacacagatacaaaaatattctcagctcaagaaatatgcactttgtcattattagtgatttttttttttttttgagacagagtcttgttctgtcacccaggctggagtgcggtggtgtgatctcagcttactgtaacctctacctcccaggctcaagcgattctcctgcctcagcctcttgagtagcttcaaccacacgcacgcgccaccacacccagctattttttgtatttttagtagagatgggttttcaccatgttggccaggctggtctccaattcctgacctcaggagatccaccccccttggcctcccaaagtgctgggattacaggggtgagctacagcgcctggccaccactagaactaacacctcaggtactggatgcctccttcgaaagattggataatcgttcttacaggattatgtggtaatgagtgtctctgtcattcatttaggtaagatgcatacgcaatagtgatctat

SEQ ID NO: 1561384 - DNA, 4001 bp, Homo sapiens
ggcatgagccaccatgcccagcctcaacacttttaatgttccttttgagcaacgttgtccaatccgcagcccaggaaggctttgaatgcagcccaacacaaattcctaaacttccttaaaacattttgagattttcttgcaacttttttttttttttttttttttttttttagctcatcagctattgttagtgttagtgtactttatgtgtggcccaagacaattcttcttccaatgtggcccagggaagccaaaagattggacacccctgctttagagagacactatgtagtgacagtctttcactttctgcccagctttactctcccactcccccttcccctccccctgccccaacgccagggaaggggaagaggatgacctgtggaattaatgagtcaagtcacttccctctgccttaacagggattgcaagtggaagctaacttctgatgccataattataaaatgcaccagccttaatagacaggagctttgcaattctcatcatctgtgcattttaaacttataaagacagaaatcaacaggtcaaaaggtagtcatcacatccagtcagttcacaactcacctggacctggggtccccctctttcctcattatggtgtgtttccctccctcgttccgtacatcgctctcattctcaccttctttctctagctctttccttcccctttattttctccctaggattctgctcattttgagcccctctcctctcctgctgctcctccccgtcttccctctattctttctcttccacttgctctttccattcttgcaatgtatttaattcctctttcttcctaatcttttcattgtcccagtctccacatatttctggctctttcttccccatttcagcactccctgttaaattccctcttccctgttacacaccgttgtccccactctttggcacccccagatcccaggcctccccgtgctgtggttctccctctgcttctccttgtcatcggctgccccctcttgctgtcccggtaccacactgccctgtctgccctggctccaaatcccttctgctctcccccactctctgtctgaggagcctcctcctttgctgcccctctccctacctggctgtccttcatctctctggatactgtgctttttctcgaaatgtgtctagttacttttctctccctgctactttctcggcttcttcttccactcttactgtctctgaaaatctctaaccatcctctactttgccatctgtttattggtttgcctcattccttcctgtctcaggttttctactgctctctctgtccctcgatccctttggcccacacattcacaggacggtttggggtaagacgcctgcatcctggaggagcgcattttccacggggtggaggagggcaggcaagaacatcgggtgtcacaggacaggccctgagcacctccccagcgcgggctcaggggaggcctggggagcagcggggcccggcacgaggaggagggaggtggggcgcgacagcgccttcagacaggggtggggtctgcaggatcccaggaccaggcagaggacgcaaggctccccgggactgcggctgcagctgcggcgctgcgctccaggggccgacgagggcaaggctgggaggcacccaggacgggaatacacctcttgggtgaagactttaaaaagcccggggatgggggagggggtcaggaaaaggttttaagcgggaggaagaagcaaaaggccggggacggggagcagcctcaaagcgacttcaacccaaagggaagcgactccggacccacactgcgaggcctgtattcacctggggtggagtgtacggggattttaagggccgtatcgaccctggacatcggctgtggaaatgggaaacagggagcgcaggtttaatctacacagagggtcactcacgctcgacgccgtcaccttcacccaacgcgatccgtttccgggcctgtaggaaactgcgcatgcgcggagagaagagcccgggcagcctgaaggaatggctggagtgggcggggtctgcgccgctttaaggtaaaaaaatcagagttgtgtgggccacttatggtggaaaccaaaatgttttccacttaccaagttgaaaacggtttatgttaaaactattttgcctgcaggttggacccgatcctgctagggagtctcctgcagcttagcagtccgggaactgggatttcggtggggaatccaaaactagcagtgattggatccataaaagttaccaaaaaacaaaaatgaagtgtctggaatcactccactggatttcaagactaccaatataggaaaggtaataaaaactgtgtggttttggggcaataaaagacatatggattgatgcaatacagtaagagagtacaaaaatagcctctacaggtacttccaactgatttttgacaaagttaccaagggaattgaatgaagaatttttaaaaactggtgaggggctaacttaatatccacagcaggaaagaagtcatctctactcaaacttcacaaccgtacagacattagttcaacattgaccatagcctaaatgtaaaatatcaaaccataaaatggtatcctgtaggagactgaaagaaaaaattactcacaataaaatcgtaagaatcaagagcttgttcaaaaattcttagccatagcagcaaaagcatgattcattaaagaaaaaaaaaatcaactggtatttaccaaattaaaaacttttggtctgtgaaagaccttcagacgatgaaagaaaaggtatttgatatggtttggctcagtgtccccatcaaatctcattttcaagtataaacctcaggtgttgagggagggacctggtgggaggtgactggatcatgggggtggttttccccaagccgttctcatgatagtgagctctcaggagatctcatggtttaaaaatctgtgatagttcctcctttgatcgctctctctcctgctgcaagcaagacgtgccttgcttcgcctttgccttcctctatgattgtaagtttcctgagggctccctagccatgcggaactgtgagtcaattaaacctcttttgtttataaattacccagtctcaggttgtcacaggagggtttaggcagtgtgaaaatggactaatacagtactgaataatagaaaatatttgcctaccatatatctgacataaaactggtatgtggaatgtataaagaatcctagaacgacttaaaaaaaaagcaaaataatcaaattagaaaatggatagaactatgaagagacatttcactgaagcagatatactgagataaatgggcacataaaaagatttccaacatcaccatccatcaaatctcagacctcagcatattctgctttctccatgtgaacccctggatgctgtcagagatcatgagaaacacaggagcttctactgaacagtccagttgatgtgtattagcaacctgtaattgtttttggaaacgaacaatggaaacacagatacaaaaatattctcagctcaagaaatatgcactttgtcattattagtgatttttttttttttttgagacagagtcttgttctgtcacccaggctggagtgcggtggtgtgatctcagcttactgtaacctctacctcccaggctcaagcgattctcctgcctcagcctcttgagtagcttcaaccacacgcacgcgccaccacacccagctattttttgtatttttagtagagatgggttttcaccatgttggccaggctggtctccaattcctgacctcaggagatccaccccccttggcctcccaaagtgctgggattacaggggtgagctacagcgcctggccaccactagaactaacacctcaggtactggatgcctccttcgaaagattggataatcgttcttacaggattatgtggtaatgagtgtctctgtcattcatttaggtaagatgcatacgcaatagtgatctataa

SEQ ID NO: 1561385 - DNA, 4001 bp, Homo sapiens
cattgatctcatgcccactcttctcctagatccttggccacttgccagatcatccttgctctcacaccctaccatagccacctctctcccatacctgtctttgtgattcccaccatgaccaaccatgtccccaagcaggagagccagtagtgacccccaaccttccttccctgggctggtaatagcattaccaaagtgatcacgattccacctcctaattgtgtcccaagctatacccctaggcaagtagtggccaccaccttttaaatgtctctatcctgaatccctcaacacagttctagtcctgtaggataaactatccacttcatgtctaaactaactgttctttgaaacatctcagactctaaaagatgtcccattgggccatgttcagatgatttttattaaaaaattttaaaaataaagatggtccatatcaaaatttctgattatctctagagataactgactctactaccaactttacaatcctcgctagtggagcttccatatttccagctgctaaacccaaacaccttgcttttacccctaaatcctacttttctatctcaaaatccaggcttccctacttaaaaaaactgatctaaaatccaactaccacctccacagccaccacacaagtccagccaccagtaacactcacctggactactgcagcagccttcttcactatcttcctatctcatacctcacactcagcctgttctctcagcttggccacacacagggaacctgatgagacctggatcagatcacatacctcctctgcccccaaactgtcattgctcatcacacactccagaagaaacacccgacaactgacagccattttttgtctgattcctgcatcccagctttcagttcccatgagaaagaaaacagctgtagtttcctaaaccagctcagcctgaccttcaagcacttgctcatctggtatctaagcctgagacaacgttccacaccttactttactggttcccagcaataggaaccattctataccagcttccagcctggatgtatgaccctgggactgatgtttgttcaggattcctagaaccaaggacccaaagagtgccaagagaagagtcccagaacacaatctcagagacaaacactggggtcagcatcagtgagggcccgaaacactctccactcacctgtgtaaagcccataagtttagcttctgcagtcacgggaacctgcgggaagaggaaggctatgagaggcaggtaactatggtggaagctccatgggctgatgcctccttgtttccctgcgcagccctggagccaggtgacttggtgatgactaaattattattgctcctcagttccgtgtgactcttacctgctgtgggaccttgcacaaggactcaacttccctgtgcctcggtgttatcccccttccaggctgttccaactctgagtaactttagaaaaaatttgaaaagtctaactcagaccatgtgcctcgtctgttcacaaccacccatggctctcagcgtcttgaaaagaaagagcctcattttaccattcgggcgtgaacgttactggctcaatcgtcccagcaagattcacagaaaccggcccctccgcctgccacaccctccacagcccacgacaccaggcttgtaaatgggagccccacccgcgagggcctcatagtcctggactctagggtcgggctgcagggacgcaagcaggcgcccctcatgcagggtgttggatttccggcggagagggcaggtgaggcccgggagacgcagcactcaccgaagtcgaatccctaagcacggccgccgccatcggattgtgagcggagcggggccgggagcggcgggcgacccggggcgggaacccaggcacggctgccaccagcgccagcgacccaccggctgatgcgcagcggggcgacccccgctctgtgccggaggcagcgtttctaactcaggcggcgtgggccgaggtagagaaccaccaaaattaccatctcggagcggtgccggaagtcccgccttaccgtatgcaacaaacggagacaggtccgttcctgaacgttgattggctccgcgtctttgcagcttggcgctcggcattatgggtaatgtagttctcagaagcccagggttccggtgccctccctgagattcacccggaacaagggctaagcggcccgcggagggcgctaggaaaaggcgcgacaccaagagcgagacagggacttgctgctccttaaaggggccgctggccgatttccgcagtcccatacccactgaagggagtgtctgggttaagataagaggttgtagagaccaaggttcttattaagcagatgaagctttcacgcagcaggcttcagagggaatagattgtaaatgtttcctatcagactttgaaaggtgccagactcttaattctttcctggaccatgaaaataaaaaaaccctggagaggaaaggggattctcagcaaaatgcagattccacaagacacacctttgcagggcctcttcaaaatatgtcaaataaataaagtttagagtaaaatacttcaattcctttcagggcctgctatctgtcatgtaatgctatactacaatcaggctggaattcactgtcttattgctacaagaagtcttaaaatctctgttttaatgttaatgctggtcagttgtgcctgaattccaaggggaggagggcaagtctgaccctcacttcccatcacgtcctgaactagtttttcagattaactttggaatgcccttggccaagaggaaggatgcattcagatggttggggggctgggaattttatttttggtttacacttctcatgcctcttggaatctctgaaccacatacaacggccatttgttgagtaaaagcttccaatgcaggaaactgtctctttcagcctcatgctatacaccattaaaacagtaattactggcaataagactgggctttcttaaacatacaggatctcacagaccataagcctatgatccttcataccagctgcccataatacttttggttttggaagcagcaccccataacctcagcatggctaccaaggcctccttaagacagggtagaatgaataagatctagtatttgatagcacagtagagagactacagtcaacagtaatttattgtacattaaaaacaactaaaagagtattataactagaatgtttgtaacacaaagaaatgataaatgcttgtgtaccctgatatgattattacacattgtatgcctgtatcacaatatctcacgtatcccataaatatacatacatactatgtactcataaaactaaaaattttaaaagacagataaatggcaagcaggtagatgaaaacatgcttaacatcattgatcactataaaaatgcaaatcaaaactacaatgagatatcatctcactctagttaaaatgacttttatgcaaaagacagggaataatgaatgctggccaggacagagaggaaagggaaacttcatacgctgttggtgggagtgtaaattagtaaagccactatggggaacagtttggaggttccccacagaagtaaaaatagaattaccatatgatacagtttacaccacccagaaaagaaatcagtatatctaatagagatctgcactcccatgtttattgcatcactattcacaacagccaagatttggaagctacctaactgtccatagataaatggataaagaaaatgtgatgcatatacacaatggagtagtatttagccataaaaaaagaatgagatcccatcaattgcaagaagacgggtgaaattggaggaaattatgttaagtaaaataagccaggcacagaaagacaaacttcacatgttctcacttatttgtgggagctaaaaatttaaacaattgaactcccggagattaagcttagaaggatggctaccagaggctgagaaggatagcagaaatggaagggaa

SEQ ID NO: 1561386 - DNA, 4001 bp, Homo sapiens
ggagccttatctctgacatttcttcctcttccctcaacccatagtgtgtgcaccaaggtccaaccagatgaagccggtagccagtagaactgtggtaatatcaccttctgactttgatcctttttatctctaagcatttcacaacctggtagcaaatcctgggttaatcttacaagagtgtttacactggctgacagaaatgggcatacttgcatataacctgccatggcctcagtatcctgtctttagagattctccagggtcctcggatcaaaggactgaaaaaatggcacttaagagtcccagcacaccacaagctagagaacctgtggatggggtcaagaccaatgaggggattgaacaccctccacttccctgtgtgggttccctaagtgcttctgcagccaggagtgcctgaggggagaggcagacattacaaacatgtcacgggatttgataagctcaggcctccctgaaccctttcttgtccctggaaccaggtaaccctacggctggttgtctgacctgcttgtctcagtgcaaaatgtcatctctaccacctatgtgagctacaaaaaggattcaacctcccaagaccccaaagtcttcatcctctctacgatattcttcctttgaatgtcctttgggaaaccttaaaagcctggatttggatcatgtccctcctttattcaaaactctccatggcttctagcgtcctcaccttgaatgcacagccctcggcctgcttactcttccagggagagctccacctcacactttgttccagacaggttccatcctcccggctccgtccatctccaggccattgcctgcgcccctccctgtgcttgttgctctccccaccgcatcccacgggtgtcagaaacaggtgaaaccgtctttgcaaaattataactgaggaaattatgacagtgaaagaaatcagaccttactgactccgtcttgcttccaacctttcagctgtccttgttcattcctgggtataggctgaattaacttagggaaggaattcagttcatggtttcactctgaaacaaaattgataatagccctttcctgaaaagacccccttcttgcctggagaacagcctgcctttgcaggactaacgaattagctacaaggttagaaattaccgtttaggggtcatgcagcttctgactccaagagtctgaacctccccaagttgctcctgaagataaatcactattgtaaaacctaagatcagtgcttgaggtattttgcagatcctgcactggatggatcagctgacaacacacagaccggtaatctgggtcaatcagttctgccatcccacccagaacagaaaacagcatgaaaaactcactttaaccctctatgaatccatctcaggtcccaacccttaccgccaaattaatgttgaaaactctgatcccggaatgctaatggagactgatttgagtaataataaaactcctgtctccagaacagcctgacggctctgcgtcaattactatttctccatcgcaattctccagtcttcataaatcggctctgtctaggcagctggcaaggtgaacccactggacagttacacagggacccccactggacagttacacagggacccctcctgcgagcgcctcagtgttcctacgccgggtaccggctacagacccgtgagcaggagccgctccctcgctggtttaggacctgggtgacgatggggtgacctgagggcacagaaggcgccacaattacctgagtcgggcgcctcggcgcagccgctgccatcggactacttggggaagcacggcccgggagcagtggtcgccgtcacggggctgcagagccgcctctgggcaccgaggacgattcctctccaccttctaggttcagtcaccgcggtccccccccagcactcaggggccacaaactggggaaacacccgcgtcaccgatacacagccgctactagagaccccggaagtctcagccttacgttacgtgcacacgtggaaatgccttctttccgagtgctcattggctctgaccggctgtcgtttaacgcagagctttctgggtaatgtagttccccactttccatggcgctaaaaagagcgatacccagagtccatctgcaggaaaagcccgccatcaggtcaggggttctccttaaaaagcgcacccttctggccgggcgcagtggctcaagcctgtaatctcagcactttggaaggcggaggtgggcggatcacgaggtcaggagatggagaccatcctggctaacacggtgaaaccccgtgtctactaaaaattcaaaaaaaaaaaaagttagctgggtgtggtggcgggcgcctacagtcacagctactctggaggctgaggctggaggagaatggcgtgaacctgggaggcagagcttgcagtgagctgggatcgcgccactgccctccagcctgcgcgacagagcaagactctgtctcaaaaaaaaaaaaaaaaaaaaaaaaaaaaaaaaaaaaaaaggcgcctttctagggcagaggaggggtctcacctagccttagaagccgtattgagattcctggagactagtgtctgtaactaatcactcaagaatctggaaaaatactgtttcagatttcggggagcgcaaggtaaataatagggagctcaagctaaaactattatttaggattctcctaaaggctaaaaatccaaattaccacaccgtttgaaacagtcgttcagtcgcaaaatacctgcactggaagcagaggctgataagcgttgttgtgttataatgtgtctgaaggccctcagaagccttagagtgcctaaggcaaatgaaggaagttagggatgtgctcccctatagcaggagtgcaaagctgaatctctgtgattcctacagaaaacaactctcctgctgatagaatctgtgaaaggaaaatcttgtggcctcaaaattactaagctaaagggaaaagtcaatctgggaactgctcagggcaaacttgcctcccattctattcaaagtcttccctctcctcactgagatagatgcctattctgattgcctcctttggaaggacttatcagaaattaaaaagaatccaactatttgtctctctacctgtctacctgtgacctggaagtcccctccctgcttcgagttgttcccgcctttctggtcggaaccaatgtacttcttacatatattcactgatgtctcatgtccccctaaaatgtataaaaccaacctgtaccccaaccaccatgggcacatgtcgtcaggacttcctgaggctgtgtcacgggcatgtgtcctcaaccttggcaaaataaactttttcttttatgagacggagtctcgctctttggtcaggctcgagtgcagtggcgcgatctcggctcactgcaacctctgcctctcgggttcaagtgattctcctgccttagcctcccgagtagctgggagtacaggcacgtggcatcacgccaatttttgtagtttcagtacagacgggggtttcaccttgtttaggatggtctcgatctccctcgtgatctgcctgcctcaccctccaatgtgttggggttacaggcatgagtcaccacacctggccagcaaaataaactatttaaattaactgagacctgtctcaaatttggggggttcacaaatcattatagcgttcaattaattgaacaacactttttcccacttagtatcctttacttgatattctaacttacattcaactccttttagtaatttgacatcagtcttataaagaacaataaggctgggcacggtggctcacgcctgtaatcctcgcactttgggaggccgaggcaggcggatcaccagttcaggagatcgagaccatcctggctaacatggtgaaaccccgtctctactaaaaatacaaaaaaaaaattagccgggtgtggtggcacacgcctgtagtcccagctactcgggaggctaaggcagg

SEQ ID NO: 1561387 - DNA, 4001 bp, Homo sapiens
atggcaggagccttatctctgacatttcttcctcttccctcaacccatagtgtgtgcaccaaggtccaaccagatgaagccggtagccagtagaactgtggtaatatcaccttctgactttgatcctttttatctctaagcatttcacaacctggtagcaaatcctgggttaatcttacaagagtgtttacactggctgacagaaatgggcatacttgcatataacctgccatggcctcagtatcctgtctttagagattctccagggtcctcggatcaaaggactgaaaaaatggcacttaagagtcccagcacaccacaagctagagaacctgtggatggggtcaagaccaatgaggggattgaacaccctccacttccctgtgtgggttccctaagtgcttctgcagccaggagtgcctgaggggagaggcagacattacaaacatgtcacgggatttgataagctcaggcctccctgaaccctttcttgtccctggaaccaggtaaccctacggctggttgtctgacctgcttgtctcagtgcaaaatgtcatctctaccacctatgtgagctacaaaaaggattcaacctcccaagaccccaaagtcttcatcctctctacgatattcttcctttgaatgtcctttgggaaaccttaaaagcctggatttggatcatgtccctcctttattcaaaactctccatggcttctagcgtcctcaccttgaatgcacagccctcggcctgcttactcttccagggagagctccacctcacactttgttccagacaggttccatcctcccggctccgtccatctccaggccattgcctgcgcccctccctgtgcttgttgctctccccaccgcatcccacgggtgtcagaaacaggtgaaaccgtctttgcaaaattataactgaggaaattatgacagtgaaagaaatcagaccttactgactccgtcttgcttccaacctttcagctgtccttgttcattcctgggtataggctgaattaacttagggaaggaattcagttcatggtttcactctgaaacaaaattgataatagccctttcctgaaaagacccccttcttgcctggagaacagcctgcctttgcaggactaacgaattagctacaaggttagaaattaccgtttaggggtcatgcagcttctgactccaagagtctgaacctccccaagttgctcctgaagataaatcactattgtaaaacctaagatcagtgcttgaggtattttgcagatcctgcactggatggatcagctgacaacacacagaccggtaatctgggtcaatcagttctgccatcccacccagaacagaaaacagcatgaaaaactcactttaaccctctatgaatccatctcaggtcccaacccttaccgccaaattaatgttgaaaactctgatcccggaatgctaatggagactgatttgagtaataataaaactcctgtctccagaacagcctgacggctctgcgtcaattactatttctccatcgcaattctccagtcttcataaatcggctctgtctaggcagctggcaaggtgaacccactggacagttacacagggacccccactggacagttacacagggacccctcctgcgagcgcctcagtgttcctacgccgggtaccggctacagacccgtgagcaggagccgctccctcgctggtttaggacctgggtgacgatggggtgacctgagggcacagaaggcgccacaattacctgagtcgggcgcctcggcgcagccgctgccatcggactacttggggaagcacggcccgggagcagtggtcgccgtcacggggctgcagagccgcctctgggcaccgaggacgattcctctccaccttctaggttcagtcaccgcggtccccccccagcactcaggggccacaaactggggaaacacccgcgtcaccgatacacagccgctactagagaccccggaagtctcagccttacgttacgtgcacacgtggaaatgccttctttccgagtgctcattggctctgaccggctgtcgtttaacgcagagctttctgggtaatgtagttccccactttccatggcgctaaaaagagcgatacccagagtccatctgcaggaaaagcccgccatcaggtcaggggttctccttaaaaagcgcacccttctggccgggcgcagtggctcaagcctgtaatctcagcactttggaaggcggaggtgggcggatcacgaggtcaggagatggagaccatcctggctaacacggtgaaaccccgtgtctactaaaaattcaaaaaaaaaaaaagttagctgggtgtggtggcgggcgcctacagtcacagctactctggaggctgaggctggaggagaatggcgtgaacctgggaggcagagcttgcagtgagctgggatcgcgccactgccctccagcctgcgcgacagagcaagactctgtctcaaaaaaaaaaaaaaaaaaaaaaaaaaaaaaaaaaaaaaaggcgcctttctagggcagaggaggggtctcacctagccttagaagccgtattgagattcctggagactagtgtctgtaactaatcactcaagaatctggaaaaatactgtttcagatttcggggagcgcaaggtaaataatagggagctcaagctaaaactattatttaggattctcctaaaggctaaaaatccaaattaccacaccgtttgaaacagtcgttcagtcgcaaaatacctgcactggaagcagaggctgataagcgttgttgtgttataatgtgtctgaaggccctcagaagccttagagtgcctaaggcaaatgaaggaagttagggatgtgctcccctatagcaggagtgcaaagctgaatctctgtgattcctacagaaaacaactctcctgctgatagaatctgtgaaaggaaaatcttgtggcctcaaaattactaagctaaagggaaaagtcaatctgggaactgctcagggcaaacttgcctcccattctattcaaagtcttccctctcctcactgagatagatgcctattctgattgcctcctttggaaggacttatcagaaattaaaaagaatccaactatttgtctctctacctgtctacctgtgacctggaagtcccctccctgcttcgagttgttcccgcctttctggtcggaaccaatgtacttcttacatatattcactgatgtctcatgtccccctaaaatgtataaaaccaacctgtaccccaaccaccatgggcacatgtcgtcaggacttcctgaggctgtgtcacgggcatgtgtcctcaaccttggcaaaataaactttttcttttatgagacggagtctcgctctttggtcaggctcgagtgcagtggcgcgatctcggctcactgcaacctctgcctctcgggttcaagtgattctcctgccttagcctcccgagtagctgggagtacaggcacgtggcatcacgccaatttttgtagtttcagtacagacgggggtttcaccttgtttaggatggtctcgatctccctcgtgatctgcctgcctcaccctccaatgtgttggggttacaggcatgagtcaccacacctggccagcaaaataaactatttaaattaactgagacctgtctcaaatttggggggttcacaaatcattatagcgttcaattaattgaacaacactttttcccacttagtatcctttacttgatattctaacttacattcaactccttttagtaatttgacatcagtcttataaagaacaataaggctgggcacggtggctcacgcctgtaatcctcgcactttgggaggccgaggcaggcggatcaccagttcaggagatcgagaccatcctggctaacatggtgaaaccccgtctctactaaaaatacaaaaaaaaaattagccgggtgtggtggcacacgcctgtagtcccagctactcgggaggctaa

SEQ ID NO: 1561388 - DNA, 4001 bp, Homo sapiens
atcaagaccatctggctaacacggtgaaaccccatctctactaaaaatattaaaaattagccgggcatggccgggcttggtggctcatgcctgtaatcccagcactttgggaggccgaggccgatggatcacgaggtcaggagattgagactatcctggctaacacagtgaaaccgtctctactaaaaaatccaaaaaattagctgagcatggtgacgggcgcctgtagtcccagctactcgggaggttgaggcaggagaatggcgtgaacccgggaggcagagcttgcaatgagccaagatcgtgccactgcactccagcctgggcgatagagcgagactcccgctcaaaaaaaaaaggaaaatctagttgccattttacaaactgtgaatcttgaatccagccacagctccttactcattaatatggtccagtaaccctcacctgcattatggcaggagtttaaactctgatcctccttcctcctccctcaaacacagtgtgttctcttctttgcagccagatgatgcctgcagacaaatgggactgtggtaacatcacctcctcgccgccctcttgcctccccaccgaatttttacctctaagcatttcatgacctggtaccaactctgtagttaaccttcaaagtatgtttacatgggttgacagaaatgggaatacctccatacatcctgtgtcatggacttaggattctgggtttagggtttctccagtgttctcagatcaaaggactgaaaaaatggcaagtaagagtcccaggacatcacaagctagagaacatgtgaatggggaataaggccagtgagggaatggaacaccctctaattccctctgtgggttcctttttttgagccagagtttcgctcttgttgcccaggccggagtgcaatggctcaccgcaacctctgcctcccgagttcaagcaattctcctgccttagcctctgagtagctgggattacagtcatgcggcatcaccacgcctggctaattttgtatttttgttagagacggggtttctccatgttggtcaggctggtctcgaactcccgacctcaggtgatccgcccgcctcggcctcccaaagtgctgggattacaggtgggagccaccttgcccgaccccctcagtgggttctttacgtgcttttgtagccaggagtgtctgaggggaaagcagacgttacaaaggggatctgataagctcaggtctccttgaaccttttcttatcgctggagccaggtgacctcagactggttgacctgcgtgtctcagtgcaaaatgtcatctctaccacctatgtgatctatcaacaaaggagtcaacctcccagaaccctaaggtcctcatctcctctactatgttcttcctttggcctttgggaaaccttaaaagcctggacttggatcgcatccctcctttcttcgaaactctccatggcttctagcgtcttcacagcgaatacacagcccccagcctgctcttccaggagaagcttcgcctcacacgttgttccctacaggcgcctgtggaccccaggttccatcctcccgggtctgtcctccaggccatagcccgcgccggtccctgtgcctgtcgctctccccaccgcatcccacaggtgtcagaaacaaggacctctcccgcgaacgcctcagtgtcccgacgccgggtccgggctgcagacctgtgaacagtcgccgctctctcgctgcttcaggattcgggttaggatgaggtgacctgagggcagggaaggcacaattacctgagccgggagcctcagcgcggccgccgccatcccgagtacgcggggaaagcactgccgggagcggcgggcgccgttacggggcctaagatctgcctctgtgcagcaagaaggactcttcaccttctgggttcagacaccgcggttcggacccatagctccagcgcctctcacctcacaaaccgcagaaacacacccaacattaaccaaaatggtcgctaccagagaacgctgagaatcccgccactacgttacgtgcgcacacagaaacgcctttattctgagcccttactggttctgttgcgctgtcattcaatgtagagctttctgggtaatgtagttccccaggttccaaggtagtaaagctgccgcttcccaaaggcgcttctgcagggaagtcccagccctacctcagggggttcattaaagcgcgtacccttttagggcagaggatggtctcgcccctccttagaggccatattgagattcctggggaatccctgtttgtaactgaccacctaagtgtttgcaaaaatattaattcacatttctgtaaattcaagctcccaggcgctaaaaatactgtgaaggcccccaaaggctacaaatccaaattcgtgtatcactttatacaatcgtttagacacagaatgcttgcactggaagcagaggctgataaacattactctgttataattcacatgaatgcactcttgttaccggatagaatgtcttggctgtgagttgtccagttgttggcgcattgaacaaagaagtgaacaaaacacacaaaaaaagcaacgaaagaacggaccaatgaaagcgcagatttattgaggggaaagtacactccacagaagtggaatgtaggtgtgggagcaggcgaccaagcggctcaagaaccccgattacaatgttttttagggttttattaggttggtgcaaaagtaattgcggtttttgccatgaataagctagaattttataataccccaagagttctttaaaggcctccaatcctatgaaggactggtgcacaaccaatcagaggctgaagtggagacttctgtcttgttaccacaggagtgaggacgtggcctgtgtgctgcctcatcttgcctagaactagctgcacctgctgttcttttgcttatgccttcattcttggttaccctaattccctattctcctgcctcactctgaggcattagagttggtttttcagtctgccagggacaaaagagaactaatccagataggaccatgccaaggaagatagaggagaggctaaagaaagagtacaaaggtcaatcagtcgttcccatggaaaaacaactctcctgcttatatagtcaattattgtgtccaattcattcagcaaaacatttattcatgtaatatcccttacttggtattctaacttatattttcaactcattttaggaacttgaagtcagtctcaggtaaagaacaatgaaagagaaatctcagcttggtattggtaatggtggtgataatctccacctggagacactaggcgtatgttaaattatcgagcttgttatctttcctgggaagtgattatcatttgtttctcttgtgacagcggggagtgttctgcatgaggaactaatatgataccagaaaaacaggtgaaatgccagttacagaaacttattaccaacgactatctaataactgcgatgacagaaataggtcaattgaaacatgagtggatggtgaaaaaaatttacacttcacagaagtttttctttctttttttttttttttttttttgagacaaagtctcgttctgtcccagactggagtgcagtggcgccatcttggctcactgcaacctccacctcccgggttcaagcgattctcctgcctcagtctcccaagtagctgggataacagatgcctgccaccacgcccagctaatttttgtatttttagtagagacaaggtttcaccatgttggccagactggtctcaaactcttgacctctgacctgcctgcctccttctcccacaatgctgacattacaggcataagtcactgctcccagctgactttacaggtgtttgtttgtttgtttgtttgttttgagaaggagtttcactcttgttgtccaggctggagtacaatggcacagtttcagctcactgcaacctcctcctcctgggtcaagcaattcattctcctgcct

SEQ ID NO: 1561389 - DNA, 4001 bp, Homo sapiens
ttgagaccagcctggctaacatggtgaaacctcgtctctactaaaaatataaaaattagctgagcgtggtggtgcatgcctgtaatcccagctactcaggaggctgaggcaggggaatcgcttgaaccagggaggcagaggttgcagtgagcagagattgcaccattgcagtttagcctgggcaacaaaagcgaaactctgtctcaaaaaaaaaaaaaaaaaaaaaagaaagaaagaaagaaaaagaaaatatgggtttcttaaacttacttttaaattaagaatgtgatacttaaggtgctttattttaatcaaatactttccagtatactaactttacaaccaattatgaagtgcttacatcagtttaacttaataaatccgtgttgttttatttgcccctgtgtgtatatgaactatgatcaattagtgcttaaatacttacctcataaattcacaagttaataaactgggacctgggtctgagaaacctgagcacataccattccttttggcaacctggctgcctgctatatactcccctgaagaccatcctgctgagagcccttctactggagcagttgatcatccctcctgtgctgacggctagggaaacttaggcaccaaaggggctgctccagcagcctggctgacgtttccttttgtccatacggactgtacatgaggaactgctgagcctggagtggcaaacctatatactactcaacactgcagtctccatgcagtcctgggtcttcatactctataaccctccattccggcagacaccagacagaaccacttctgaccacaaaactccatgctatagaggcagccccgtcctacagggccatctctcccttctctcaccttagggcccatctgaaagggaaccttaagattctccctcctaaataggagccccaggacttaccctagtccaggcctctacccaaccagcccatatctaccatatctccagcccagatccctccccaaacttccagatgtgagtgggcaagctgcccatgtggacacgacacctccactctgggtcatctcaggattaccatgtccaaaacctactccctgcacagccttacccatctccatccttcctgatattcaggaacaaacaaacaaaaatacaaataaaaatccagaatggctcttcattccctttctttcagtcacatctgatgcaacaggaattcctgtctgttcagtttttgatatccatccaagatctgatcacttcccctcctctgtggcccagtcccagtagactctccactagtctactgaatttacctactcacaggtctgtcttcacccgcctcacccccaccccagtctgttttgacttgaagggcctttggcaaactttgagaaacagatcttgtcactcttctgtctccagccctccgcggccactgtggccccctcaggatgaaagcgcagctgctcgggctgtcgctcgacacgcgcctcgtcccttcccaagctgcccactacagacaccaggaggcctcaggttcgggactcgctgaatgcgcctcacatctttgcgagccgggccccttgccctccattgccaccccatcacactgcgtgtcagaaacgggacgccgcgcacgaacgccccacagttctgcacccggggacctgagcaggcggccctcacagggctttaggattcgggggaggccaggaggacgcggcgctcacctgagcggggtccctcagggcggccgccgccatcggagcctgtgagtagagctggaggggagacaatgaccgaggaaagggcccgggccaccctgggcgccgccaccgagcctcagacccgcctctgagcggcgagaacagcgtgagtcgccaccgtgccttccggcgctggtcgcctcagcgcacaaccagcttctcgcaggttagttcacctgagtcgcgaaagtgaataccaaacgagacgccggaagtcccgcccattgcgtgtcgcacgctcgggcagacctcttttcattggtcagggatcgccgcctcgcggcgctgcgccttttgggcaatgtagttcccgtgcctccaaacttccaggaagtgggcataacttcggagatggagattggagatgatagatgatgatggagatggagacggagatggagatgatgatggagatggagataacggaataggagatggaggagaaattagggttgagaacttctctcggactcatccagaaactgctgtttttggagatgggcctggatttcagtttcctgcagctgataccccaatctttccttcttttgaaggaattgaagaggatcttcagggccacagtaaagaggtttctctgggaagagccacgtatagatccccaaatttcctttgacaaaaggacacccaatattaaaattaacggtggccaagcaatgcctgatgtatgacaataagaaaaggctctgaattctggatgtaggtgatgagagagtatgggagcccaaggatttactttcctcctttatcccatgctcatttgtgctccttccttcctcaaagacccaacattggtgtacaggcacaacaataggcggcaaacccatgaggcaactccccctccatttctctccttcatccctttatgctccatgttcccactgctcttccatttccaaatataaagccagttcctcacaggtgggtagaatgctagactgttgtttacaacacacaactattgataaaaaaaagatgtcaaccctttattatgtgtagtcccactacatccattcccattgaatctagtcccctcgtgtcaatctaatttccctacttcttttcctgccccttccatctgttggctgaataatgatcaatttcaacacagcattggagtgacttatgaggacaagagaaaatgaagccctccctccttcttggagctttctggaactgggtgttcagtactacttgactctgaaaaggaggaggggagtcaatattgggattgagaacatggtagaatagagagagacacaagctctttaccccttccatggcagctatggcattagttatttcagttagaccattatgtggcatatggaagggaggggaggaggagagtgaggagagatgagtccatgacaggagtgggacaatatgtaaataatatcctccttctgaaaccaagcacaggaataaatgtttcacttccttgagaacatctattagaagagcagattctggattaatcatctaatagattatggaaattagcttaccatcatgacaggaacctttgtggacaaacctaaaaaacatattatagaatctagtcacccatacagtgtaaaatgtatagaaaattcagaatctggaaataagaaacagtatatcatttaggaaaatatatgtatgtagtaaaactataaagacatttatagaatgattatcaaaatgattaacaaaaatgtcatgcaaatgttagcttaatggggtgtatcaggcatgtgaggtgatgtgaaaagaaaggatgcctaggaactatattttttagccaggcgtgggggcaggtgactgtgatcccagctactcaggaggctgaggcagaagatcacttgaacctaggagggagaggttgcagtgagctgagactgtgccactgcactccggcctgggtgacagagcaagactctgtctcaaaaaaataaattaaaaaaaaaaagaaagaaactatgttttatcactactggttgtttcacagatgtggttttaattaaaaaacaaactatacctcttttgaaagttgtagtgaattgtgtgatagttttgaaataaagagtatatgtagacattttaattttatcacaggaagagacaacccactaaagcaggctcatatgtagaattgcaaataacatgactggtgaggaccaagtagactatctaattatttggtttaggtaaaatcattatctacataagaaattcac

SEQ ID NO: 1561390 - DNA, 4001 bp, Homo sapiens
tttgagaaggcaagaaatttcaaaaagaaaacaaaaatgtctatgtcctgtaataacaaaggtatttcaggaaacaaagaggaaatactcaccttggacattgctactgaaacagccattctttctcctctgggctctactctcagaaaaagaaaaatggaatgagatattaggcctttcttggggaatatgctaaattataacataccctcttcctccatcctcttaatctcatttaacataaagaaaagtcaggaggagactagaataagtcttctaccttctgtatcagaaagaagggccaggtcacagctgtcttgggcttgaatttatttctgtattcaaagctgtacactggagacagtcctgcagtggggtgcttcaggttcagaactgggtggctgtctcctaaagcactccctctgaaactattcccactcctggagtcccattatatttccagtggcctatttatttatttatttagagaatgagtttcactcttgttgcccaggctggagtgcagtggcttgatcttggctcactgcaacctccgcctcccgggttcaagcaattctcctgcctcagcctcctaagtagctgggattacaggcatgcgccaccacgcccagctaattttgtatttttagtagaggtcatggtgaaaccatgacctcaggtaatccacccgcctctgcctcccaaagcgctgggattacagatgtgagccaccgcgcacagcatccagtggctgtcttgaaggtattatcagccctaaaattctcatcctaagaccaggtctgtaacttgcaaataactcctattcatcactcaggtgtccaaatgtctgacttccttacttcttgccacttccctgcacccaatccccttaaggctataaggcaagaggacgcagggaagaagtcgtgaactcgtaagtaactacatttcccaaggtgaaccgaggatggatacagaaatgaagcaatacaggccatggatgaaagggcagccactgtggtcaaatcaaaaagtccttaagtcctcagagccacatgggaggagcacagagccacatgggactcacaatccataggcagacctcagccccaaatgaaccccagaaataccaaaaagaaatttacttctgtactggactaaacccccataaggtcacagaatatacaaatggccacataaagtcacacataatcacatttccacagttacacagctagaggcacaatcacccaattatgctacattgttagaccaccttgtctcaaacaaaatcccattaagtacaaggcatataattacatccaagcaccttgtcagagacacataccgccaaaaacaccctttcaaagctgcaattttagtctctttacacagtcatgaaaacagcacacacaaccccacagtcacacacaatcagacagtcacccaacccagtacgaaatcagggaaacacgcggtaataaacaccgtgtcacagcaacactgtcacacaccttaaatttactggcaaatccatcccacgatatcaggtttacacacaacctcaaagtgacacaagaacatccaaacactcttgtcacaactgtcacacacttcatagtcacaggcaaaccccaattatacacgcggcacacataaaatcacagtcacataagtatatcccagccaggtaagcaaacagtcacaaacaccctcagagtcacaactcacactcatacaaatgctcatacacaaaaccacagccacacacgtccagtcgtgtatgcacaggcagtcgccaataccaggcaggctgtagcctgcacacaaaaccggagacacggccacacgagtaaccccagcgacgctttctccgcgcgtgtccgctccggcatcccggacactcctaccttgacagaggtgcagttcagggtccaagatctggctcccgggttccaagcccaatttcgggttcgccagcccagcaggtgcggagccaagctcctccacagacgcggccctctccccacgcgaggcctccaaatctcgcaaactaacggaaatgaagctacgctccgggagcggtgcctctgggaaatgtagtccagcgctccggacgccgtgcctctgggaaatgtagtccagcgcttggctagccggccagaacgccaggaggcccgggccgctcacccctcgaggggctcgtgggctcggcctgtggaacctgcttgtcccgcctgcagcgccccggaggtttctgggagtgcccgcccgcccgcgctcagtgcgcaggcgtcagacgctcagggcctgcgagagcgagctgagtggtcccagggtctacccctggcaggagagagggtgggacccgccggccaggcaggtgcgggggaggagctggggccggtgcggggacccgccggaacctcggatttgcagaggaccctgtgtgtgccctcccaggcccttggggtgtgtgtgacaatgggagatgccaggtggactgagagtctttccgtggccgggtgtgtatggttgtgtttctgcctgtgtgtgattcttcctgctgtggggtgtgaggtgatttgtactttaagctgcgtagtaatgggattttataactgtgtagaatcgtctaacagagtaagacgattttacacagatctctattgtggtttgcttatgaagggtatctgtatgtatatctgcttttttgtgtgtggccgtaattgagtaactggtgatctgtgttatataaacgtgctttctttgtgcttgtatttcagtgtctgtaagggtgccaagagcaaatgagctgtgtgtgatcgtgtgtgacagtgaaaatactatggccaagttatttcttccttaaatagtaatgtaataatctggaaaagataatcaatttatctgacaagtaatttagacatcatttttctattggatcaaatatatgtgttatcgggaagaatccaaaattaacgtagttttttctttgtttttagaaagattatttcaaaaccagtcctagggtaactgccttttcctctgccacagcaggccaaaagtagatatccattattttctaattagagggtaaagtttctcttattactgggtacggttgagaggccatcaactaataaaataataaaacaacgttatacataagaagagtgaattttagcacagtacagcactagtcagatttcccaaattctaggtcaaacacttgtcctcattttctgatgagaaaaccttggccggcagaaagtaacttaaggctgtagagtttgttggtaaacctgaacttatttttacttacttcaagacctcttggccttttatgatttttgaataatcaaaaacttgtgaacttccagcacagagaagatagagtataatttcaccactccttcagagggaaaaaaattaataaaacttggtcttgcaagaccatatatcaaatacattgatctcttaccggtaatgtgactggaatagcaaatttggtgatcagaattcttgagggaatgaacctgtgtgtgtgatcaggcatagctatgtgaaatatagataattaaattgcactgagttagagtgggtcaaagtcaggcaagaattatgtccaattcacatgcacacgtatgtttattgcggcactattcacgatagcaaagacttggaaccaacccaaatgtccatcaatgatagactggattaagaaaatgtggcacatatacatcatggaatactatgcagccataaaaaaggatgagttcatgtcctttatagggacatggataaagctggaaaccatcattcttagcaaactatcgcaaggacagaaaaccaaacaccacatgttctcactcataggtgggaattgaacaatgagaacacttggacacagggtaaggaacatcacacactggggcctgtcagggagtgggggtagggggaggggtagcattaggagatatatctaatgtaaatgatga

SEQ ID NO: 1561391 - DNA, 4001 bp, Homo sapiens
aatacacttttaagtattgggtagcctcaactgggccttgattggaaacactcaaatcaaatctgcatccccagctcacactgtcagagaggcaaggccaaaccactctgtgcctaacactggtctgttttatgggtcttcaaagagaactaccttttcatagtatttatctggttaatttttttccaccaaagtttggttttatttggctgggcagggtggctcacgcctgtaatcccagcactttgggagcctgaggccagaagatcatgaggtcaggagttcaagaccggcctaaccaacacggtgaaactccatctctactaaaaatacaaaaattagccgggcgtggtgtgcggctgtaatcccagctactcaggaggctgaggcaggagaatcgcttgatcctgggaaatggaagttgcagggagctgagatcacaccactgcactccagcctaggtgacagagcaagactctgtctcaaaaaaaaaataataataataataatgacaatcattaattaatcaaacatgaaacagtggctcaaacaatcacctacagaatgggagtcaaatgatgataaacagtgaaagttccgcagttcattatccatgaaccaaattcacaaaaactctataggcctccttctaccaataagactaaaaccctaaagtcacaaaaaccacagttctggactcctggtatagatcacacctactcccaggggtctcaaactaggggtcctagggctgactaggcccacaaatattcagtttggtggcatctgtatagaatatttaactctttttttttttttttttttggagagatggagtcttgctatgttgcccaggctggtcttaaactcctgggctcaagagatcttcctgcctcagcctctcaaagtgctgggatcacaggtgtgagccactgtacccagccagctttttttttttttcattgatatacaatcaatgtagcttaaaatgcacacatccttcgtttctcttttttttcttttgagacggaggctcactctgtctcccaggctggagtgcagtggcacgatctcagctcactgcaacgtccgcctcctgggttcaagtgattctcctgccttagtctcccaaatagctgagattccaagaccccaccaccacgctcggctaattttttttctatttttagtagagacggggtttcaccatcttagccaggctggtttcaaactccttaatccaaccatcctgttcattgtaaatttgattattgtgatactagaataataaagccttcatcctttccctctggaggtctgattaagaagctctcttgggatgtacaggcctaggaactccattcgaagataatgaattattattcttagtattctttagcagaaagacttgcggtctacaaacgtttatattcacatacacaaatacgcacaccctataaacctaaaaagcatctttatctttcgccatgaaagtaatggtcaaaaataaaacacaacacaataagacgaaaccaaacttacagatgaaacattcgtttgcataagagaagacagaaaaggccccctagaaccaactttcacccagtgctcaccggaacactcagaaatcgccaggtccctgaaccgggaagatcctggggacggagccaacgcggatgcaaaaggcagcaattattttcctgccggaaaaaaattcacaaacgctgctttggaggcctttggagaggggcgcacagatgaaaacaccctgcggacaccgtaactataaacccgactcctcccgaggagcgacggtccgagcggacgctagcgggcccagcagacacgagcagagcgggccaggcctctctaacgtccgggccaaacccgtccttcaccccaaaaccagttcatctcctcggaactcacccaggccagtgaggccttaactctgaaaggcaaaaagactctcaggcgctcacagccggcgtcacaaaaggaacggcgcaccgctgacgtcatttacgctctccgcctcgggccaggcggggtttcgggactagggtttctgccgtgtaatacctcctcgaggcagaaaaattctactttccatctgcttggctgcggaggaccttggggtgggctcagcgtgggggctgcaggcagaaatgggtccagaaggcaaggtcgaggttagagccaagcctgtgggcagggctacgggcagggggcggggaggaatgtgggtccaggcccagaggaaaaggttgaagttatagccaggcctgtgggcgaggccgcagcagggcggccataggggaaggagccaatgtgttatgcatgtagaaaataggtaactacgtcttttgctctgttactatttcaacatttgatgtaaaaaacattttctatgcagctaaaagaattgtttttaaaaataatttctaggttttctgccttgctttaaaacatcttttctttttttttgagacaaaatctcactctgtcaccaaggctggagttcagtggagccatctcagctcactgcaacctccacctcccaggttcaagcgattctcctgcctcatcctcccaagtagctggaattacaggtgcatgctgccacaccctgctaatttttgtatttttagtagaggcagggttttgccatgctggccaggctggtcttgaactacttgtcaggcctctgagcccaagttaaatcatcataaaccctgtcacctgcacgtatacatccagatggcctggagcaactgaagaaccacaaaagaagtgaaacagccagttcctgccttaactgatgacgttccaccattgtgatttgttgctgccccaccccaactgatctcttgaccttgtgacattcttcttctggacgagtctcaggagttccccaccgagcaccttgtgacccccggccctgccagcaaaagataaccacctttaactttccactacctacccaaatcctataaaactgccccacccctatctccctttgctgacccctttctcggactcagcccacttgcacccaagtgaataaacagccttgttgctaacacaaagcctattggtggtctcttcacatggatgtgtgtaacatttggttccgaaacctgggacagggggactcccttgggagactggccccgtcctcaccctcactccgtgaggagctccacctactacctcgggtcctcagactagcccaaggaacatctcaccaatttcaaattgggtaagcagtctcttcactctcttctccagcctctctcactacccttccatctctctgtccttccaattccagttctttttcctctccagtagagacaaaggagacacattttatctgtggacccaaaactccagctccagtcacggactcaggaagacagtctttccttggtggctaatcactgtagggatacctgcctgattattcacctacattccattggtgtctgatcactgtggggatgcctgccttgatcattcacccacattcccttggtggcaagtcaattgcagggctgcctgctttggctgcttacccacattacagcccagggctgctcacccccaccccactccactgccttctccatgtctctacctttctctttaaacttacctccttcactatgggcaatcttctgccctccattccctgttcttctcccttagcctgtgttctcaagaacttaaaacctattcaactcacacctgacctaaaacctaaataccttattttcttctgcaacaccacttggccccagtacaaacttgacaatggttctaaatggccagaaaatggcacttttgatttctccatcctacaagatctagataatttttgtcataaaatgggcaaatggtctgagatgcctgacatccaggcattctttacacattggtccgtccctagtctttgctcccaatgtgactcatcccaaatctttcttgtttctttcttg

SEQ ID NO: 1561392 - DNA, 4001 bp, Homo sapiens
tagaaaaaataatctcacaatacacttttaagtattgggtagcctcaactgggccttgattggaaacactcaaatcaaatctgcatccccagctcacactgtcagagaggcaaggccaaaccactctgtgcctaacactggtctgttttatgggtcttcaaagagaactaccttttcatagtatttatctggttaatttttttccaccaaagtttggttttatttggctgggcagggtggctcacgcctgtaatcccagcactttgggagcctgaggccagaagatcatgaggtcaggagttcaagaccggcctaaccaacacggtgaaactccatctctactaaaaatacaaaaattagccgggcgtggtgtgcggctgtaatcccagctactcaggaggctgaggcaggagaatcgcttgatcctgggaaatggaagttgcagggagctgagatcacaccactgcactccagcctaggtgacagagcaagactctgtctcaaaaaaaaaataataataataataatgacaatcattaattaatcaaacatgaaacagtggctcaaacaatcacctacagaatgggagtcaaatgatgataaacagtgaaagttccgcagttcattatccatgaaccaaattcacaaaaactctataggcctccttctaccaataagactaaaaccctaaagtcacaaaaaccacagttctggactcctggtatagatcacacctactcccaggggtctcaaactaggggtcctagggctgactaggcccacaaatattcagtttggtggcatctgtatagaatatttaactctttttttttttttttttttggagagatggagtcttgctatgttgcccaggctggtcttaaactcctgggctcaagagatcttcctgcctcagcctctcaaagtgctgggatcacaggtgtgagccactgtacccagccagctttttttttttttcattgatatacaatcaatgtagcttaaaatgcacacatccttcgtttctcttttttttcttttgagacggaggctcactctgtctcccaggctggagtgcagtggcacgatctcagctcactgcaacgtccgcctcctgggttcaagtgattctcctgccttagtctcccaaatagctgagattccaagaccccaccaccacgctcggctaattttttttctatttttagtagagacggggtttcaccatcttagccaggctggtttcaaactccttaatccaaccatcctgttcattgtaaatttgattattgtgatactagaataataaagccttcatcctttccctctggaggtctgattaagaagctctcttgggatgtacaggcctaggaactccattcgaagataatgaattattattcttagtattctttagcagaaagacttgcggtctacaaacgtttatattcacatacacaaatacgcacaccctataaacctaaaaagcatctttatctttcgccatgaaagtaatggtcaaaaataaaacacaacacaataagacgaaaccaaacttacagatgaaacattcgtttgcataagagaagacagaaaaggccccctagaaccaactttcacccagtgctcaccggaacactcagaaatcgccaggtccctgaaccgggaagatcctggggacggagccaacgcggatgcaaaaggcagcaattattttcctgccggaaaaaaattcacaaacgctgctttggaggcctttggagaggggcgcacagatgaaaacaccctgcggacaccgtaactataaacccgactcctcccgaggagcgacggtccgagcggacgctagcgggcccagcagacacgagcagagcgggccaggcctctctaacgtccgggccaaacccgtccttcaccccaaaaccagttcatctcctcggaactcacccaggccagtgaggccttaactctgaaaggcaaaaagactctcaggcgctcacagccggcgtcacaaaaggaacggcgcaccgctgacgtcatttacgctctccgcctcgggccaggcggggtttcgggactagggtttctgccgtgtaatacctcctcgaggcagaaaaattctactttccatctgcttggctgcggaggaccttggggtgggctcagcgtgggggctgcaggcagaaatgggtccagaaggcaaggtcgaggttagagccaagcctgtgggcagggctacgggcagggggcggggaggaatgtgggtccaggcccagaggaaaaggttgaagttatagccaggcctgtgggcgaggccgcagcagggcggccataggggaaggagccaatgtgttatgcatgtagaaaataggtaactacgtcttttgctctgttactatttcaacatttgatgtaaaaaacattttctatgcagctaaaagaattgtttttaaaaataatttctaggttttctgccttgctttaaaacatcttttctttttttttgagacaaaatctcactctgtcaccaaggctggagttcagtggagccatctcagctcactgcaacctccacctcccaggttcaagcgattctcctgcctcatcctcccaagtagctggaattacaggtgcatgctgccacaccctgctaatttttgtatttttagtagaggcagggttttgccatgctggccaggctggtcttgaactacttgtcaggcctctgagcccaagttaaatcatcataaaccctgtcacctgcacgtatacatccagatggcctggagcaactgaagaaccacaaaagaagtgaaacagccagttcctgccttaactgatgacgttccaccattgtgatttgttgctgccccaccccaactgatctcttgaccttgtgacattcttcttctggacgagtctcaggagttccccaccgagcaccttgtgacccccggccctgccagcaaaagataaccacctttaactttccactacctacccaaatcctataaaactgccccacccctatctccctttgctgacccctttctcggactcagcccacttgcacccaagtgaataaacagccttgttgctaacacaaagcctattggtggtctcttcacatggatgtgtgtaacatttggttccgaaacctgggacagggggactcccttgggagactggccccgtcctcaccctcactccgtgaggagctccacctactacctcgggtcctcagactagcccaaggaacatctcaccaatttcaaattgggtaagcagtctcttcactctcttctccagcctctctcactacccttccatctctctgtccttccaattccagttctttttcctctccagtagagacaaaggagacacattttatctgtggacccaaaactccagctccagtcacggactcaggaagacagtctttccttggtggctaatcactgtagggatacctgcctgattattcacctacattccattggtgtctgatcactgtggggatgcctgccttgatcattcacccacattcccttggtggcaagtcaattgcagggctgcctgctttggctgcttacccacattacagcccagggctgctcacccccaccccactccactgccttctccatgtctctacctttctctttaaacttacctccttcactatgggcaatcttctgccctccattccctgttcttctcccttagcctgtgttctcaagaacttaaaacctattcaactcacacctgacctaaaacctaaataccttattttcttctgcaacaccacttggccccagtacaaacttgacaatggttctaaatggccagaaaatggcacttttgatttctccatcctacaagatctagataatttttgtcataaaatgggcaaatggtctgagatgcctgacatccaggcattctttacacattggtccgtccctagtctttgctcccaatgtgactcatcccaaatc

SEQ ID NO: 1561393 - DNA, 4001 bp, Homo sapiens
atttaattttcttttttgggacggagtgtcactctgtcgcccaggttggagcgcagtagcgcgatctcggctcactgcaacctctgcctcctgggttcaagcgattatcctgccccagcctcccaagtagctgggactacaggcgcgtgccaccatgcccggctttttttttttttttttttttttttttgagacggagtcttgctctgtcgcccaggctggagtgcagtggcacgatctcggctcactgcaagctccgcctcctgggttcacgccattctcctgcctcagccttccgagtagctgggactacaggcgcctgccaccacgcccgactattttttgtatttttagtagagatggggtttcaccgtgttagccaggatgatctcgatctcctgacctcgtgatccacccgcctcggcctcccaaagtgctgggattacaggcgtgagccaccgcgcccagcctacttatttatattttttaagagacagggtctcgctcagttgcccaggctggagtgcagtagggtgatctgtaggaaaggggcttccaggccttaactcatgtactcccccataaccaggttgggaggttagctcactgtaacctcaaactcctgtgctcaaggtaccctactagcccctaggagagcagctgggactacaggtatgcgccaccatgccaggcttaatttttactttttttttttttttttttttttgtagagacgggggtctcactatattgcccaggctggtcttgaactcctggtctcaagcgatcctcctgccttagcctcccaaagtattggtatcactgcaactagcccaaagaattaatatagctatgttccatgtgatatttgggacatacttttctaaaaggttgtatcttttggatataattgtttatctgaaattcaaatttaactagacattgtatattttatacggcaaccacacacctgggacaatcaagacattccctgaagttaccaggagacaatgcccatcagcctacacttttccaagcccacgtcacacaaggccccttccagagtattccagacgtcaggtagggccatcccttggttcacaagtcccactcctaccacgcctatggcagccaaactgaaaggcaaacacagtgctggagaccccacaatgccctgggcctatagcagtcaattcccaagatgccccgcgtgaacacaataggcacccgttccaatgctcgagcaaagagaccagggcaaaaccttccactacgggacaataacggccagttcccacaattcgttgtggcagttcttcccaggatgccttaggcctatagcgaccaccttcccagactccccgtgtggaagcgctccaagcctccaggacggtcagcggcaggtgtgggataaaaggaaccggtctcgacaaggatctgggacactctttcccaggatgcaccaggcctacgactagcggaccgactcccacagcgcttcaaggcggagcgctcggttctcccaggatgccccagggcggcacaaacgcgtagggggagaaaaagaagccctcgggtcaccacggccccagaccgccggctccccggtgacgggagtcgtcgctcccatcatgcagcggggccgtagcgcccgcttcccggcatgcctcgcgcacccctgcccgggacactcaccggcgccggcggcccccgctccggctctgcggcggcggctgcacgcccagcctctgcgcctgcgtcgcaagtagggtaggacagcgcgcagggggcgtgaagagcctagggcgcttgcgcggcgagacggactagtcctgtagcgctgtgggaagaggggctatgcgcgtcgggccgtcgacgagacccgcgcggggggcgccgtgctttgcccctcgctgcctgggtttacttggtacagcccgcggcccaaaggaacaagaagctgaagggttcgcgcgtgcgtgtgcggggcaggaacgcgccttacaaaactgggatgcgctgggggtggagggcgctagttcggactggatcctgggcccgaggcctgcttatttgcataatcctagcgcgggacaatgaaaggcctcccgcactggaaggagtgatttgcatattccccggaggggccttactccagagcgcagtgattagcatatggcgggggcaacctgagcaaagcgcatgcgcgcagggactgcagactgacgcgaagtgggtagccttgtcttcgtaggggatcagtttgcatcctgagagagggcacgagggccaggacccctcccaaccaggataaaggtttattgatctcctaggtgtcaggccccatgctggcggattctgtggtttctgcagtgaaccatactcctgtactcacggcaccccagtcgaaggagatacgcacctaattagacaactactacccagaaggtcagacctggagtgaggaacacagggggctgtgggagcctaagaggcgcttgccccggcctctggttctagaaagacttccaggaggtggtgatccttaagccaagtacgaataggagccaactagaatgggaatgggtctggcagaatgaactgcaagcgccaaggcccagaggccaaaaaaaaaaaaaaaaaaatagaagcgcatgttttgattgaggaagcaagagcagcttagtatgcctagaacctaactggagacgggaaatggttctatagacgatgttagagttcaactatggctacattccagtcttcctgtaagtgactttgtcacattctggcttaaaactcccccaaagggatcccattaggaaaaaaaaaaaatccaaaaatctttatcatggcctcagggctatacacctggtctggccgtgcttatctttctgaccccacctacttcctcctccctccatttctgtccagctccaccttaccccaaactctttaccagctcgggcctctgctcttgccgttccctccgcctgaaaatgcttttccctctgacctttgaatacctactcttgtgctcaccattcatatcttggtacagatgtcaatctgagaggcttttcctgatctctccataatagcacttacacatttgactggagttatggataaatcgggattggccatgagttggtggtggttgtaactggcatgaagagtacatggggctgggcgcggtggctcacgcccgtaatcccagcactttgggaggccgaggctggtgtatcacctgaggtcaggagcttgagaccagcctgggcaacatggtgaaaccctgcctctattaaaactacaaaaattagccaggggttatggggggtgcctgtaatccttgctacttgggaggctgaggcacgaagatcacttgaaccctggaggcagaggttgcattgagtcgagattgagccactgcactccagcctgggccacccagcgagactctgggtctcgcctgtaatcccagcactttgggaggccgaggcgggcggatcacgtcagaagatcgagaccatcctggccatcctagaccatttctactaaaaatacaaaaaaaaaaaaaaaaaaattagccgggcgtggtggcaggcgcctgtagtcccagctactcgggaggctgaggcaggagaatggcgtgaacacgggaggcggagcttgcagtgatccgagatggcgctactgcactccagcctgggcgacagagcgagacttggtctcaaaaaaaagagtacatgggacgttattgtcctgtctactcctgtgggtttgaagttttccataatgacaatggcataccacatcaccatactctgcatttatattaatagttcttatcacaatctgaactttctttgcttccttgttttgagtgttttcctcatgaaagcttcatgagggtaagaatggagtcgccctttttcactttgggttctcaatgcttagagcaggatcagatttcagattagtgtagcgctgtctttaac

SEQ ID NO: 1561394 - DNA, 4001 bp, Homo sapiens
gacagtactggaacccaggaccaggaaaaaaactaaagggtggctgaggacacatcaccccacaaaaattccaagaaaaaccttgatgccaaaacattctcataaaatctctatgcctagggaagataaaaggaaaagagacaaagatttttttacaatacagtgtcagaagattattccttgctttcttcttatggaaaatatttataaacagaaaacaaatctttttaaatgtgccatccaatgctttgtcaaaaaatgtttaattaaaatacagtatcaaaaatgtacactaaaggacaaatagttaatagtgtgaattagggagtagtgggagttggcatttgggattgtcaggaggaaatggaaattttgtattttactgcaagccagagttaggctggaggaatggggggcgtgggagtagatttgagaccctgcttaggacacctgtgaaaaatgcaggggaagatcagttttgtgtagggagtgaaaatagttaagtggtaggcaattcgactgaggtggctgtagtccctgaattcctacttttaaaagatctaactcaagccgggagccgtggctcacgcctgtaatcccagcactttgggaggccgagatgggcggatcacccgaggtcgggagttcaagacaagcctgaccaacacggagaaaccccgtctctactaaaaatacaaaattagccgggcgtggtggtgcctgcctataatcccagctactcaggaggctgaggcaggagaattacttgaacacggaggcggaaggtgcagtgagccgagatcgcgccactgcagtccagattgggcaagaagagggaaactccatctcaaaaaaaaaaaaaaaaaaacaaaaaactaactcaaatgcttttttttttgtaaattactacactggggaaaacaaatacagggttaactattaactggaattaagctctgattacataaccaggaaattttgtaagctgaagatggaaattaagaaactacgtaaccctacctaaccaataactgaatttgcgtttttgtaccatgcgcaaagtctttccttcaagctcctccaaaggaccacaaactacatcccacagctgggtgctttacaattttagaaccactctttaattaaattctttaatattttgcagtgactccccttttttttttttttttttgtttgagatagtctcattgtgtcaaccagcctggagtgcaatggcacaatcttggtctcctgggtttaagcgattctcgtgcctcagcctcccacatagctgggattacagatgcctgccaccacatccggctaatttttgtatttttagcagagagggggtttcaccatgttggccaggctgttctcgaatgccggacctcagtgatctgcccgcctcccagcaaactgctgggattacaggcataagccaccgcgcccggccactcccatagatttttaataggagagaatgggaactgggaaccccacggaccaaagctcttcccgctcatgaacccgcatcccgagtcactattctcacctgacgcccctcccatggttcttgcacaatctgggagagactgcggaattgcgcgtgcagagctccccagacagggctacacgtcaggcacagtcactgcggagggaagacaggacgcccggggcccggctgtcagcacagtcgccatcttatggctgaaggggactgaagccgagctgggcaaggagaattccgggcgcagattgtggagctgactgccgggagacctaagtccgccacggccacttctcacggttccgaccagcccctccccctctctggggatgtcagactcggcactctcaccatttctaggcttccagggggtcctggagtcttagctgtgtatctcccaatatctgcgggtcacagggccacacaggctgggcctctaagaacaaaggacacagaaatgaagacgagacctggagctctggctgcagcaagagccaaacgccccgccatattccggaaaccgtcctgtcgctccagctgcgtgcctgattggataatgtttaagacccgccctctcaggccctgagtgacagagggtgatcagttgctgggcagaatgaagcgtgacagcctagctgcagccttttcaggcaggctttcctccgagctgagccaggcccaccctagagggtgtttgcattgaaccttgtgtgtaaggtcatatgcatttataaatatactatatggctagtcacaaatgaaaagaatataataacaattacttttaaattttagcttttatcaccttcctagcttctggtcctttgagcaggcagcctgagattttaaaaaggaggcagtcctctgaaataaaatgtgagccacatgtgaatttttaattttccagtagccaaactttaaaaagaaacatgaaacacgtggaattgattgtaataatgtaactaacccaatatgtttaaagtattataattttaatatgtgagcaatgtgaaaggaaaatatcttgggcccccaaaattactaaggaaaactcaagctgggaactaaaggccaatcagaaactcaaaagaatttgagtccacctatctgtgacctggaagctccctccagcttcgtgtcttcctgcctttgcttcaagttgtcccaccttttcagactgaaccaatgtacttcttacatatattgattgatgtctcatgtctccctaaaatgtataaaaccaatatgttccctgaccaccttgggcaggtgtcctcaagacttcctgaaactatgtcataggcgtgttctcaaccttggcaaaataaactttctaaattaactgatgtctcagattttctggggtcacagcaatatgtaattattaaggcactatatatatttttggaactaaatcttcgaaaccaactctgtattttacttttctagcaaattgcagttcagaccaggcacattccaggcacccaggagccacacatggccaacagccaccacgttgaagtgcagctctgatgtcaggtgggtggaggccctgaacatcccttttctgccagaggtgaggagacagcctctctctactaacatctatcttcggttctgagggtgcgatagatagtggccatagcaagggcagagggcagcacaaataaaataaccacaggtagaccactctttgccacctgttgtccacctttcatccagagatcagacagtgaacaaaaaattctggggccacaggagacaggagaagaaaactctatgtctttgggtctgtccacagtcttaacctctaactttaagatatgaagaaggccgggcgcggtggctcacgcctgtaatcccagcactttgggaggccgaggtgggcggatcacgaggtcggaagatcgagaccatcctggctaacacggtgaaaccctgtctctacttaaaaaatagaaaaaattagccgggcgtggtggcgagcgcctgtagtcccagctactctggaggctgaggcaggagaatggcttgaacccgggaggcagagcttgcagcgagccgagatcgcgccactgcactccagcctgggggacagagcgagactccgtctcggaaaaaaaaaaaaaaaaaaaaaaaaaaagatatgaagaaaataaattaaaggcaaacttattttgctgtttggccttggctctaatggtcaggctgtggttatctgtttttttcctgtggtgtggggtactgtgtgagtataagcaccaatcacacacatacatgtctacctgtatttctgcattactcaacattgtcttaggagacatccaacttcaaatcgggaaaaaaagaaaagaaaagtcagtatctttagggtgtccactgtcagaaggtaactagtaatcaacctgtcattaaatcctggcattccatctgcacagggtgcatgtattagttagctattgcagcataacaaaccatccaaaacttattt

SEQ ID NO: 1561395 - DNA, 4001 bp, Homo sapiens
agcagagtcacatcacctgggtgctgagcccagcaatggataacaatgctctctgtggtccaggcccaggcaggagagacacattacctgagtctagtgataagtcaaaatttttcctgtaggcagagtgcaggcaaaaatggagagtcactctcctaggtgattgatgcagagatatgtcacaaggccctctgtagaaagggcctgggcagggccagacacggtgggtcacacctgtaatcccagcacttcgggaggccgaagcaggtggatcacgaggtcaggagttcagaccagcctggccaacatggtgaaaccccatctccactaaaaatacaaaaattagccgggcatggtggcaggcacctgtaatcccagcacttcaggagactgaggcaggagaatcatttgaacctgggaagcggaagttgcagtgagccgagatcgcaccactgcactccagcctgggagacaaggcgattctctgtctcaaacaaacaaaaaaagaaaaagaaagggcctgggcaggagcctcttattgtataggtgttagacctagtaacatgtcctaacgtccaaaatattcagggactaaggaaaaaaggagagtcacataacctgagagcagggcttagcaatatgtaacaatgcaccttgtggacagtgccaaggcaagaaaaaagactcccatcacctcagtgaaaggcccagctatgtgtcacaatgccatctgtgggcagcaccaaagctggaaaaaagtcacatcttcaaggtgcaaagtcaagcgatatgtcacaatctccatctgtgggctgggccaaggcaggagtcaaatcactaaggtgcttagtagatgcatgcaatcttacctgcaggaaagtccaggaatgagattagaaattccacacatgtccaggttccaggtatgagggtcaacacctcctgtatgttgggtctgtctaagtacgtgagtcacaatctcaatggttgacggtattgcaagagagccacaattttgtctgcggactgtgcttttcagtgcagtcacagcctcacatgtgtactgaatcttggtctgagagtaaccaacccacctgtggaccaggcccgcatatgaaagtcaattatccaacttttgacagcctccgagtgtgagattcagaaatgttcctaagaggccgggcgcggtggctcacgcctgtaatcccaggacttttgggaggctgaggcgggcgtatgacctgaggtctggagttcgagatcagcctggccaacatggtgaaaccccatctctagtaaaaataaaaaaataaataaataaaaattagccgggcctggtggtgcgcacctgtaatcccagctaatcggaaggctgaggcaggagaatcgcttgaacctggaggcgaggttgcagtgagccgagatcgcgccactacatttcagcctgggcgacatagcaagattccctctcaaaaaaaaaaaaaaaaaaaaaaaattaacaacagaaactgaagaccccagggccgcagctcctcctgcgcacacaccgagtcgggattctgccccgatcatccgccgggcatccctgaacaatctgggaaatactcggggctgctggtgcagagctgaccagagagctccagacagggtaccgcgcaggaatggggcgggacgcgggaggctcggctgcgggcccagccgccatcttgcggccagaggggcctggggcggagctgcgccagcgaccaggactcaggagcggactgtgaggaggccggtcccgccactttcacagcctgctctcccctctcgggatgcctaaccccgcacactcaccatttcccagcttccaggatgtccgggcatcttagctgtgcgtctcccaggacttgcagatcacagggtaacggaggctgcgacaaagtcaccggggattcccgagttggagaacgcggaaaagcagaggcgggtcccaaggtctagcgggagctggagacaaaggccccgccaaaagccggaagccacggccccctctccaactgcgcgtctgattgggtggttcccacgccagcgccactgattggataaagctccaggacccaccctccctagcgtttgcgcattttatggacagggaaacaggctcaagtaggcggggcacatgcccagggaattacagctaatcaagtgagctgagccttgaaatgcacttgcttttttccttccctgggtcagcttgtatagtgcatcttagtagctactgaaggggaagaaacagaacatttggatacccttttaacaactttttaattatgttgacaatgcagcaaagaccctcgtcccatccctgagggtctctctcaccgtgctgtaccacactgctgtacacatcttgggatgaccattaggaacggggaagcagctggggctagggatagataaacatgaattatgttgcctaaatttgctcattttagaaaaacatctaaaccaatctctgtgaagtggctattatcagggtaattgtgccctgactgtgctacatctcaatctgacttctctttttttaaaataactgcattactctcattaacggggttatttcactttctattggaaaatcgccaattgtcctctgtaggtgtcctgatgtaatttgctagtttagaccctggaggtagggataagaaaatacttgagctacatcagaacacctaactcaactggaggatatatagaaattccttaataatatctaacagttttctcaatacccattatatttaacagtgatagcttggagggctgagaggtgaaacagatgacacaaccttagaagttcacttttgttgccggcgtggtggctcacgcctgtaatcccagcactttgggaggccgaggcgggcggatcacgaggtcaggagatggagaccatcctagccaacatggtgaaaccccgtctctactaaaagtacaaaaaaattagccgggcgtggtggagcatgcctgtaatcccagctactcgggaggcagagccaggagaatcccttgaatcagggagttggaggttgcagtgagccgagatcgcgccacagcactctagcctagcgacagagcgagactccgtctcaaaaaaaaaaaaaagattgtcttcatccaagccagtttccatttcttggacacacattgctggtcagccaatcagatgctggtattgaggtgaaaacagaaacgatttctgcctctggattctctgagattcgtgggaaaaatggtatccctaaaaaacaaagcaagacacaaaaacctgaccccggtgagatggtgcaagaacttgcaaagtaaaatgcacttggaaactccctgggacatagtgcagtgtctcctgagaggtcataaaagaggtgggtttcagaaaataaatctaatcacgcattccatttgtttaaaattctcatttaccctttttttttttttcctgtaaggtgtgttttttatggctgagtgaatttcaaacagaattccaaggcttatcttttaaaatgctaccaaagaaaagaataggtaaaatatattttccgttttggctgtaaaaaatgcatacattaaaaaaaaagtggtagataatgggcaagttacaagattcgcaaaaacatcagttcctctttgtgcagggtaaatttgtgacattgactatacctgttctacatcctgttatcttgatttctgggtttaatgtcaaattttgtaagatgaaacttggaacctactaaaagtgttcccatatgactaattactacatgatttttaatggaaataatataataacacacttattgtctgaaaggaatagatacttttgcttttcttactgaggtatgaaatgtaagcaccttaaaatttcctctttttttttgtggcagagtctcgctctgtcgcccaggctggagtgcagtggcacaatctcggctcactgcaacctttgcctcccgggttcaggc

SEQ ID NO: 1561396 - DNA, 4001 bp, Homo sapiens
gtgccggtagttccagctactggagtggctgaagcaaaagaatcacttgaatcagggaggcagaggttgcagtgagcagagatcacatcactgcactccagactgggcagcaaagcaacactgtctcaaaaaaaaaaaaaaaaaagtaaagaaaaaaagaaaaggaaaagaggcacagagatttttattttttacaaacagtgtaaggggattattttttgctttcttttcaatatggaaaatattttcaaatagaaaacaaaatttaggccggactcggtggctcacgcctgtaatccttgcactttgggaggccaaggcgggtggatcacaaggtcaggagttcgaaaccagcttggccaacaaggtgaaaccctgtctcaactaaaaatacaaaaaaattaaccaggcacggtggcaggtgcctgtaattccagctactcgggaggctgaggcaggagaatcggttgaacccgggaggttgcaatgagctgagattgcaccattgcactccagcctgggaaacaaagcgagaggaaggatggaagcaaggatggaaagatggaaggaaggaaggaaggaaggaaagaaagaagaaggaaagaagaaaggaaaatttatttaagtccatccaatgatttttcaaaaaataattaaaatatctgtatcaaaaatatacagatatctaaaatatctttatctaaaacgtatctctgtatctaaaatgtacactaaaaaaaaaaaaaaaatagcccggctcggtggctatttttaagtgctgtaatcctagcactttgggaggctgaggcgggtggatcatctgagctcaggagttcgagaccacctggccaatatagtgaaatcccgtctttactaaaaatacaaaaaaaattagctgggtgtggtggcaggcacctgtaatcccagctactaaggaggctgaggcaagaaaatcgcttgaatccgggagacggaggttgcagggagccgagatagcaccattgcactccagcctgggcagcaaaagcgaaagtccatctcaaaaaaaaaaaaaaaaagaaaaaaaagaaaaaatagttgataacgtgaattgcggagaagaaggtggcatttgggaatgtcagaaataaaggaaaatctagtttagtttttttttttttttttttccagagggagtttcactctgtggcccaggctggagtgcaatggcgcgatctcggctcactgcatcctccgcctcctgggttcaagcgattttcctgtctcagcctccctagtagctgcgattacaggcgcgcgccaccacgcccagctaatttttgtatttttagtatagacggggttcaccatattagccaggctgctctcgaactcctcacctcgtcatccacccacctcgacctcccaaagtgctgggattaaaggcgtgacccaccgcgcccggccgactctcctgtttctaatagaccaaaagagggactagaaatgccacggaccaaagctcttcctattcatgaaactgcatcacgagtcaggattctctcctgacgaccctcctgtggcccctgcacaatttgggagagacgccgcgttgcggctgcagagctgcccacagagggctgcaggccgggacacagtcactgcgcagagaagagacaggacgcccggggctgcctcccagagcagccgccatcttatggctgaaggggattgaggccgagctgggcaagaactccggcacgcgcagattgtggagctgactgcgggaaggcctgagtcacgccacagccccttccccctctcgggatgtcggaccggcactctcaccatttctaggcttccggggggtcctggcgtcttagctgtggatcccccaatacccgcaggtcacagagccacagaggctggacctctagcagcagaggacacagaagaacgaagacgagacgcagagctccaactgcagccagagacaaaggccccgccacatcccggaagccgccctgtcctctcctgccccgtgcctgattggacggtttccagcccagcgtccctgattggataacttctaaggtcctgcccccgcaaaccctgaatgaaagatgtgatcagacgctgggctgaaagaagaaagaatgacagcctaggctgccgccttttcaggcagggcttcctccctgagcagagcaggcccaacccagagggtatttgcctttaaccttgtgtataaggtcatcttcacttataagtaatatactatatggatactaaaaaatgaaaacaattgtttttgaatttcagcttttatgaccttcctggcttctggccctttgagtaggaagtattacaaacattgaatattttattatttatcctctgtggggtttttcttattcttgagagggagtctctgttacccaggctggagtgcagggtcatgactgcagctcactgcagcctcagcaatctaggcttgagcaatttacctgtctcagccttctgagtagctgggaccactggcatgtggccccatgctcagctaatttgttatcatatttttatttgtagagatgaagcctcactagatagcccagaatggtctcaaactcttgggctcaatgaatcctacaaagtcagcctcccaaagtactgggattataggcatgaaccatcacattcagactgaattattttatcaaaaaatttttttaaagcattgaggtccattaatagaattcaaggaaatgttatgcacatgttttaaaagcaaattaaaaagcatatacaaaaagagaacattttttaaaaaactaaatataggtaatgttaccagaaaaagtttagatctcctgactttaagttgcagtatgctaatggaatattcttagtggatagtattccattttcataagaaattcaaaacaagataatttccaggttttagaaactgatgtaaaacataaaaatatagaaaatctctaatgtgttcccatgatatagtattacttgaaatataaactgggcaaactcagcaaaagacaatttaatctcaaatttcaaaataggtacagaagttctaatggaataataaatggaatccaggattttattcataaaaaggctaaaaagtgaccattctctgtgattttgaaagtaggaatttgtgtaaacagatgtgtatttgcatctacatttgcctacacttactttttttttttttttttttttttttttgagacggagtcttgctctgtcgaccaggctggagtgcagtggcacaatctcggctcactgcaacctccgcctcccaggttcaagcgattctcctgactcagcctaccaagtagctggggatacaggtgcatgaccccatgcccagctaatttttttatgatatattcatttattcagattactcgataattaaaaattatattttctatgaataccagctaattttttgtatttttagtagagacagggtttcaccctgttagccaggatgtctcctgacctggtgaactgctcgccttagcctcccaaagtgctgggattacaggtgtgagccaccatgcccagcagcttttaaacattttaggaaagcatgagacatcaatcaatatgtataagatcttccttccctacctttttccttctccacctcctccttcctctctctctttcttggtttgatccagtaatgcaggacaacttgaggtgagggcttccaggtcataagtaaataagagataaaagtctggattcttgagtccttgataagcattcaactgaatacaatttagtctggctcagtgaacctgcatatctaaattaacagcagtgcagaggaagcaatcagatgtgcatttgtctcaggcgaggctcagagaaatgactctgagttctgtctgtctttggttctcaaggaatttccttgttggctaattgtaaagaaagtatgtagcttttttatctttgtagctatcttatttagaaataaa

SEQ ID NO: 1561397 - DNA, 4001 bp, Homo sapiens
gacccaaaaacatcctgagacaagatctctgtgcccagagaagatacaaggagaagaagcacagagagtttttacaacacagtgtcaggggattattctttgctttcttcacatgggaaatatttacaaacagataacaaatcttattaaaagcaccatttaatactttgtcagaaaataactaattaaaatacggtgtaaaaaatgtacactaaaggacaaataggtgataatgtgaattaggtaggaaaagttggcatttgggaacgccagaaagaactggaaatttagtatcttactgcaagccagagtgaggctggagaaatgggggacgggggttagacttaagaccctgcttgggacacaggtgaaaaatgcagcagaaaatcagttccccgtggagtgtgaaaataattgagtggcaggcaattagactgaggtgtctctagaccctgggttcctacttttaaaaagatctaacgtggctgggcgtgatagctcacgcctgtaatcccagcattttgggaggccaaggcaggcggatcacctgaggtcaagagttcgaggccagccaggccaacatggtgaaaccccgtctctactaaaagtacaaaaattagctgggcagggtggcaggcgcttgtaattccagctactcaaaaggctgaggcaggagaagcttgaacacaggcagcggcagaagttgtagtgagccgagattgtgccactgcactccagcctgggcgacaagagcgagactccatctcaaaaaaaaaaaaaaaaaaaaaaaaaaaaaatctaactcaggcgcatcgttttgaaaattactacattgaaagacacaaaattcaggcttaatcaactgtatactgccaattaaggtctgattacacaaccagaaaattttcacctttattgtacaaactaagaaactacataacggtacctaaccaattactgaatttggctttcttcatcatgcaccttataaaagtctttccttcaagccccgccatgaacaacaaattacaaaccacagctgggtgctcaacagttttttaatcactctttgattaatttctttaatatttttgtggtgacttctgtacattttttttttccgagacggagtcttgctctgttacacaggctgtagtgcagtggcgctatctcggctcactgcaatctccacctcccaggttcaagtgattctcctgcctcagtctcccaagtagctgggactacaggcgtgtaccaccatgcccggcaaatttttgtatttttagtaaagacggggtttcactatgctggccaggctggtcttgaactctcctgacttagtgatgcgcccgcctcggcctcccaaagtactgggattacagacgtgagccacccctcccggtctgtacatttttaataggagaaaagaggaactaggaacccaggaccaaagttcttcccattcatgaactcgcaccccaagtcaggattctcccgtgacgattctcccgtgacgatcctcccgtggtccctgcacagtctgggagagacgcggcgctgcggatgcagagctgcccagagagggctccaggccagggcacagtcactgcgcaaggaagagacgggacgtgctggggcccgcctgtcagcgcagccgccatcttaaggctgatggggactgaggcccagctgggcaagaactcggggcgcagattgtgcagctgactgccgggaggcctgagtcccgccacagccacttcccacccattacaaccagcccctcccctctctggggatgtcggacccggcactctcaccatttctaggcttccaggggttcctggcgtcttagctgtagatctcccaatacctgcgggtcacagggccacagagcctggacctctaggagcagaggacacagagcgctgaagacgagacctggagctcaggccacagcgagggacaaaggccccgccaaacccggaagccgccctgtccgcttcacctgcgtgcctgattggacggttccctgcctagcgtctctgattggataacatttaaatccccgccccctcaggccatgattgacggaagatgtgatgagatgcggggctgaaagaagagtgacagcttgggctgcatccttctctgacagggcttcctccctgagctgagccaggcccaccccagaggttatttgcatttaaccttgtgtgtaaggtcatatgcatttataaataatatatggggccggtcacggtggctcacgcccgtaatcccaacattttggaaggctgaagcgggcagatgacctgaggtcgggagttagagaccagcctgaccaacatggagaaacccagtctttataaaaaatataaaattagcgggttgtggtggcccatgtgtgttatcccaggtactcgggaggctgaggcaggagaaccgcttgaacctgggaggcggaggttgcggtgagccgagattgtgccattgcactccagcctgggcaacaagagcacaactctgtctaaaatatatatatatatatatatatatatatttatttatatatatttatttatatatatttttatatatttatttatatatattttatatatttatatatgtatttatttatatatttatatatttatatatttatttatatatatttatatatatttatttatatatatttatatatatttatttatatatatttgtatatatttatttatatatatatttatatatatttatatatttatttatgtatttatatacatttatatatatttatatatatttatatttatataattatatatatttatatatttatatatatttatatatatatttatatatttatatatatttatatttatatacttatatatatttatatatttatatatatttatatatatttatatatttatatatatttatatatttatatatatttatatataaatatttatatatttatatatatatatttatatatttatatatttatatatatatatttatatatttatatatatttatatttatatatttatatatttatatttatatatttatatgtatatatttatatatatttatatttatatttatatatttatatttatatatattttttatatttatatttttatatatttttatatatttatatattatacatatttatatttatatatatttatgtttttatatatatttatatttttatttttatatatttttatatatatttatatttatatatatatagtggctattcaaaaatgaaaagaatgtaacaataattattttaaaatttcagattttatgaccttcccggctaaaggaggcagcctcagattttaaaaagatggtaatcttctgaaataaaatgtgagccacatgtgaatcttaaattttctagtagacaaacttgaaaaagaaacaaggaacaggttgaattgattgtaacaatttaacccaatatgtccataatattatcattttaatgtgtgaggaatgtgtaattattaataatgtatataaacatttgaaactaaatctttgaaactaactctgtattttacctttctagcacatcgcagttcagaccagccacattccagtcactcaggaggcacacgtggccaatagctgccacattgaagttcagctctgatgtcaggggggtgaatgaactgaacatcccttttctgccagaagtgaaggcagagtctctccctaccaatatctttcttcagttctaagggtggaacagatagtggccataaaaagagcagatggcagcaggagtaaaataaccacaggtagaccactgctggccacctgttgcccacttttcttccagagatcagacagtgaagaaagaatgttggggccacaggataataaaactctgtgtcttcagatctgtccacactcttgacctcaaatgtttagatatggagaaaacagattaaagg

SEQ ID NO: 1561398 - DNA, 4001 bp, Homo sapiens
ggagattcttccacccactcctgctcacttatgtgctcatgaaccacccatacaggagacactgcagtatttctcggtgactgctccaggtgcattttactttgcaagttcttacaccatctcactagagtcaggtttttttgtttttgtttttgtttttttctggtcttttgggatactattttatctgtcacaaatttttcactttttaacactatttttcttccactatatttatttcattatctttctgccccctaagacaatccagggggcatacattatttctgtgttttcccatcagtgccagcatcggactggctgaccagcaatgtgtccccaagaaatgaaagctgggttgggcgtagacaattttaatgtctcaagaggttaccttttcaaaataagagtaaactagaagattcctctcagccccagggcatccacttgcttccttgagaggatacactccatatttcaagtcgtcctatggaagaaaataaaccagaagctgatattcactaggcactttagctgacataaccacggtggatatcttagttcatccccagacagcactgaaacccacgaccagaaaaaaactaaaaggtggctgaggacacatcaccccataaagtttccaaaggaaaaccttgaccgaaaaacattctgacaagatctctgtgcctagagaagatacaaggagaaaaggcacagagagttttaacaatacagtatcaggggattattctttgctttcttctcatgggaaatatttacagatattttttttaaaaaatcttttaaaaaactttttgaaaagcgtcatttaatgctttgtcaaaaaataattaaaatacggtatagaaaagtacactaaaagacaaataggcgataacgtgaattagggaggaaaagctggcatttggaaacaccagaaggaactggaaatttagtatcttactgcaagccagagggaggctggagaaatgaggaatgggggttagacttaagaccctgcttgggacacaggtgaaaaatgcagcggaaaatcagctccccatggactgtgaaaataattaaaaggcaggcaattagacggaggtgtctttagtccctgggttcctactttaaaaaaatctaactgacgtacatttttcagtaaattactacattgagagaaacaaaactcagccctaaccaactataaactgccaattaacctctgattacataatcaggaaattttcacctttattgtacaaattaagaaactatgtaactctacctaaccaattactgaatttggttttcttcatcatgctttttataaaagtcttttcttcaagtcccgcccatgaagcacaaattacaaaccacagctgggtgctccacaatttttgaatcactctttgattaaattatttaatgtttttatagtgactcccatatatttttaacagaagacaagaggaactgggaactccacggaacaaagctcttcccattcatgaacccgcaccccgagtcagaactgtcccctgaagaccctcccgtggtccctgcacaatctgggaaagacgcggtgctgcgggtgcagagctgcccagagagggctccaggccagggcacagtcactgtgcagtgaagagacaggacgcctggggtcccgactgtcagcacagccgccatcttatggctggaggggactgaggccgagctgggcaaggagaactcggggcgcagactgtggagctgactgcggggaggcctgagtcccgccacagccacttcccaccggttacaaccagcccttcccctctctcgggatgtccgacccggcactctcaccatttctaggctttcagggggtcccggtgtcttagctgtgggtctcccaatacctgcaggtcacagggccacagatgttgggcctctaggagcagaggacacagagcagcgaaggggagacctggagctcaggctgcggcgagagacaaaggccccgccacatcccggaagccgtcctgtccgctccagctgcgtgcctgattggacggttcccagcctagcgtcgctgattggataacgtttaaaaccccaccttctcaggccctgagtgacagaagatgcgaacagatgctgggctgagtgaagaaagagtgacagcttaggctgccgtcttttcaggcagggcttcctcccagagcttagccaggcccaccccagagggaatttgtatttaaccttgtgtgtaaagtcacatgcatttataaataacatactgtatgcctattcacaaatgaaaagaatataataacaattattttaaaatttcggattttatgaccttcccggcttctggtctttcagcaggccgtctgaaattttagaacggaggtaattttctgaaataaaatgtgagccatatgtaaattttaaattttctagtaaccaaacttaaaaaaaaaaagtaacaggttgaattgattgtaacaatttaattaacccaatatatcaaaaaattttcattttaatgtgtgagaaatatgtgattattaataaagtatataaatatttgaaactaaatctttgaaactaactctgtattttacctttctagcacatcgcagttcagaccaggaacattccaggcactcaggagccacacatgaccaaagcttccacattgaagtgcagctctgatgtcgggaggtgaagggccccagcaaaccttttctgccagaggtgaaggaaaagcctctccctaccaacatctcccttcagttctgagggtggaacagatagtggccatagaaagagcagagggcagcaagaacaaaataaccacaaggagaccactgatagccacctgttgcccattttcttccagagatcagacagtgaagaaagaatgttggggccacaggataataaaactctgtgtcttcagatctgtccacactcttgacctcaaatgtttagatatggagaaaacagattaaaggcaaaacttattttgctattggccttggccctaatggtcaggccgtagttatctgttttctcctgtggtgtgtgggactgtgtgggtataagcaccaatcacatgcatacatgtctacgtgtatttctgcattactcaacattctcttacaagtcacccaactttaaatcaggggaaaaaatcagtacctatagggtgcccactgttagaaggtaactagtaatcaacctgtcatagaatcctggtgtcctatctgcacggggtgcatgtattagttagctattgtagcataacaaatcgtccaaaacttattagttcataattgagatggtcagccatttaggctagactgagtggggccgttcttctagtctcagctgagctctttgagacacgtatcatcagctgcttgttgactagccagctgtgcttctgggggtgagcttctagttctggggctgtcaacagggcaccttgcttctccttcccatggtatcttattttccagctggctaacatggctttattcagggagatggcagcattctgaaagaaaaacagaagcattcaagaccatttgagcctgggccccaaactagcccactgtcatgttcacaagtttctaccactctgagccaataaggccagccagatctagggtttggaaaacagattctggatcttgatggaaacagttgtaaaagcacctggcaatgggcatggatacagaagagattaaaaattgccaccattttgcaattagtaccaatctacctcttttccatatgtggttcatagaactctttcacatcaagaaaattgtccaaagacccacagatactaagtggctgggctgagactcaggattaactctgtctgactccaaagcccatgtacctccatagatcacactacaaagtagctgccctgccctagacccttgaaatcctggagagtgacacttgtacagaagaaaccagattccttcagattt

SEQ ID NO: 1561399 - DNA, 4001 bp, Homo sapiens
ataaaggagagaataaaatagagaaaaagtcacctgggcattgatcattttcttctgttgtgggaaatggccagcacctgggatactctgtctttgtctcctctggatctgccttaaatttctatttagaaacttcagtcaccagtgaagggtgtccacagaaatcatatctaggtcctggaatcttcctctttcttcatttacttcttgtctcttcccagggtagccaggacctgtggactgaagagcaaaacaactttcaggggtacattcaccttaacacgtggccctgaatatttgtctctttatttggttctctcaaaccaaggaaacacaagaccctcaatgtaggccaaatgcctttcttcggtgaagtgtggaagtaacatgaagatgaaaggggaggtcacaaaggagaatccacatagcatcatgcctaagcagtaggtaattctcatatcagttttttaaatcaggccatatggatggtgagaaactacattttttcctttatacaatgttactctcacacctctttaaaagtctttatatatatttaaaagtgtttatatacggccaggcatgatggcttacacctgtaatcccagcactttgggaggccgagatgggcagatcacctgaggtcaggagttcgagaccagccttgtcaacatggtgaaacactgtctctactaaaaatagaaaaaattagccaggcatggtggcaggcacctgtaatcccagctactcggagactgaggcaggagaatggcttgaacgcaggaggcgaagtttgcagtgagcccagccattgcactcaagcctgggcgacaaaagcaagactccatctcaaaaaaaaaaaaaaaatgtttatatacacacttcaatatgaagaacaagaaacacatagaaaaaaagagggagacagagaaaaggaatacgagttataaatacaaatttagaaaacaattcaaaaatataaatactgggaaaatagccgcctttatatactaacatacaaaacctgaaacacccataaaaatatgcagtacatttgcaagaggaaggataaaaataggctcttgttaatttgtgcgcagtaatttaaaaacataatgttaaatagaaagcctattcatccgccccccttcacccccaaaaaactttcattttctgcaggttcaagagcatgggttgttgtggaaagccagaggattagaaaactcattgtggaggaggtactcggacctgaaacttttaggaaatgttaacgttcatcaagtctgttccagccaaagtttgagctcaacacacacacacacacacacacacacacacacacacacacacacacacacacacaaaaccagccagggctcttgtgaaaagacttcggctttcacttgtctctagacaaaagaccaccaccccgccagataaaataggaaaacctggaatagacacacacgtacactggattcccttaatgattcatcaatcactaagcctcagattaatccagaatgtgaaacagaagtcacattcgttgacaaaagccaccccatcgattctcaatcactgagccccactggggagtgacccgcgaggaccacaatccctgacctcagtactcttggtcgttgatctattcaggcctttaatcactgaccaccagagcctccatgagggaccccaaagatatcctatcacagacacccaccagggactcctaccagctcccctccaaaaggaaacacccgcccccgcctcccccaacccccgcgctacctccaccatatagcgccaccaacaacgcagacgccctcagaaagctccctcccaccacgtttccacgccctgacccacacactgacctgactctccttggaatcgccgcgacctcttaaaagctgaacttacttccctaaacttcttccacttctgggcccctcgcccaactccctccccctctaaacctccagagacggtcagccgcgtttccatggagagcggaatgcggccttccggcttttcctcaggaggagacgcgtccgcgccggcgtcgcctcgccgctctgggggcggccatctttgagtacgtgacgtacagaaggcacagcggccgggagacgcggtggacggaggcctcttaaactgtccgatttccagacacctcagccctggcagaaaatggagagcttatcagaggcttgagttcacacaggcagacacggcgtgggggtaaagtcctctgaacagacacggaacagaaataagttagtcttctcctcgcaggggacagtgaacggcgcaaacttctcaaaggccagaacccattattaccacaaaggcgcggcatcccttcttagcggttatgatggctgtgacgtctcagctcaatggaaaattaaagtcacctctgggcacctcagtcactattgtaaatgcgaagcgttttagaagccgtataaaaactgaagcaagagagactagaacaaaaaataagcgagcggtgcgttgcaggtaacggagccagagcccttaggggagagcatcatgggggcggccatcttaggggacgttcggtgtccgtacggcagaacatattctctctgagaagcttgcggtggaactggcccatggaaatgtctttagaagagaagaaccacctggctctgttcttgactctggaaaagaatccttttctagaattatttaggttgttgccagattaatttcctttagagagtttccttgcccccacgacttcctatctttaaagccaacaatagtatgtgaaatccctttcatatttgaaaccactgactattgctgctgcatctctccggtttctcctattcttaagtgcttgggcaatccagaataatctcccaatgctaaagtcagctgattaataaacttaattacaatgcagagtcctttttgccatgtaacataaccatgggaattactctggggttgtagatctggctatgatatgatgacactaatgaatattttgcaataaaaacatactattttaaaatatatatatacatatatctttatatatgtatatttctacagaattattacaagttatgtcttatgatggtttcttataagaagcaaggaggaaaaggtccttaacattttcaattgtgttttttttaataataaagcatgcattctaatttacaaaaaccacaataaaggtactttcatcatgtcagtcttgaggctgaacaacacttaacattctttttccttttacctgtctgccttctcccttcccctacactctctataccccaccctccaggctctctgttccatcatcttatgcgtatggcccctttcccctgtgccctcttattacttccatctatcacgcagacacacactgtcactcccctaaacactctagtgttaaacaattgctgctgattgttttttgacaagtgccctatgggtaggagtgttcacataaataaagtcaagccaaatagagaaatactatgagaatagacctattcagcaggctgcaaagcaggcttagtagtgaacattctgtggggatggaggcttttgggtgtttcagagccatttctgccattttcagagccatttctacctcctcaagtgcagatattctgctagggtgcagatattcactgttactgttgttaaaaggtggttgcttttcaaggctaccttgaagctgaggatatggggataggattagggcaagctaaataccacaagctcactgtggccggcattgtagacttaattggccattctagaagaggaactaactggcttctagccagggcctaaaaactagatctagatagccaaaaagattacattaaacttcctctagtgtcccatctatcagattccaatcctgaaggaccaagtcaatctctcttctatttcatctcctttctcccatcttataaaagatctttggaaaactctgtttatttcatatataa

SEQ ID NO: 1561400 - DNA, 4001 bp, Homo sapiens
acttgggaggctgagtcaggagaatggcgtgaacccgggaggcggagcttgcagtgagtagagatcgcgccactgcactccagcctgggtgacagaacaagactctgtctccaaaaaaaaacaaaaacaaaaacaaatagttgatactacaaattgaagaaggagagttggtgtctgcaaattttagaaaggaactgaaattttagtattgtactgcaagctctccagaggtaggccagggtcacagggtggagggtttgagatctcacttcccatatatttggaaaatgcagagaagtaccagttaactggggagtgttgaaaattttgaataagaagtaattaaacttaatgcctatagtactctaagatcttggccaagaacatggaaatcaaattcaaatgctattcatataaagtactaacttatgtgacggtatgtggcctgagaaaacaataacaagttactaatttattgggaaatgaaatatgggcttaaccaggtacaattggtcgagtaacctctgattatacaaccaaaaattttccactgtatggtctgtgaaaataagtaattcaaaaattgaagctgttggaactctaaattatcttgaagtttaaagtaatgtgactctggaattgagtcacctgacactggaaagagccagctggaaccctcccacacttgactacagattaaccatcagacaggcttcactatacctggacaggcctcattatacccgcttcctttaggagtttccacatagccactgacccaccttcatgttaaaacagacatcagccaactggaaacacagactctctgtgacaataagaaaccaaattacaaacaagacctaaggccatgcaaggcaagaggtaagtcaaatcttagaattcacaaaatctaaagaaacaggtcttttgttttgggtgggatgaaatcatatgacagataccagaccctcttcacttaagcaatccttcctaccgcctcgaagttttagacaaagcttcacactctccaccaacggccaccttcagaatccctcaaccacctgcaccttctaaccccccttccacaggtcccgccctttctgccaaaggaacttacacctttccaggcattgatgcatgattctccctgcaattcctgtctccctgaaatgaataaaaacagtcttgagccgcctcgggaccacttacttcaggcctcctggggttgtgttttcctcagctgaggcctctcctattcggctctgaataaacttctttaagttattttacacagcttggcattttccgttaacaaattacaagccaggactgggtgtttatcattcaggaatctcaaaggaactctaattattaatatattttttaaaacctattctgagaagcaaaactataattgttaacgtgtctcagtttaatttttaagaggagaaaggcgctactggggaccccacagcccaccctcctcctacacaaacccccacacccgaggcgggatccccccatgaccctcgcgtagtccccgcacaatgtggggagacgcggggcagcgggcgcggagctgcccagagagggctctgggaactgggtgacagtcaccgcgcagggacaggacgagacgcccgggtcccggcggccggcccagccccactgtggggccaaggggaccaagggccgagctgtcccacgggaaatcgggtcccagaccccggagtcgccgcggggaggcccgggtcccaccacagccggttccggccggttccaaccagctcctcccccgcctcgggacccctggcccgcacgctcaccatttcttgcctttcaggtgactcccacgaccagtgcgggtcacagcacaggcgacagaagctatggcagaggcacctgaaccctctcggaggggaaagccaggctcccaacctcagctcgccgcctggagccgggaaccgaggagagcagggccttcgccctccccgatggacactcggcaggccccgcccagcgcccctgattggacgaagcgccgggccccgccccctcagccgtgagtgacaatagaagcccttggtaacggggctctgaaaacgggtttgaccggatccagcgatagattctttaagccagaggtctgtaacctttttagcaccagaaccggtttcgtggaagacagttctcctacgggggcagatagtttcggaatgaaacttccacctcagatcaggcattttatcctcataaggcgaacccaacctagatccctcgcatgtgcagctcacaatagggttcgggctcctatgacagactaatgcctctgctgatctgacaggaagcatatctctggcgataatgcccgctggctcgcccgccagccgctcacctcctgctgtgcggactggttccttacaggccatggaccgggggttggggacccctgccatagagtactgttgaatagaaactttagctcgtccggcggtgggctgggggggtgggggtagctcatgcctgtaaccccaccactttgggaagccaaggcaggcagattgcttgagcctaggaacttaagcccagcctgggtaacatagcaaaaccccgcctctacaaaaaatacaaaaattagtcgggcgtggtggtacatgtttgcagtcccagctactcggaaggctgaaatgagaggatcgcctgagcccagagaggtcgaggccacagtgagctgtgattttaccagcctggatgtcagagtgagaccctgtctccgaaaaaaaaaaaaaaaaaaaagacagggaattgcagtggagtttaatatacatagagccggctaaatgaaagagaagagttttatttttattcaattctgtctccctaaaaaatgggaggctaggttttgtttttttggtttttttttgagacggaatctctctgtcgcccatgctggagtgcagtggcgcaatctcggctcagtgcaacctccgcctcccgggttcaagcgattctcctgcctcaacctcctgagtagctgggattacaggcatgcgccaccatgcccggctaatttttgtatttttagtagagacggggtttaccatgttggtcaggctggtctcaaactcctgacctcatgatccacccgcctcggcctcccaaagtgctgggattacaggcctgagcccccgcacccggccgaggctagggttttaaagataatttggtgagcagaaggctggaaaatggggaatgctgattggtcgcgaaaaggatatcacaggaagtctcagctgtcttcttgcactgagtcagttcttggctaggggccactggagcaggtgagccagtttattggtctgtgtgatgccagcaaatttatcagaatgaagggtctcaaaaatacctcaaacaccaatcttaggtcttacaacaataatattatccacaggagcaagtgagaaggttgggaatcttgtgtactctggccgcatatttcctgaaccataatttctaatcttgtggctaatttcttagttttacaaaggcaatctggttcccaagcaaggagacaatttctttacggaagcggcagttatgacttttgctttaaagctaaactaaactccttccaatattagtaagacctatacccgggaatgaacaagggtagcttggaggctaaagaaaagatggagttcgcttagatctgatctctttcactgtcataattttctcactgttataattcttgcaaaagggttttcagatgtagagtcatacttttagctcctggcaacatttatgttggaactcttatacagcaactaaatcactggaacaggataattggttgaggatttactaactgctccatcaggtggaagtggcactccttactaatttacctgaaagcactatttcctgagccatggagactgagtatagcaatgatatgtgatctaaagaagttcccactctgcttcttctctgcagtgaag

SEQ ID NO: 1561401 - DNA, 4001 bp, Homo sapiens
gtgggtcctttcatgtctacgaacataacggggacacatgaatgcttttccacattccttacattgataagccttctctcccatgtgactcctttcatgtctgtgacaggatctgggactatggaatgctttcccacattcctgacattcataaggcttttctccaatgtgagttctttcatgtattcgatgggtagcagaataactaaaagatttaccacattgtttacattcatacggtttctctccagtgtgagttctttcatggataagatataaactgagacaatggaatgctttcccacaaaacttacatttataaggtccatccccactgtgcactaccatgtgtctttgaatgcttgaatggtaaataatgttttttccacattctttacaagcatagggtttctttccagtgtgatccctttcttgtgttctcaaggaggggtgatatctgaaggcttttttaggttgttgactcttccatggctttggtccatattcctgacattcacatgccttgtgtccagtgtcacctctgatgttcatattagaagatgagttacctaggccaacttcacacacaaagctgtcacatgattttacttcaggagaagctttcttcttctggaagttcagcctgtcatctggaactggggtaaaagtttctccacaatgactgtcttctttaatttcattgactttctcttctgtgacactcctgtcaaaaatgagaaacaaattatgaagagtttgtttataagtaattttatattaatcagcaagtattgtacttgcatttttaacactctccatcaaagtgtaggctttctgccctgtctgaattgtttgaaggtgactggacaacacattctacaaggtgacctagccatacctattatttaaaaaaatgtttatatggggcttcttaatactcttcccatgtaaactattttaaaatactaaatactctgtgtcatttttcttttgtttcagggtcttgtcctgttgcccaccctggagtgcagtggtatcatcatagcttaccacagcctttaactcctgggggctcaagtgatcctcatgtccctcatgtctcagcctcctgagtagctgggactacggatgcataccacaatgcccagctaattttttgctgttgttgatatgtggtcttgttatgttgcgcaggctgttgttgaactgctggcctcaagctatcctcctatctccatgtctcaaaggactgggattacaggagtgagccctcagccttgatcacatttaaatatatatttttagataaaatattgtatgaataaatgaacttgatcctggacttagttctttgttttacttatttttaacatagtctcatattctaagatcgtgtagagagacactgctttctcttataagtgcaaattacctgaagtttctcctggggttttggtactcatattcaatgttctggtctttccacttttttcctaaaatacaaacacagaaaaataatcctgaggcagtataaaattgtgaaaaaattattagacctatgcccatgatttacagcagccatgcctcatttattcatcaaagtatttcctgtctgtgttccaaatcactcaacagcattggtgagctagaaacattggtaaactaatgcactgagggaaggaatattgtcatccttacctatagaggtcaggttccagaaagtttccagcatcacttccctgtagagattcttctgggaaatatccagcaaagcccactcctcctgggtgaagttcacagccacatccttaaaagccactgggtcctgaaacatctcacatgtgtagaggaggatgggtgagagtgacagcattgggggcctagactctattcccaagaagttctcaggatgccgtggactccaaacatttattccctgctttggtcatcagatccctttctctctgtctatacttactttcttccataaagcaatttttttttttatttttttgagacagaatttcactcttattgcccaggctggagtacaatggtgcaatctcggctcactgccggggttcaagtgcttcttctgcctcagcctcccgagtagctgggattacaggcatgcaccagcatacccggctaattttgtatttttagtagagacagggtttctccatgttggtcaggctggtctcgaactcccaacctcaggtgatccacctgcctcagagtcacaaagtgctaggattacaggcatgagccaccacacccagacagcaattttttttttttttttttttttttttttgtgatagtgtatcgctctgtcagctgcttgggctgtccctaatgtctccttggactgtgggtctgtagcacctgtcataacagagtactatgaattaatatgcagaaaaaagttaacattagcagtcctgaagctgtgtatccttgaaaatgcctgttcccaaagtgtaatctttgatgacattgttagagaaggcagatatctagccaagagcaggaagggtagcccctgggaaatcccacaaccccagggaccacccaaaacaggcatgctagatataagcagagaggaggggagacacctaagtagaaagaaacatccattatgatgcccaggaatcattcagtttgcagttatcctgtcagaatgtagctagatagatgctgataagaagggcaaacaggacattactgaaaaaaacaagaccgtaattacacaagagggcaaacaagaaactcctaagagatacccaggtgtaatgagcacagatttaaccactatacgaccttcctggggtggcagtaatgagcaatgcagccacccacatatccattgatggctgaatggataaacaaaatgtggtaagcatatacatacaatggaatattatttagtcttagaaaataacatcttggcctggtgcggtggctcatgcctgtaatcccagcactttgggaggtggaggcgggcagatcacctgaggttgggagttcaagaccagtgtgaccaacatagagaaaccttgtctctactaaaaatacaaaattagccgggcatggtggcgcatgcctgtaatcccagctactcaggaggctgaggcaggaaaattgcttgaggttggggtcagtcaatattgtgccattgcactccagcctgggcaacaagagtgaaactgcatctcaaaaaaaaaaaagaaagaaagaaaacaatatcttggcccatactacgacatatatgaaacatcaggataattgcaaaaggcaaaatacaacagaattcatcttagagaacttacatagatttgtcaacctatctcaattgtacatgtaaaattccttaagctgataatttttaagttttgttttatagtaagtattgataacaaatcacggtagcagccaggcgtgttggcttatgcctgcaatcccagcactttaggaggccaaggtaggtggttcacttgaggtcagcagtgtgagaccagcctggctaacatggtggaactccatctctactaaaaacacaaaaattagccaggcgtgcagcgagtgcctgtattctctgttacttggaaggctgaggtgggagaatcctttgaacccgggaggcagaggttgcagtgagccaaaatcccaccattgcactctagcctgggcgacagagtgagactccatctcaaatcaaacaaaaaatgagaagaatgtcctaatagaggcagaaaaggcatgtgacaagccttaacccatttgagcccactgttccatttctggaacgctaagcatgtgggagttatttgtatcctactgctcaaggtcattaccaaagtctgatttttcacacgtctgcaattcaaaaaattgcaacctctagcataaatgggttgatatctcctcatgattaaaaacacttaataaactaaatatacaagagaagattccatatgatcgcaagagaggcactagga

SEQ ID NO: 1561402 - DNA, 4001 bp, Homo sapiens
gtcgcccaggctggagtgcaatggcatgattgtgatttcggctcactgcaacctccacctcccaggttcaagtgattctcctgcctcagcctcccatgtagctgggattacaggcacctgccaccatgcccggctaatttttgtattttcagtagagatggggtttcaccatgttggccagggtggtcttgaacccctgacctcaggtgatccgcccgcctcggcttcccaaagtgctgggattacaggcgtgagccaccgcgcccagcccaggggttagctttttacaggaatgatataccagaagattcctcccaccccagtgcatccacctgatcctttgggaggccccactccaacacctcaggctgtcctctgggaagagtgacccaagggccgatatccactaggccctccatgagattggcagcttccagcatcttagggtagccccagaaagttccataacacagggcctggaaaagatacagggtgggctgaggtcacatcaccctgtaaaggacatactgagaaggcatctgtgcctaggggagataaaagaggcacaaaggtttggttttttttacagcagtgtcaggtggttattctcttcttcctcacatgtgaaatgttaaggaaaacaaaataaatctgtttaaaaagagccatacattgctatctgaaaacaaacgacaaaattctgtgtctatttgaaatatcgtcttgctgacaaagggttcataacgttactgggaattgaggagtgaagttagcatatggaaggctctggaaaccaaaagatttactgttagccccaagaggagttaggatgaagggacaggtctcaaagaccctgatgccaatatctttgaaagcctcggaggagaaatggtcgcccttggaaagaaaggactgaagagcacagagaccacagctcctcccacacacaaaccccacacacgagtctggtttgtgcctagtgaccctcccaccgtcaccgtgcagcctcctcaccgggctcacaggaactgcgagccaggctggaggcgagattgcagttagatattaaccaggtgccctcagccccgctgcttcacaggaagccgcctccctgagagtcaggtcacagcagacgctgaccgccggcttccccattggcctggggataagatctctgagagttgctcaagagtcgtctaagttctttctcagatcttgaattccagcggaaaggctggcgccaagcaggctgaagaccccacaaggaagcccactcagcagcagaatgcggtttcttcacctccagtcccaagattcacccctcacttctccaccaaccagcgaccccacatcccaaccacccccgtccagacccctaaacaccccatcctcaaacctctcacggaggcggatctagggtgtcctctcctattaaaccgtttctgctgcagccctcggcgtccgggtgcagtgacttgggctgcgaacctgtactggttccgccgcacaatctggggagaagcggggctgagggcgcggagctgcccagagaggggcgccggggccggggccgcagtcgcagctcagggacgggacaggacgcccggggtcccggctgccggcccagccccaccctgcggccaaacggaccgaggaccgaggtgcgcagggggcgctcaggtcccagaccccaaagacgctgcggcgaggcccgggtcccgccacagccggttccgactggttccgaccagcccttcgccctgcctcaggacgccgggccccgcacactcaccatttcccggctgtgcggtgtcccgggtcctcccaactcccgtagtcagggtaggtcccagcgcgacaaaagccaccacagatgtcccagggcgtctctcagtgacagaatacggaacagaggtcaccagggtgaagaggccactagctcctggaacgtcacaccctcctctctgcctcgcgcctgattgacaattctcaggaacccgcccacgactttgattgggtagccctccaggtcccgcctcctgggcactgagtgacagaagaagcgatctcacagtgctgagtgcagccggatgaacaggttccagacccggcccctggcagggcgggcttcctccctgcgttgtgacccgacccgtcccgggaaacgtttgccttaaagcggaatttcctacctgtacgcagtgggccctttttgcttcttcctcctgaacaattgtgtgcaaggaatcccagactcactgtccagtggagccatcccttggcctcagagcaggagggcagccgaggccacacaggccacactgtagcagcgggggacagggggtgggtgggtgggggggtggtgctgatgtcctccagggaccaggaatttgggatgaggctgtcgcctgcaaggtcaagcctttcttccactataagcgctggatgggttctttctgcgcgctacgcaaataaagaccacggtattgcagttaaaaaaaaagtttaataaacactaggccagctacgatacgtgagagacggagttactactcaaattattctcatccaaggtcctctggtaggggtttttcaagggcagtttgggagaaagggtggaggtagctaggcttgctactgactggttggggtggggatgaaatcactggggatggaatctgtcctcttggcagtgcgtggtggctcaccgctgtaatcccaatactttgggaggcctaggtgggaggatcgcttgaggccagtagttcaagaccagcctggacatagagtgaaactccgtctctatactataagggaggagaccacccctcatattgtcttatgcccaatttctgcctccaaagaagaagtaaaaactaaaaggcagaaatgaaatccacaggcagataacccggcttgtgccctgggctgggtagttaaaaatcaacctctgacctaactgtgttatctatgattccagacattgtatggaaaagcactgtgaaaatccctgtcctgttctgttcagttctggttaccggtgcatgcagcccccagtcacgtacccactgtttgctccatcaatcacgaccctctcacgcggactcctagttgtaagcccttaaaagggacaagaattgctcactcggggagctcggtttttggagacgtgagtccgccgatgctcccagcccagctgaataaagccctttccttccacaactcggtgtctgaggggttcttgtctgcggcttgtactgctacatatttaaaaaagaaaaaaagaggccgggcccggtggctcacacctgtaatcccagaactttgggaggcccaggcgggcggatcacctgaggtcgggagtttgagaccagcctgaccaacatggagaaagctcgtctctactaaaaatacaaaattagctgggcgtggtggcacatgtctgtaatcccagctacctgggaggctaaggcgggagaatcacttgaacccgggaggtggaggttgcggtgagctgagatcgcgccaagccgagatcgtgcctttgcactccagcctgggcaacaagagcgaaactccgtctcaaaaaaaaacaaaaaaaagacaaaaaaaaaaaaaacctatcctgttatgctgaatcacttctggttggggccacaggagcagagttggcaggtgcaggtggtgtcagacatgcaaaaaaaaaacaaacaaacaaacaaaaactgaaaatacgtctacaaatgctaatctacaatagtggtgttatctgcagaaatagctggcaatctatgtctacactttagcagcattccgattcctttcatccctcagcctgatggccattcattcgttttacaaaggcagttgagttttggggaaggcttattatcatttaagctatcttccaaagttagctgtgcctaagagcccaggattaagggaaagagaagacagagggttggcaggggcggggggcggggcggggcagaacgggtgtt

SEQ ID NO: 1561403 - DNA, 4001 bp, Homo sapiens
ccttccttcagcattccttcctacctcctccaaactttagacaaagattcaacactctcaaccagctgccacctacagaatccctcaactacctgtgccttctaaccccccttccacaggtcccaccctttctgccaatggaacttacaccttccaggcactgattcatgattttccctgcaattcctgtctctctgaaatgaataaaaccaaactgtcttgagctgcctcgggaccacttactccaggctgcttggggttgtgtttccctcggccaacggctctcctattcggctcctaataaacttctttattttacatagcttggctttttccgttgacaaaccacaagccaggactgggtgtttctcattcgtgaatcgttgttgttgttttgagatggagtctggctctgttgccaggctggagtgacgccgtcttggctgactgcaaccgccgcctcctgggttcaagcaattcttctgcctcagcctctcaagtagctgggattacaggcacgcgccaccatgcccagctaatttttgtatttttagtagagatggggtttcaccatgttggccaggctggtcttgaactcctgacttcctgatccgcccgcctcggcctcccaaagtgctgggattacaggcgtgagccaccgcgcccggccctaaactctttaattgttaacgtacctcagtttaatttttaacagaaaaaagtgggcactggggaccccaaagaccgctactcctcccacacgaacctgtcagagatgataaattacttttctaaaagctttagtaagctgttctttgtttcttgagaccgacttccttgtctcctagctacctgttctgtaaacaaccttcccgcttttgccgcgcccagacaagtccagatacgccttcccgcctagtaacggacagtccctgttccttcccgtctcatagaccctatttaatttgtgtgtgtgtgtgtgtgtgtgtgtgtgtgtgtgtgtgtgtgacggagttgcccagttgtctcgctctgttgcccaggctggagtacagtggtgcgatctcggctcactgcaagctccacctcccgggttcacgccattctcctgcctcagcctcccgagtagctggaactacaggcgcccgccaccatacccagttaatttttttgtatttttagtggagacggggtttcaccgtgttagccagggatggtctcgatctcctgacctcgcgatccgcctgcctcggcctcccaaagtgctggggttacaggcgtgacccaccgcgcctggccagaccctatttaattttaaaccttagcctatcgagttagtttagattgtgaggtccaaccctagccaatgaggaaaggacacagaagtgctagaaactgcgttaaggagaaaaacccctgccctaccccgctcgctgtgctcttgtgactggcgcaagctgcacccttgtgtagaaataaatttgctttgctgaggaattttctgcctagatgctggttttctttgcggcaccgggcacttgtttctaacaaaccccatatccgaggcgggatccccccatatccctcccgtggcccccgcataatgtggggagacgcggagctgcccagattaggctccggagccggggccgcagtcgccgtgaagggacgggacaggaggcccggggtcccggctgccggcccagccccaccctgcgaccgaggggactcgcgtccacgaccccggagtcgccgcgtggaggcccgggtcccgcctcagccggttccggccgattccagcccctctcccagtcgcccggacgccagccccctcacacacaccatttctcggcttccagggtgttccggcgtcctctgcgtggctcccgcgactagtgtaggtcacagtgcaggttacagagcgacagaagctctggtggaggcacctagtccctctcgaagcaagaaagccgagatcctgaccgctgtcggcgcagcactaaaggaatggacggagggcgactgtcccttcccccttccccggatggacagttgacagggccccgccccagcacccctgattggatggggcgccaggccccgcctcctccgtgctgagtgacagcagaagccctgggtaaccgggtcctgcagatcatgtctgacttgttctggccacagcgtctctgagcgagcagcctctctaagcgagcagcctctctaagcgaacagcctctctaagcgagcgccttccttgagccctggtcatcagatatttgcatttcaaggcgacttgctccttattgttagaagaggcactgttagcttcctcattcaaggggctgtccctgctccttccttctgcacgggatcacaagtgtgtgcagggcatttcagactcagtgttcaatggagagatacgcttgcctcagagcaggaggggagcccagaccaggcaaggcacgactgcaccaggagagagaggcagatgtcttccagcgtgcgggaaatgggatgaggcatggccaaggcttcctcacactgctatggactccagcaaggttttccttgtaagggagctaaccaagccagaacttattaaagatttagaggctctcagtactatgtatatctatccctggtgcattgacagtgactgaagacccatttttcaggacatgctgtgtaggactgagccagggaacatgatatagcatggcacttttatctcacatataacccccaaggagcagggttaactgaaatgaaagatggtctcaggggaagctgtaaatgagaaattctgtcatagaaattatgatttaggcaggccgggcgcggtggctcatgcctgtaatcccagcactttgagaggctgaggcaggtggatcacgaggtcaggagttcaagaccagcctggccaacatggtgaaatcctatctctactaaaaatacaaaaattagccaggaatggtggcgcatgcctgtaatcccagctacttgaaaggctgaggcaggagaattgcttgaaccgggaggcagagtttgcagtgagccaagatcgtgccactgcattccagcctgagacacagtgagactccatctcaaaaaaaaaaaaattatgttttagccatctttttttgagacggggtctcactctgtcgcccaagctggagtgcagtggtgcgatggctactcaatgcagcctcaacctcccagactcaagcaatcctcccacctcagcctcctaagtaggtgggactacaagtgcctgccaccatgcctggctagttttttatttttggtagagatgaggtctcattcggttgttcaggttgatctcaaactcctgagcttaagtgatcctccagcctcagcctcccaaagtgttgggattacaggtgtgcgcctggcctcttgggcatcttcattgctccacaccttacaatgataaattcaatattctgtgaatatttcctggagaaattagcacagccataacttgtgataaggtaaatcaggtgttgaaatttgaacattcctggaaacttcatttaataaacctaattttgcttatgtgtgaaagtattcatacatattcattgttcagacacagataaccatggcaagatgaggtgctatgaaaaactatgttgggacaacaggtactatcaaggattatcactggcaaaccgggacacatggtcagatgatttctgaggcagttttgtaccttatgtaaaggtagaaagtgttggaactagaagacatcgagctggagtcagttgcagaattgatgctttgcttggcatgtgggggacacttctcaaatatttgcatttggtcacagaagtattccgtgttgtgtgagagcagaggaaaaagagtagactttttttccactcttaagtctcagcacaactcagaaatccagtcccccagacaggatgtgtggatgttaaagtcgccctcaccacaagagggagcttcattgacttccc

SEQ ID NO: 1561404 - DNA, 4001 bp, Homo sapiens
catgctgctcaccgaagtgctcaataaccatgatcccaggagacactacattgttagcttttcaggttcttgcaccacctcagtggagttggttttcctgtccttagggatagttttctcccttcattagtctgagaacatcagaagggaagaatcatttcagtcctgtccccttaataccaccatccaattggctgaccagccatatatccccaaggaagggatgggggaagaaaagctgagtgttctaaggaagtagcttattgaggaagggtataccaggagactcctcccactacagggcatcatgctgcttccctacaaggtcccaccatctccacctcagggtgtcctctgggaggagtgacaaagggactgatattcacttgacactacaagagacttggcagctgtgggcatcttggggtggccccaggcagctctgaaacccaggaccaggaaaccatagaggatgggctggggactcatcactctgtaacgtttccaaagaggaaacttaatccaaagacattctcaaaaggtgtctctgtctagggatgatgaagggaggacagtaacaaagattttatttattaatattcattttttttacagcgaaatgtctggtggtttttctctgcttcctctcatgtgaaatgttcacaaacacaaaaccttttacaaagagccatatattgctatgtataaacaaaatgacaattaaaatactagcctctgtttgaaaaataaactgggggacaaggagttcataaagttgctgtgaattgaggagagaaagcctgaggaaggctctggaagccaagggattttctgtcggccctaggaggagttaggatgagagaacacagtggtggacttgagaccctgctgcccacatctttggaagactcgaaggcgaacgggtcacccttgggaagaaagaagggacaggggaccacacagaccacaactcctcccacacacaaaccccacacacgagtctgcctggtgacctgtcatcaccgtgcagcctcctcaccgggttcacagaactgcgagccaggctggaggcgagattgcagttagatattaaccaggtgccctcagccccgctgcctcgcggggccgcctccccaagagtcaggccacagcagatgctgaccgccggcttcgccattgtgcttggggatgagatctctgagagttgctcaagagtcgcctgagttctttctcagatcctgaattccagcggaaaggctggcgccaaccaggctgaagaccccacaagggaacccactcagcagaagaatgcggtttcttcacctccagtcccaagagtcacccctcacttccccaccatccagcgaccccacgccccagccgcccctgtccacacccctaaacaccccatccccaaacctctcaggaaggcggatctggggtgtcctcccctctccccctattaaactgtttctgctgcagccctcggcgtctcggtgcagtgactcgggccgcgaacctgtgccggttacagccgcacaatctggggagacgcaggactgcgggcgcggagctgcccagacaggcctccagggccagggccgcagtggccgcgcagggacgggacaggacgcccggggtcccggctgccgccccagccccatcgtgcggccgagggaaccgagggccgagctgcgccagggtgtcgccggcggggaagacctggtgccaccacagccggttccggccggttccaaccagtctctcctctcacgcgtcgggacaccagacctcacacactcaccatttcccggcttccggcgtccaggttcctccctctgcctcccgctgtcagtgcgggtcccagcgagacagaagctgccacagacgttccagggcgtctctcagtgacagaacccggagcccagtgcaggggcgtggagaagactcggcgggctctttgaaccttgcaccctcctccggtcagtgcgcctgattgacagttctcacgaccccgccccgcggccctgattggatagtgcgccaggtccctcccccgggcactgagtaacggaagaagcgatctcgggcagcggagtggaacctgataaacagattccagacaggccttgagaggactagcttcctccctgcgctgtgacctgaccccctcccaggggacatttgcatttaggcagtatgtcctgaccttcctcctttttcctcttggacagggacccacaagtctgtgcaggaaattccagactcactgtccagtggagctatcccctgatttgagagcaggaagggagcccaggccacactgcagcagaagggaggggctgatgtcctccaggaatcaggagttttggatgaggctgttggctgcacaggccaagcctttctcccaccttatgtctcaatctactaattttcagtgcagaatataaaaacaccccaacaaagccgggcgtggtggctcacacctgtaatcccagcactttgggaggctgaggcaggtggatcacctgaggtcagaaattcgagaccagtctggccaacatggtgaaatcccgtctctaaaatacaaagattagccggatgtggtggcgcacgcctgtagtcccagctactcaggaggctgagacagaggaatcacttgaacctggaaggcagaggctgcagtgagagagtgggcgagacagagggagactccgtctcaaaaaaaaaaaaaaagaaaaaagaaaaaagaaataaataaaattgttaaatgtgtggaaaaactggaattatatggcggcaatattttataaagcaaaaacttgaactagctcagataagcagcctgctgcatccacacacagttcacaagtcaaccactttcaggaggccaaacatattccaaagcttggaggccagacgataattcctgaaatggagccctagggtggatcagaacctggggatgagtcaggggcactaatggatttaactctgggagttcaatttgccctcctgtctcctaaacacagcgtggaaatgctccttccatcaagcctataaatgttattgaattaaatgcttcaatcaaaggctgagacattagactttgaatttgaaaacattcatcttcatatttttatgaagaataccagatataaaagcattatgaggccaggcaccgtggctcatgcctgcaatcccaccactttgggaggctgaggtgggtggattgcttgagctcaggagctcaagaccggcctgggcaatgtggtgaaacccccatctctatttaaaaacaaacaaaaaaaaagcgttattaactgggagctggcacccatggtgatacgaagaaaaagaggtttaattgactcacagttcagcatggctggggaggcctcacaatcatggtggaaggcaaaggaggagcaaaagcaaatgttacatggcggcaggcaagagagcgtgtgcaggggaactgccctttataaagccatcggatctcatgagacttactcacccaaatctcattttgaattgcagctcccataatccccacatgtcatgggagtgatccagtgggaggtaattgaatcatggaggcggttttcccatgctgttctcgtgatagtgaataagtctcatgaaatctgatggctttataaagggcagtttccctgtacatgctctcttgcctgccgccatgtaacatttgcctttgctcctccttagccttccaccaacacctgaccaaatggatatgacatctacagaactttccacccaaaaccaacagattatacattcttctcctcaccacatggcacatactctaaaatcagtaacataatcagacataaaataaccctcagcaaattaaaaaaacaagcaaacaaaatcataccaactgcactctcagaccacagtgcaataaaaatagaaatcaagactaagaaaatctccccaaaccatacaattatatcaaaattaaatgacctggt

SEQ ID NO: 1561405 - DNA, 4001 bp, Homo sapiens
ggaatggaaactggggttggggaagaacaaggtgattgtcccaagggttagctttttatagaaatggtataccagaatattcctcccatcccacccagggcatccagctgttctctgtgaggccccaccccaacacctcaggctgctcactgggagaaatgacccagggactgatattcactggaccctcccagagacagggcagctgtgtgtatcttgggtcaaccccaggcagttctgaaacagaaccaggaaaaggcagagagtgggctgagaacacatcaccccataaagtttctaaaggggactttcaatgttgattaggtatccgtacccaggggaaagaaaaggagagacacaaaggtttttttgtttgtttttttgttttttacagtgcagtgtcaggttattctctgcttcctcacatgtgaaatgttcaggaacacaaatcttttaagaagccggccgggcgcggtggtcacgcctgtaatcccagcactttgggaggccgaggcgggcggatcacctgaggtcatgagttcgagatgagcttggccaacatggtgaaaccccgtcgctactaaaaatacaaaaaattagccgggtgtggtggtgggtgcctgtaattccagctactcgggagggtgagacaggagaatttcttgaacccgggaggcggaggttgcggtgagccgacatcgcaccattgcactccagcctgggcaacaagagcacaactccatctcaaaaaaaaaaaaaagaaagaaagaaaaaaagaagccatccattgctctctgaaaacaaaatgaaaattaaaatactgggactctgaaatttagcacgggtggggcggaggagggaggagttcatgatgttgctgtgaactgaggagggaaagttagcctgcgtaaggctctggaaaccaagggagttactaccacccctaggaggagttagaatgagggaacagggtagtggatttgagaccctgctacccccatctctgaaaaactcgaagaggaatcagtcaccctgggaagaaaagaagggactggggaccccgcagaccacagctcctcccgtgcacaaaccccacgcaagaatctggattctgattgcagttagatattaaccaggtaccctgagccccactgcctcgcgggggccgccttcctgagagtcaggtcacagaagacactgaccgccggcttctgcattgtgcctggggataagatctcggagagctgctcgagttgcccaagttctttctcagatcttgaattccaacggaaaggctggcgccaagcagggtgaaaaccccacgagggaacccactcagcaggagaatgcggtttcttcacctcccgtcccaggattcgcctgtcacttccccaccaaccagcgaccccacacttcagccgcccctgtccagacccctaaacacccccatccccaaacctctcatggaggcggaactggggtcttctctcctctccccctattaaactgtttctgctgcaggccttggagtctcggtgcagtgactcggaccgcgaacctgtgccggttacagccgcacaatctgggaagacgcggagctgtgggcatggagctgccccagagagggcgcgggagccggggccgcagttgctgcgcagaaacgggacaggacgcccggggtcccggctgccggcccagcccccagctcccaccccgcggccgaggggactgaaggccggctgggccaggggaactcgggtccacagaccccgcagtcgccgcggggacgcccgggtcccgccacagccggttctggccggttccaaccagtccttcgccctgccccaggacgccgggccccgcacactcaccatttcccggcttccgcggtgtcccgtgttctccccaaggttccccgctgccagcataggactcagcgtgacagtgcctgccactgacctgccagggcttctctcagctacagagccaggagcgggagctcagaggggtgtagaaagctccaccctcctcccggcagcgcgcctgactggcagttcccaagaactcgcccccaacactgattgggtagagctccaaattccgcccccccagggaactgattgacagaagaaggatcttacacggctgagtggagcgagatgaagcggttccagacacagcccttgatagggtgggcttcctcccttcgctgtgacctgacccctcccaggggacatttgcatttaagcggaatttcctgcctgtactcaatgggctcttcctgctccttcttcctggacggggacccacaagtgtgtgctgggaattcgagactcactgcccagtggagccatcccctggcctcagagcggtaggggaggcccaggccacacaaaccacactgaagcaggagggaaggcctggtgtcctccagggatcaggaatttaggatgagactgctggctccatggtcaagcctttctcccaccttatctcccaatctactcattctcagaccagaaaataaaaacacatcaacaatgaaataaaattgttaaatgcatggaaaatctggaattatatggcagtaatcttctataaaggaatcaaaagaagggaaaagaaaaaacctgaattagttcagagaaatttcagccacagttcagcaggaaaccccctttcaggaggttaaacatattttcaagcttagaaggcagattctgactcctgaagttgagtcccagagtgtgtaaccagcagcttagcagctgagtctcaaaccacgttttaaaccttttttttcttcttctttcccttttcctctttcccctcctgatctcaagataataacttcgagataaactgcatagatgttacctctcatcttaaaatacagcctcagaatgtgctgtgaacttccactccctttcctttcccatactacactgccatgccttatgcacatttatttttattttatttttttggagacggagtctcactctgtcacccaggacagactgtagtggctcaatcttggctcactgcaacctccgcctcccaagttgaagcaattctcctgcctcagcctcccgagtagcacactggactacaggtgcacgctgccatgcccagctaatttttttgtattttagtagagacagggtttcaccatgttgcccaggctggtcgtgaactcctgagctcaggcaatccgccggcctcggcctcccaaagtgttaggattacaggcgtgagccaccacgcctggcctgtgcacatttatttacctaaatacttattaagcacacaccatgctctcttatttggtcatatatttccttagaagcttcaggggttggatcttgttaggtaccaggcacctctggaattctctttccaacaaaagattacttcaaagacagaacccacacccagctgaagagtgactactatcggggaaaccagcccccaatatttcaacgtaggttctattttccctaagtgtcggcccatctgagaaattaagagaaagagtacaaagagaagaattttacagctgggcctccaggggtgacatcacatatcggcaggttccatgatgcccacctgggctgcaaaaccagcaagtttttattagggattctaataggggagggggtgtacgaacagggagtaagtcacaaagatcacatgcctcaaagggcaataaaagatcacaaggcaaaggcaaaattagaattactgatgagggtctgtgtcctgctgtgcatgcactgtcttgataaacatcttaacaggaaacagggttcgagagcagacaaccagtctgactagaatttaccaggctggaacttcccaatcctagtaagcctgagggcactgcaggagaccagggcgtatttcagtccttatctcaactgcattaagacagatactcgcagagcagccatctatagacctacccccaggaatgcattccttccccagggtctcaatta

SEQ ID NO: 1561406 - DNA, 4001 bp, Homo sapiens
ctgccttgtgtgcttttcaggatcttgcactacctcaaagggcaggttctccagtccttagatataactttctaccttttaagtctgagagagtccagaaggcaaaaatcatttccgttttttttcctatggaatatgaccatgaaattggctgttcagtcatgtgtctccaaggaatggaaactagggttgggaagaaaaggtgagtgtcccaggagttagctttttacaggaattatataccagaagattcctcccatcccagtggatccagttgctccccagggggccacaccttccatctcaggctgtcccctgggaggagtgacccaggggatgatattcactagaccctccaagagacttggcagctgtggacatccattttttttgagacagggtcggcctctgttgcctaggctgggatgcagaggcacgatcatagctcactgcaacttcaaactcctgggctccagccatcatcccacctcagcctcaggagtagctgcgactacaggtgccagctaccaagcccagctaattttattattatcatttacactagagacaaagtcttgccatgttgcccaggctggtctggaactactgggatcaagcaatacctctgccttagcctcccaaggtgctggaattacaggaatgacccaccgtgttcaggaacccaaaacaattctttcaagaaaaagccatacattgctagctgaaaacaagatgacaaactagtgaaatatcgcctggggccaaacagttcatactgttgctgtgaattaaggacagaaggttagcctggggaagtctctggaaaccaagagatttgctgccagccctaggaagagtcaggatgagagaacacagtggtggatttgagaccctgctgcccacgtctttggaagactcagaggggaaacggtcgcccttggaaaggaagaaaggactgaggaccacggaaaccacagctcctcccacacacaaaccccacacacgagtctggattccacctggtgactcgtcgtcaccgtgcagcctcctcaccgggttcacaggaactgcgagccaggctggaggcgagattgcagttagatattaaacaggtgccctcagccccgctgcctcaaggggccgcctccctgagagtcaggtcacagcagacgctgaccgccggcttccccattgtgcctggggataagatctccgagtgctgctcaagagtcgccggagttctcagatcctgaatcccagcagaaaggctggcgccaaccaggttgaagaccccacgagggagccctctcagcagaatgcggtttcttcacctcctgtcccaggattcacccctcacttccccaccaaccaaggacgctacacccagccgcccccgtccagaccccaaatccctcagggaggcggatctggggtgtcctcccctctcctcctgttaaaccgtttctgctgcagccctcggcgtctcggtgcagtgagtcgggccgcgaacctgtgttggttacagccgcacaatctggggagacccggggctgcgggctcggagctgcccagagagggcgccggggccgcagtcgccgcgcaggaacgggacaggacgcccggggtcccggctgcatgcccagccccaccctgcggccgagggccgacctacgccagggggacccgggtccgtagatcccgaagtcgcccttggggaggcccgggtccagccacagccgattacggccggttccacctaacccctcccccgcctcgggacgccggcccagcacacgcaccatttcccgacttccgcggtgtcccaggtcctaccgacagctcccgctgccaatgcgtgttccagccagacaaaggctgcctcagaacttccaggtcgtctctcagctacagaacccagagccgagcgcaggtgggtggagcagacgccgcgggctttttcaaccacacacacttctctgggcagtgcctgattgacagttcccacgaacccgccccacgcccctgattggatagggcgtcaggtcccgccccctgagggctgattgacagaagaagcgatcttgcacagctgagtggagccggatgagcaagttcctgacacagcccttggcagggggggcttcctccctgctctttgatctgaatcctcccgggttatatttgcacttaagcggaatttcctgcccgtactcaataggacctcctgcttcttcctcctggacacggactgacaaactaattatatctttttttttttttttcctcgagagggagtcttgctctgtcgcccaggctagagtgcaatggtgcgaggctcactgcaaccttcgcctcctgggtgggttcaagcaattctcctgcctcagcctcccgagtagctaggattacaggcacgcgccaccacccggctaatttttgtatttttcagtagaggctgggtttcaccatgttggccaggctggtctcaaactcgtgacctcgtgatccgcctaccttggcctcccaaagttctgggattagaggcgtgagcaactgcgcctggctccaattatgctctttttcaatgaaatttttcaagatttttcaatgtacaattaaattattttttactatagtcactctgttgtgctagcaaatactaggtcttattcattctttgtaactattttttatacctattaaccatccccacttcccccataactactcctcgctactacttttcgcagcctctggtaaccatccttctacacatttttggttgtttgagatggggtcttgctctgttacctaggctggagtgcagtggggccatcatggctcactgcaacctctacctcctaagctcaagcaatcctcccacctcagcctctcaagtagcttcagattgttcactgttggcatataaaaatgttattgatttttgtgtgttgatattgtatactgcaactttactgaatttatttctcagttctaatacttttttggtggagtctttaggtatttccagatataagatcatattatatgcaaacaaggataatttgacttcttccttcccaatatggatgccctttatttctttttttttcttttttttttttttgtcttattgctctagctgggacttcaagtactgtgttgaacaacagtggtaaaagtgggcattcttattgtgttccagatcttacaggaagggctttcagtttttccccattcattatcatgctagctgtgggtctgccatatatagcttttattatgttaaggtatgctccttctttacccacttttttttagggtttttatcatgaagggatgttaaatattatcaaaagctttttcagtgcacattgaaatgattatatggtgtttgccctttattctgttgaaatgatacatcacattgattgatttgcatatattgaaccatccttgcatcccagggataaagcccacttggtcatgatgaatgatctttttggtgtattgttaaattcagtttgctagtattgagttgaggatttttgcatcaatattcatcagtgacactggcctatagttttctttttctgacatgtctttgtctggttttggtgtcaaagtaatattggctttgtaaaataaatttggaagtattgccttctcctctgttttttggaatagtttgagtaagattggtattagttcttttttaaatgttggtagaattcagcagtggagccactgggttctggggttttctttgctaggagactttttattatggctttgatctcattatttgttattggtctgttcaggttttttatttcttcatggttcaatgttgctatgttctatctgcctaggaatttatcagtttcttctaggttttccagtttattggcatatagttgttcttagttgcattaatgatcctttgaatttctgcagtatcaactgtaatgtctcctttttcacctctaattgtatttatt

SEQ ID NO: 1561407 - DNA, 4001 bp, Homo sapiens
catgtcaatccaccctaccatccaatgagcgccctgtgctatgtgcattcaacagctgtaaccctgctgtctagctgtctgtgtccgcaaagcacagtccagtccagagccaggcaccctggatgccttgaagacagccactgagtggctagtgtcttatactgccccacccaaccttcccaacagacctgtgagctggggagatgggtcccctcttaccatagggagatgctcagagagtgaaggagccacaaatgggacccagatgtgactccagagtccacaccagttccacctagtaccccggcaccagcacccacatatgctgggttaatatcatggctaagaggctgtggagtctggctgcctggcttcaacttccagctctgccactcatcagcagtgtgactgtggacgtgtgacttaccccctctgtgcttcatttctccacctgagacacaggactaacaagagctccttcctctcaagaggctgctgggagcaggagttagaagcagcctccaaaggctaagtgctcgacaaagaccggtttgtctactctaggttcccaacctcgacattaatggcacttgtgtcgtggcgggctatcctgtgcaacatacgatgtctaccagcatctctgcctcttttcatgagatgccagtagcacttcccaagttggaaaaaccaaaaaaaaagtctccagacattgccacatgtcccctgggggacaaaaccactcctggttgagagccgctggcccactggacaaatatttacctacggcacaaaggctctggggcaaattccagctctgcctcctaccagctctgtgtccttggacgaggtacaaggcaccttttgtaataccctgtatctccatttcgttgactgtaaagtgatagaaggagaacaaaaatgctgagaaccacacctggctagtaagtgtccagtcagacttagggttactttgtcgaagtttccctgcgaggtgcccaggggacactgctatgaacacgcacgcagattaaaatactaagtatacattggaataggcgttaaaatcggatatagaggagggtgactccatcctgactggggtagaggtggcgggggtcaacttcatttgacaataaacagagtttctaagcactttacacatattaccgaaggtaataatgccttgcaacaagctaaaaaggcagatgctccgcactgagaaagcagcaaaacagagcaacgattcttatcttcaggaatctcacaactctgtaaaagttgcacttgtagaagcagcgcgcaaaacgagccacctgcgccgtatctacgttacaacaataaccatcgtccccggaagccccttcccgcaaacctttccgaaggggtccggtcccggcgcccccagactcctttgtagggtccagcttcccactcagctttcatctcacagcccaccctctgctagggtccccttcccctcccccacctgtccctcccccgtcccgcccctccccctcccccaggcgcccctcccccgtcctctccctcagcatttctctcccgcgttcaggacctcgaggatccacgaccccctcccactatccacccctccccctctccaagtccctccccctctagttccctctcccagccccttccccatcactcagcccccttctcctcccctccccgcaagtctcccatctttccctcctgaggcccccggcgcccctcttcccatccaacctctggtccctccctcgtccaaccgcccccacccaatccctccctccttcccccctcgctcacctcactctctcaggcgaggccccccaagccccctcacctccccgcacatgcgcacaaagctcgccgggactccatgccccagcaggctttgcgccaaactcccccgtccccctcccccaatcccatactccgagccgctcgttcagcccaacaactccccatgaagccccggcctcaccccgaactacaactcccaggaagcatcgcggcaaaggcggctgccaattggccctcgcctggggaccgccttactcctgtttgtcaccgcgtggcgtcttcgccaacactggaactacatttcccaagatacgcgaaagcgtcgtctgcagcctatttggccttgacggcgcaaatgtcgcgggctgtctgagcgcgacaggctttggactacatttcccagaatgcacgaggaggcttcccagtggtctgcgcgcgggccctggacatgcgcagaagtgccgggaaaaaaagagggaggaggaggaggagccatggcggcgttgttgtggagatcaggggaggccgggcaccgccgggcatttgggaggtggggcctccggagctctagaagctggcaagcgaagaggaggaggaggaggagaccaggctagagttctgcgccaatcaggagtgcaggctacgtctccttgactacggatcgcatttttttttgtcctccctctccacccgggcagaacttaagggccgatgtcggtgccaggaatcaggacgtgagcaggctgccctcctgttccggggtgggcagtggctcaggagggggccagcgcgggggcctcggtttggctcttcctgtgtgtgaacctggacaggacaccgccctctctttagcctcagtttcccctggggtgaattgggggacagcgctacctgccacgcgtcctcgctgtgcccctattggacagactactgccccgtcctgaggcctcagtttctgcatctcagaactgtgaagaagcatatttggattttagagcagacagacatcctaagagatcagctgaagtttttatctagacagttccagacctgattatggctcatacaagccctaccccagcccgcagcgtatttcctcctccgtacaacaaggataagagaatccccctcccatcctccacctccccggctgatctgaagactccgcgccataaaaacgaagacagtggcttacccataacaagcattcattacatggaagttgttcgtcttatattcataaatgaacaactttccccaggtttcacaagcgatgagtggctgactcagaactttgtgaccagtttgcccacggtggcctaatctgccctggcccacctgtctaccactgtcttctcctcgtgtttaatgagttccagtcatgcctcctttctgctcctagagcacgctgatcttcttcccactcatatccgatggcctacttgacatctcctcttggatttcttaataggcatctcaaacctaaggtgggcagtagataatttttcactctctcccccaccttgcgaagaaatttgttccttcccattactccaccatcttagaaagcaagtccatcttcacccaaatgttgaggccaaaaatagaaaagcagcccttgattcttttttctttttttttttttggttttttgttttgttttgttttgttttttgatacagggtctggctgtgttgcccaggctggagtgcagtggtgcgatcacagctcactgcaacctccgactcccagtctcaagtgattctcatgctgcatcctcctgagtagccaggactacaggcgtgcaccaccatgcccagctaatttttgtatttttaatagagatggggtttgccatgttggccaggctggtctcgaactcctggcctcaagtgatctgcctcctcggcctcccaaaatgctgtgattgcaagcgtgaaccaccatgcccagccaattcctctttttcatcaccatccacatgcaatctatcatcaggtcctattggctctgtcttcaaaatagatgcagaatctgtccacagctctcccgtctatggctaccacctggtttaagtccccatggcctctttagacactgtcatgcttccactctcgcctcttctgcctcctgcccctcagttcctgctccacacagcgccaaagggatcttttttttttaattgtggtaaaata

SEQ ID NO: 1561408 - DNA, 4001 bp, Homo sapiens
gcctcccaaagtgctaggattacaggtgtaagccaccatgtccagccccaaatccttttcaataatagatcaccagtctgtccctctgccccaggtcctgtggaggggtacagcttttacagactccacttctgggaagcaaagagccactagtcaaggagcctggaaaaccaccaggcagagggcagccatggggacagtcccttctcacacctggggcctatacttcccacttggggctgctcacctgaatcctgggtgggtggaaggatgtggaggctggttcttggtgtccatggttcccctcaggggactgtgctgcaagtggagggctggagggtgctgaaaagtggggcagatggaagggtggtgtcaggggctgcccacatgagccatggcagatgaggagctcctctgctgtgtgacatggcacgtagccagcccttggctcctgcctcccaggtccccatcccagacagggacatccacattcacttcaggagtcccagccttgacacacctctcctgggactcccaccctagccaggaatgtccacacttcctccaggagtccctcatctctggtgggaccccaacctcacccacttcctgtccatcgacattgggctcctccttcacactgcagctgagctggacagacccctctattctggtgtcctggggaccttccccaggggactccactgtccctgaggggtgggggctcccaagtggttcctctgtcttctgggctgcagggagcacctcctgcttcaggacatgggctgtgatctgaggagaagaggtaggtcacaatggctctagccagggtctatccctccaagaagctgatgccagccacactcacccagcccaacagttgcccagggtcatgctgcagtccttcgactagggcagcggcctcctcaggactgcctggccgctgaccgcgcacccaggcctggatctcgggaggcagtgtgcccaggaactgctccagcaccagcatctccagcatctgctccttggagtgtgcctcaggctgcagccactggcaacacagctcacgcagccgggccagggcttctcggggacctgccacctcctggtagcagaaccctcggaagcggaggcgggcagtctcaggctcctcaagggtggtctctgggtccatgacgggcaggcatgggggacccagaggggatggcattcttgctcaagggggtggtcttggaatcgtcaagatgggcctacagaaaaggaagggtcggaatgtcagccaagagaatctggccaggggaaggcagacaccaggctcagcccagggggctgagaccaggaccaagtgtactctgaggccagaagagataaggccaagaaagcttcatggaaggaggagggtcacaggacccaaacaatgatggcaaatgagagcaggaggaagcctcagggacaaatgcttggacgcaaggtgtccagggagcttcctggaaattgcaaacagttgggtccagcaggggactgctgggagatgacgctaaagaggtggagaaagacagtcatcacagagttccagcgccaggctgaggagccacagtgtctagccgaggtgcgaggagagtggaccagggtgggcgggtagaaggtggggccaggctgtaatgtacggggacgagtcgccctccacaatctcggggaggttgactgggtgggacctcctttaggaatggctctggggagggggcacgtggacatcgtgctcgctgaccacagcgagccgtgggcgactcacactgccggggcccgtgcatgtgaaaacgaaaagcaaaggccaagaaaaacggggccaaagctccacgttgcgcggagtcgagggatggccacagcatcccggccctgaaggtctgcagtgaaagacgcccacctggacgggcctgagagaccaggcctgacacccggcctatccgagggatgctcgaacttcgggatctgtccccaaaaggggaaggcaagagggaggcgttccaagaggacttgccaggcccggccccccggaacggcgttgagggtaggaaaggcctgagcgaaggctgaggtgacgcgcgcggcctgtcgggaagtgggcgggccctccagggcgccgacagcaggagccgttcaggccccagagggcgaccccaagccctcccacggggtggaaaggctgcgcccactctggcagcctgcgctcacctcaacccggagcggttgcttggaggccgcttcccggatgtggcgccgcacaacgcggggcgcctcagccgggtgttgccccggcgacgccgcgctgaccaatctctcgcctgcaccgaaggcaccgcccatgccctttgaactacatttcccatgagcatcagcaagacaggcgcgaccgtgacccgctgacccgcatttgcagcagcctctgacgcctgagaggcgctctgttcctctaggaggtacggcagagtcccagggttatatggtctccctccgctctgagagcagctcttcccgggttataaacttgcgcgtctgtacagtgggccggtttctattggcaggtgaggggagggggttttgcccaatcagaggtggcgcttgcttggccccgccgcccccacgccattccccgggccagcccctagataacgctagggcatatccgcccgcctccagctgttcccgtggcaacgttcaggagcgttgcctcgacttccgaagaggctggaagtggcggcccagtggtttcctaggtcgagtagttcgctgggactcgcttccaagtggacccgggagaggcggtggtgtagaagaccaccctgagcctgggctttctcccgccaggagggtgcgagggccatctttgacctctgttaagcgccctaaggaggtaccgacggttgtgaccgcagtctctgacgtcttcagatgtcagtcctacaaagtcgggggtggaggtttccctccaggctgatcggacatgctcaaccgtttatttacctttgaatttggggagcagaactagccagggtgacactagtttctcccaataagcagtgttacagttttctaaatctgtggggtcagttttgcttccacacttaaaagtggccgagccattacttagtcagtcctaaattacaccgcctgttttggtttctttggatacctgggaatccctgctgcctgctctggatgaagagcagtggtcttgatcaccgattggaagcaccgagcatgtgcgtggatgagacttgtcaactcggagctttccaacggcctcctcaggttgtttttggggatgaggtgcttaggccttttctctgggactatgcagagtcccagaaggaaaaaaaaacaaaaactttcaccctccaccatgtggggagagcactggggcgttaagggcttcttcagtagttgttccccaggcagctttgatataggtctcccgtctctgggctgctggttctcagccttctgcggttctggagtcagcctggtgggaactctctcctcttcgccaagtcgccacgtagtattttgccttccctaacttagtgacagctctcacccacttctagcttaggaatgccattgctcctgactcctctgtcaccatcctcatacttgtgggttatgtgttttaaatactcccctctgtggtttcagtggatttctgagcccagtgagatgcatgtgttcagtctgaccttttgacatagaagcccagggatacttttacagtcactacctattcaaaattaagagcagagggggaggttggagggaggtcagccgaggggccaagacctgcatggaggtgggagcctaggttgggggccactgatcagtcatgggtttggggaggggaagattggaggagggtggacaaactgagggacaacaggggcacaagcagacgtggaaaggaacttgatggagggaggcggctggtgggaagacaaggtagggtactg

SEQ ID NO: 1561409 - DNA, 4001 bp, Homo sapiens
cgagtttgagaccagcctggccaacatggagaaacccagtctttactataaacacaaaaattagcagggcgtggtgacgggcacctgtaaagccagaggcaggagaattgcttgaacccaggaggcagaggttgcagtgagctgagatcgtaccactgcactccagcctgggcaacagagcaagattccatctcaaaaaaaacaaaaaacaaaaaacacaattaatgataattattagtttttaagccttactgactcatcatctgggtttgttttaaaatactcaagggaaaaaaagttggtgggagaggcaataagattagcaagaatggaagcagggtgactgtacataagagttcattatatttgggtatgtttggatatttccatagtaaaaaataagggaataacaacccactatgaatagtgtgataacaatttcataaaacacagacaaaaacacattaaaaactgctaaacagaaatgcattaaaatgttaataattatctatatcctagtattaaggaaatttgtaatattttatatttctgtattttctacatcctgtacagagaacgtgcatctctatgatcaaaatatgaactactaatattgcttaaaattaaatgagaattctttcaaaattttctaaagtctaaactcaaccttgctttcaaaatcttctacagtaaaattccaacctccctccccaacttgatctcaaatggctcctctgcagccagtttcctatgattatttatatggatcatttatctattttatttcctaattctaaattgggatttcaaactgtgagaccaagggtattcagatgtaaggaacccaagtctaggacacaaatcccactgttcttactagcactgtgatataggaaagtaaattaggctctctccatttcctcatctgtataattggtgtaataacagtacccatatcacaatacccacatcacctttgtaaggtgaacagaacccacaacacaaggcctttgtgaaggttcagtgtgttagtttttataaagccctcagagtgatactcagcacccaatgtttaactagtgtgactaatattcatgtcacattttctccaattatacaataacggaacacttctgtagcagaaacatttgcaaggaatgaaataccttctcgcactcggaacagaagaggaaggtgaatgctaggtcctgtcacagtggggctctgctgccagaagccaggatgctctccttcctcctctcccgcagcattctttcagaagtcagggcaggggaaggaaaggaggctgggagattgcacgatcttgtctgagatcctggaaaatccacagaggataactccagacgccacctgttgagtgatgcactctttcttaaaaaacgggtcaggcatagtccaagaacagcctcctttcctgcaggaatcagaaagaagagccaggcgcttgctgaaaaatgaatattttttattatgatagttttaatattaacggccgacatgttgccacattcctgtactattccatacacattttacttgtactatattactaattgtcaaaacaaatatataaggttaatatttccttttgcagaagaggaaactaagaccagaaactaagcaccgaaagattaagttctcacccaacgttacaccgctaggaagctacagagctgtgggaggtgggggaaggcgggtcgggccgctgagagcccaggagatcctcagacgcctccccattcaggtccacttccaaccaggggactcccgaaccgccccgaacgcagcagctccggatacagtaaggcaatcagctgcccagccattcaactccgccctccgctgctcgccgcagcgtcttttcctgctgaccgaagtgcgagccctgctgatcctacgaccaaaccataaaagttaaaacaggtcgcggggtcccaggactcactcacttccacgagaggaatgaaggccgcgctctcaacctcttgccgcggaagtgcccgggagagcagggagctctggaactacatttcccagcatccccgggaggaacggaagccgctgccccgccccctgggcggaagtgcgggcttcgactcccacggccgaatcttatttctcagaatccccaaggggagcgggcttcgtgttctcgtcctcaaatagtcgaagtaccaccgaacccactgagcactggggtataggttcctatttccccaggggagcaaataacaaagccgcgctttcccagagctgaagtgcccccaaaagtctggaccacacgtcccagaatcctctgtagggctgagcttcccgccagcctgcaattttccttttgaattagcggggggagtctaagtcattgcttgtagagctcagcctgctttttccttttgccattgttcccttttatacgtgacagaagttgcgaatatgaaaaaaaaaaaggaaaatacaaaggaatgctatgtgtgagctaaaaacagaggtaataaaagaggtggccagagccgcccagagcaacaagccttttataatatgggtatggattcatctgtgattaaaaatgctcaaaaaaggagatgcaatcatccagcaggacatgaaacaaaagcagcaaaattctccacttttcttgcgcttagttttctttcattcgcaggatactgaagaaagtattatagtattgaataggctctatcctatataaaatcttgaaaacattcagttcagattaaggaatcacatcacttcttgctctcagaatcaggaatctgtaaaggtgtcttatgatttgccaaagtgtctatgaatattcagtaaggagagggaggtgaagtgagggattaagacatgaagtgcaaaaaatacagaaagctatactattcacttttctcctaggtagaaactaaatatttttccaagtttattatgaaagggtaaagaagaaaaaatggaagttgactacataggagtagctgtaaacatctgaacaatgttcaatttaggctgaggcaggagaccagcagggcgtgattccaagatcagataagaaacctgctgaaaccagcaagtgatggaaagcaacctgtaagttccctttgctacctatcagtataagacactcccaccagcgccgtgacggtttataaatgccatggcaacacctggaagttaccaaccccttttctagagatttccgagtaactcaccccttaatttgcatgtaatgaaaagttggtataaatatacccagccaacagcccatatgctgctactctgggcacactgcctgtgggctagtcttggtctgcaaggaacagtcactgagcttttaacactgttgattcgataaacctgctttcttccgctgctggcttgctgttgaattctttcctgagcaaagccaagaaactgccctgcatcaatgccatttcaaaatctggataagtactctctctactttagtaagaggaagagagaaatgtaatcacccaatggactcatcttgcccactgcccagagagagccaatttatcaagacaggaattgcaatagagaaagagtttaatacacgtagagctggctaaatgggagaccagggtgaagactgaactctgccgttttttcttttcttactcaaattcctatctaagggtctggggagtcaagccctccaaaccataaagtctcatgagaggggttttaatttaaccctatataatgtgacttactttccaacctgtcataacacctcatgacggataagaaaggaaatcaaaatacttcaaccccaaatatgtttcattgccctatcatgaaatagccctgcaaagttgtcctttgtggagaaaaatctacattctgtagagaatctcctttcctttttccaggccattttttctgatccaggagagaatcaactaagagtctgacacttttttttttttttaagagttttgctcttgtcatccaggctg

SEQ ID NO: 1561410 - DNA, 4001 bp, Homo sapiens
tcaggtgttagggcctggacctgcttccagggagaattcacaatgagccatcgcttccttttctacctaagtcctactagcaggcatccctgaggccagaagattccatgagcaagcaacaagagtcatagagggcacagcaggttgtagccaagacaatatgggcccatctggagattacatctatcctggctgagtaggagggtacattcagcaacataaccatacaaacgtgccctctcagaatatgtcagcaggtaagggagtaaggggaaccacatataaaaccaccgtggaagccacacaggtcccctgagaactccttaaacaaccaatataccattttttaagtctacacagttccaccagtatgaaaggccatgactcctcatgcccaagatcactggctagaaggaggcctcatcttgcaaaggttactttaggtctcacccccaggcctccctaaccactgcgggtaaagaagagggtaaaaacacaggctatgatgttagacacaccagttgttagtttctgacttaagaaacttaagagctacagtgatgtaaggcaggtaattggacgtatgtgaccctcaaattgctcttgtgtaaaacaatgatgacaacagaacctaattctaaagagtaatcccagcactttgggagacccagatgggtggatcacctgaggtcaggagttcaagaccagcgtggccaacacggtaaaaccccgtctctactaaaaatacaaaaattagccaggcgtggtggcgcacacctgtagtcccagctactcaggaggctgaggcaggagaatcgcttgaacccaaaaggcggaggttgcagtgagccgaggtcacgccactgcactccagcctgggcgacagaacaagactccgtctcaaaaaaaaaaaaaaaaaaaaaaaaaaatttcagggttaaacgaactgagggttaaataatactcaccgatcagcccacagcaaggactcaatgacagttaatatcattctttgcaattatttttctttgttcccattacatccttgacaaactcaaatccacaagcttctttaataccatcagattatctacacaaaaataccagactctgggcaagggtgtaaggtgccactttagccggaattgccaaaaaaggcacctccaaataggtgacacctggacagatgccaaaaggatgtgaaagggaggccctgcaaagttacaggggcagtgttcgaagtaaaaggaagtgcaaggagaaagcctggaaaatggaagaggactgcacggtcaggttggtggctctgaagagcaaaggaccagggaaaaatgcaaacagacaaggtcaggggtggttggccaggtggatggggtacgggctggcaggcaacagagaaggttggatttaggggaagtgtgatgagatccctagaaggaagcatcactccttcaaccacggactgaacacctatcagaggccaacactgttgcaggactgcggataaaggaaatgacaagccacggccatttctcttaaataaacgatggcgacaaagaaaaatcctgtggctgtcttggcttccagcctgcccacgaggcctctagaaatagcacagcagcagcaaggccgaaacctcgtccactcacctgcgccggagccatccacgccgccgccatcccgggaatgccgcggatcagccgaccacagcccttctctgtcctgggcggggcgacctcggctgactttcgcactccgagcctcagttttcccccgaaaaaaatgcgcacaaggcccaaggcgcagcgtcggggctgaggagacggagggcggctgcggaggcctaggcctcggcgggcgccggtgggacacctcgttaggggagaagcggggcgtcaggctcccgccaagacgcgaagaaggggcgtaaccgcttcactacccgtccctgctcaggccgcagaacgcgcccacccagcgctctaggccccacactgtttcagggccaaaccggcccacggagatgacgtcacacgaagaagcggaagtcccgcctccgccgccctggcccgcagaaaactctcctgtcctgggtcgtcaatggcccagagtccgcggccgacgcaaggggcagtgccttctgggtaatgcagtttttcccttacatctaccgggtgtgggaactcacccagcgcatccgactgcacgtaagtgcgcaccagaacccccgcgtcgtcttagggccaccgccttagtataggcacaagtcggagggtcgaaaggtcccttctagctcaggaaaatcgaggtcaggaggcggggatattcgccccgattcagaccccgaacaaaggtgcttaccctgctgtgggctgggcccgcgacttctcgcttgctttgcctcttttctggatcttttcatagaagaaaaggataaatgagcagttaaaatagccacccaaaggaggacgcctgacagtgtgcccagcctgctgggaaaggacagaccgccctctattgggcctcctttggccgggcccagccttcgtaggatgcagggacttccgggtgatgtaataggcttcgcgttcgccacgtgtggacttcccgtaccctgaggtggggaggctgctagtggagcaggcttgccgggaagcccagtactcccatttcaagcatgatcagtttgaaacgtcagtaagaccacaaagcgtagtgccatatactcaacctatgattcaacattggcagagggttcgagcgtggatatataaatttgggagttattactgtaaactgttacttcaagtcatgatattgggtgaggctatgaaaagaatgagcgtagatggataagtgacgggaaagaggggaaccctggcccaacccagcattaactggttgcagacaggagagtttataaagtcttgttaggaattttaacaatcctagactatgcaaagattatattatgcgaagtcttaggagtccccatcagtaactttttttttttcttttcatgactatgaaagtgagagaataaagtccagctttcaatggtttgacgatatatatggttaaggaaatagaaaggtgtgcagaaagtactctccaagagatttaattttgagattgaaaatagtcaaggaatggagatggagtcaatttcctacacgatgcggtacttttggagaaatatttttggctaaattagtgtgcaaggaacactgttattcatcactggcaatagtaatttttgaaaattgataaagacatcattctctttttcacatatttgtgactcttaaattttttttttttttttttttttttgagatggagtttcactcttgttgcccaggctggagagcagtggcacagtctccactcactgcaacctccgcctcccgggttcaagcgattctcctgcctcagcctcctgagtagctgggattacaggtgtgcgccaccacgcctggctaattttatatttttagtagagacagggttcttccatgttgttcaggctggtctcaaactcccgacctcaggtgatccacccacctcggcctcccaaagtgctaggattacagacgtgagccaccccctctggccagactcttataattaaatttaaatggttttttcagaggcatatgaaccagagcaactctatcttaaataggagctgggtaaaatgaagctaaaacctactaggctgcattcccagacagttaaggcattctgagtcacaggatgagataggaggtcagcacaaaatacggatcataaagaccttgctgataaaacaggttgcagtaaaggagctggccaaaaccaccaaaaccaaaatggtgacaagagtgacctctggtcttcctcactgctacactcccatcagtgccacgacagtttacaaatgccatggcaatgtcagggagttaccctatgtggtctgaaaaggggaggcatgaacaatccaccccttgtttagcaagtca

SEQ ID NO: 1561411 - DNA, 4001 bp, Homo sapiens
agaatgacatttttcttcccccttcatatctcctattcccagacctgatacatacatacataaattattagtgggaatttggacaaatcctagctttactcaaaaccatgaggaaactcagctacagcaggatagactcaagaaaagcaaggatcatgcccttcagcagaagggatagttaggccagcccattgtcccaatactatgatgaaatcgaagccaggatcagggtgctgagaactgcactgggtagattttcactgaattaagaggaaaaagaaaaggtaatgaacattatgagaaaagattagggaaacagaaaacagacccaaaagacccagtgtatgtgtaacagaaatttcaaaaatagaggctgaaacaacacagatggaagagaaaaaataaatagaacaaaaatttgcagaccaaaataaattcttgagtctttagtttgaagtacagtgctgtaagaattaaagaagaatcatacctggaaacatcctgaaaaatattcttaagtttgtctttgaatacagacaaaaggacataaatatcttttagtaagaagttgcagaggccgggcgcggtggctcacgcctgtaatcccaacactttgggaggcagatgcgggcggatcacgaggtcaggggctcaagaccagcctggccaacatggtgaaatcccgtctctactaaaaatacaaaaattagctgggtgtggtggcggatgcctgtaatcccagctactcgtgaggctgaggcaggagaactgcttaaaacccgaaggcggaggttgcagtgagccgagatcgcgccaccgcactccagccacggtgaaagagagaaacttcgtctcaaaaaaaaaaaaaaaaaaaggaagttgcagaacaatgtgtattgtggccaaatctcagaaaaaaaaaatcaaacacataggtacataagcatactacatatgtggtgtttttctgaggctgtaatgataaatgcggggtagcaatgtgattttcgcttgtgttgtgtgtgtaaatctacagctaactcctcaagtagtcaggaaaggatgagagatggatgaatgacagatctctggagtggggcgtcctgagccttagatgtgtgcacaggagcggggtgaggtgaatgtgcgtgtgtctgtgtgtgagagaccagagttgactgagaggagtggaagctctctgcctgatcgtgtgagcctgaggataacgtgaatgtttttttgtttttttttttttgagacagtttcgtttcactcttgttgcccaggttggagtgcaatggcgcgatctcggctcacagcaacctccgcctcccgggttcaagcgattctcctgcctcagcctcccaaggagctggaattacagacatgcaccaccatacccggctaattttgtatttttagtagaggtggggtttctccacgttggccaggctggtatcgaactcccgacatcagggcatccacccgcttcgggctcccaaaatgctgggattacaggggtgagccaccgctcccggcctgtaaatgtgctttttctttcacgtaaataaatgagatttacacaaatagccattcacaatcatggtcacagtcacctacaaaccccatttacacaaatgatcaggcacacaatcacactgtcactaaagcacacccacgcaccaggtcgctgtcccaacagtaacacacagcccaaagagaaaccctacttcctcacgcattcaaaacacacccacctaagggctgatcccgcactcagaggcctaaaactatagacattcccttccgcggcactggtgagccaggatttcttaccttcagcattctcagggaaggctctggtccaagctctgattcggattccaagcgaagccacacgcccagctcttccttctccaccggcccgggacatccttacctgcctctacccggagaccattcctgcgaggctcctaccggaagtagctgtggacagcagtgtcctctgggaaatgcagtccgaggggagagcgcctggggtggagcgggtgtgttccgccgggctccgggatgcacttgcgcagtttcacccgaggctggagtgacgccaacctgttaatgttcgttttcggattctggacttcgggttccgctgaggacggatttcggaataggcacagtggctgccccgaacccctcaaggcggcctccgcgggctgtggctgaagataattttcggcgggcgcggactaacccggcttccctttgtggagttgtggtgagaaaggtgttttgttgtgcgcgtgtccgaaggtgactccggaggagaaggtggatatgaactgacggtgagggtgtagcgcgtgagatttgtatgtgaaacgatttaaaaaaaaattttttttttggccgggcgcggtggctcacgccaaggcgggcggatcaccgagaccagcctgaccaacatggagaaaccccgtctctactaaaaatacaaaattagccgggcgtgatggcgcatgcctgtaatcccagctactcgggaggctgaggcaggagaatcgcttgaacccgggaggcagaggttgcggtgagccgaggtcgcgccattgcactccagcctgggcgacagagcaactccttctcaaacaaacaaacaaaactgtatgtcatatatttgactccatttatttatttatttagagacagagtcttcttgccctgttgcccgggcaagaaaaaacaaacaacaacaacaacaaaaaactgtacgtcatatatttcactcaactttttttttttctttttttttttttgagacggagtctcgctgtcgcccaggctggagtgcagtggcgcaatctcggctcactgcaagctccgcctcccgggttcacgccattctcctgcctcagcctcccgagtagctgggactacaggcgcccgccacctcgcccggctaattttttgtatttttagtagagacggggtttcatcgtgttagccaggatggtctcgatctcctgacctcgtgattcgcccgcctcggcctcccaaagtgctggattacaggcgtgagccaccgcgcccggcctctttttgagacagggtcttcatgccctgttgcccaggctgactgcggtggcgcgatcctagctcactgcagtctccacctcctcagctcctcccgcatccacctcccaaagtgctgggatagcaggcgtgagccaccgggtcaggccaaaacgatttattttatttttatttttttggtaaagacagggtctcgctatgttgcccaggctggtggtctcgaactcctgggctcaagcgatcctcccgtctcagtggccaaagtattggatgacaggtgtgagccaccgcgctgggtggtgaaacggttttgaggctttttgagaatggctgttctatatgcccgcgtggggctcatgcggcgagcgccgccactcccgcagtggcccctgtgggggtgatacgtgatgtggcttaaatgtgagaggccacctggacccgtgtgattgccacgtttgcaggagcgcagccacgtgcacagggatcttgtgacattctgtgtgaggctttttgcgctgggtccacccatgattagaggactagtgtgactgtggcggcccctgagaagggaagaagctggttgcgaccaggaaggtctgagatggatgaatgacagatctctggaccagggcgtcctgaaccttagatgtatgcataggagcggtgtgaggtgactgtgtatgtttgtgtgtgagagtccagagccgacttagaggagtggaagctggcacatgttatctgccagaagggacagatccatggtaaggatttttaaccttgctgagagaccagtaactccatcaccaagtgtaatatgaggaaatggtgcttgtttgagaacaagtgattctgcttgtgtctgattctcattcatgtatgtgagatggtttgcacttgaaactgtcagt

SEQ ID NO: 1561412 - DNA, 4001 bp, Homo sapiens
tttctgagtctaccgctctgtttcttccattcttctgcttttttttttttcatttttggggtactgcatcccactgaaaattctaattacaactgggcactctcctctaccagaaaaaaagccacacccagacaccgcctctattttgccaatcatttcaggggtcaggatcactcaggttgagcttttctggtctagcccttcgtcgcaaagatgcagggaggttcactggggctcagagctggaaacattttcacgaagttaccctgagaaggtctgagatgagtgagaaggtgtgcctgaattcttacatgggggcctggaagggctaatgggatgggttggtcttatcatcccattcttaaaattagagaagcatttttcacatgcctgggttaaagaaaattcttttgaaaggttctgatgaaattgactcccaacattgaattcttccttacaagaaaatcacactaacatttataaaatgcagcagtgtaaacacacagctcttgaccttgaaaacagggaaacagggtcagctgtagaaccaagacataagcaaattatttcaatcaagaaatacatgggtggacagctgaggtggttcacacctgtaattccagcactttgggaggtggaggtgggtggattacctgaggtcaggagtttgagaccaacctggccaacatggtgaaaccctatctctactagaaatacaaaaattagctgggctccatccttgcaacttatttaacctcctgttggtccttctccccaatctttagatcgtcctcaatctccatagatttctgcctcttctcccatctatgcgcctcctctgctctccctgttaaattctctcttctctgttataaccccctggacccaatctggcaccccagatccccaggtgtcctccccgctgtgcttctccctctgttctccttgccaccagcaccactctgctctgtctgacccggctccacatccctcctcctctccctcactctgatgagcctccacatttctgcccctctccctaccttgctgtccttcatctctctgtacatctagcttttctctacatttctccagttgcttttctcctcctgctttcttatcttttatcacttttgctgtctcttggcaaatccctcacccatcctctactttgccatctgttatgggtctttctcattcttcttttctctgtctcaggttttctactgctctctcagtccctctctctgtctcctgatccctttggcccacacgatcacaagagggtttggagtaagacgcctgcatctcggagaagcgcattttccaagtgctggagctgggcgggcaagaacaccccgcgtcacaggacaagccccaggcacctctccaacgagggctcaggggacgcggtgactgcggaggggagatctggggagcagcagggcccagcaagaggaggagggaggtggggagcgacgacgccttcggacaagggtgggatccgcaggatcccaggaccacagaacgcagccttcccgggactggggtcgccgcgctgtgctccaggaacccaggagagtaaggctgggaggcgcacagggtgggaatacacctctagggtgaggactttaaaaagagccgtgcggaaggagtcaaaaaacggttttgagcaggaaaactacgcgataggaaacgtatacattgccctatggcagaaagacccgggacgggaccagcctcagggcgactttaaacctaaaaagaaggggcttccggactcccagtagaacatctccatttgctctgagtgaaggaagaaaggcgagaacttccaggtctatggggaccccacatcccatgtacagaagtgccggggacctgggaagctcagacttaacaccacacagagcaaaactcaccgcccgccgcggcgtgaccgtcattccacgggatccacttcctggtctgcgcgaatctgcgcgcgcaggacagaaaccaggcctgggtggagccaacgaggaggcgagcggggcccgggtgaggtgtgggcggggcgcgaagcggcgagaccttgccctttagaacccgcagagggcggggccggagcgggacctgtgcatctctcagcctcctcccaacccgttctccgggttttggcggcgagagcccccaggaaggcagacggataattcaaaagccctggaatagtctggaaggaggatgcaaactagaatgtaaaatgcaaagccctttctgggcggaacgtaggatttcatgctgatggcccacaggacagtatagaaatcttctccctttctattctccattcactcaggagggagagtccacccagtgctcagcttcagagacatccctagggccacagcctgggatgccagacggagtgctcaggccagggaggagtgaggtcaccacctgctgcttaaacacagcagggatgcgggcgtgggagcctgaggtcccagctactcaggaagcagcggcgggaggatcgctcagcctgggggtccaggacagcctgcgcgacaatgtaacattccctcccgcagtctctctcttttttaaatttttaaaataaaatttttattaggccgggcacggtgactcacgcctgtaatcccagcactttgggaggctgaggcgggcggatcacgaggtcaggagatcgcgaccatcctggcttacacgatgaaaccccgtctccactaaaaatacaaaaattagccgggcgtggtggcgggcgcctgtagtcccagctactcaggaggctgaggcaggagaatgcggtgaacatgggaggtggagcttgcagtgggccgagaccgagccactgcactccagcctgggcgacagagccagactccctctctaaaaataaataaacaaactaaatttgcttgtgtgagataggaatacaacattactcttctccatatggatatccagttagttgtcccagcacatttgtaaaagagatctgttactttctcctttttatttacattttttctttttcttcttcttcttctttttttttttttttttgagactgagtatttctctgtcgcccaggctggagtacaatggtgacatctcggctcactgcagcctctgcctcctgggttgaagcgattcttctgcctcagcctccggagtagctggcattacaggcacacccaccatgcccggctaatttttgtattttgggtacagacggggtttcatcatgttggacaggctggtctcgaactcctgacttcaagtgatccgcctgcctcggcctcccgaagttctgggattacaggcgtgagccactgtgcctggcccaagaaatactctttacttcgctttttaaatgttgaaaaaatacaattgaaaactaaaaaatcttccccaaaatgagaaatcatcttcatgacaaaacaggaagaaataaaaaccattttattagtaaataagccttagaccagaatgtgttgggaaatacaggcaaagagctgagaggttgaaaagagagaaacttcactgctctatacaacccattaagtacatgttttcaagataaacactaatcagtcctcagggaagaggacttgacaagtctttggtcgcacatagttcatcctggctctacttggtaatggaggtgaccatctgtgtcagctaactagcttcatgcagaaggaggggaaatacattaacccacgtctttttgacaagtgtgagttttacgacatggcgacaggtgccctctctagtgaggctcctacaatctgacggaaactgacgtcagcagtaaataataaaattcagaatacacgattaattatagagtttattggaacacaaagtttgaggatagccatctggaaacatcaactccaaatgaagggggcccgtgttcccatgtagagatgttaaggtttcacacacagggaaagacagagaagctttagcagaatcaacacattttccat

SEQ ID NO: 1561413 - DNA, 4001 bp, Homo sapiens
caccaacctaggtctggctgactctatcacagaagttatttgctcatataccagaaaataacagaaaataagtcctctgtgcagttggccaggatttgtgaacattctataagacaaattccatggagaattccatcttttccagagagaggcattcctttcgttacaacagagtccatgtgacttgcagacaaccaaatgaaaaaatcctcatgaggcctaggatctcattttgttttgtgacaaactacagtgttgaagcagtcccttgactccactgagccatgtttccttaattaggaaggaagaggataaagtatctgaattaattctagtttctttcatctaaattccactgccttctcaaaggattatcataatgatgataaaaatgaacacattacatggcagggactataccaagtgctttacatgtatgaggtcatttaatccttatgacagtactgtgaggtatataatattaccatctccattttacctaagaacttagagtcataaactttttaagaaaaaaaccccaaacctgctcagtggaggttctggcatatgaactatttagttatttaaccctttcagagtcagtttctttaattgtcaaaagtggctaagaaacctacctgaggcagtagttgaggaaactacatgacagccagtgactctggagtcagcctgttctggatctgaatcccggttcttccacttgctagtgattacttatcctctctatgcttctgtgtcttcatctgtaaaaaagaggtaagtagttcctacttcataatgttgtgaagtttggtgctgatactcccaaaaggtcttagaactgtgtctggcacataataaacactcattaaacattagctattactatagcatgcaggaaactaaacaagcacagaacaatatggctaaaaatagcccttcctccccctttctctttattggagtgggaggccagaggggagggagagaagcccaaggaatggggatatcttccgttattgactagaacgtgattaagccatagaaaggctggaatgcctcggcatttctgggtgaagctgtgaatctcgccttcttcccaaatcctacagtgatagatgggacaaggctctgacgggtaaaaatctaaatgctgagctattccttcaacagcagcagagtacccagaagtaatgctataatgggtaatattacgggtagtgttctctcccatgggcccttagtgatataccaaggacctgagtcaggttatctggttaggtgtctctggccaagtcaaggtccctccctaactaaacccagctccactctgacccaaggtgaccctccaaatctttcgacttccaggtccactagccttagaaacgggggacatcctcctccagcacctgaaccccgaaagacagcacccaaaacctcaatgtccactccggcagccacatccgtcatctgtcactcttacctgtgtactcagtccccatggtcttcgctcctcgccgtcctgtggacatggagccctgtcctgggctctgccccttccagatagggctgacaggaaatgcttcagccgaggctgccccgcccgggcaacttccccgggctctaggactttgcccacactgggctctacgcagtcgatacaggggagaacggggtaagcctcctccggccgggtttcctgctcttggccacttaaagtgcttcactcattccaacacacaccgccttccgcacgccgccgggccatgcacgcaggcgcagattcgcggccacgcaccggacagtcacacaccgggccgccatccccgcgcgcgctcgcccctcctcagcacagcaccgcacgctcaccacgtatgggcactcacagccaccaggccacacgcgcacgctcacgcccgccgcccacacaggaaccaggacaccgcccccgccgcgccccagtccagcctcggccgctgccccgcccagacctcccttctcctcagcaaccggcgggacgtgcactcgcccggctttgggtcctttccggaagtgggcgtgtcctccgctgcaatagcccctgggaagtgtagtccggaacggaggcggcgttcagaaatagggcgctggctttgccaggagcggctcctctccaagcctggcggtcactgccctgtgtccccttttgggcctctcctggtcctcctggttggattaggaggcctctcagcccggagtctgggtcgccgaagtacaggccccttcactgaagcgacccacggcgcaggggtttctggaagccatcgccaggctccgagtgttcagatgcagctgccaggctcaggacgcagagaactggcttccagctcgcaggagcgcctgtccgtggtgggtagggtcgcaggcgtggggtgtgcaggagcagtgggacagcactgaaacgcagtcggtaaggcgtagcggctaccctctggagaggaaaaccatgacagggcggggcttggggcgcgggcggggcctacgcgatagaaaagtgaggagattgggatttgtctgctttgcacacttgtgactttctgatggtgcgcgtgtggaacctgttttatttcatgcctactagttactgctctctgatatacggtacgcccctcacctccccccaccccattttatctctccctgctggaaggagggttccaagaaggcacacagcttccgtcctgttcagggttatattctcagtgactaaaacagcacatagtaggtgcttagttttttatttttattttattttttaggaaatcacgaaatctagcattgccagtctcaccatgacacaacatgttataggctgaatatgtcctcccaaaattactatggtgaaaccctaacccctagtgtgatgacgttaggaggtgggactttggggaggtaactggttttagattaggtcataagggtgatacccttatgatggggtcagtgcacttattaaaaaagaggaaggaggggtctccatgtttacacaaccaccaagcaaaggccatgtgaggacacagcaggatgtaacccatttgcaagccaacggggccctcaccaagaactgaatgtgccagcactttaacttcccagcctccagaattgtgaaaaataaagtctcttagtcaagtcacttagtctatgatattttgttatagcagccccagctgaccaagatacagcatcatagatactggctcaccagaaactaactcaccctcccagtcacactcaatcacccaaggccacacagtgacatctagactggactctcctggatccaatttatgtcagacatcataaacaacataataaagccaagtctagctgtgaagatactttaactatgaaacagcaaatatcatcttagagcttgtaacgtttgtggttatttgagttggatgaaaatgataatattctcattttagctctggcatataaagagctcggaagccttcattcccatcttcacaacaacaaaatcattcaacaaactgaaaatcaacttttcttagatccatcagagaactgaagatagaaaggtaactgacaccccaaaatcccgagaaagaaaaatacataaaattacagccaagattagcttacttgaagcagaagccactggagttataaactggtaaaaacttttattttttataattttgatgaattgctggaggcttagtgtgggctaacttgtgagttaaaaactcctaggggcccaatcttagatgggcccccacactttcgtgaattttacctccagaaaccctatcaaattctctcagtgaagaatggggaaaaatctcaggtttttgggcaaggggaggagaaaagtaagcaccacattttccataataaacacctgcactccaagaaaaactacttactagagtcttgttggaccttggggagaggcaattggccagctccagtccctctatagcctgtctgtctcagta

SEQ ID NO: 1561414 - DNA, 4001 bp, Homo sapiens
actcaggtgacaaagaggaaaaacaaactgtttctcctactccactcacacaacacaaaacagttctaagaccagatgtgtggggatctacacacacacacacacacacacacacacacacacacacaccaggcaagcaataagttcttcagtgaataccaggtgggtgacctctagggcaacccagtgaataccaggtgggtgacctctagggcaacccaattctgacactatctacctggagacagcataagatcccacaggttgagggctcagccctacaaaattgctccccacttccaatgccagttgcaaaccccaggttgttttacttgtgcttctgactagctataaatcggggttcctatgaccccctccttgcgttcaattaatttgctagggcagctcacagaacttagggaaacacgtttgtagtaataaaggatattacaaaggatgcaggtgaagaaatgcataggacaaggttatataggaaggggctcatcctacaggaacctccagtgttcagctatctggaagtttgatgaacccagtccttttgggtttttatggaagcttcataatgtaggcatgactggttaaatcactgaccactgatgatcagtttaacctgtggctccctttcctttccctggagattgagggatggggcaggtaatcccaaccctctaatcctgcctagattgttcttgtgaccatcccttaccgtgatcaacctacaggctgccagcccaccaatcattagcatgcaaaaagacacttaatactttggagattccaaggatcttagaagtcgtaagccaggaaacataactttgtcctatactttgatcgcctccctctctctcacaaactcataacaacataacctagtctcactctttggactctcacagtttagtctctttctctctctcatacacacacaccagcctctcaaggagcctcacataatgactggtctttcacacacagccacgtgctcatctctctcacactcactggtctcacgctatgttgtctctcacacacgaacacaccctggtctcacactctggtctctctcagtctgtcagacacacataacacggcctcacacactgacgggtctttcacccaaaacacccatttctcacactcactggtctccctttcacacattaacataccacagtctcacactctgttcttgcacagtctagtctcgcatacatggtgattcttctctctctcgaacacacaccggcctctcattgagcctcacccaccgaccgaccggcctttcacacacaggcacacgcccatctctcacactcactggtctctcacactccatccagcccgtctcactctctcacacgaatacatcctggtctcacgctctggacacctggtctgttacacacttacacacccacacacctcgcaacctctcactgagcttcacacgctctctttcaaatgcaggcacatccctatctctctcacactcactggtctctcacactggcccgtctcgctctgtcacacacgaacataccctggtctcacactggactctcggtctgtcacacacacacacacacacacacagaaaccacaccctctcacggagcctcacactctgacagatcttttacacacaggcacacccccatctctcccacagctcactccagtggtcccgccgccccaagccgccccgaacgcccagcagccccgagccgcggcctccgccccgcagactcgagtacgcgcgccccgctggcctctgggaaatgtagtcgtcctggggacagaggacgcggctgggccttcgcgacccgcgtcggagccgcccgcctcgcctgcccttcctggcccagccctcgagctcggactcccaaaccacccaaaacaaacccccggcctcgtctggcacccagacgctctcatccgaaggactccgtgagtcgacgctggaaccccccatcgcgcaggcgccagcctctctccaggggtcggacgagaggggcggagacaaggcgtggcctagtgttgaggggattgtcctcgggctgctgaaggagtgagagggaccttagagcagagcgggcggtgcctgcgcagtgcgtgattacgcgagccgggcgtggcccagggttccggcgggtaagagcaggagtgtgcgcaggcgcaaagattgcgctctccccctctcctcgcctagagaccagaagcgtccctagttactagttcctggggcctgggagggaaacgcgcgacggctgagccttcggtgtgagtacgcgtggggctttgtgacgctgtctgtgcctctgtgatcgcgatgtcattcggagcgcggccttctgtgccagtccgtgggagtgtcattatctttctgtgttaagcttattttggaataagacagcgacgaggaaccccgaccgtgttgtgactctggcgaattaatacctctttcagctgcaaatgggaatgtcactgatcagaggcagtgaataacacgacgtttttggaaccaatctgctaggcttgaaccgcgttcagccccttaacaaaatggaaatggtccccgttttaggggactagccctgactaggagaactgtagaattagtattggaaggtgagacaaataaggaaaagcaattcagggggatacagcagagaaaaaaaaatccctgtcctcttattatgtaatttactttgaagcggagagagacaagccacaaattcatgagttagataaacagtctgatgaacagtaaaaagggctatggagaaatataactcagagaaggttgtatcgtatacattttttctattgtctcttataatgtcttaacatgtcaaaaaaacctgtctgcagcagacaccagccaggtgaccgctactccaattcaattctgacgctacctggaaaacatcagatcctacaggttagacagctcagtcccaaaagactgtcccccacttcccatgccaattccaaactccagattgttgtacctgtgtttcagagagatgtgctataaattggggctcccacagccggctccttgggttccattagtttgctagagcagctcacagaactcaaggaaacacttatgtttactggtttattataaaagatattttaaaggatacaaatagccagatgaagagacatgtagggcaaggtccgagagaatccctagtgcaggaacttctgtgcccgtggagttggggtgcaccaccctcccagcacgaggatgtgtttttgtctaccttcttggaagccgcttgaactcaggccttttcggttttcaaggtttcattatgtagatgtgattgattaaatcattggccactggcgatcaacttaattttcaggctctctcttttcccagaagtagagggtggagctgtgagttccagtcctctgagcacatggctggttcctctggcaactagccaccactccccccaaatattgggattatcttgagagtttccaaaaatcacctcattaacataaactcatgtgtggttgaaatactgtctttcacctttatggctctggagctgttctggagctttttcaggaaccaggaacaaaaggccagatattttaacaaaagatactttattgctgcagtcatttaggaaattaaaagagctgtaggaactgagagccatgaactgtacctttctttctaactccacattcagtgatgtcatattggtagattgaaatccaccacaaggggactatttacagtatggaaatacagtctacatcgctaaaggatggagatacattctgagaaatgggttcttaggcaatttcctaagaaccttgttgtgcaaacatcatagagtgtacttacacaaacctagattgtgtagcctactacacacccacactcactcagactgggacaacttagacataccagttaacttactgtgcacatctttgggatgtgggaggaa

SEQ ID NO: 1561415 - DNA, 4001 bp, Homo sapiens
gcactttgggaggccaaggcaggcggatcacctgaagtttggagtccaagaccagcctgatcaacatggtgaaacccccgtatctaccaaaaatacagaaattagccaggcatggtggtgcacgcctgtaattccagctgcttgggaggctgaggcaggagaatcgcttcaaccggggaggtggaggttccagtgagaccgaactccagcctgggtgacagagcgagactctgtcatcaaaaaaaaaacacaattctccccttcagatgaggcaagtgctccccaaggccccgcagcctcacctggaccagttctcttctttcctgtatgtcatctgcctggccctcacagacagctgagcttgagatccctgtctgcagttaccaaatcacattctgcccacatctcatatactctcagctctgggaggaaagaaacgagggcccagaggtggagcccaaggtcatccagcccagagtgacttaagccaaacaattatcaggctgagagaccttgggcccaagagtcttgcccttccttccagaccatttaccttctctaagccttagtttccacatgtaccaaatggaacaaatacaacagatctatggtcctttaaatgctccaaaaaccagaacttgatttataaactgaccgcaaaacttcacctggattgccacaggccatgtagggtcttaatgttctcataagtgtgaatattcacaccttgccccacagaaacattttatgaccaaaaactggcccagattcctcggggtgtgggggggtgctgcctaattataaaatatgcaccctattagctttctaaaatctgaaaaattctgattcccgagattgccttggtgccaaggggacctgcacttatgtctcagtgctgctgcggggatcagaagaggaaatgcaactccagcagggcgcctggcacacagaaagcactcaaatactgtaaatgttaagtacttcaacttcccgaagaactcccatccatcgtccagcaagattctgcctaaatttgccaacttcaggtaactcattcccctccttccccaaccaaaaccaaaataaaacagaaccactcctctcagggccatcagggaggcctggaaacccctttagcagttttcttttcttttcttttctttctcagctcactgcaacctctgcctcctgggttcaagcaatcctcccacctcggcctcccaattagctaggaatacaggggcgcaccaccacgcccggctaatttttctatttttttcttcttttgtggagacagggcttcaccatctggcccaggctagcctcgaaatcctgggctcaagcgatccgcccacctcagcctcccaaggtggttttcttcctttctttttttttttttttttttaagatgtagtctcgctctgtcacccaggctggagtgcaatggcgcgatctcggctcactgcaacctccagctcctgggttcaagcgattctcctgcctcagcctcctgagtagctgggattacaggcccccgccaccacgctcaactaatttttgtatttttagtagagactgggggttcgaggaactcctggctgtaagtgatcccccccgccaaggcttcccaaagtgctgggattacaggcgtgatctaccgtgcccagaccttgagcggttttcataacagactgtgaaagacggttcacaccttcaccctgacaaccgccgcccaaggcgacgcaccctttgccgaagtcgcccccacttgcattccgtcacctctcaggaaggaccgagcccgcaagtccctcagccccagcgtctccgtacctcgggattgtagtcggccgcgtcaacagacgcaaccccagcctcaagggagcgggagattcaactccccgcacacgcgcctcctcgcagcgacttcctgtgcgcgagaagcttctctgagcggctgcacccaggatcctccgcggcagcgccaggactctatttcccagagggctgtgcgggcgacttctttcgccttcccatctcctcctgcttcttcagccttagcactgtgggagtagagtagaaagagaatcaggaccaggcggcatcagtttgtagtccagatttttaccttgttaaagaatcatctaattagcttcttgcctttactagaagtcagggagtgttaaccttttccgaagagcaagcggtaggttgccatggaaacgcgttgtgacgggtttctgagaaaacaagcggaagtaaggggcggagttgaggcagaagtttaggtaatgtgacctctgattggtggagaggtacctcacggtgcattccgattggtctgacactgacacatgcgcagtagaaccagaaggcgttccaaagcggctagaacggaggggagggggatgagcaatgagggaataatccccattccgtctggaatcagagggcgggcctgccgcggaggcatctgggaaacggagttcccaggcaggcgaagcccaggggccgtcaggaagtcagcggcgcctgcgcgggcgcctcagattcaggatgcgcgcgcagcgctctccgcccagcggaagttttcgctgggcaactgagaaggtgagtccgggtaactgcggaggatccgagggtcaggctgcagaagcccagaatcccaccccagtccccaagtacagaggtgaggggaagcgaggcgaacgaggggacgtcccccgaccccctagccgcagctcggccggggcgtccgtgacgtcagcacgaccgtttgtgggaggcggaggcccctgctgtcggggttcggaatgagagcggctccgggtcgcggggttcactggcctcctcttgagcttcccaagccaccttgggctccgtgttgggcatggctaaggcggagatgggcggaacttgtgggaagttcgacagctcctccgctgtgaaacttggcgtctaagtcatcccgtggtttctatggaggtgcggccgaagggaggctctgtcgtcgcctaggcaatcgccccacctgcgctgaggtggggtctgacttttagcctttttgctgtgctgtttcctgaactttctaggaggaacactatacagtagttgacgcatagcagctgttccctaaacatttgttgaataagtcaaataaattaagataaagactggcctgagggttggagtcttagggtttcaagtcctgacctggccattgcataggtgacttcagcacatccaattttattgagcgtttactatatggaaggctccgtgcaaccgatattacactactataacctgggtttgaacggtgctagtctaataggcactgttcaagcccaggttattatagcagtgtctaaaacaaaaatcctgcccagctaattcacattctcagggtggttggggatgccagacactaaaaaagaaatgttaaagaatatttacaggtctgcagtcccttatctataactttaaaatccaaaacgttctgaaaactgaaaggtctttttctctgttttgcaacttacttggcaggccaacctcacctggctttgaacttgtttgctggcaatacccactctgaactgatgtgtgactatttagaatttttaaagattttgttgtgcaaatcatatacttatggagagttgcccctggatctcgccggtgttgtaatatgtaataggttctaaaatccaaaaaatttggctgggcacggtggctcccgcctgtagtcccagcactttaggagaccgaggtgggcggatcacctgggttcaggagttcgagaccagcctggccaacatggtgaaaccccatctctactaaaaataaaaaaattagccgggcatggtggcatgcgcctgtaatcccagctactcgggaggttgaggcagggagaatcgcttgaacccaggaagcggaggttgcaagtgagctgaggtcgtgccactgctctccaacctgggtgacatagcaaaactctgtcc

SEQ ID NO: 1561416 - DNA, 4001 bp, Homo sapiens
ggaaaaggaaagtgggtgacccacacctgaatgactcaagtcactgacctgtgcctgaatagggaatgtgagtggaagctaaagtctgatgccaagaattataaaatgcaccagccttacagacaggagttttgcatatccattttcatctgtatttttaaagtatatttcatattatcaaattataaatagataaatcaatgtcacaacttaatcataatatccaatcaactcaccgttcatctgcacccagggttccctcttttctgggtactgtgtttccctccctcattctgtacgtatctctcattctcaccttctttctctagcttttttccccctttatttttcccctaagattctgctcattttgagcccctctcttctcctgatgtttctccccttcttccttctattccttctcttccacctgttctgctccattctggcaacttgtttcacccctcttccaaactttctgctcaatctttgatcatcccattctccacctatttgtctcttttttttttttttccctgagacggagttttgctcttgtcgcccagcctggagtgcaatggcgcaatctcagctcactgcaacctccgcctcccgggttcaagcaattctcctgcctcagcctcctgagtagctgggattacacgcgcgcgctgacgcccggctaatttttgcatttttagtagagatggggtttcaccatgttgcccacgctggtctcaaactcctgacctcacgtgatccacccaccttggcctcccaaagtgctgggattacaggcgtgagccactgtgcccggtcttgcctcttcccctgactctactccccctctgctctctctgttaaatcccttcttttctgttacacccccttgtccccactctctggcaccctgagatcccaggcctccacctgctgtggttctccctctgctctcgttgtcaccagctgactcctcttgctgtcccagcaccacgctgctctgtctgccctggctccaaatccctccccctctcccccactctcaaactgaggaacttcccactttgctgcccctctcactatcttgctgtccttcatctctccggagatggaacttttctctgcatttctccagttgcttttttccccctgctactttctcggcttcattcgctgtctctgcaaatcctccatccactctctactttgccatctgcttacggctctccctcaatcttcttttctccttcaaaatttttctctttcttctccctcgctctccgtctctctttctgcacacattcacatggaaggaattgggatccgatgtccacaagcagaacaccttttcagtggggtgttatttggcccgcaagaacactggatgtcaagagacagagtaagtcacctccccacacgcagggttaggagaagcggtgtctgggaagaggaggcctggggagtagcggggccccgtatcaaggagggtaaaggtagggtctggatcaagagatgggtggcgtctgcagaatcccagcactgggcagaagacgcggcttctcctggattgagattggagcgctgtgctccagggccaacaaaggcgaggcttgggggaccgcatagaccggaatccgcctagcgggggaggactttacgctgtgcggggcggatgtaagcatcactgaaggacttgaaacaggaaaactccgcgacaggaggtgactacatggccctgtggcagaaggacgggggacaggacccgccgccgagcgatttaaacacacagggaagcgaccgcctgactctcacggagacgcctgaatttggtcggggtagagggagcggtgcgaggatttcaaggtctgtgtggcccctcagatcccgggtacagaagcgcgggggagttgggaagcgcagattaatttacacaaagggaaactcacgcgccgcggcgtgaccttcactccacgcgatccgcttccgggtttgtgggaaactgcgcgcgcagcggaggggtccgagcggggcgggggcgggggcgggggcgggggcgggggcgggggcgggggcgggggcgggggcgggggcgggggcgggggcgggggcgggggcggggcggagtggggcttgcgcttccctccgcctcgcttccagtgcctctgttttccgggttttgccggggagacctgtcaaggagactggagcaactcagctgtctcggaactgtactcttgccgggactgagcaaagtcggctaatgattagatccaggaaaattcctgctattaaagttaatcttaagccgaccgtgcggtcgggcacctgtagtcccggctaccccgaagactgaggcgggaggatcgcttgagcccaggagttcgagtttacactgagttatgacggccactgcactccagcttgggcgacagagactcagtctctcaaataaatacataaaaaactaaatttagcaatttaattaagccctgggattgtctgtgaaagcgacgcaagttaatacatgaactgcaaagccctgcctgggcagaatgtgcaatttcatgctgacggcccacaaagcagaatagaaatcctctccttttctattccctgttctttcgggagggacagaggtaaccctgtgctcagctccagagagttttctagtgacagcaccaggggcatggagggctaaggccagtgagaatttaggtcaccaattgttggttttaaaaaagcattaaccgggcgaggtggctcacacctgtaatcccagcactttgggaggtcaaggcaggtggatcatttgaggtcaggagttcgagaccagcctggccaacacggtaaaaccccatctctactaaaaatacaaaaattagctgggcatggtggcatacgcgtgtaatcccagctactcaggaagctgaggcaggagaatcgcttgaacctgggaggcggaggttgcagtgagctgagattgtgccactgcactccagaccaggcaacagaacaagactctgtctcaaaaaaaaaaaaaaaaagtcaaaaaatatgttaatttaacattctcaggattttaaaactacaaaatgctgatgaaagaaatcaaagacacccagatagagacatatacaatatcaatttattgataaactcaacatagaaaaaaatgtgaaattaccccaaattgatacacagggttaatatatttactatcaaggcacttcgtagatactgacaagattatccaaacaattatgtagaaaagcaaaaaacaaaacaaaccaacagaaatcccaaaaaacctggaatagctcaaacatctgaaaaaaaagatagagcagcatgctcccgggaggtgaaggttgcagtgagctgagatcactccattgcactccagcttaggcaacaagagtgaaactccatctcaaaaaaataaataataaaataaataaataaaataaagataaagggttggaatcacttcacgttacttcaagtcctctaatatagtgaaagcattttttcctttttcatatttacaataaaacgtttatacctgccattgtcttgtgcatactcttgtcaaaaaatattgtctccaaacaacagtctcatttttgtgtcccctaaaattttcactagagtgacattcggaaaaaatgtattaagcatagcatctggccgggcatggtggctcatgcctgtaatcccaacactttgggaggccgaagcgggtggatcacctgaagtcaggagttcaagaccatgcctggccaacatggtgaaaccccatctctattacaaatacaaaaattagccaggtgtggtgatggtgcatgtctgtaatcccagctattcgggaggccgaggcaggagaatcacttgagcctgggaggcggaggctgcaatgagccaagatcacaccgctgcactccagcctgggtgacagagcaagactctgtctcaaaaaaaaaaacaaacaagcatagcatctg

SEQ ID NO: 1561417 - DNA, 4001 bp, Homo sapiens
tgaacccaggaggtagaggatgcggtgagccgagatcataccattgcactccagactgggtaataagagctaaactccatgtcaaaataaaaaaaatgtagtaaccccaccacttcgggaggctgaggtaggcggatcacaaggtcaggagttcgacaccagcctggccaatatggtgaaaccccgtctctgctaaaaatacaaaaattagccgggcgtggtggcgagtgcctgtagtcccagctacttgggaggctgaggcaggagaactgcttgaaccccggaggcggaggttgcagtgagccgagatcgcgccactgcactccagcctgggccacaaagcaagactgtctcaaaaaaaaaaaattttttttaaccccctccttttgcagacttcatattagccttagcttggaattactaggttcaagctttaatttccatgtcagtgttattcacttggtttttgaaactaagtgtttgaaaaatccagtgaaattactcaaacagtgtttacataaaggaagaaaattttaagattcttacttttttttttttttgagacggagtttcgctgttgttgcccaggctggagtgcaatggcacgatctcggctcaccgcaacctcctcctcccgggttcaagcaactctcctgcctcagcctcccgagtagctgggattacaggcatgcgccaccaagcccagctaattttgtatttttaatagagacagggtttctccatgttagtcaggccggtctcgaactcccgaactcaggtgatccgcctgccttggcctcccaaagtgctgggattacaggcgtgagccactgcgcctggcccttcttttgtgtgtgtgaaggagtcttgctctgtcacgcacacttaagtacgatggcgcggtctcagctcactgcaacctccgcctcctgggttcaaccaattctcgtgcctcagcctcccaagtagctgggattacaggtgcctgccaccacacctggctaatttttgtatttttagtagagacggggttcacggtgttggccaggatggtctagaactcctgaccacaagatcctcccgcctaggtctctcaaaatgctgggattacaggcgtgagccaccgcgcccgaccaggaatgggtttttaaccccaacgtagtttttgtttttgtgtccttcccctattggctggggtcagaccgcacaatctaagctgatcccggttggcttagacccaaactttttccaaataggataaacgagcgatttgcgagaaaaggaaaagggagaaaaaggggtagggttgttttacaacttttacaacttctgatcaggaagttgagtctttgaagaggaatttagttgtcctagcaaccctttacctcaagtgatccgccagccttcgcctcccaaaatgctgggattacagacgtcaaccaccgcgcccggccccataaatttttaacaaaagaaaagagaaactgtgaaccccacggaccaaagctcttccgaatcgtgaacccgcaccccgagtcaagattctcccctgatgaccttctcgtggttcccgcaccatctgggagagacccgaagctgcgggtggagagctgctgcacagagagggcgccaggccagggcacggtcactgcgcagggaagagacaggacgccccgggaccggctgtcagcgcagccaccatcttatggctgaaggggactgaggccgagctgggtaaggagaagtccggacgcagattgtggagctgactacggggaggcctgagtccctccacagccacttcccatcaaccagtccctcccctctctcaggatgtccaatgggcactctcaccatttctaggcttctaaggggtcccggcatcttggctgtggatctcccaatacctacaggacacagggccacagagggtgggcctctaggagcagaggacacagagtagcgaagaggcgacctagagctccagatgcagcgagagacaaaggccgcgccaaacccggaagccgtcctctttgctccagctgcctgcctgattggacggtttccagcccagcgtctctgattggataatgcttaaggccccgcccactcagtccctgagtgacagaggatgtgatcagatgctgggctgagtgatgaaagagtaacagcctaagctgcagccttttcaggcagggcttcctccctgagctgagccaggcccaccctagagcaagggaaaattctatctcttttttactctctctctttttgcatgtattcaaaaggtgaacagaagtattttgctgtcatattaataatacataaaatttttgttagaaaatcaacttttactttggtaatagtgtattatcaatactaaagctaattttaataaaaccttatatataaatcagatttgtcacttttgacctctcgagatttacacatatatttcataatcacttgtaatttttttaactttttatattttatctacattctttttttcaatttgaaacaacctttaagtaatttcaaattgttacaggaaatagaaatcatttagaaccaggcgcagtggctcacgcctctaattccagcactttgggaggccaaggtgggcggataacttgagtcaggagttcaagaccagcctggccaacatggtgaaaccccatttctactaaaaatacaaaaaattatctgggtgtgctggtgtgcacttgtagtcccagctactccggaggctgaggcaagagaatcgcttgaacccaggaggcggaggttgtgtaacagcccaagggttttaccttgccttttgtctagacagagctgattcataaagacaggccttttgcctagacagagcccattcatcaagacaggggaatttgtggaggaaaagttaaatattaattttgaaataaattgaacacagacacaaacaatggtcaccaagtctcagaaccggttgtgtgacccccttgaggcattcattgaggcattcatgtagtgtcatttcagagaaatctctgtttcaatctattcctatatgttagttattgaaaaacaagataacgtttttgtgttccttgagcccagtcgcaaagggccctagtgactgggcctcatgccaaacatttcagctccatcaggtcatttatgttcctctccaaactgtttattctagttagcagttcctctaaccttttatcaaggttcttagcttcttcaaattgggttcgaacatgtttctttagctcagcagagtttgttattaaccatcttctgaggcctacttctgtgaattcatgcatctcatcctcttatgttcctctccaaactggttattctagttagcagttcctctaaccttttatcaaggttcttagcttcttcaaattgggttcaaacatgtttctttagctcagcagagtttgttattaaccgtcttctgaagcctacttctgtgaattcatgcatctcatcctcttatgttcctctccaaactggttattctagttaacagttcctctaaccttttatcgaggttcttagcttcttcaaattgggtttgaacatgtttctttagctcagcagagtttgttattaaccatcttctgaagcctacttctatcaattcatgcatctcatcttctgtccagttctgcaccttgctgaagagacattttgatcatttggaagagaagaggcactctggcctttcagctgttttttgttgattctttctcatcttcatgagtttgtctagtttcgatctttgaggcttctgacacttggattttttttttttaacagtctctctctctgtcactcaggctggagtgcagtggcacaatcgcagctcactgcaaattctgcctcccaggttcaagtgattctcatgtctcagactacctagtagctgggactacaggcatgcaccaccacgcctggctatttttttttgtattttttagtagagacaaggtttcacc

SEQ ID NO: 1561418 - DNA, 4001 bp, Homo sapiens
acattgcccacactggtctcaaactcctgaactcaagcaatcctcctacctcagtctcccaaagtgccaggattacaggcatgagccactgcacccagcccaaatgtgatattccaaaggatgcaggtggctgtgttgggatggccaatgaaggtaagggacaatggaagtacagggtgagggcaatgaacaggacatacctgagagcctggttattggccttgactatgggagtgccttcacaaagacccgaaagacccccccacaaagaggtcatagaaggacagacccaaatggtcattataaacaaggaaggtagccacgctgacaggtagcgatctcacttacagtttgagtcttgatgctttgtccatggtgttcactgttctgcatctaattagaaacaagaggatgcattttgtgagtttcagcaatttagaactaaacatgacctttgacagccttggaagcattgttccccctgcatctacctgtacacacagagctaccagaagggtggatcatgggagttttcaagattacactgtctcctctataatgggaaaaatgaaatatgtttctactttaaaaaaaaaatttagagacagtctctctctctcccaggctggaatgcagtggcacaatcttggctcactgtaacctcaaactcttagccttgagatccttctgcctcagcctccgaaggagctaggactacaggtgaacaccatacccagctaatttttaaaaattttttgagaaatggggtctcgctatgttgcccaggctggttttgggctcttggtctttccaagttctgtagggacactttagaaaacttatttgagataaatttccttccactttacagcaacacggatggaactggaggccattatcctaagtgcgatgatgcaaaaacagaaagtcaaaaactgcatcttcttacatataagtgggagctaaacaatgggtaaacatggacatacagaatggaataatagacactggagatgccaataggttggacagagaggggggatgagggatgaaatattacctattgggtacaatatacactctttgggtgatgggtgcactaaaagccagacttcgccactatgaaatatatccacgtaacacaagtgcatttgtaaccataaatctacaaaaataaaaataaaaatgaaaagcaataaaaacatgcttaaactaaaaacaaacaaacaaaaaaacaacgaaaacaaaccatttccttccagagtaaaacgcagtttactgagcacgtctcatagatcgtgattggtctgaagagtccctgtgcccaggttagggttgcaatttaccacccgagccaagtgctcgggtgtcctacggattgttttttctttctttcctttttttttttttcttgggatgggttctggccatgttgcccagactgaactcaaactcctggagtcaagcgatccacccgcctcagcccacccaccccccgacctcccccaccgcccccaccacgcagtagctgggactacgggtgtgcgccaccaagccctgccttggggttccttttctaaagtgccaaatgtgtggaggtggggaaaagaaaggtggacgcctcaacgctgttatggtcaaagattaaaatgcaaccacactttttattacacatgatggggtaaccgtctgtttataaacaagggtcactattccacgagaggccttacaacattatgccaagcccctggtacctggaggacatcagaccctcctgttcctgtgcggccttgactagacgaccacttgctctggacttgctcctcgaggggtcgctccatctggaaactgagactggaattcctgcgcatccctgtccccgcatccagaaacactgcaggaagacttccgtgtccgacccgagatccggaacaatttctgcttcaacacaattgtccacggagggcaccagttccgtcccaccggcggaagcgagatctgcctagctactagacctgctgcctagctgtcattcggacaaaaaggggcggggctgtataattgtccaatcaggggcggcgccggaaaggagggtacggctacgctgcgcaaatgcgtgctacgtcactgtgcgatcgggttgtgcttagcttggggtctcctggccccttgacgcgtcaggttgctgtacccctgcatcggatgcgctgtaccctgcgctggctccgtgaaccttagggacaacaccgggacacccgcgaggccggaaaatggtgagtgtgcagggccggactagttggaaccggccgtgatcgcgggacccgggcctccccacggtcacctccggccgcagtgtggggctgggctggcagctggaactccaagcgtcctgtcccgtccctgcgcggcgactgcggtcccagccccggagccctctctggacaactccgcgcccgcagccccgcgtctttcccagatcgtgcagggaccacgggagggtcctggggagaatcccgccttgtgtgtttggtttgtgtgggaggagctacagtctggggttcccagtcccttctttcttcccaaaggctgtttccccctgagtcttccaaagatgttggaagcagagtctcaaatccactaccctgtccccccagcctagctcctcccacggcgggccattaatccctagatttccggatccctccccgaattcccaaacgcctacttccgctcgccagtggaaaacatcgtcaccaactctttgtcctgtgtggtgcatttcaaacacacgcagtattttaataatcttttttccaatagatgcctcttttaaacgatttatttcttgtttgtggatattttacatcagagaaaaatcagaaaaattattcacttggaactaatctgcataaaatgctgtggccctcatcctggtacctttccagggcacagacatcctatgggaactcctttgcgttgaggttcctttttgtaaactttcctgggtaatctatcttttcagcacagtttcagattggcactgtcccgccttgggtttatgaccttgaaaagatttattcactcgaatgtcatttttccaataaatataaaatatatgttatcagaagaacttgagagacagtacaaaatatttccaaagggcaaaaaagaaatgaatctcagaaaacaaaaaacatcccaatattacatttgttaaaaattctttgttctttccctgagcacatggaatatgtttctcaggtctgttcttttagtttgatgtttcagatggtattccaggacttaaacttgcaacatctagaagcattcagatagaagtaatacttttgtaaactatttattgccatggaaataattaactgacattattattttcttttttttttttttaacagatggggtctggctgtgttgctcaggctgatcttgaactcctgggctcaagcgatcctccaccctcagcatcccaaagtgctaggattccaggcatgagctactattaccggcccaacattctcattttctgaaagcaatagtgggttttcttgttaaatggcttaaaattttcttgcttccttcctttatttatttatttatttatttatttattatttatttacttttttttttgagacggagtctagctttctcgccaggctggagtgcagtgacacgatctcagctcactgcaacctctgcctctcgggttcaagcgattctcctgcctcaacctcccaagtagctgggattacaggcacaagctaccacgcccagctaatttttgtattttttttttttttttttagtagagagtgtttcactatgtttcccaggatggtctcaatctcctgatctcctgacctcatgatcctcccgccttggcctcccaaaatgctgggattacaggcatgagccaccacgccaggccttttgcttcctttatacgtaaacactgtgtttaagtaattctgctggatttt

SEQ ID NO: 1561419 - DNA, 4001 bp, Homo sapiens
tgcactccagcctgggcaacagacacagtgagactgtctcaaaaaaaaaaaaaaaaaaaaagttttccttattttcagaggtgttgataacatttttaaatagtgctattcatttgtctgtggaaaaatgataaaatatggcagctgtttcaaatgtagcatgggaaacacataattgataaggatgtcaattggcgaggggaagttggtgtttttgaatgtgaggagaaaaccagaaatttagggatttactgtcatacctgggaagaactaggctgggagaggggtcccaaaaactccctctttgatcaaactagtcaggctcctcagagcccccctcttcttgagtagactttggccttttcctgcagagccctgtggtagcaaaaacccttctaagggagtttagagaaaattcccccaaacctgatatccaatcaagtcccttttccctacgtttgacaatctcttccctaattcttgacactaaaccaacttccatcctctccctcaccttgcctattagctgtaaattcaatactgtcgttgatgcagccttcacctcctgggctcaagcaattctcctgcctcagcctccagactaactacagaagcggccatcatacctgactaattttttttttttttaacagagtctcgctctgtcgccaggctggagtgcagtggcaccatctcggctcacgcaacctccgcctcctgcgttcaagcgattgtcttgcctcagcctcccgagtagccggattacaggcacgtgccaccacgcccagctaatttttgtatttttggtagagtcggggtttcaccatgttggccaggatggtctcgaattcctgacctcgtcatccgcccgcctcggcctcccaaagtgctgggattgtagacgtgagccaccgcgcccggccatacccgactaattttttaaaatattttgtacagacggggtctcgccatgttgtccacgctggcatcaccttgccttacgctggaatgttaaatatactcttttaaattggaaaggaaatgaaacccaaatgtaaagaaaaaaaaaaaaaagctctatgggggcggggggaggggggcgggccaaactctgattaaattgttgtgcctcacaaactagccttgtataaaaaacgttgtaatcctgttaaatttcttgcctatataagcaagaacttaaacttttaaatttgaaacactgagcccatttccgtggatcctgtgttttcccaaatgggccattcccagcttcttgcttgagtaaactttaaaaaactggaatctgattcttttatttcaggttgacaagtccacatacggcgacagcatcactgtaactaatcaagtatttaatcctgtttgcctcctcatgcaacttataaaagccttttcttcaatcacaagccatgaccgggtgtttctcactcggaatcgctgttgctccaacaaactctttaactgttaacagagcctcagtttaatttttagcagaagaaaggcgggacacatccgaccccccatgaccctcccgtggcccccgcacaatctgggaagacgccgggctgcgggcgcggagctgcccagagaggactccggggccggggccgcagtcgccgcgtagggacgggacaggacgcccggggtcccagctgcgggcccagccccacctggcggccgagcggaccgagggccaagccacgccatgggggacgcgggtcccaatcgccggggtcgcccgagcggaggcctgggtcccgccacagcaggatcctgttggttccacccagcccctcttccacgtatctggacgctaggccgggcactttaccatttccctgcttcttggtgtcccggcgtcctctttatgactccggagcaggtcacagcgcaggtgacagcgtcacaggagccgtggcggaggcacctggggcctctcggagcagcaaggactggatgcagaacgcaacggaccccagcaacaaaggagtgcagagactctgagtgcggccttctgcttccccggattgacagttggcagggccccgtcccagggcccctgattggatggggttccaggctccgcccctcagccctgagtgacagggtaagccctgggtaacggagccctgcagagcccggctgattaatcctagctacagcctttctaaggctaagctcactccctgcgccctggtcgttggctatctgcatttcagccaaacttgctacttattgttagaaggggcactgttagcttcctcgatctttcagaaatgtgtgctgggaattccagactcggtgttcaatggagtcattcctttgcctcatagcaggaaggaaatccaggccaggccaggccaggcaagactgcaccaggagggagaggcaggtgtcctctacagggcgggaattggggatgagacttcctcacactccccccgtcccacccctgaatatggaaccgcttcctccccctagacttcattttcaccagcagaagttctcacctggggtcagtttaagcttctaacctaagtaaactattaccttcacaaaccctttctccaggtgacatgtcagacaaatcttactgagcctgatcttcacagattatctttgtatgtacaaattacagtctgtcgccgggaccctttgcacgtaaaaaccaaacactgcccccgcaaaacgtccctaggctctaggtacagccccagtaaggacagaacctccccccaacccccctacacaaagtgcacctgcacgtgagtctcctgctttccagggctctgtagcttctcaggatccacattccttccgcagctgttctgagcagctggaggccacctgcagtagagggcaggctgcccgggaaacacccaggggagctccctttccctccctttgccggctccagactggcctcagcagggtgtcactggccttaggctctgctgccccctacaggttattcacttcattgatcggttacctgagacaaacaccctcagttccactgtacgtatgtataaagtggggaaggaaaattctaagataattgaagtgaattaaaagacttgcaggcagggtgcgggggctcacgcctataatcccaacccttttggaggctgaagcgggaggactgcttgaacccaggagttcatcatcctggaaaacggagccacacctcgtctgtactaaaaatttaaaaattagcagtgcgtggtgtcctgaacctgtagtcccagctactcgggaggctgaggtgggaagatcttgagcccaggagtttgaagcttcagtgacctatgatctcgccactgtgcttcagcaagagttgtgatagttgtatcagataaaatagactttaaataaaaaacagtacaaaaagacaaagaagatcatgagatactgataacagaatcaattcagcaagataatatagtaatactaaatatatatgcatccaacattggagaggccaaattaataaagcaaatatttctagacctaaagaaagatatagatagcaatacaataatagtatgggacttcagcacctcacacacagtagtagatatatcatcaagacagacaatcaacaaaaaaattggacttaagttggactttggaccaaatggagctaacagacgtttacagaacccaacaactgcagaatatacattcttctcatcagtacgtgaaacattctccaaggtagaccatatgttaggccacaaaactagtctcgacaaattttaaagtcaaaatcatttcaagcatcttctcagactgctgaataaaactaaaaatcaataccaagaggaactttgaaaactgtataaatacatggaaattaaacaatgtgctcctgaatgatctctgagtcaaagaagaaataaaaacagaaaataaaaattttgtttgaaatgaacaaaaatggcaacacaacatatcaaaacctctgggatataggaaaagtc

SEQ ID NO: 1561420 - DNA, 4001 bp, Homo sapiens
gagttcaagaccagcctgaccaacatggagaaaccccatctctactaaaaatacaaaattagctggaagtggtggcgcatgcctgtaatcccagctacttgggagggtgaggcaggagaatcactagaacctgggaggcggaggttgccgtgagccgagatcgcgccattgcactccagcctgggcaacaagagcgaaactccatctcaaaaaaaaaaaaatatttaagtaagagctgaataataagaacacgtaaacacaaagagggaacaacagacagtgaggcctagttgaggttggagaatgggaggacaaagaggatcagaaaaagtacctgtttggtgctatgcttagtacctcagtgacaaaataatctgcacaccaaacccccatgacacaattttagctgtataacaaacctgcatgtgtacccctgaaccaaaaataaaagttaaaagagattcatcttttccccagggtatccacttgagaggctacactccatatctcaggttgtcctacgaaagaaaatgactttaggagctgatattcactagatactctagcagacatcgccatagcggttatcttggtttattcagagacagtactgaaagccaggaccaagaataaacgacagggttgctaagcacaaatcaccccataacgtttgcaaaataaaaacatcttgacactaaaacattctcataagatctttatgcctagggaagacaaaagaaaaagaggcacagagattttttacaattcactatcgggatattccttgctttcttctcatgggaaatatttacaaacagaaaacatatctttttaaatatgccatctaatgctttgtcaaaaaatgattaattaaaatacagtatgaaaaatgtacactaaaggacaaataataatgtaaattagggaaaagaagttggcatttgagattttcagaaggaactgaaaattcagtattttactgcaagccagagttaagctggagaaatggggtgtggggggttgacttgagaacctgcttgggacctatgtgaaaaatgccagggaaaatcagccccatgtggcggcaaatagactgaggtggctctaatctttggattcctaattttaaaaaatcaaactcaaatgcatttttttttttttagaaattactacattgggggaaacaaaattcaggcttaactaacgataaactgccaagtaagctctgattacacaaccaggaaatttgtaggctcaaggtgaaaattaagaaactacgtaaatatacctaaccgattattgaatttgggtattttcatctgcatctttccttcaagatcctcccatggaccgaccacaaactacaacccacagctgggtgctctataacttttgaaccactccttgcttaaatttttaagtattttcgcgataactcccataaatttttaatagaagaaaagaggaactaggaaccccataaaccaaaccaaagctcttcccattcgtgaacccgcaccccgagtcaggattctcccctgaccaccctcccgtggtccctgcacaatctgggagagacacgacgctgcgggtgcagagctgcccagagagggctccaggccagggcaccgtcactgcgcagggaagagacaggacgcccgggggtccggctgccagcgcagccgccaatctgatggctgaaggggactgaggctgggctgggcaaggcgaacttggggcgcagattgtggagccgactgcggggaggcctgagtcccgccacagcctcttgccaccggttccaaccagccccttcccctctctcgggatgtcggacccggcactctcaccgtttctaggcttccagggggtcctagcgtcttagctgtggatctcccaatacctgcaggtcacagggccacagaggatgggcctctaggaccagaggacgcagaacagcgaacactagaccatactccgactgcagcgagagacaaagaccccgccacatcccggaagccgccctttccgctccagctgcgtgcctgattggacagttcccaggccagcgtcgctgaatggataacgtttaagaccccccccccccccgccctcaggccctgagtgacagaagatgtaaccaaacgctgggccgaatgaggacagagtgacagccgaaggtgcagccttttcaggcagggcttcctgcctgagctgagccaagcacaccgcagaaggtgtttgcctttaacgttgtgtgtaaggtctcatatatttgtaaataatatactatatggctgctcacacatgaaaagaatagaataattatttttaaatttaggcttttttgtgtgtgagacagagtctcactctgtcgcccaggctggagcgcagtggcgcgatctcagctcgctgcgacctccgcccccgggttcaagcgattctcctgccccagcctcccgagtagctgggattacaggcgcctgccaccgcgcccggctaatttttttgtatttttagtagaagcggggtttcgccatcttgcccaggctggtcttgaactcctgacctcaggtgatccatcctccttagcttcctaaagtgctgggattacaggcgtgagccaccgaccccagccggaagacatttcattctgctgcaatttagcaaaatatttgagtacatcttgaagttgtcttttgatttttttttttttttaagacatggtctcactttgtttcccacgctgaaatgcagtggtgtgatctcggctcactgcaacctcagcctcctggcttcaagagattctggtgtctcagcctctccagtagctgagaatacaggcgtgcaccaccatgcccagctgatttttcaatttttagtagagatggggttttgccatgtttgccaggctggtctcaaactcctaacctcaggtgatccactcgcctcggcctcccaaagtgctgagattataggtgtgagccaccctgcctggcctgcattttgatttttacaatggcagagctgctgttgaagatttcaaagtcagaagcagccatggggcaaagctccagaagcacacctggaaatcacacacagtgaatacatccctcaccctgaaccaattgttttcacccgagtctgcatgtaaaaatcacttcggaggtcttttaaaatcccccaaacacaagttgccacataccaattaaatcagaattcctgcaatggaacctgggcaatagtgtaaatatctctaggtgatgacagagcgcagccaaggtcaaatgccagtgctgtaaaccagtacttttaggtgactagttgcaaattttttctcaaatgaatgaaaaaatgtttgccgctaagtcatggctttgtcttaccaatattaccaaattattgttctatgcacaaccaacgtcgctattggttttgttcctgaaccaacccagttgtatatatactgagtgcacacaaggccctgacattggccaatgtaggtgccctgacattggtgatcgttactgtgagggaaaaattttctagaataaaggttgcattcccctaaaattaaaaacatgccatgtaccgaattggggctaaaataaaaagacgtatggtctcattcaggagttaaggcttggctgggcacggtgcctaacgcctgtaatcccagcactttgggaggccaaggcaggcggatcatgagatcaggagattgagaccatcctgcctaacacgatgaacccccgtctctactaaaaatacaaaaaaagttagccgggcatggtggcacgtgcctgtagtcccagctgctcgggaagctgaggcaggagaatcgcttgaacccgggaggtggaggttgcagtgagccaagatcgtgccactgcactccagcctgggcgacagagcagagcgagattctgtctcaaacaaacaaacaaaaagggcttgaatactctttttggaatattagaagctgtataattatgccctga

SEQ ID NO: 1561421 - DNA, 4001 bp, Homo sapiens
tcaagtcaggccattcaataacttgagagattcttccacccactcctgctcacttgtgtgctcaagaaccacccattcaggagacactgcagtatttcttggtgactgtcccagttgcgttttactttgcaagctcttacaccatctcactggagtcagttttgtttttgttcttgttgtttgtcttttgggatactattttttgggccacaaatttttcacttttttttttttactctttttcttttactatattaatttcactatttttctgcccccttagagaatccagggggcagaaattatttctgtgttttcccctcattaccagcatctgattggctgaccagcaatttgtctccaagaaatggaagcctggttgagggaaggcaattttaacatttcaaagggttacccgtttcaaaataagagtacaccggaagattcccctcagccccagaatatccacttgctcccttgagaggatacactccatacctcaggtcatcttatgggagaaaataaaccagaagctgagatccaatggacactctagctaacataaccatggcagttatcttggtttatccccagatagtactgaaacccatgaccaggaaaaaaccaaagggtggctgaggacacatcaccccatagattttccaaaggagaacttcgacccaaaaacattctggtaacatctctgtgcctagacaagatgaaagcaaaagagacagagatttactacaatgcagtgtcagggtattattatttgccttcttttcatgggaaatatttacaaacagataacaaatctctttaaatgcaccatttaaccatttaatgctttgccaaaaaaataattaaaatatggtataaaaaagtacagtaaaagacaaataggcgataatgtgaattagggaggaaaaggtggcatttaggaacgtcagaggaaactggaaattatcttactgcaagccagagtgaggccggagaaatgggggattggttccaagactctgcttgggacacaggtgaaaaatacagcagaaaatcagttccctgtggagtgtgaaaataattaagtggcaggcaattagactgaggtatttctagtccctgaattcttactttaaaaaaaaaatctaactcaggtgcattatttttaattactacattcagagaaacaaaattcaggcttcagcaactgtaaactgccaattaagctctgattacataaccaggaaattttcacctttaacgcacatattaagaaaccatgtaactgtacctaaccaattagtaaatttggtttcttcatcatgcattttataaaagactttccttcaagcctctcccacagaccacaaactacaaaccatagctgggtgctctacaattctagaaccactctttgattacattctttaatatttttgcagtgacgcccataaatttttaataggagaaaatagcaactgggaaccccacggaccaaagctcttcccattcatgaacccgcaccccaagtcaggattctcccctgatgaccctcccgtggtccccgcacaatctgagaaagacgcggcgctgcgggtgcagaactgccagagaggactccaggcagggcacagtcacagtgcagggaagagacaggacgcccggggccccggctgttggcgcagccgccaacttacggctgaaggagactgaggccgagctgggcaaggagaactcagggagcagattgtggagctgactgcggggaggcctgagtcccgccacagccacttcccaccggttccgagcaactccttcccctctctcgtgatgtcggacccagcactctcaccatgtctaggctttcagggggtcctggcatcttagctatggatttcccagtatcttcaggtcacgaagccacacacgctgaggacacagagcagtgaagggtagacctggagctccggcagcagagagaaacaatggcccagccacatcccggaagccgtcctcgccgctccaaatgtgtgcctaattggacggttcccagttctgcgtgtctgattggatacggtttaagggcccgccccttcaggccctgagtgacagaagatatgaccaaatgctgggcggagtgaagaaagagtgatagcctaggctgcagccttttcaggcagggcttcctccctgagctgagccaggcacaccttagagggtattttcccttaaccttgtgtataaggtcataagcacttataaataatatatggctattcacaaatttaaaaaaataattattttaaaatttcagcttttatgaccttcctggctcctagtcctttgaactagcagcctgagatttttaaaaggagccaatcttatgaaataagatgtgagccacatgtgaattttaaattttctagtagccagactttaaaaataaagaagggccgggcgcagtggctcacgcctgtaatcccagcactttgggaggccgaggcgggtggatcgcctgaggtcaggagtttgagaccagcctggccaacatgatgaaaccccgtccctactaaaaataagaaaaaataaccaggcgtggtggtgggcgcctgttatcccagctactcgggaggctgaggcaaaataatcgcttgaacccgggaggtggagggaggcagaggttgcagtgagccgagatcgccccactgcacactccagcctggtcaacaagagtgaaactccatctcaagaaaaaaaaagaagagagaaagagagagagagaaagaaagagtgaaagagagagagagagaaggaaagagggaaggaaggaaaaggaaggaaggaaaaagaagaaagaaaagtgaagagaagagaagaaagaaaataaaagtgaaagaaaagaaagccgggtgtagtgtcccatgcctgttatctcagcacttggggaggccgaggcaggcggatcacccgaggtcaggagtgcaagaccagcctagccaacatggtgaaaccccgtctctacaaaaatacaaaaattatctgggtatgatggcaggtgcctgtaatcccagctaatagagaggctgaggcaggagaatcacttaaacccaggaggcagaggttgaggtgagccaagatcacgccattgcactccagtctgggaaacagagcaagactccatctcaaaaataaaaaaattttaaaaagaaggagaagaaacaggtgaaattcattgtaacaatttaattaacccaatatatccaaaatattatcattgtaatatgtgagcaatatgtaaagattaatgaagtatatatatatttggaactgtatctttgaaactaactctgtattttacctttctagcaaattgcagcgacattccaggcacccagtagccggccatacatggccaatagctgttgtattgaatgtgtcagctctgacgtcaggaaggtgaagggtctgaacgtccatattctgccagtggtgaggggacagcctctctctaccaaagtctctgtgctgttccgagggtggaacagatagtggccatagaaaggtcagaagatatcaagaataaaatcaccacaggtagaccactgctggccacctgttgcccacctttcttctaaagatcatacagtgaacaaagaatgatagggccaccaggcgcggtggctcacgcctataatcccagcactctgggagaccgaggtgggcggatcacttgaggtcaagagttcgagaccagcatggacaacatggtgaaacccggtctctactaaaaatatatacactggctgggcgtggtggcgtatgcctgtaatcccagctactcaggaggccgaggcaggagaatcacttaaacctgggaggcagaatttgcagtgagcccagatcttgccactgtattccagcctgggcaacagagcgggactccgtctcaaaaaaaaaaaaaaaaaaaaagcctgggcacggtagctgtcgcctgtaatccc

SEQ ID NO: 1561422 - DNA, 4001 bp, Homo sapiens
ctggctcactgcaagctctgcctcccgggttcataccattctcctgcctcagcctcccaagtagctgggactacaggcgcctgccaccatgcccggctaatttttttatatttttggtagagccggggtttcaccgtgttagccaggatggtctcgatctcctgacctcgtgatccgcccgcctcagcctcccaaagtgctgggattacaggcgtgagccacggcacccggccggtgggccggtcctgaactcttgacctcagatggtccacccgcctcggcctcccaaagtgctagtattacaggcgcgagacacctcgcccagcctatgcaacattcgtaaaatgacaaaatggtagaaatgagaacagattactagttgacaaaaagaggttaacggggagcagaggtaggagggaagggtatgcggctctgtaagggcaacacggggatccttcgtgatggaaatattctgcatctcagttgtgatattgtactctagtttttctttctcttctctttttttgagacagagtctcgctctgttgcccaggttggagtgcagtggcgtgatgtgggctcaccgcgacctccgcctcctgggtacaagcgattctcctgcctgagactcccgagtagctgggattacaggcaccagcctccacacccgcctaatttttgtgttttcagtacagatggggtttcaccatgttgctcaggctggtctttaactcctgagctcaagggatccacccgccttggcctcccaaagtgctgggattacagacatgagccaccgcacctggcctctagtttttcaagatgccacctttaggggaattgggtaaagcgtacatagggtatgcattacttgttactgcatgtgaatttataattacctcaaatcaaaagttaaattttaaaaaaacgacatctgatttcaataaaaatccatatttgtgtattgaagtatcagaaatccgggtcccccaagggcccatgtttcttaaggcggagccaggcaccgctgcccctccatcctgtggtgtgcgaccccgacccgccagcccccagccgcatctatcagggctgccgtcctgagtccgtcctcgtcgtgggatagcatgtgagccccgtaaggtccttcctgtcggcctcactgctccagcctccccgacgtcctcacgtccacgctgcgtgccctttctgagcctcaacgcctcctcctcacctcgacatgatcagagccacctcccgcgtcagtcccagcgcccacgcccccaacaacgggcacttgtccgaccagtcacgggtacttgtgtctcccccacaacccccaaggcctaggctggacaaacaaatacggagtggataaaggggaggaagctgcggccaggtggcgcgaggcctgtgcgggcagctccggaggctgggaggcgagcccagcctggtgagctccgaaactacccggggctggggactgatgaacgaataaatgaatgtgggaagaaatgatggcgcggcagggcatgagtgaatgagtgaaagaataaacgagcaggaggaacgatgccacagaactgatcgccataaggctcgcgttcaccgagagaacagcaaacgggagccatttccgtcccgaccacggtcgcctctggcccgtgcagggccacttccgggccgctctggacggcgcggaggcctatctctcggtggtcccagagggcccagctcagggccgaggcccgtcctgccccgcgcggcgggagtggttggagccggagggcggatctgtgcctggccgagggtgtccgtcggcgtcactcaccgtcctcggcccgcctctgcgtccactaggagcggcctgaaagaggcccgcacgcgggctcgagccgcgtggaatggtaggagggcgggcaccgggtctcctgggggcgcggttgcattcggcagagcggcccaaggcgtcgcgtttctccccactgcgcctgcgtaactatgccgcggctgcgggcgcgcgccttctggttcccatggggacggcgccacagccaagctactcgggcgtcctgcgttgccatggatgcgctccgccccttcctgcacccggccagcctctgcggcacacacccaacagctacacaggcgcctggggctgcccgggtcgcggacgcaagtcgggccaacgtagcttctccctggcggtcctcctccggccccaggccgtctttaccaccctggaaccttgctgagttgacgccactgagctgcgtctcacacccacgcgctgtggaacacccaccaagctggaatccacgcggtttttaaaatagagtcgggggccgggcgcggtgactcacgcctgtaatcccagcactttgggaggtcgaggcgggcggatcacgaggtcaggagatcgagaccatcctggctaacacggagaaaccccgtctctactaaaaatacaaaaaattagccgggcgtggtggcgggcgcctgtagtcccagctactcgggaggctgaggcaggagaatcgcttgaacctgggaggcggagcttgcagtgagccgagatcgcgacactgcactccagcctggggcgacagaacgagactccgtctcaaaaaaaaaaaaaaaaaattgagtcgggatctcagaagctaagcagggtcgggcctggttagtacttgggagaccgtctgggaacaccgagtgctgttggctaaaataaataaataaaccgggcgcggtggctcacgcctgtaatcccagaactttgggaggccgaggcgggcagatcacgaggtcaggagttcgagaccagcctgaccaacatggtgaaaccccgtctctactgaaaatacaaaaattaggcttgttggcgtgtgcctataatcccagctactcgggaggctgaggcaggagaatcgcttgaaccggggaggcagaagttacagtgagctgaggtcgtgccactgcacactccagcctgggtgacagagcaagactccgtctcaaaaaacaacatagaccagatgctgtaagctaaaataaatgaatagctagagacggggtctcgctatatggcccaggctggtcttgaacttctgggctcaagtgatcctcccaccttggcctcccaaagtgctaggattacagacccgagccactgcacccggcctccacgagctctttttgtaccaatttttcccaatttgtactagggagctctcacctcagcccaggtggtttgggcaggtgtgggtacatggcccaggtccacagcacagggcagtccatccctctggccctggcagtggtcactttggacctgtgagcatcgtgggacttctctctgaactgttagggcctctatctgctttgaacctgaggctgtgagcatctgtcagctggggcagctgcagccttcttgccccgctgaaggatgaatctgttaagagaatggagtccatacagaaaagcagaactgagggatggtgtgttagtttcctgtggttatgcagcaaattaccacaaatttggtggcttaaaacagcagaaatatattcccgcccagttctggggaccagaagtctaacatcgatatgactgagctgaaacaagatgttgacagggctgagctccctctggaagctctaacgtagaacctttccttgcctttttcagcacctagagctgcattccatgtattccttggcttttcgtcctttcctccatcatcaagtaactggtaacatcttactatttctctcattaagttaaaatatttaacatatgttcattttatcttatttgcatgagagtcaattttagctttaaaaaaatttttattggccgggtggggtggctcaggcctgtaatcccagcaatttgggaggtggaggtgggcggatcacctgaggtcaggagttcgagaccagcctgaccaacatggtgaaaccccgtctttactaaaaatacaaaaattagccgtgtgtggt

SEQ ID NO: 1561423 - DNA, 4001 bp, Homo sapiens
tatttacaaacagaaaacaaatcttttcaatagtgttatgcaatactttttaaaaaatgactattggtcaggcgcagtggctcacgcctgtaatcccagcactttggaaggctgagacgggcggatcacgaggtcaagagatagagaccaccctggcaaacaaggtgaaaccctgtctctactaaaaatacaaaaattagctgggcgtggtggcacgcgcctgtactcccagctactcaggaggctgaggcaggagaatcgcttgaatccaagaggcggacgttgcagtgaggtgagatcgccccactgcactccagcatggcgacagagtgagactccatctcaaaaaaaaaaaaaagattgaggaacatggggtacacctgaggccctgcttgggacacatgtgaaaaacgccagggaaaatcagtcccctgtgggatgtgaaaataattaagtggcaggcaattagaatgaggaagctctagtccccagattcccacttctaaggaaaaaaaacaaaactcaagtgtattctttggtaaattactacattaggggaaacaaaattcaggcttaagcaactataaactgccaattaaactctgattacataaccaggaaatttccatctcgattgtacaaatttaaaaactacctaactaggctgggcgcggtggctcacgcctgtaatcccagcaatttgggaggctgaggcgggtggatcacaaggtcaggagatcgagaccatcctggctaacacggtgaaacccatctctactaaaaatacaaaaaattaggcgggcgtagtggcgggcgcctgtagtcccagctactggggaggctgaggcaggagaatggcgtgaacccaggaggcggagcttgcggtgagcggagatcgcgagactgcacgccaacctggcgacagagcgagactcaaataaataaataaataaataaaataaaataacaactacgtaactatacctaatcaattattgaatttggttttcttcatcatgcatttcataaatgtcttttcttcaagcccctcccatggactacaaacaacaaactgtagctgggtgctctacaattcttgaatcacactttcattaaattatttgatatttttgcggtgactcccccctccccgtttgtgtttttttaaggcagagtcttgctctgtcgcccaggctggagttcagtggcgcgatctcagctcacggcaacctccgcctactgggttcaacagattctcccacctctgcctccccagtagctgggactacagacatttgccatcacacacagctaacttttgtatttttagtagacatggggtttccccattttggccaggcttgtcttgaactcctgacctcaactgatcagcccgcctcgcctcccaacgtgctgggattacaggggtgacccaccacgcccggcccaataaatttttaataggagaaaagagaaactgtgaaccccacgaaccaaagctcttcccattcatgaacccgcaccccgagtcaggattctcccctgacgaccttcccgtggcccctgaacaatctgggaaagacctgtgggtgcagagctgcccggagagggttccacgccagggcacagtcactgcgcagggaaaagacaggacaccccggggacccgctgtcaacgcagccgccatgttatggctggggcggagctgggcaatgagaacttggagcgcagattgtggagctgactgccgggaggcctgagttctgccactgccacagccacagccacttcctccccagttccaaccagcccctctccctctctcgggatgtcgaactggcactctcaccatttctaggcttccagggggtcccggcgtcctagctgtgaccctcctaatacctgcaggtcacagggccacagaggctgggcctctaggagctgacggcacagagcagtgaagacgatagctggatctctggcgtcagcgagagacaatgggcccgccaaagccggaagccggaaaccgtcctgttcgctacagctgcgtggctgattggacggtttccagcccagcgtccctgattggataatgcttgaggccccgccccctcaggtcctgagttacagaagacgtgatccgatgctggactgagtgaagaaagagagacagtctaagctgcagccttttctttttttaaaaaaattttatttatttatttttttgagacggagtttcactcttgttgcccaggctggattgcaatggcgtcatcttgactcagtgcaacctctgcctcctgggttcgagcgattctcctgcctcagcctcccgggtatctgagattacaggcgcctgctaccatgcccggctaatttttttttgtagttttaatagagacggggtttcaccatattggccagcctggtctcaaactcctgtcctcaagttatccgcctgcctcggcctcccgaagtgctgggattacaagcttgagccaccaagcctggccagctgcagccttttcaaacaggacttcctccctgagctgagccaggcccaccccagagcatgggaaaattctctctctttttgactctctctctttttgaatatattcaaaaggtgaacggaagtattctgctgtcatattaataatacgtaaaatttttgttcaagagaaaatcaacttttactttggtaatagtgtattatcaattaaagctaattttaataaaaccttagaaataaatttgtcattttgaacactccagatttacatatatattttgtaatctcttgtaagttttttaactttttatattttatttttatccacattctttttatttttccatttgaaacaacctttaagtaatttcaaactgctatagggggtagaaagaaatcatttagggccaggcgcggtgggtcaagcctgtaatcccagcactttgggaggccaaggtgggcagatcacttgaggtcaggagttcaagactagcctggccaacatggtgaaaccccatctctactaaaaatacaaaaaattagcagggtgtgctggtgcacacatatagtccccgctactctggaggctgaggcaggagaatcacttgaacccaggaagtggaggttgtgtaacggcccaaggggttcaccttgccctttgcctagacagagccaattcatcaagacaggggaatttgtggaggaaaacttaaatattaaatttgaacttattgaacgtggacacaaacaatggtcaccaagtcttggaacaggttatgtgaaccccttgaggtgttcatcctgcgctgttttggagaaatctctatttcaatctattccaatacattggttattgaaaaacaatagacaatcacacacacacaaaaaaagttgacctttttgtgttctttgagcccaatcgcgaagggccctcatgactgggcctcatgccaaagaactcattacaaaaagagctagggtcccagatcacgcggaaccttcatgagacctctccttgtctgtgcagagatgggtggctgactctggagcccaggctgttgctttccagtctggtggtgaatcctcctagtctgatgagtgcggtatccgactctggagcccagcctgttgcttcctggtctggtggtgaatcctccatagtctggtgtggaggaaaagttaaatattaaatttgaactcaattgaacatggctacaaacaatggtcaccaagtcctggaacaagttgtgtgagctgcttgaggcattcatccagcgctgtattggagaaatctctatttcaatctattcctatacattagttgttgaaaaacaatagacaatcgcaaaagccagttgacttttgtgttccttgggtccagtcacgaatggccctcatgaatgggccttatgccaaataattcgttacaaaagagctagggtcccagaccgtgccaaagctccatgagagacctctcctcctctgtgca

SEQ ID NO: 1561424 - DNA, 4001 bp, Homo sapiens
acacaaagtggtaactggtttaagaacaggaatccaggccaatctcactctaaaaccatgctttctctaatacaccaattttcatcttaattctcaatgagaataaaaatgtacaaaatatcaatactgaaaagagtaacagctccttacagctaggctctatcaaacatgttagtggtatctgatcctcataactctttaggacaggctaggtgggtgttatacagtcttataaataaggaaacactcagtgtggtttaagtgacttacccaaggttacatggctgttaagtggcagagccagtgtctttcaaatcaattcctgaaattaatacagtcccttggatcaatcttcaaaatccagctgtggccaagaacgaaagtatatagtatcaaaacatttctctttcttggtgaaacaaagtaatgattttttttttggcagtgaaaaatttctcaatattccatgtaaaaagaaattcagaggaatgttcatgcaaccctattacgtaatgcaaatttaaataatttatctaacaagccgacttgaggattttgcagaagttaggaaaaaatagctctggaaacttctcccaataattgtgtattttgttttacctcagaatttaggtactggactcaacactattggttttactgacaacattttctaatgagaatggaacaataaattgcacattgctattttaatctaaactaaaaatacaatctaacgagtgattctgcaaccaagcacaataggcagaaaaacagcataaaaagatatgacacagtggtgtgacctatatatcttctaacgcagtttcctactctggtcctacatttctttgccactgtttcttatactggctggaataaatctaaaagataaaaaaatgcttattcgtttcacctagaatgcaactaccttatcgattacggttaagtaaaatagctcactgccagggcagaaaaaacatctttagggctcccctgaagttaattttcaacgagttagtgaggtaaaggaatgaagggccaggctttcttttaatcaataatgcaacccatactctgagtgagaggggagtactggagaaagtgcaaactcaaagaggtgataaatccagtaattgcctgagaagagcgatgcagactgatagcaaattacagcccactgcagaaacttaaaaataccgccttggggttgggaaagtggccgccaccttattaatcatcccggccttctacacaaaccattcattccgatgcccccaggtcttaagaggtgggaactttccctgatggtctccgtgatctctggagacatcattctatctccagaggatggtaataaatgcagaagaccagggctgcgtttctgtagtagctttttctacaccacgcactggctaaaggactgaggtgatgggtcgggaatgagggagcttagaaaattaatcaaaagatgctgtgagaacatcgtggctgggtccatcccggctggcctaagcgatctcacatttgcagaaagaagcaacgcctggagaaggaagcaacgcctgcgggcgggccgggctggtgacagtatgcagggagcagcaagttccccccacccccagctgcagggcaagcccagagtctccgcaggccttgctgcacagaagacagaaccgggacacggaacttggggcttgtggctagcaccgggcgggggtcggccggctgaggaggaagcgagcgccggcagaggcctgaggggaggatgcacatggccggcggcggcgctaacagcgggcggaggggcggccccggggcgcggtacctgcggtcaggcggcggctgctgcttccgcgagcctcgtttggccagccaggacccggccgtgccctcgccctcgtccttgcccacctctctcccggctcttttccctcttttcccccggtttccccctcctcatccggagctccaaaatggcggcgctggggacggatcacgtgagccgcgggtgggtcaggtgacccgaatggcgggcagcgggggcggggcgaggctcaggccccgcctaccggcgtcccgggccgccgaggctggacccgcgagagggaggctccccagccggtttagccccttgcaaaccctggctcccgggcggggttcgggcccagttgtctggctctcatggccccttccagacgtctagatttagaagtcaccgtgtattcactttggcatctccccacgtcgcctaaatccgctgtgggctagccttatcaccccactcaccccgcaattggctttcaacaatgggcattggggttttttttttttttttctttagccttgtgcttctggatttgtattagttcctttggtaggactgtacatttcaaggtgttcttggctaaaatatagaggtcctagccagattcgcagcttggcgttaaggggtgcctgttaagggccagagctggccctggggaatctctttgcttgagagattcaggattttcagggtttgtaggaccagacccagtaacacaagctcagccctccgagggcacgatggtgtttgtcattcggatctgttctatgaaagatactagggtggttctcctgctaacagtgaaaaacggactaagtgaagcattccagccaatttcaccaaaaatgctggatagttttgccgtattaggaactacgcagcatggtgcttgggtctggactccgggtgagcggtgggcatgagcaagggtgtaaaactgaagattctggccattgtagtggaatggactcatttggtgagatacctcttggggatctgttccagatctttttagaggcctttacagctggctgggctgtccacggtcctgggaggaagatccaacaaaatttagaatcagacaggctgataattcctgttactgtatttcagaattcaaattcatctgaatttgggggttaggaaaccagcaaagttagaatttttatttttatttttattttatttttttgagtcagagtctcactctctccccaggctggagtgcaggggcgcaatctcggctcactgcaacctccacctcccaggttcaagtgattctcctgcctcagcctcccgagtagctggcactacagggcgtgccaccatgcccagctaatttttttgtatttttagtagagacggggtttcaccatgttggccaggatggtctcgatctcttgacatcatgatccgcccgcctcagcctcccaaagtgctggggttaccggcgtgagccaccgcgcccggctgcaaagttagaattctgctattccacagaatcctttgccaattagaccaaatagctgtgaaaaaataaaatgttgagtaatttttttttcgataaaaggtaagagattgagcaggagactagcatggaagggtggaaagaaaaaacagtgaagaaaacccagaaatacgaagtgttgaaagggagaacaaacaagtaatatgagaaattccttgccttgggctattggcacaaacaatcctaacttatcattatctgaagagaggcttttcgttagtcatgtcttaagtgtaatgtccatgaatctgaaagtagacagacgaaatgacagaattatttgatcaagggagagtgcagaaacacaatagagaaaatataatctagggataataaagaacttttaaaacaagcgaacgaaagtgtatcttcgtttgaagttcctgtggtggtcattactggtattcaccagctagttcccattgtccctcttctggcataaggttagtttccattgaccctgtggctcgggggtgtggccagtactggtgttggctaatggatcgtgtgtgggagtgagggcattcccttcatactggagcatttaattgccagtgcagttccctccagagtatgtttccctttggcttgatgactggcagtgtttcaggtggcggccatcccgtcagccagcatcttagagggaca

SEQ ID NO: 1561425 - DNA, 4001 bp, Homo sapiens
tactggggctgtcaccccctgcacctgcaccagtgggggctcctgccctgacttgggggggcggccccgcttgcgagggagggaggccttgagtgtccgatttgaggaggtggctcccccaggacgacggcctcggcggccccggggaacaggaggagataaggccagaggtttctcttcctccccgggcaaaggcgaaggcaacgggtctgggctgggggtgtccattgagcagtggggggcttgggtctgggcactggagccagctaagaggagagaggggcagagtcagtgctcacagggtctagagcacccctgtgtcccccaacacctcgcccatccctctctccaagtctcttgacaaaggtgtgtttgacattcatccagatacacaattttagctatgctggtgggtaaaacagtgagatgatcttgtatcagctgataaacaggcacttccctgagctccaccagacatccctatgcctccctaactctccttctggatctagaagttcaagatcaacatgagcaacacccctccccacctccccacaaaaaaaaaccttccagagaggatagagtccaactgagagtgcagaccagtattgtgatccttgaaacggagagcccatcaaactccagagccatagaggcctcacgaatgctctcatccctccctgctgactggcagaagtggggaaggggttccagagtggaaaaaagggactggtcccaggtgatatttgaccctgattcctggatgaggaaacatatctgcgatgttaagagcctgggccctggagtcaagacatcattcgttcaaatctttactctctgcgtggccttgggcaaggtgttcgcttctctaagccttaatcaagacttttgcaaaatgggacacatagttctacgtacttgcccagacatgccatgagcataatacccacaaagtgttcatacacagaagctttcaggacacattagccattgttatcaggagcagctaagcctcacatcaaccctctgaatagggcatatctgtcccattttgcagatggggaaactgaggcacaggaaagccaagtcagttgcctaagttcctctgccagtaaatggcagggccaaaactggaaacaggtcttgtgacccgaatgtcccagagaatggagaacaaataaacccaaggaggaaaggggacattacgagggctcagtcctgggtttgaattcagctctgcctataactagcaattgactttgccagtttcctcctctgaaaagtgaataaaccagggttgtcaggagaatcgaataagacagtgggctttaaaatgcccctcgaacactgcctggtgcacagtaagcactcaataaacttcaccaacgccaccaccatcttcccggcgcccactcagatactgggagcatgggattggggtgtaacggaggggaaggggaggcacaggtgcagctggaagcaggtgctgcaggtgcccccctgcacccccccctcccctttaacagccacatagactgctgtccagagaggagcaaccacctttccatacggttcgctcccacggggtagcctagtctaggagtctggtctttggaacggtggaaagggggagactggtcccccgaccctccccgtcccctcgccccggtactgacgcgcccatcggcccccgagctgcgaagcccaagcgcggggcgggccctgcgggggcgacggccaatgagcggcgccgggtaagcgggcggcgggggctgccaggaagggggtctgcgcgcgcgcgcccggacggcttcgcggggcgcgagcgcgggagcaggaacaggtgttggaggcgcgctccgggagcgcgcggcccggcctcccctacccccacaccccccctcccgcctgcgccccccgcctctcgggtacctcatttgcatgtcgccggggctcgcgagtgtgcgcgcgcgcgggggcaacggggccggcgcgtgggaaggggagggggtgagggggccctgcccctcggcggcggcgaggcgggggcggcggcgcgcggtgccggccccgcccctcggagaagcgccgggcccctcccttcctgcccttcccgcccgcctgcgcgcccgcgggaaacaaaggggactcgctgggtcctaacgaccggtcgcggccacgcccggaagccgcgcctgcgcaccggcggccctggtgtgtccccagtgggaaataacccagcaccacatccccaaccacctcgaaacgcctttcctctcacaaagcccacagtcgggtgacccaaagacagataccgaatgatgaggagcgggaaaatggctgcccagtgcccgtaattaacatggcaccggacaggcttcgaagcccatggagtgctaagtggataagatggtgccggtcttttccagctctgtattgcagttggcgcacttcgctttctttttttttccctagtccaactgtacatcctaatcggaggagtccgaggctgtgaaaaagaaatagtatctgctctcatttacgttagcatcgcctagtgtcgccacggagaagccccctcgctctcagctccttgcccttagtctgtatggcgccgtgggtgtccctaagccccgccccttcccgctgccctcacccaagatggcgcgggcctggcttcttcaacctccagggctgggaaaggaaagggaaagagggagaagggcggggatgaggaaggggagccaagagggcgggagaaagggggagtacggcgggggaagggagctgaggcggaagtcgaggggccccccgggtggaagtgacgctgcccccgctgcccaaaatgtcggcgcccagagggaggtgtaagtaattaaagaggaaagccgacggacttccccggcctcccggggccgccccgggtctccaggaccaacgctccgtacgagcgaggtggactcgcctggccccggggcctgcccgacctgccccccaaccgggcgcccagggctgcaccttttaggggcagggggaggggcacaaaaggccggctctcggggcctggggcctggagcagactgggcaagtgggggggcccgctcctcaggctgcggggtggaggaggaggcggggcctagtggctgctggggcggagcaagggctgggaggagcctgagttgggcggagcttagagtggaagtgggaggggcgtggaggagggagagtctggatagaaaatgggagggtcttaggcaaagaggtggggtttgataaaggggcgtggctcagaaggaatggtgggtaggccctggattgaggggtggaaggaaactcattgaggctggttgggtaaagggagcccaggaagcaggagggaggagtttagagtagaagggatggagtttgtctggggtgtggcttagagaagtaggtaggcctagtgaggggggtggagtttaagggtgtaatttggaggggtttaatgcaactatcaggtctttataatgaatgtggaaaggacttgcaggggatgggaatagacttcgtagagaaggcctgagaaggtgacgggagtccagtggagagtcttagaaaggatgtggcttctttaaaggaaaaattgggtggagttttggaagtgggtcttagtggacccgagaggggcttagataagtcaaataacttagcaatcatggtaggacttaaggaggaatccaggaggaacttacgggataatagtcatccaaacagcttacttgttgcgtctttgctgtgcaccagcttaagtgggcacgtagcatttattgccacaattttacttaattctcgccaccactccatgaggtaggtactactattcccattttacagatgaagaatttttattatctgatgttacaggagtaattctggtctccctgcaaggatgactccagtgtgcttagccccaaatctttgccctcccattcgctaagtggtcatcctggaagaggagtggg

SEQ ID NO: 1561426 - DNA, 4001 bp, Homo sapiens
ccaaggcaggcgatcacaaggtcaagagatcgagaccatgctggccaacatgatgaaaccccgtctctactaaaaaaaatacaaaaattagctgggcgtggtggtgcacgcctgtaatcccagctacttgggaggctgaggcaggagaatggcttgaaaccgggaggcggaggttgcagtgagctgagattgcgccactgcactccagcctggagacagagtgagactctgtctcaaggaggaaaaaaaaaaaaaaaagttgctcatattaagcacctagacggtagcagtttagcctgcacatcactgaagcacgtccagtgccaagaacaatgtctagcacacagtacatatttagtgactgagaaatgctcccaggccaggtgtggtggctcacatctgcaatcctagcactttgggaggctaaggtggtttgatcacttgagcccaggaggtggaggctgcagtgagcctcccttgggaagtgagaccttgagaggtttttttttttttttcctccttttgagacagggtctcactctgttgcccaggctgcagtgcagtggtgcgatcttggctcactgaggcctccacctcctggactcaggtgatcctcctgcctcagcctcttgagtagctgggaccacaggtatctgccatcatgcctggcaaatttttatttttatttattttattttactttttttgagacagagtttctctctttttgcccaggctggagtgcagtggcacgatctcggctcactgcaacctccgcctcttgggtccaagcgattctcccgcctcggtcacctgagtagctggaactacaggcattcaccaccacgcctggataatttttgtatttttagtagagatggggtttcatcatgttgcccaggctggtcttcaactcctgacctcaagaaatccacccaccatggtctcccaaagtgctgggattacaggtgtgagccaccacacctagcccctggctaatttttaaattatttgtagagaggtctccctatgttgcccaggctggtctcgaactactgagctcaagcaatcctcccacccaggcctcccaaagcgctggaattagaggtgtaagccactgcctggccgaccctgagtttaactgtccctatgcacagtccatttctaccagaccaacttccccattagactgtgaattcccaaaacacacagcccagtacagggccctgctttcagttaatgcccaatacatactccttgagtaaattattcactaaaggagctggagctaaactttccttatctactattccaatccccttcctaatttttgagttgccaggcccctgcacacaacagccattccacaaaggaccttcctggaagtaggcaaccaggggcccgagagttccatttttccttgattacagccccatttccaacagagaactcccctagggcgaggcccagtgcctgctgcaaagcttgcacaaagcaggtacccaataaatgtctacgaggtggcccgggagacttgaaatttgccctttcctcgtctacgattctttctcccactcttgaattgtgaactacttagggaaagaatgggggtttttcacacagtatatcagtaagtctttccaggaaggaacccactagggccctggaaattcaactttcccgctttacaacgcttgtctcctaccagactgagctcctcggcagggtgagagctcgcagcagtgggtggtgggcgagttccagcgtaggctcccgcacactaaaggagccccagggcacacaggaaggagtgctctccttccagcccgcgccgctcccgccctagcgcaggccccaaggctcttcgatccctgcagaccccttagttttccttccgccccctccgtccgcccagcgttctcttcccagtccagccccgcgcggcgccctcacccgtttctcttatctcctgcagcccctgccgctcttgacacagaccctcggctccaggcgtgtgggacccctcactatccacacctcccattgggcggtgcccttacccgtggcgaccaatcagagcctgcagcgcagggcacgcgaccttgcgcctgcgtgttgccacacaggcggggctctgggagttatccacgcacacatcttcgccctgtgggcggggctcagggcgaggagatgcgcctgcgcatttctctgggtcgctcccgggctaagcgtcggcaagttctgtagagaaactcgggcaacctttggtgagcgttgggcccatggagtgaactgggcggcgggagaccttgacagagatgtcatttcaaagctgaagagacggagcatttctgagagtacagctttagagcccgacacacttggagttattctcctctccgggcctctgttttactggtgtgaagtgagcttgagtcacagccacctcaaagattgtttaggggattggatgatatcacacatgcacagcgctcatacactgtaggcgcccactacaacccacttagcaagacagaatccttcacagtttgttaaattgctttcctattctccctactcttcgtttgatttaatgatagtcacttaccaggcccccttgtgagtttagcccaggactatgcttccgtagcttaccattgccatccatttgtttcacaagtagggaaactgaggcccagagaggggaagggatttcttggagggtttgtttgtttgtttgagacggagtctcactctgtcgcccagactggagtgcagtggcacgatcttggctcactgcaacctccgcctcccgggttcaaccgattctcctgccttagcctcccgagtagttgggattacaggtgtccaccaccacgcccggctaatgtttgtattttttagtagagacggggttttgccatattggtcaggctgctctcgaactcctgatctcaggtgatccacccgtctcggcctcccaaagtgctgggattacaggcgtgaaccaccgcgtccggtcttgtttgtttgtttgagacagagttttgctattgttgcccggactggagtgcaatggcgcaatctcggctcacggcaacctccgcctccagggttcaagcgattctcctgcgtcagcctcccgagtagctgggattacaggcatgcgtcagcacgcccggctaattttgtatttttagtagagatggggtttctccatgttggtcagactggtctcgaactcccgacctcaggtgatccgcccgcctcggcctcccaaagtgctgggaatgcaggcgtgagccaccgcacctggcgtttgtttgtttcttgagacaaagtctcgccctgtggcccaggctggagtgcagtggcactatctctgcttactgctccctggttcaagagattctcttgtctcagcctcccaagtagttgggatttcaggcgcgtgccaccacatccggctaagaacagacagggtttcatcatgttggccaggctggtctcgaactcctggcctcgtgtgatccgcccacctcggcttctcaaagtgctgggattacagacgtgagctaccgcgcgcagccgattcttttgaattcactgctacagctcaggcagagccagtactgggccagtgctaggcaggacccagatctcccgactcccaagaggagttaattgcgggggtgggaagaggtccagggaggggacttgtctcaagtacatgcaggtcctgaccttgagtcacctaagtggggggcgtggcgaccgtcacacccaaggccccgcggtaaggggacacgcatacaccacagcctagactccctgacagaccctctctagttgttgcaagttagggagcgggtatctgggcgaccctggagggcagagattggaaggggttacggaggggccgttttggctctgggtggagacatctgactgtgatgggggtcgtgatggacgccatcgagatgtacacagtcggaatggag

SEQ ID NO: 1561427 - DNA, 4001 bp, Homo sapiens
ctcagaactactactgctccacaaaactacaaagataggtattaatatctccactttactggtagtaaaagggaggttccagaagcttaaacaaccaactcaaagtccggggtccaactgaaatgtgacctcaaaaccagtcctcttttgagaggccacgatgtctgaatgggaaatattcaacacaacccgagtaatcaatgccatatattccttagagaggcatctttagagatggcaggtgttacctttatttctctacagaaatgcagcctgagggaaacatcgccaaattttaatactaaagcaacaacaaactgggcaatctgaagtaagttccttgtcctcttagagccaacatttcttcattgtaaaaatagagacaggctgggcacagtggctcacaccagtaatcccagcactttgggaggtcaaggtgggcaaatcacttgagactaggaattcaagaccagcctgggcaacatggcaaaaccccatctcctcaaaaagtacaagaattagttgggcgtggtggcatgtgtctgtagtcccagctacttgggaggctgaggtgggaggcttgattgaacccaggaggtagagggtgctgtgagccgagattgcaccactgcactctagcctacaggacagagcaagactctgtctcaaaaaaaaaaaaaaaaaaaaaaagaaaagaaaagaaaagaaaagaaagggacaactgtggttgacctagaattcagtatacatcaccccctaatttcaccccctaattctggactactttgcactaggcaactcagtccctagcagttatttccttagtgtagtgcagcttgaaattgtccataaaaactgcagcagggcgcagcgcctcacgcctgtaatcccagcactgtgggaggctctggtgggcggatcatgaggtcaggagttggagaccagcctggccaaacatggtgaaacctcgtctctactaaaaatacaaaaactagctgggcgtggtggtgcgcgcctgtaatcccagctacttgggaggctgaggcaggagaatcacttgaacctgggaggcggaggttgcagtgagccgagatcgcatcattgcactccagcctgggcaatagagtgagactccatctcaagagaaaaaaaaaaaaaaaagcgagacctctagagctaaactgcttgggtttgagttctggtgctgtcacttgttaactgtgtgaacttgggtaattctaatatttctgtgcttcatacatcaatcccacaatctcatatatacacacaaattctcacccaatcacaaatgtatagagtcacacaaacacacccataatctcacacaatacacagccacataagcacaaagatagatggtaacatacaactacaccaacagagataaacaatcacacacaatcacacacaaagtagcataccacagaagtcacacatcttgtcacaattactgatacaaaactatacctgcggagacagatggtcatagtcgcacaatcacacttgctgtcacacacattcaaacgcaattgtatccgcagaaacaggtggtcacataaccacacacatgcatttacacaaacacacaatgtcacaccccagtctctcataaacacatacacagctacacctgcagagacagtcacacacaaacacacatattcacagtttcacccccagacacagatggttacagtcacacacaagcgggcgcacgcgcacaaacacacacacacagtgacacaagatcacattctgtcacacccgcagcctgtcacatagttggtaatacagtgaaacacacacggcctccccagcgactcctgccgggttcccatccctggcgcggccgggccacccggagcccgcccttgacttcccgctcccgcccggggcccggccccactcacctcccggcgccgcgggctctgcaaacgggccccgcgaccgagacccgcgacgtcacctcccagaatcctccgcgaggaggagcgaggcgaggactgaggcatgcaggactctgagctctgcgagatctgaaccagcgacaccgcgttccccatggaccccgcgaaccacgagccccagaacgctttgcgccacggccgtcatcgttgaactacatctcccagagaaccccgcggccccctccactgcgcgcctgcgccacgggggcaggtaccggagagggctgtgtgcggtcgtaggctctccagtgaccttgagctgctgtgttggggaaagcggccaggctgcgcgcggggctgactggttgaatgcttgggtgtggtggttcgtgtgtgactgttgctgcacacctttatgcttgccgacgaaaggagcggcggattttgtcagtgcagggagcttctgtattttaaatcacgtcccgtgattgtgggtagctgaatgtgaaagtgattgtggatgaaagagactgtggctgacattgggggtgaccgtttctgttactgtgaggataccactgatccgatgtgtatctgactgtctcctggtcttactgttccttcacccccatctcctgccatgggcggggtctgtggtatcttttattgaggcaatctcggcgctcactgcaacctccgcctcccgggttcaagcgattctcttgcctcagcctcctgaggagctgggattacaggcacctgccaccacgcccagctaatttttgtatttttagtagggatggggtttcaccatgttggccaggatggtcttcatctcctgaacttgtgatccacctgcctcggcctccccaagtgctggggttacaggcatgagccatcgcacccggcctattttattattattattatttctcaattggtcaaaataatatatttaacattttaatattattaaacatacaaaaggccacactttggccctcctctagtcaagcagtttccttcctggtgaaagtccataggcagaaacatgcctgcaaagatctcacaaccttctttcagaccatgctctgggtatccaaatccccaggatttcctgttcaaatggactccagcctgcttccagagcctgtatctcctctgtgtccaaagacccttcccttgatctgtcttccaaaggtggaatgtgctgcctatccacaaaatgtggccaaatgagagcaatttggtaaggctagacagagcttagatatgcaagctggagtgtccacatgtgggaatagaagacctcttacgatgtgggacaaggatggcagtgggaacagaaggggactggctggggacctccatctgtactgttgacccaggtctctacatgtcaatgacaggctcatttatgtataaactattttggagaccaatggtcttatgatgatggtggtttgaattagggtcatcactggaagaggcaatgagaaattgtcagattgggatacagtttgagtgtagaactaacagaagttgctgatgcttggttgtgaatatagggaaagagagaagttcaatataatgcctaaatgtcttgagcccctggaaaaatggtagtgttatttactaagataggggaaaatgagtatgtggcagttatctaggatggggtgggtggtgaggtatcatgttaagtcgcagatgcttgttggatttcaaaagagtgatatcaagtaggcatttagatatatgtgtgtggagctcagtgaaatgttggtactagagatacgaatttgggaatttcaattaagatgcttttaataggaagttatacagttatatgctcaactgaaagtagcttatacagtaaagatatttatttccccacttagcaagaagttcagttggcttagcaggtgaccaattgtagcaagaatccttcctcctgctctgcagtcctcaatgtattggcagtgttgctttatgtggttgcaaggtagctgcagcagctcaggtcctcacacaatgtcttcattctgtgtctagttccagaatgaaatactt

SEQ ID NO: 1561428 - DNA, 4001 bp, Homo sapiens
taaaattacagaacacccaggtgctgtctgacgaagaactgcttgttggtgacaagtaattcccatattactttggtgaccagagatgaggcattctgtgttgagcgctctttattgtgttcactgtgaacacaaaaacacactggtttttcctaacttatacactcacaccctagtccatcccaagaaaagagaagagtgccttataaatagtgttccaattctcatcttcatgtgtggttttttgttttttgttttttgagatggagtcttgctctgtcacctaacctggagtgcagtgacacgatctcggctcactgcaacctctgcctcccaggattaagcgattctcctgcctcagcctccagagtagctgggattacaggcgcaggccatcaggcccagctaatttttgtatttttactagagatgggtttcacatgttggccaggctggtctcaactcctgacctcaagtgatccgctcacctcagcttcccaaagtactgggattacacgtgtgagccacagctcctagcctcatgtgttctaaacaaattttatattatagaaaaattaatatgtcacaattcaatcataatttccaatcaactcaccactcatctgtaaccagggtccccctctttcctcactactgtttccctgcctcattctgtacatatctctcattctcatcttttttcctagctctttttttctctattttcccctaggattctgttcattttgagtccctcctcttctctttgtcccattcttccctctattccttctctcccacctgttctgatccatttttacaacttgtttcacctcttattcctctttctgcccaatctttcattgtccctaatctccatatatttctgcctctttcctcccacatctcagctccccttggggtctccctgttaaattccatcttcgatattacacacccctgtccccactctctggcacccttagatcccaggcctccccctgctgtggttctccctgttctccttgtgaccagctgccccctctggctgtcccagcaccacgctgctctgtctgacctggctccaaatccctcctcctctcccccctctgtctgagaagccttccctatcttgttgaatttcgtctttctacagacccaggtttgtctatatttttacagttacttttctcccctgctattttctcggcaccttctttcactgtgcctctgcaaacccctcactcaccttctactttgccttctgttaatgggtctctcattcttcatttctctttcaaaatttctctatttcctctgcctcgttcccatctctttttctccacacattcacagggaggggattggaataagatgcccacttccggaagagctcattttctgtgggctggaaactggctcgagagaacactggatgtcaggagactgaagtcaccccccacactcggggtcaggagaaccggtggctggaaaagggaggcctggggaacagagggtccagattaaggagcaaaaaggcaggagtgggtcaggagaggggtggagtctgcagaaaccaggtctgggcagaggacgaggcctctcgtgccctgttggggcgctgagctctaggggcaaagaagggcgaggctaggggaacggagagtgaggattttacgtggtgcggggcgtgtgtaggggttactaaaggatttgaagcaggtaaaccccacgataggaggtgtctacgtgggtaaatgacaaaaagaccgggcacacgaccagcctccaagcgattttaacacgcagaaagcgactcccagactctcaaaggatgtctgaatttactcggggtggagggagcggtgccgggatttcaaggtctgcatgcccctcagctcccgggtatagaagcagagaagaactggctagcctagacttaacatagacaaagggaaactcacgcactgctgcgaaaacagtttctccctgcaatcggcttccgggtctaccggaaactgcgctctaggcgttcgccccccgcggtccgcttccgggtttgcacgaaattgcgcgcgcatcctagaggccggactggctgggaccagggcgggccgggacaaagcctgggccgggcctgcgcttccgttcgcttgactggctgcgcttgttttcagggttttggtctgaaaacggatcttacctgcgcagagcaaaatcggttgtagattatatccacgaaaattccttctattaaaatgaatttcaagtcccacctaccctggaagcagaaagagagagaagagagagagtaaagagaaagagaaaagaaagagaagttgaaaaagagaaagaaaaccaagaaagaaagagaaaaaaaccgaaaataaatggacaagaaagaaaagtaaggagggaagggaagggaggaagggaagggaagctttaggaattgaattaacacactttggaattgtctgtgaaggggatgatgcaagctaaaatgtgaaatgcaaaaccctgccagggtagaatgttctatttcatgccagtgcccatagaagataaatacttttcatttatcttccccattcactctagacggtgaaggtcaaccctgtgctcaattccagagactttcctagggacatcgtgttgggcatggaggactaaggccagtgtgaagataagtcaccgattctttaaaaaaaaaaagccagtaacttataaaaatagccataaacgacgtagttttttgttgttgttgttgttttgagacagcgtctccctctgtcccccaggcgggagtacagtggcaggcactcagctcactgtaacctccgcctcctgggttcaagtgattctcttgccccagcctccagagtagccaccacgcccggtccaacttagttttttaatactttttaaaattttaagacagggtctctgccaccgaggctgaaatgcagtggcgcaatcatagctcactgcaaccttgacttcctggggtcctgggcaggtgaccccctgtctcagcctgccgagtagctgtgagtaaaggcctgtgcctctccactgtgctaattttctactgtttgttgctttgtttttaatagagatgtagtctggttttgttgcccaggctggtctccagcttctagcctcaagcagtcttcccatctgctcctaccaaagtgctcggattataggcatgaatcaccttgcatgggagataaggacccccacatcaagccctcaggttatttttgaaacacaaatacataaggcccacaagcaggcccattggctgcagacagtggggtcacctgaagaacttttctttgatctgagtaccaacttctcacctaggtcactgggatcctggactacggcactgctccaggcaggcctggttatcctgcttgaggcagcaatcctcttgagcctagtgaaatgcaactggctgtacctcaatgatgttgccctgagattctgccagtcgaggtattacttcaatctcctgagaccagcctctacctccagatccagggaggtcagtgcacatgtaaatggactagctttattaaaggggatatctgggccaggcgtggtggctcacgcctgtaatcccaatactttgggaggccgaggagggcagatcacctgaggtcgggaattagagaccagcctggttaacatggtgaaacgaagtctctactaaaaatacaaaaaaaaaaaaaaaaaaaattagccaggcatggtggcacacgcctgtagtcccagctactcgagaggctgagacacaagaattgcttgaatctgggaggtggaggtgcagtaagccaagattgcgccactgcactccagcctgggagacagagcgagactccgtctcaaaaaatataaaaataaaagggatatctggattggcggagagactgcaggacagcattcaagtggggttgaattggcccagttgcatctgacttctcacttgtagt

SEQ ID NO: 1561429 - DNA, 4001 bp, Homo sapiens
agagcacacaggagaagtgaacatactgtcaaggtgttatatgaaaattaactctaggaagggcatctgatgaggtactggaaagaaggagatctgtcttcataatgtcatcagtaactgggaagagaaggactagagaccaggtaaatagataagtcactatttggtgagcatttcaaatgaagttattccacatcctgaaaaacaaaaatgcatttcataaaacaaagaaaaaaatcaaaatgacctccagctttgctttaaaatgtgcaactacaatgcttttcttctctcagagctcttctcttggaatacagcaaaatgtggaaagaaagggaatcacaatatactcagcctttcttggagcccagacaggctaaataagaacacattcttcaccaccggcaagcttccataacccatgctgaatatgaccagatggaagtatgagaaagactggaatattgttgactcttcccttcataaagaaaagtcaggttcaccaaagcctgggactgaaatgtttctgtattcacaataatttcctttagacagctatgaaaatgctgtggatctgcaatattcaacttgcccccacagagcttccaaaagggatcttttggctaggcacggtggctcacgcctgtaatcccagcactttgggaagccgaggcgggtggatcacctgaggtcaggagttcgagaccagtctgaccaacatggtgaaaccccgtctctactaaaaatacaaaaatgagccgggcatggtggtgcatgcctgtaatcccagctactcgggaggctgaggcaggagaattgcttgaacccggaaggcggaggttgcaatgagccgagattgcgccactgcactccagcctgggcaacaagagcaaaactccatctcacacacacacacaaaatctttggagaaacgaatcctactcctggggcctcaatatcatatcttcccagaaccttgccttgggagcaattccagctctaacatctccatatcaaacacgaggctgtgcatatcagaacacagccttgtccatgtgaaacacaaggctgtgctttttcagttggaaacttcattctggatctcaaatatccaactttcttttcgatagccatttgactgcacactgtgcaacgtggttataaggtgaaatgactgaggcagtgaaagaaatcccagtataacaaactccaagaaaccacgtaacttaaaattggccccagaggttggcgaggctgcatgccactgtgtattatgcattatgaaagcgacaggggccatgctttagaacagaaggtctcagagtcttcacagacacagatcgagccatacggggaccttgtccacgtattcctgagccccagaactgcagaaatcaaactctacaaaagctgcaccaggccagttttgatcacagtctccagtgggtcacaacagcgctgtcacaggatcactgataacagcatgacacattcatagtcaccgctcagcgccgtcacacaaacggccccgcccccactcagtcccgcgggcccaatcggggacagtcagggctgtcccgggctgtgcacctgctgtgcacacacaccccctgctgtgcacaccccccgcccccccgggaccatcacaggcgcgcccactcacaccaccacacacggacgcagccacagaacggcacacacaaacacaatcacacagtctccctccccagcaggtgacttgcacacaggcctggggcttctgcctccacaaaccctctccgcgtcccatgaacccaggtcccctgccgtgagctcttctcgcatccagacccgggtcacctcaactcaccacatggaaaacgaacaccaggtcaacggaaaagggagccggggtcctggcagaagcgtagtgccagccgcaatagggcggccgtgggtgcaaacggaggggagcgccggcagctagcaccgcgcggcgactaacgggccgccccggagactcctgggagctcaggcccacgcgcgagtgcgcaggcgcagacgactcaccctgggccgggggtgaggcttggtgggtgccaggggtgctgaggaggccaaggagggcactgggagctccgttccgggagagctgtctaaggacgcggaaccgggtggggaggccagggaggtaaccaagagtccgagccgggcctggaaattctgaggaggaaaccgggaccgcggtatccagacgctccgatctgtacgagccgggcctcgggcgtggtccatgggcgtgaccttgagggtgacccggagcgagctccgcgaagggggattttgcccgttctgatcccgcggaagcgccatcgctggcggcgggtccccgcgcggagcgggcgctgtgtgttcgcgcgcgcgggcgcgcgctgaataggggtggcctcctgcgcccaacctgctgcattttaggtgcttgcctctctttgggatgttgtggccgattgtgtgtgaaaagtgaacggagtagtgttgctgcgcgaggtttcctctgcgtgtgtctatttttagattaggtgtgagtcgcatttgagactgcctttgagtgtggagaattgcaagtgatttgtaggtgtggttgtgactgcctggagtcgtgttagctgctgtctgaggttgtgaatgacaagtggggcctgtaggttggtggttctctgaaggatgtttgattgactgtgactctgcatgtgtttgtaacctactgttacttctggtggttttgtggccttagtgacctaaatatttgaatgattgaggaactctgttatgaccatggctagttggttatgtaagacttgattatctgaatagtagccattaagcctgcctccaaaactgtaactaagtagcaatttagcaaataaaatagagataacagtatcagaggggaagagatgattttcataattcccagattcatttcctggaaacaccatattaactaaaaccagtatgttgaaatgaatagcattccattggggacatgcaggaaattttttttttttttttttttttaccataactaccacttttgttgttgttttttgtttgttttaagacaaggtcttgctcttttgcccaggctggagtgtagtggcatgatctctgctcactgccacctctacctctgaagttcaagtgattctcctgccccagcttcctgagtagctgggactacaggcttgtgccaccacgctcggctagtttttgtatttttagtagagatggggtttcaccatgttgcccaggctggtcttgaactcctgacctcaagtgatcccctccccccgccccctcggcctgccaaagtactgggattacaggtgtgagccactgtgcctggcataactaccactttcaacacttgtatatgagtgaggtttcctactcccttaggcttgctaagataataaaaagtatttgatagatttttaataagtccagtctcactgtagtaattaaaatagttattttgcgggcctggtgcagtgactgatgcctgtaatcccagcattttgggaggccaaggtgggcagatcacctgagatcgagaattcgagaccagcctgaccaacatggagaaaccccatctctactaaaaatacaaaattagccgggcatggtggtgcatgcctgtaatcccagctactcaggaggctgaggcaggagaatcgcttgaacccgggaggtggaggttgcggtcagtcaagattgtaccattgcactccagcctgggcaacaagagtgaaactctgtctcaaaaaaaaaaaaaaaaaagattattctcaactacaacatagaccagataggcaaagatttaaaagttgtcaactgtcttcatcagggcttgggaaggtattctcatccactactatcagtgtaaattggcaaaaagtccaagaagaaccgtttggaaatacacagtaaacctgtggttagaggtagatggaaggcagagc

SEQ ID NO: 1561430 - DNA, 4001 bp, Homo sapiens
tacatgttgaaataatattttggatatattggtttaaataaaatacattaccaaaattaacttcagctgtttctttttctttttaaaatgtgtttaaagccgggcgcagtggctcacgcctgtaatcccagcactttgggaggatgaggtgggtggatcacctgaggtcaggagttcgataccagcccagccaacatgatgaaaccccttctctactaaaaattcaaaaattagccgggcatggtggcgggcgcctgtaatcccagctacttgggaggctgaggcaggagactcacttgaacctgggaggcagaggttgcagtgaactgagatcgcaccattgcgctccagcctgggcaataacagtgaaactctgtctcaaaaaaaaaaaaaaaagtgtctaatggaaatttttaaattacctaagtggctttatattatatttgcattagactgtgctgctttagactcagacaccactgtatcaggctgcctctcacaatctacaccaatgtcacactgccaaatctcaaagaagatttggttgtcaccacttaaatcccctcatgaatgttctggaaaaactccctgcccttgttgacatagcctctctgcataaaactcctatcatattcccactcctaaatgtctccaaagccaactttgtcacttactgattaatacctaccatctcctatcttgctttgtttgcaaatcaagtctgtaaataagatcaaaggtatctagtgtgccattctacttaatcactcgtctcctccttaacaaattacattctaaaaaaaagttttaacttctcctccaggagttgtatttctataccataaaaatcctttggaaaaaaagaagcacatgggagaattgaatgatttacctaatgcatatgtgaatattcaatgaaagggaaatgggcatttggaaaggcaatggaggacaaggggacccatctctacggtcctgttgttaattgggaagagaaaaccaagggaccaggtaaatgaacaaaaaaaaaaactaaccttgagttggccattagtaccaatgctgtcttccacttcagggggccttcacttgcagaactacataaccaagagggagaaaggactcatgacatcctggactggttaaataagaacacagtgttcaccaccagaaaagcccatcacacacaacaaacacacccagatcgaagagggaaactagaatactgtcgactcctccccacatccgagaaaaaggtacgaccaatgcctagcagtttctagggaacacagctcaggaaatactgtagttctttaatgtataaatggcctccaaactcatgcaaggggagttatcccaggaatgaatactacacctatgccctccccttcacgtcttcccaggaaacttcatttatctatcttatctatctatctatctatctatctattatctatcatttatctatcttctatatatcatctatgtaatctatctatatgcgtgtgtgtgtgtgtataagacctcacgaagagattccatcacagacatcacagagtcggaaaaatgacgctttacccaaaacaaactcctacaggctcacggaaaaaaacgaacaaacaaacaaacaaaaaaaaacaaaaaaacacttctaccccgttcacacttatagttggtcacaacagtgctgtcacacgatcacgtcaccgtagaccagggtcacacgatagaccccgcccctactcaccgtcctgagtccgatcaaacagcacccacggcacacactagggtctccgtctctcacacacacacaccacaatgacgtcgtaaacaatagcactaaccaccatcgtccgcagctcccgcgtacagaggcctcaggctcccggctccacgtggaccgacctcgcccggcagcgcggggccacctcaccgcgagctcctcccgcagcccggcccgggtcacctcgactcgccaggcttaactcaataaccacaacaccggaaaaggaagcaaaggtcgaagttcatccgcggccctgaggcctgtgggaaacgtagtccaacaacgaaagagccctgaagctcaagcggagcccgctggccgcaggggccgcaccacgccccagaccctggagtttccgggtgcgcagacccttgccatcagcagaggctgccgctgcgcgtcccctaggcgcggaagaggcggctggtggtccctgacggcaaggtgaagtcgaggcagtaatcgggaacccaggttgggaggacagaatggggaacaggaagctggggcgagggtggtcttgggggaggtggggggccgcggaattctaggtggcccctgcctcacctctggaaagaaccggaagcccgggccggggagggtgaagggagtcgcggacccggctgctcagccgaggaggaaacccggaccccaggctgagggaggccgaagaaggaactggagggccgggctgggaaggcctgaagcgggtacagcctttaggctggggagggtcgaggggagaactcggagcctgagtcgggcgaggttttgctccactctggcttctaagtgtgggggcctcaggatgtgacccgtggtcgtaaacctgagggtgacttggagtttttgtccgttttgcaccatgagaaaggccccagatggaatctggcaggtagcggcggttcagtgtgtgtgtgtctgccttagggcgtgttttacactgttgacgaaaagactcagactctaaagtatttgaagagacttattctgagctaaatatgagtgaccaatggccggtggcccagccctcaggagatcttgagaacctgtgcccagggtggacgggatatatgtggttttataccttttagggaaacatgagacaccaatcaaatacatgtaaaatgtacattgattccctccggaaaggcgggacagctggaaggtggctggccttccaggtcataggtagattcaaagattatttgattggcaatgggttgaaagagttattgacgtaagacttaggaatgtctccaggtagcacgcttcacagagaatagattgtaaatgtttcttttcagacttggggtcttttctatcagtaattccaaaatggaggagggtataatgaagcatgtccgacccgcccacccccgcctttccatcatggctttactagtttttcaggttaggaatgccctggccaagaggaggggtccattcaagatggtctgggtgtgcttaggattttatttttggtttacaacaccagcaccaccggagtttgctggtgtcctttccagtcagtttcaaagcagagacagccatagttctgatttgtgtcactgtaactgtcagttccggaattccatatttctcctttagtttaccctaatgtgtgtgagatttcatgtgtagttcatttttctttttctgaacagcactccattgtgcaaatataccacaatttgtgtagtcatttttctgttgttgaacatttggcatatttacaggttttatacattacgaataaagctggcacgtttccatttctcctgggcaaatatttagaagaaaagttgctgggtaattggtaagtttacatttaactttccaagaagctgataagccttttagaatgattagttgtgatttgtgtgtgtgagattgtgtaactggagtaagtagtttctgagtttgctttgctatgtttgtatggaattataagatgggctcaacagggttgtgaatgtcatgtaggatccataggattgtggctttgtggagtaggtaagatcacaggaaactgaatgtgtctgtgctaattgttatttatcatggttttgtgtgtacattccatgataactgaaaatggatcactatgtaagtgatgttaatgactgaagaactctgtgtgtctggtgtatttcattttgcttgcagaattatgacagtttctaataactaaaatatcacaagcattggaaac

SEQ ID NO: 1561431 - DNA, 4001 bp, Homo sapiens
ctggttgctaaaaagagactggtgcctccctcctgccttgctggctccctttttgccttctgcaatgattggaagcttcctgaggccctcaccagaagtggagactagcgctaagcttcctgtacagcctgcagaactataagctgtaataaaccttgtttctttataaactacccagccttaggtatttctttatagtaatgcaaatggcctaacagacatagggctccatcctagttcaataatatcctccactctttgtagaagtctctatcctgcacccttcctcagagtccaagacctgtgtgtccacctagccacttgatatagctacttacttattctctaaaacatctcatatttttaacatggacaaaacacattcctgatgtcctgagtgaaaaacaattctactatctacttggctctcccagtagatggagcttctatgcttccagctactaaactcaaaaagccttgagtcaccccttcttatctctcagtcccaataccagaaaatcagagccgacctacaatccaaaattcaaccatttctgccacactgtggccactactctggcccacatcatctacactcacctggactattgcagtagtctcctctttcctctttggtattgctaccaactcccttaaacccacagtctgttgtctgtgctcagccacaggagcctcatgaggcctggggaagatcacctccctcttctgctccaaatcttcattgctgccatcatctccagaacaaagacatctgagacagccatttagtttctaactcctgtacctctgctctctgttcccatgagaaggaaatgagacttgaggttctcttaaccagctcagcctcacctccaagcagctccaaacacctgtacttatctctgggacaaacttccacattcatcctattatttgccagcaacaggcaccacctcatataatactcaccctggacatatttttgttcagagtccctaggctcaaggcctggaaaagcggtaagtaaagaatcccaggtcaccacagtcccaatcctagagatcccattgctggaatcaatgagcttctggatttcctccacttacccttgtagggtcttcaagtgcttcttacggacctgtaagtactagtggcaatctgtgggaggaaacatgttctgagaggcaggtgaccaaagtgtggctccatggacttctggttccaatgtggaacaccagagccaggtgtccagggatgactgctttgtatctgggtgtcagtccttggtgctgacttttaccagctttgtgacctcgtaaaaagactaggtccctccatgcctgctatcatcactgcccttccagcgcgttcctctgaacagcttttgtgaaacttttagaagcgtgactggggccgtgcccctcttctgtcctacgcgctgtggccctcagtgtgctggtgaaactcagtggggccaatgcagcgcggcgctgccccaccctctgctacctgcacgcgtgaggccggcctgggtctccccagcctcccggctcaggcgcagctccaagctgttgcccgcgcagccccctgaccgtgtcgctctcccgctccctgccacactaccagaaacgagatccagcaccagcgcctcactgtgccggacagtgcggtccgggctgcagaaaacccttcacgcgtccctcagtttcgggtggggagggcagaggaggccgggaggacgcagcgctcacctgggtcggggccctcagtgccgccgccatcggactctgggcggagcgggccgggagcggtggacgatccgggcggagacaagagcaaagctgtcaccaccgccggcgaccgtcaggccccggctgtgcagctgagaaaacgactctcctcgcgccttctcgctgtcagcacctaggtccagatccggcacccgcggatggaactgacacaagccaaagtgcccgccacagggaggacgccggaagttccgctccgacaagttggacagagcggaaatgtccctcccctgagcctcattggctccacgccaagaacctggctcacgggcctctgggtaatgtagttctcaccgcttcttgggctggcagaggtcgcccttctcctggacctcagggaggaatgaccccgttgctatggagaaaggtggaggggaaggctgagaggtggtgtctccagcctccttggacaagggaggagcttcgctgcttttttaaggtaccatacagagatttttggagggtattgtgtacaactagtcacctaggtagtcagagttattcagatacaaaatgcctctacccttggcgagagcctagtaaacattaccttctttctccacacatttatgtaaagtagaacgttagagtcagctttgtgagtttcattatgctcagtaaggaataagggaaatagagtttacatagcgccatgacaggaatgataaaacatccgttagatcgcaccgaagctggaggacgaaagaggaattttgtctcacagaaaatgcctctcctgcctgtgtaatcggtgagtgtgtctagccctgtaaggaacagtgttgtattcatataatatttcttcctccatattcttagatatgcttcttttaggattgtagcaactttctaaacagaagagccacttagcatatgccattttaaagtagaacagtgtctgtagtgttcacagtcagagcacttgtgcaaaggggacatcagaataccagaataaaggtttgggacacctagctttcatctctttgatgggaaattttgatcattgatactgttactgcagggacagtgcttgcatggggagttgagatcatcttagaaaaacagttgtgaaatgaaaattactgaaacctattgtattagtcaggattctccagagaaacacagaaccaataggatacatagatgtacaagaggggatttattatgggacttggctcatccagttatggaggctaagaagtcccaggatataccttttgcaacctggtaagacacgaaggtgggtggtatcattcagtctgcatctgaaggcctgaaaaccaagggagcctatggtgaaattcccagttggaggctgaaggcctgagaactgggtgagggtcattcttgtatgttccagagtccaaaggcccaagatccaagaactttaatgttggaaaacagaaggtggatgatccagggcaagaagagagtaacttgctctttctctgcctttttgttctatcttggctctcaaagcattggatgttggcccctaacactgatgaggccagatctcctttacattgtctacagactcaactgctaatatcttccataaacattctcacagacatatcctgtactaaggttttcccaactatttgggtagcccttaatgcaggcaagtcgacacaaaacattatacgtcacaactattaataatcttgtggctaggccaagcgcggtggctcatgcctgtaatcccagcactttaggaggccaaggcaggtggctcatgaggtcaagagatcaagaccagcctggccaacatggtgaagccctgtctctactaaaaatacaaaaattagctgggtgtggtggcgtgcgcctgtagtcccagctacttgggaggctgaggcaggagaagcgcttgaacccaggaggtggaggttgcagtgagccgagatcacaccactgcactcctgcctggtgacagagtgagactccatctcagtagagagaaaaaaaaaaagaatattgaacataattaattgaactgaacatagacttactttgctttttttagtgcagtcatatataagtctataagtacatttggcttggctctggaaatgtttaccctgaagacacatagagcagatagctcttcagttgctgaatttaagtcctgtctgaaaaggaaagggagaaggtgtggctccagcatgatttcatatagaaaggtaagtg

SEQ ID NO: 1561432 - DNA, 4001 bp, Homo sapiens
agcctgggtgacagagtgagactccgtcccctcccccccccaaaaagagaaagaaatgttaggttttatttttgacacatcaagtgacatttagtatctacctgagatacaagtagtgtcttcagagatgacaatgtctacagtgctttctttcttttttttttttttttttttttttgagataggatcttactgtttcccagactggagtgcaggggtgtgatatccacccactgcaacctctgcctcccaggctcaagtgatcctcttaagcctcccgagtagctgggactacaggctcacaccactatgcccagctaatttttgtatgttttgtagagatagagtctcaccacattgtccaagcttgtctcaaaggcctaagctcaagtgatcctcccacctcagcctccaaaaatgctgggattacaggcatgagctaccacatccgacctatagtggtttttaaaaatggtcaaaatctgggccgggcgcagtggctcacacctgtaatcccagcactttgggaggccgaggcaggtggatcatgaggtaaggagttcgagaccagactggctaacatggtgaaaccccatctctactaaatacaaaaaatgagctgggcatggaggtgtgcacctgtaatcccagctactcaggaggctgaggcaggagaatggcttgaagccaggaggcagaggttgcagtgagccgagattgcatcattgcactccagcctgggtgacagggcgagaccctgtctcaaaaaaaataaataaataaataaaataaataaaaaatggtgaaaatctgaaaactgcgatgataacaacagcaatggctgaatagaacacttcccatgtgataggcactattctcaatgatttacatgaactaactggtacagcaacaaaagccaatgaaagaataatctgctcctatcttactaaaaagacaactctttcacatacacgctagcttgccccaggtgtgagaactgaaacagcagagtaagcagcagatcacaggtgtctgagcatgagaatcaaacctaaagaatcagacagttaagtaacagatcagcatcaaaagtaaattgacagttacctaattcagtaaatttaaaacaacttcaaggattaaaaacatggaattgcctaatagttcattatatatgcatatatataatcgatatccccataatacattactataatgttcttatagccattgcctcattgcctcttatagccactatcaggtatgatgcctcatatcatcatacatgataatgtagaaaaatttgaacatcctgataaatagatgtaatttcaactgataaaaatatatatatatataatgatgacatgctatttataaaaactataggtttgctcatctgtgcactcatgcaaacacatcacatgtacacacttacacatatatatactaacactcatatacactagtacacatatacatttatatggccgagatcacaaaaccacactccagcctgggcaacagtgcgagactctgtctcaaaaaaaaaaaaaaaggaattccacatgcagcttctctagtcttagtccacagaacactcacagtgcatccagatgtggcccctgaacaatccctgctgcccaacagcactgacaccacaaggcccacaccccatctccatccgtgtctgggtgtgagcacttcccaggaccatgcccagtggaacctcttcccaagttcatgtcattgggtcatagggaactggaatcttaagtggaagtgaaagggactggaagaagccatgggtaagtgcaatgaaatgagtcaggcaggatgcttcagagtcagagattagcaactccaatgcctggcatttcaggaagaaacagagacagaacaatccactgagaacattaccttacctgagtaagggccattcctgacttcctttctttcctcttccgagttgcttccttgcataatatgtctctttgaaagtgaatcctagtatcaaaaataatgctgtttagggcttagaatcaacacacccacttcctgtgccacagccacacaaaaagggaagacttcaccttctggaaggatggtcctctgctgcctactgttgatctcccacaggaaaatcaacaagtgagttttttactcccttcctcaaaactctctcctgtctcatggtgagcgacacacacactgcagcagtgcagagctgggcttgactaagctccccttaaaagcacagacttggccgggtgcggtggctcccacctataatcctagcactttgggaggccgaggtgggcagatcatgaggtcaggagtttgagaccagcctggccaacataatgaaaccctcgtctctactaaggatacaaaaaattagctgggcgtggtgacacgggcctgtaatcccagctactcaggaagctgaggcaggagaatcccttgaacttgggaggcagaggttgcagtgagccgagatcgcaccattgcactccagcctgggtgacagggtgaaactccatcttaaaaaagaaaaagaaaaaaaaaaggccatgtgtggtggttcacgcctgtaatcccagcactttgagaggccaaggcaggtcgatcacgaggtcaggagttcaagatcagcctggccaagatggtgaaaccccgtctctcctaaaaatacaaaatttagctgggtaatggcaggcacctataatcccagctcttaggaggctgaggcaggagaattgcttgaacccaggagacagaggttgcagtgagccaagattttaacactgcactccagcctgggtgacagagtgcgactctatctcaaaaaaaaacaaaaaaaaagcacagacctcaccctgaccaaagctcatgcagagcacaggcccctcagccctctgtggatcacagtgctcaattctagatatagactatagtagaatccttttatcgatgtgcactatgttccaagagccccaatggatgcctgaaacctccatcagtactaaaccctattaattccccttaaagactccatgttacagcttctcactggcatatccaaattgtcagcatcaaggccgggcgcagtggctcacgcctgtaatcccagcactttgggaggccgaggcaggtggatcacctgaggtcaggagttcaagaccagcctggccaacatggtcaaaccctgtctgtactaaaaatataaaaactagccggccgtggtggtggacacctgtaatcccagctactcgggagactgaggcaggagaattgcttgaacccaggagacagaggttgcagtcagccaacacagtgccactgcactccagccttggcgtcagagtgagactctgtctcaaaaaaacccaaaaaaaaaattgtcagcatcaatcaatactcatgtgcctggagggcattgttaagggaaaaaaaaaagggttacatgaaaaaaaagcactgagataccataaaagtggatctcatccaaaagactattggccaagtacggtggctcatgcctgtaatcccagcactttgaaaggatgaggcgggcagatcacctgaggtcaggagttcgagaccagcctggccaacatggtgaaaccccatctctactaaaaatacaaaattagagaggcatggtggcgtatgcctgtaatcccagctactcgggaggcccaggcgggagaatcgcttgaatccgggaggcggagtttgcagtgagccgagatcacgccattgcactccagcctgggcaacaagagcaaaactcagtctcaggaaaaaaaaaaaaaaaaagactattaagtgactaacgagcagatacagtctaaagtcagcccttggtatctctggggtacacatcaatggattcaatcaactagactgaataattacaaaaaatgaaaaaaaaatagcaaagtgccaggattacaggcgtgaggcaccgcgcccggcctagaagcctccaagcggtt

SEQ ID NO: 1561433 - DNA, 4001 bp, Homo sapiens
attagtgcaatggcagtaaacaactaaggcactattaagctgtgggtgattaaatagtattactttatattttttacggtgctagactaaaagatggagatttaagatatatatatttccattaatattaatataaaatataaataacaggtgtcttccacttcttcttaaggtgcaatttatacccagcacttcaacctatagagaactacttttcttattgaaaaaaaaactctttctttatacactccagggcaatatttcttatcttcatgcacccggatatttaagcagaaatattatttaattggagttacggactcaggcgaaataatgcccatacctatatcaccattaaaaaataataataataaagcttccatcccattgaaatacgctctatcgtttctatctttgcaaagagcgaatcgggcattatgtggtgaattgactgcaggcccggaaaacaggcgggcggcgggtgggctgcggccctggggctggggccgggccgcgtgcaccttgctgaggcccaccttggccccggctcccactgcagctcaggccgctcctcctccgtgtgtgtagatcatcctggaattctggcacatctttcctcggcatctgattaagttaacaatgtgctgctatttgcatgcagatttgccggggctttctctccagctgctcccagagacttggtctttctctgcgttgtgatagcacagcagtccctaaatgcaatctttgtcagacccaggtgtgctctcattgaggacgccttcgttccaagcaatttttctttctgtagcatttataaggctctattatagtatagccacatctggaggaaaattctcctattaattatatacttttaccactaggaagacacattctaaaagataccaacatttttgttgttgttgttcttatttctttgacaggctgcattttattttattttgttttgtttttccaggcatttcaatatttaaagagccattaaccaaggggtggggggtgtgaatttctaggaaaaaaaaaagaacaacagaactaaaatctcagtgtcagccctgccttacctcacagggacaagtcaggggaaaggtgccaactgagaactctcagaagacctccaggctggacaagggattcaggatgagggcctggccagtggggaagagttccgttctactggagtttaaaaaaaggtcggggggaagaaaagcacaagtgctattaacttttaacctagtcttctcccaggtggacattcaagcatgtcaccaaatcgccagacaatttgatttctctaacgtcaaaaagcagaacccaattggatcagcatggtgatcccgatgcggagttttctttgtgtggtatggtaatttttcaattaggttggagacagattaaaagcaaaatttggagctcagaattcatgctcatctttcagaaagagacaagaatctttgcccagggagtctgaaagttactttagaagcaggtgggttgttttgtttggttggttggtgtttttgctttgttttcaaatcttttggtacagtcagattagatggggggggcgggtgatggagagaattaatgtaggaattataggaaaagttttaaccatcggatggtccctttctaaattataataaatttaaagggctataattttttattcaaaaattattttgcaaaagggtgtgtacttcgtgaacaagaatccatgcatgagtatgtgcgtgtctgcatgtgggtgggtgcatgtgtgggtgttctatgctggggagactgcacgcacacacacttgcacacactcacacactcacacacaaagaaagctgaattaccttgagaacagggaaaatggaaatggaaccattttcacttttcaagacaaacttcatcaggtaaaaatccaagcaaggttttggtcacttgagtccagatcctatgatgacaacgtggaaactctcttctccagactcacctcccctgttccaaagctggcctcagcaaaatcccagggccgtgtcccggcagtaccaggggcggctcccagcaggccacgtgtgagcagcaaaatcacacaagagaggcctttctgagtcctgcctctgaaggctggagtcactgctcccagctactaactgcctctgctcactggtgctaacccctttccctcaaaatgaccaattgttttcactctctctgtacagaggccagaaaggccctgcaattagggcccatctttggaccatgcctcagcctcagttttgtcagctctgaaatgggaagagccaatcccatcctaagtacatgcatgaaagactgtcaacccagttctaaatagaaatgataaataagggtaaattttactctgattcttttttcttaggtctcatttcctccaagccttggtgctgaaattaactgcccttcttttaccttacgaaaacaagcagcggattctagtttcatgacacttaaggaagaatctatgcaaaaaggtggcagatattaaatgcatagattcttcaatgtatatatattctctctttatatatatacacacacacatatatatgcatatatatatatatattctctatatatgcatttaaacatataatgcaaaaagaaataatttattttctaatttgactcttttggggccgctgccttttccatctcctgctggctggcaatgccccctcctttcccctacagatatccagataccctcctgcaaaaatacagcagggaggcagatgcagtgatactagattacatcactggatagcatgtggcattgaggggagagaaaaaaaaaacaaaaaaaaaaaaacaagaaaagacaaatgacattttgctgctatggtgtgctattttagtggtgatggcttgacttttggcccaaacgcatatgccaatggcaaggctaactccagggactcacaaaaaagaatgtgtgttcacagctgtactgtacaccaatacagattacatgttttcagtgttgcggccacaacagaatgctaattaacatactggagtgatgagagcggctgcaaaggccttattgttccattatttcatgaagcccagctgcctttgtttatgtcacttatcctctcgtgccacaggtttttactccaaaaatactatcccaatacagcgttaatatttaaaaaacaaagaggtggcagattgtcatttttgtgtcagtctcaaactgcagaactgttaagctgttctggttcggtatttagaaataatttaacagccatattcagacactgcctgcattctaacataatggctgaatacttgaaccaagcaaatgcataactatcctgacatcacttatgagatttagattggtcagttaatggaagtctttaccacaatcaataccataacagcttcttgaaatgaacgtgattttttacacggagtgctgcaaacaataactacagaaacatactacctttgtacccagcacaaagaagctaaaatgcaaaattaagaagcaattacgtttttgcaaactaatattacagttgattattaaaaacaaacacttccaaaaatacgtacttatcatttaataattggagggcattaatatcccccgtacctgattaatcatttttttacactttttaatagctgtttcacctactggctacattatcagcttgctgttaagtattgatattgatgattgatgtaataatgattaaataaaaagccatatttagagcttgatttttataacattctttgtcataatcttcattcaagagaacactgtctgctgtttaaattagtttttttcccctctgttttgcctggattgtgcataaaagtgacattctataaaatacaggtttcctcaaatagtgttccgccagcaatccatacattctacagtaatttgcaatcatggtcaggggaggttgttggctcaagttcaaaatgtt

SEQ ID NO: 1561434 - DNA, 4001 bp, Homo sapiens
cacgggaacattgaatagactgataataacatgttaaactggagtaaaatagatgccctcacgccatgttatacactggtgccaccttaaagagggtaaattagaaatttatattagcagaatttaataatatgagccagatgtttcagtaatcccactcctatgaccctgtctaaggaaaataattatatatgttcactaggatatatgcagacaggtgcagatagactaattttaaaatggaaaaagctagatacaaacataaattagacttcaataaagaacaggttaaataaattctagtgtatccatataatagaaaataaagtagccatcagaaataatatagattgggagtctgcaaacttttcctgcaaagaaccacataataaatatttcaggctttgtgggccagctggaggatcccttgaacccaggagttcgagactgcagtgagctataactgcaccactgcactccagcctgggtgagacagtgagagcctgtctctttaaaacaaacaaatacagtatctgcaaagtgcaataaaatgatgcacaataaaatgaggtatgcctacattatcattaatgttgacgcgaatatcttcaaacaagagggaagaaagtgcatttgtctataaaagggcaacacaacagatcctcgaggtgatggaaatgatctatcttgactatcaatgtcaacatcctggttgtcatattatactacagtcctgcaagatgttgtcattggagaagactaagttgaagataacacacaatgtctctattatttcttacaacctcatatgaatctacaatcatctcaaatttaaaaaaaaatttaaggaagttttaagaatttcattttcaaatatttgctagatgaattaagtttttacccccttcaaatcttgaaggcaaattaatgctccaggttgtactgttcaataggaagactattagccatatatagctgtttacatttagatttattaaaattgaacacaatttaaaaaattcgttcctcagtcaaaccagccacatttcaatttctcaatagccatatgtagctagtggctactatattggagagcacagatataaaaaatggaactcagttttgcagaaattcctattaaaaagcattgttccaaagcgttacacgactgacaccctcactttacaggtgagaaaactgaagccaggagatatcactataatacagcgctgcacacaatcgtgctcattctcaccatattatgctcacacacttctttccccacattcactgccacaggcgaactctcaatgaatcattcactacatttatataatttcatgggaatctattttaaattcatgaccatgcaaagaaaaatcaatttcttacaggttataagatactcagtcgcaggctgaatctgattaaacagacatcagtcaccctcaaagctataatcaaaccattcccaagacccttccgcacacaatactaaatgcgccactaatagcctcaagcataatctgacgcacatcacacaggcatggccactacccactctgcacccacagaggacactcggacacgcgcgcgcacagacccacacacacacgcacacacacacacatggccgcaaagaatgcgtcacacttccgaaccccgttgagcagcaacccggtatcgtggccactgcgtcacggccagagctgtcagagagaaatccagaccttacctgacagccttttgcagctcttctagcccgggatgacattcccctgaaggcaccacggcaagactcaacctctttgtgtgagattctctggaatttctggggcgttacttgagtataatgaaatagggtaggctcggaccatagtagggtaagtcccacagttcgagcaagggagcctcagggatcgttctgttctggagcgccggacccgatcttagctgctgggcctgcgcagacacgatccggccggtttccagttgtagactacatttcccgaaggcccccgcgtcgctgcgcaacgtcgtacacttacgctgttatgtcttgacgcacggagcttgtctgcgccggccaggtgagtgggcggcctcaccgggaaccgctcgcagcttttgggttgcttcatcgaaaaagtagttcttgtatggtgctgggaataccggtgtcctggctggggctcggtgctgacaggaacgggacggtgctctggctaattacttatggaagtcggccttgcgcttgcggaggggtgtcggcaccgtcactttggttctggcagtggcgggggtgtggtgctgctagttgtgttcctccgcaccgaatttatgagtgtgcccctggagcccctgccgcggacaaaatcggcaccataactttgggatagggaggctagaaggaggcgggtgttactagtagtgttcctccgccctggacgtgtgcgtgtgcgcttgtgcggccgcggggtgggctcacctgccgcctgttaatgctcctagcgcttggcccctcccgggccgcagtactcctcgtgtgacacggacatcattaagccagctgagaatcgtgcggttacagctgctgcagtttctttgcagagtaagaggctctttttgaagtttccctgatggtgaggctttacccctggaagtgtcttaggaagaagaccactgttaaagatgtcctattctagcttgacagccctgtggggaagactaatccctttctagaggttggtgttatcctaaattgtttcgtctgctccgagagctctgatgttctatgatgcttatttcttttctcggttctgcgttttccaagagaggcacccagaggaaaagaatatcgcacttctgaaagtcttgtgtgaagttcctgttttctttctaacctcaaatttcttcctttccgaaacgttttctacctccagcaacatcttcctaaggaagaaccagccatgctagtgactggtccttaggcaccccataaatgatgctgcggggatgggatcatcagtttagctctactccccagccacactacacctctcctttccacccaatgatacagcagtcctttctggtctaagatttttttgtttgtttgtttgctttttgagacggattctcgctgtgtcgccctggctggagtgcggtggtgcggtctcggctcactgcaagctccgccttccgggttcacgccattctcctgcctaagcctcccgagtagctgggactacaggcgcccgccaccatgcccggctaattttttgtgtttttagtagagacgaggtttcaccgtgttagccaggatggtctcgatctcctgacctcgtgatccacccgcctgggcctcccagagtgctgggattacaggcgtgagccaccgcgcctggcctggtctaaggttttgatgaaaaataactgtactttctgggggaaatttgaagagttttaaaattttaactttattgtggatgttttcaagcaggctaaagaataatacgaaccccaacatgttcaacacctagctgtaattaaaaacatttgtaaatacctttgtatcaatccttccccgttttttcctatagtatttcaaaattgtattttatcctcttataagcatatattaccaaaaaggacattatattttaaaataaccatgatgctgttataccaacataaaaaaaaaaactaacaataagtttaaaacaataaatttgtttcttatgttggtgtaacagcgtggtggttatttcataatcttgtatacccccatattcagattttcccaattatttcaaagacatatttttacaataggtgtgttcaaatctggatccagatagagtccacacattgcatttggtggccaaacctgttaaacttacttaatgcatgatagtttccctcctgtgttttgttttggtttaattggtgctgttgatttgtagaaaaactagatcatctgtcccgtagaatattctgta

SEQ ID NO: 1561435 - DNA, 4001 bp, Homo sapiens
cacctgaagtcaggagtttgagaccagcctggccaacatggtgaaaccccatctctactaaaaatacaaaaattaggcaggcgtggtggtgggcacctgtaacccagctactcaggaggctgaggcaggagaatcgcttgaacccaggaggtggaggttgcagtgagccgagatcatgccactccactccagcctaggtgacaaaggcgagactgtctccaaaaaaaaaaaaaaaaaaaaaaaaaaaaaaaaaaaaaagatgttaggttatataaaaaaagattaaaatatgaagactcggattaaaaagtcaaaagtatataccaactcaaataggttaaaagttaaaaaaaaaaaaaaaacaccatgcaaacactataccaaaatggctatgtgaacataaaacaaattgtctttttttgttcgagacagagtctcaccccgtcacccaggctggagtgcagtggtgccatcttggctcactgcaacctctacctcccgagttcaagtcattgtcctgcctcaccctcccgagtagctgggactacaggcgcacgccaccacactcggctaattttgtatttttggtagagatggggtttcaccatgttggccaagctggtctcaaactcctgactccaagtgatcccaccacctcagccttccagagtgctaggattacaggcatgacccactgcacccggccctcacaacaaattgtctttgaaacaaagaatattaccagggatttattctaaaaaggcatattttataatactatagaagtgtattgaccaagaagacaaagcaatcatacaagtacttgtgcctagtaccagaactaaacaatacattaaaaactgctagaaataaaaataaatgaactcagaatcatattttgagattttaatactgttctctcattaacttttaaaagtatatagaaaatctataaagatataagatacctgaacggtgctaatagccaacttgttgtaattgatacttatagactagtccacctaagagcagcagcagtgttttcacttatacaaagaactttagcaagcttgtttatattctgagccataaattgtcaatatattgaaaaggattgaaatcagaaaatctgttttctaaccacagtagaattaagccagaaattaatgtcaaaattaaaaaatgtttgcaaattaagcaacacacatttaagtaaactatgggacaagtaaaaaattacctatttggagtcaaaaataacagcatataaaattttgtggaatgcaactaaagcagcactttgagggaaatgtatgcttttaaatacatatcaatggtttaagttcccacttaaagaaacaggtgagactcagaaaaggaattaagcttagagctgaaatcaatgacccccaagaaagcgaaaaacaagaaaagcacacttgggaccacaagagggcgcataagagagcccgcggactacagagaaacggcgctccaccgcacgagacacattcttttcaccagacaccaccccccccacacacacagacatgcaacacttgcacagaaacacacacagagatatgcaacactcgcacagaaacacacacacccaggcagctcctgaggctgcttggttctcctgtccgccagaagcccctccccggagacagcagccccggtacacacaggcaggcggtacctacctcgcaatcccaggcgggacaacgttcaaggagacgcgctcccagcaccgtctaggcaggcctgacgcgtcggggagatccgatagggatcacgcggtgcatccttgaagctacgctggacgtttctttagcctggttctgccctgcccgactcctagggtcgggggaccaaggcgacgatcccccggagaggagggggccatagcccagcgccgacgcactgccagggagggctccagctccgccaagccgctagggcccgtccccaggcaacggtggctgtcactgtgacgcgagccccggctcagccgtcgcgcctggtgacgcgcgcctggcgcatgcgcattcgcgtgcccggctggcgctgccgcaacgtcagggctctcagggcccataggaaaacggtggaggccgtgctggctgcggcccggggaagaaggctgcgtgagaccagcagcgcaggaccctgacagtcctgacctcagtgcctccttcagcccacttcgtgtacgggtctgggtggaggaggaggcgcttcagaccttgaggtgggcactcgggactgctctctgatttgattctagattggagggtgtgggcaggaatcaggtcccatggggctggggatccaatctggtgaggagttgaggggtcgctggggtaggaaaacatacctgagaccccagtggagggtgtgagcaggacattccctcgccccatgagctgactggccccctttcgacctgggcctcccagggccctgtcctggtctccaagaccagggccttcggcttctcagcattgctgtccagaaaaggcgggaacaaggacaaagtcaagcccgatgtgaagcagaggtggcaacacctaaaactggcatcccatgggggcagaaaatgtggagagagtgtctcagaggccttctggggtgaatccaagcccaaaagggatatccaggcatgctggcgagggccactgaggatacccccaagaaagcgaagcacaagcaaagcacacctgaaaccataggagggcctgtgccggagtccaagcctcctccagggattcctgccagaggagccaagaggatcctgcaaagtgatccagcacccacaccgggatcacaacccaccaccgggtctacacccagctaacccccagtcccttttgctccgtgaaatccctggcaacgaaaaggtgcagtgctgagaggcagtcccagccaggaacagagcaatgggagacccctcaacaatgagaaaacaccagcagatgagatgaaacatagccttcattagaaggcaaaggccagctacggctggctacctctcattctatgtgaatcatgcagccatctgatgcaatggggagaccaagagtttccttattggggaaagctacgggcacccacggttccaagagcatcacagctacccagtcattaagaaatgtgagtgttgagaaggaaacactcatcacctacgtccccgccaaggtggtcctggacgaactgggaaacatttgctgtgaaggacgttctggaggactgtgagccagaccaaggaaaacctgggccgacgagaatcagggaaggcaagaaaagagggagaacagagtagaggccgcagcccaggcaggatcaatccatcccactcccatgtgcctcggggaaccagggtccaacaggggacctggccagaaaggcgacagtcttcggtccaaaggttctccgaacactcgtgtcttctatcgccagcacagcgccatggtgtggacaggttgtacagtgaagaggaaaaggggatggcgttggaaacagtttctttgacatctgtctgcacctgttctgcaggtgaaggtgcgagacctcctccacacctcagcggattgtatcttcacccccatctgaccttttttctgcacacatcctttaatccagaatgaaatctgaagaggatgaaggagtgcccgcctcaggtcctgaagctgcgactccgccagccaccgaattagaagtgggctcaagggggtactgaggacaggacagctagggtccgtccagccttgggtgtgccgcaggaccatgggcccctggaggaatttgttcttggttgtcgtgtgctggtcttctttctggaagagtgggcggcttgggaggggaggtgatttggacgtttgcgggtcgcagccagccccccacttcaccgaggctttaggaaccaagagcgaaacaaagaacgcttgccccgcaacccaagcccggccaaagagacgggcgcatcagagcgtaggcga

SEQ ID NO: 1561436 - DNA, 4001 bp, Homo sapiens
taatgctccgtctgggtaaactgactttgaggaaaatattcaaagaactaatccaaaagaaaactcaacatgtacaaagttgttcacagaaacactttaacagtccaaacagcaagaatatggtctaacagtccaatggaatagctatttcagtgaccctcagtatgaaggtctaccttcaatatgaaagcaaatacaccaactcttacaacttaaatggaattatatacttaatattatctctgcaagactatgtatgtctgactttacccacgtttaaaaatttacaagtgaggtcaggtgtggtggttcacacctgtaatcccaagcactttggaaggccaaggtaggcagattgcttgagctcagttcgagaccagactgggaaacatagtgaaaccccttcactactaaaaatacaaaagttagctgggtgtggtggcacacacttgtaatcccagctactcaggaggctgaggcgggagaatcacttgaacctgggaggcagaggttgcaatgagccgagattgtgccactgcactccagcctgggcgacagagcgagactccgtctcaaaaaaaaagaaaacaaaacaaacaaaaaaaccacgaatatctcgccagtgctttaaggtctatgaagtgtgtttacaatagttccttcttttgttttactctggggggaagcagagaggatattattgtccacctgctttatggataaagacactggggtctaagaaggcctgacaaccaaagatcagaagggaccggaccccagttcattctggaaatgtgacatcagcctctaaggtgtggtaatgggaaggaaagtcttcagtaaatgctaacatctgcccacacaccacacaaaagataaggatatccccagacacctaagtttctgaacattattccctagaatgagtgttctgtttcctttactaagaattgggggccgagtgtggtggctcacgcctgcaatcccaccactttgggaggcggaggtgggaggatcacttgaggtcaggagttcgagaccagcctggccaatatgatgaaaccccatctctactaaaaatacaaaaattagccgggcatggtggcaggcgcctgtaatcccagctactggggaggctgaggcaggagaattgcttgaacccggaagccagaggttgcagtgagccaagaatgcaccactgtactctgcctaaaaaaaaaaaaaaagaattggccgggtgcggtggctcatgcctgtaatcccagcactttgggaggctgaggcgggcggatcatgaggtcaggagatcaagaccatcctggctaatgcagtgaaactccgtttctactaaaaatacaaaaaaattagccgggcgtggtggcgggcgcctgtagtcccagctactccggaggctgaggcaggagaatggtgtgaacccaggaggcggagcttgcagtgagctgagatcgcgccactgcactccagcctgggcaacagagcaagactccatctcaaaaaaaaaaaaaaaaagaattggggaatgattcccaagtaggaaaaaaggtgactgttccctaagtcacctgtaggagggaaaaattttcttaaccaatccatgcagaatcagtccctagctggccacagaaactgtcgaacatcctgcagggcccttctacccaggtgacagcctcaccttgtaaggatgcctgagactccgaatctgcgtactcctccagcagcttcacagaatcactgtccttcccggagtacagggacaaggtgtctaagttgtcctccagcacctcgctggacatgtcaggcgttgggaggctggggtccgggtccagaccactcaggccagcataaagaaagcctcgcgtgttgggacccaaatcccggttgagggtgtcgctgcagttgagcccttggctctctgaaaatgaagggaggtgcatttctgatgggagggcaccctcgtctccaaggctgtactggtccatggctctccactgccaggtcttggccaaaagctactctccagataagcaaaaccatgtaaggagacagggaggagagagcccttgatggcaactaattcctgaaaatgaagcaagaagaatgaaagttattaggtggcaaaacagcattgtgggcagagcacggacttgcaatgcaagcagacctcgatctgggtctgttctctgcctcataacagccatgtggctttgggcaagtcacttaagctccacgagccccaggtgcctcatctgtaaactgggcataagagtacttccttcacaaggttgttgtaacaaataaaagtacttccagcaacatggtggactgaactgacctcttgctccagctataaacatatacatgtatgacaaaagataattttttaacacatagcctaggtcaaaagacaggaaaaatcccaagtgccagcagcaacaagaaaactcaatgctggaggtgtaagctcacgtaggccccaggggaaaatcagaatcagatacagggcctagagccatttgtccaatatggtggccactagctccatgtggctatgaagtacttgattttttcttttaattttttacagatatcaaatcgaaaatggataattttttttaagatatggggtctcaccatgttgcccaggctggtctcgaactcctgggctcaagcgatcctcccaccttggcttcccaaagtgctgggattacaggtgtgaaccagcgcacatggccctgtgaagcacttgaaatgtggctggcttgaactgagacaggctgtgagtgtaaaatacaacctggatttggaaaactttgtacccaaaaaagtcaatttaatacgtttctatatagattaaatgtggaatgataattttttttcttttcctttttttttttttttgagatggagtctcattctgtcgcccaggctggagtgcagtggcgggatctcggctcactgcaacctctgcctcccaggttcaagtgattctactgcctgagcatcccaagtagctgggactacaggtgcacgccaccacacctggctaatttttgtatttttagtagagatagggtttcaccatgtttcccaggctgatctcgaactcctgacctcagatgatccacctgccttggcctcccaaagtgctgggattacaggcgtgagccactgagtccagcctggaatggtaatattttccatataatgggctaaatgcaacatgttattaaaattaacttcatctgcttatctttttaatgtggctcctaggaaatttagattatatatggctcgtattctgtattatcaaatgctgccctgccgtctgggacctgggatgatagcagacacgtgggtgagggaaacagggccttgagttcccaggaaacggaggcctggggccctggaagagctgaaccatccacaggaaaactaaataaatgaaaagaaaagcttcacacaagcctagaaaagtacccccaagaaccagaaaaaaatagccagtgagagatgacaaagctgagcattctacaagtctacaaaagaatgacaattaccctgatggcaaacttctcaacagaaacaagcctcgaagataagaataagaatatcatcagtggactaaggaaaagtcagccagcacagagctcaacatacaggcatgagagagggagggaggaggctgggcgccagggctcacatctgtaaccccaacactttgggaggcagaggagggaggattgcttgaggccaagagtttgagaccagcctgggcaagacagcaagactggcttctacaaaaaattaaaatatcagccaggtgtggtggcgtctatctgtagtcccagctattcagaaggctgaggcaggaggatcacttcagcctgggagcttatagacttttacacacaaggcctaagaatctaccttacagaccctggtccaaaaaatgactaaaagttttgaatcaattgggaaaa

SEQ ID NO: 1561437 - DNA, 4001 bp, Homo sapiens
tttttttttttttttgagacagggtctcaatattttgcccaggttgggcttgaactcatgatcctcctgccttagcctcccaagctggatatacagacacatgccactgtgctggggttagccacttgaaatattttcatggacctgggcagagcagcatagtcataatcacctacctcacagaagagtcacctgaggtggtggcacctgcctcaaaagtggcagggcctggacctgcatctgctgcctcggacacttctgggcctcacagatgcccattctcataggaagaatccacaacgagctatcactaccttttcctgtttgagtcctaccaacaagtatccctgaggtcaggatacttcaggagcaaggaacaagagtcacagaggacacagcaggttgtagccatgagaacatgggcccctgactggctatgtctgtcctggctaaggaggaaggcacatctagcaaaagaccacaaaatcttgtgtcccaagacatgtgtcagctggtataggagaaaaccactcaggaaaccactgtggaagccacacgggtcccctgcggactccttaaacaaccaataaaccatttttttttagtccacacagttccaccagcatgaaatgccatgactcctcatgtccaagaccacctgctagaaggaagcctgctcaacttgcaaagtttactttaggtgtcacccccaggcctccctaaccattgcgggcaaagaagagggtaaaaacacaggctgtgatggtagacacaccagttgttagtttctgatacttaagagctacagtgatgtaaggcaggtaattgaacctatgtgagcctccagctgctcttgtgtaaaacagtgaggacaagagaacctaattctaaggagttcaggattaaaggagctgagggttaaataatgcctgccaatcagcccacagcaaggactctttatgatcagctgtcactctttgcaattatttcgtttctctttgttcacataacatcctagaccaactcaaacggcaagcttctttaatatcgtcagattctctatacaaaaatgccacacattgccaaaaatgggcaagtgcgtaaggcgccactttagccggaattgccaagaaagccacctccaaataggtgacatctggacagaggccagaaagatatgagagggaggccctgcgaagttataggggcagtgttcaaggcaaagggaagtgcaaagagaaagcctggaaaaaggaagaagactgcacggtcaggttggtggctctgaagagcaaaggacaagggaaaaatggagagacaaggtcaggggtggttggccaggtggatggggtaggggctggcaggcaacagaggaggttggatttaagggaagtgtgatgagatccatgaaggaagcatcattcatccttctaccaaggactgagcacctgtcggaggccaacactattgcaggactgcggataaaggaaatgacaagctacggccacttctcttaaataaacgacggcgacaaagaaacatcctgtggctgtcttggcttctgcctgcccacgaggcctccagaagtagcagagcagcagcaaggccaaaacctcgtccactcacctgcgccgaggctgccatcctgagaccctgcagccctagcggggcccgggaatgccgcggctcagccgacccccagcccttctctgtcctgggcggggcgacctcggctgactttcgcactcggagcctcagtttccccagagaaaaatgcgcacaaagcgggcgcagcgtcggggctgaggagacggagggcggctgcggaggcctaggcctcggcaggcgccggtggaacaccccgttagggaagaagcggggcgtcaggctcccgccaagatgcggagaaggcgcgtaacagcctcattaccctcccctgctcaggccgctggacgcgcctacccagcggtccaggccccacactgttccagggccaatcctgctcacggagatgacgtcacgcgacgaagcggaagtcccacctccgccgccctggcccgcagaaatcgcccgtgtcctggcccgtcattggcctagagtccgcggccgacgcaaggggtggtgccttctgagtaaggcagtttttccctcacatctaccgggtgtgggaactcaccaagcgcagccgactccatttaagtgcgcacaaggacccccgcgtcgtcttagggccgccgctttactatgggcacaagtcggagggtcgaaaggtcctttctagcttaggaaaattgaggtcaggaggcggggatattcgccccgattgagatcatgggctgggcccagagcttctggctcacttcccttattttagggaggtagctcatatatgtaatctcagtgctttgggatgccaacacaaaataattgctgaggtcaggagtttgagaccaccctgggcaatatagtaagatgttatatctaccaaaaaaaaaaaaaagagcaaggcatgatggtgtacacctgtagtcctagacactgggaggctgaagcaagaggattgcttgagcccaggaatttgaggttataatgagatatgatgagagaaaacacacacacataaacacactgagatgccatcttatactggtcagagtggctattattaaaaagtaaaaaaccaacagatgttggtatggatgcaaggaaaagggaacgcttatatgctattggtgggaatgtaaattagtacaacctctatggaaaacagtatggagatttatcaaagaactgaaaatagaactgccatttgatctggcaattccactattgggtatttacttaaaggaaaataaaccactatatcaaaaagatgcctgtacttacatgcttactgtagcactattcacagtagcaaagtcatagaatcaacctaagtgtccatcgacagatgattggataaagaaaatgcgatatatatatgtatatatatgtatgtatatgtatatatgtatatatatgtatgtatatgtatatatgtatgtatatgtatatatatgtatatatgtatgtatatgtatatatatgtatatatgtatgtatatgtatatatatgtgtatatatgtatgtatatgtatatatatgtatatatatgtatgtatatgtatatatatgtatgtatatgtatatatatgtatatatatgtatgtatatgtatatatatgtatatatatgtatgtatatgtatatatgtatatatgtatgtatatgtatatatatgtatatatatgtatgtatatgtatatatgtgtatatatatatacactccatggaatactactcagtcattaaaaaaaatcatggcttttgcagcaatatggctggaactggggggccattctcttaagtgaaataattcagaaacaaagtcaaatactgcatgttatcacttataagtggtagctaaatgatgtatacatatggaaatagtggaataatagacactggagattcaaaaaggtgggaggcattgccggggacccctcacaccatggtgcttcactcacctacaccacagccatgccaccccattggcacacacttgcaggtagcccccctctactgcccaagtggtgcacacttgcctgtggcctccccatcccccagccacagtgcactctctgcagtccccacaatgctctgctggagcacttttgccagcagactgagaacacctcagcccctctagcacagcaggtgcttcaccccaagcagccagagaacaaagccaagggcttaatcccctctacccaggtttacagcatgcagctcaggagtgctcagctgagccttggcctgtgaaagcacccataattgaaaccatgaaactaaacccaacttataccacagtaaaactcccaagggcatcaaataatataaaagcagaaagccccatccaaaggagagcaacttcaaagattcaaggaacatcagcccacac

SEQ ID NO: 1561438 - DNA, 4001 bp, Homo sapiens
gctctgctctctcactcccaaacacacacacaaacacaaatgtagaccacatccaagaggtctgcccaatatcttatgtgttactatcttgtcctgatgctcctggccttccctggggaatctctcactgcctgtgtccatctttgctctctaaccctgtccttccttgtctggaggcatccaagggcaacggctgagaacactcactttgcaacctgctgtcaaagtactggctccattacctgccactgtaggactctgaacgggtctctttaacctctccaggcctcagtttcctcatccgtagacatctggaaaaacagcaagacctgccttgtgaggatgctaaaagaattaattgagttgcatttacagagcttaacattgtgttaacctgcaaaaggggcacaacacatgtattcatagtgattatacttggacataaaattccccatctgttcctcatactggacctgtatggtggctgatctggcagaagtccctctggctgcagggctggggagggagttgctttctctttccttttccagttttctccttccctgcttgtggggtgacgtttccaatctgctccaggttacgtgtccagcccaaacctcctgggcttcctgccactgccattccctcctccacattcagccatgtcacccacatgctcctcaactcccatgcagagactgaccaggcataccacatcttccttgcactgtgacttctaccctggctccacgctggaaacagaaacacagtcttcctccactccttcctgtcttttggcatccctccttacacggagtcatttccacaatcagatgtttccctactcccttagactcttgaaatccaaccccatgccttcctcattagcactgccttgtacggtccccatcaaatatcacccaacacaaatggaaccccgatccctaacttacaggcgttacatacacatcccatcctgttcacctctgtagtctctctatggggtgcaccagcatcgcttaaccagtgcaggcccccaacaccccagttacccctgccctgcgtggactggccttaatcttctgttcacttggaaaatacacatgttctctgcaaggttcaagcttcacgtaccattggaagaaaatgtgtccacgtctggagctgggatgacctctggggtccaataggcgtcacctgcctggtgccgctgtgccaggaggctcttggctgccacctgtggataagccgcagaagatgagttgagggaggaaaaaggagccgggagaggcccgctgggtcggcagccccagagctccagacgccagcctgaatcccccgcccctgcagccctcgacccaggcaccctctgtcgggagggcccacccagtcccacccagtcccacccagtcccacccagtcccacccagttccacccctgcccgtacctgcgaggtactataagttccctcccagctctgcagcaggagagcctcccgacaagctcagacccagccgggcgctcctgcaggggaaacctgactggaccggccttccccgtccctgaggccggagagatcccgatcccatcaggcccctgcccttgctcggcctcgccgcatgagggacccccgcaggccctgctcgtttctccggcacgcccagatcacttggggcggctctggcctggtcctgcgctccggccgcacccggctaacagtgaaacctccgagccaaccttgaggccgccagactcacctgcacgcaccggccaatggcggtgcttccggtggccggcggacgtgcccgcgctccgcgcaacaaacaactcccagaaggccgcgcgccggtagccgttgctcccacaggcatagtcattgccggcgggagcatggggccccgcggcggcgggatgagctttttcctgtgttcgcgactagcattgtggcttagggagttgcttcccgcggctctgctccttgcagcgcctgtcccctcccccttaaacgggccacgctggttctcatccagcaaccgaagccgagactgtggaggcggcggtcggcgtccagggcgggactagcgcctatggggctcggcgctgtcatctcgggtgccttcccggcgccttgccctgctggggagagagaccaagactgagccatgagaacagtccaaggccgttaaccgggagctcaggggcaagggcgcccgccaacatctgcgcctgtggcagggactcagggacagcctgggcgtggggacgcgtcctagtgatagaaacaaagccccgggagtgccctgcttggagcattccgagtggaaggtggaagcacgctaactggaggcgattcgtcctaggtgatcgctcagtcgagcctatttggctttctgtggtagctcctaagtgggacagggaaaaaaatagggaggctggcagtgaccaagttctgttttgtacctattgctgcagaagttgtgggacagagttctgttattataaatggtctgatgttcagtctcagtgcgttgtggggctcaatgtctgagacccaccaccgcctgacccgtcctggctcttcaatgagggagaccacaggaaactttcctacgaaggccaggtaggcgggaaccactgtggctcaggcaccctcagctcctggactgtgcttttgtgtctggggtgcatctgtgactagccttccttggcttgactgttttgtagctgaccttgtcgatagctttacccaacagtcatcatctttttacttgcttattttcatacctggctagcacgaccctgcaatttttagattcttccgggaaatctagaatctaactccctaagggaggatcttgatggattctaagctaatcagaatggactcaagcttcttgctgtgtgaattaggcaaggatattctggccaaggagaaataaggctgctaggggtttcctgggaaggttccctcagtctttttttttttttttttttttttttttttttgtgagacggagtctcgctctgtccaccaggctggagtgcagtggtacgatctaggcccacggcactctccgccttccgggttcacgcctttctcctgcctcagcctcccgagtagctgggactacaggcgcccgccaccacgcccggctaattttttgtaatttttcttttttagtagagacggtgtttctccctgttagccaggatggtctcgatctcctgacctcatgatccacccgcctcggcctcccaaagtgctggcattacaggcatgagccaccgctcccggccggttccctcagtcttaaaagtggacataagatagcaatgtgtcttcttttgcccctggaccgtgatgtctgtatgtgatgtgtaggacaattacaagcacactggcaccatgaggaagccaccccaggaggtaaaggcaacatgctgagaatggcacagcagaaaaatggaaagaaccagtatccatgatggaatgaatcctctttgtgccactgaatcaacattgcctatgctcacctcagggacttttcattatgagataataaatgatcttgtttgtttttattatagaaaatttcaggccaggagtggtggctcacgcctgtaatcccagcactttgggaggctgaggcaggccgatcacgaagtcaggagatcgagaccatcctggttaacatggtgaaaccccgtctctacaaaaaatacaaaaaattagccgggcgtggtggcgggagcctgtagtcccagctccttgggaggctgaggcaggagaatggccctgaacccaggaggcggagcttgcagtgagccaagatcacgccactgcactctagcctgggcaacagagggagactccgtctcaaaaaaaaaaaaagttcaagtaaataagaactttgatgttacatttctgtttactgtttccatgtctgtatcaataatggagtcgtctgaggaacaactttccctacatcagtgtttatat

SEQ ID NO: 1561439 - DNA, 4001 bp, Homo sapiens
ctttgggaggccaaggcaagtgaatcacctgaggtcaggagttccagaccagcgtggccaacgtggtgaaaccctgtctcgactaaaaatacaaaaattagccaggcatggtggcaggcgcctgtaatcccagctacctgggaggctgaggcaggagaatcacttgaacccaggaggcagaggctgcagtaagccgagttcatgccattgcactccagcctgggtgacacagcgagactccttctcaaaaaaagaaaaaaaaattgcgtattattcttcatcactatgactattactttactcatatgtactttttattcttatgactaactctgtataaaaataaatctcaactcatggattccttggaaaaaaatccctgctcatgttcacacagatttctatgcttggacttccaatcacattcccacttctaaaagccttaaaagcaggcgaccattatcacttgcttactgacactagtcaggtcatctctaatcctgtcatattttaaaactgaggtctttggagaagattggagaagatggatgatgtgattctacctaaacattaatctcaataaaacaaagttttaactttagactccaggatatgcatttctctaccattatagaaagtgagtgcagaggaatgatttgaaaaatgagaaagtcatttggaggcccgtgaagaggagggtccacctgcatggtccattgttcactggaaaggaaggcctgggataggtcactggacaattcaggaaaagcaaagcaatgtttccatttcctaaaaacaaaaacattttatgcatttatttaaagatttacttaaagatatagaccagagagttgcaatttatgtgacaaataatttagtctttttagattgaatcaaatgaacttcttcaaagggaaaaatgcaaatgaaagctacagaaagtacctggggatgtgatttttgtgactgtgagcaatgaggtgacaggctctgtggtagattgtggctgtgcttgacatagcagtgtggtaccacgccgtatgactgggtgcaggcaaggctgtgtgaggattagaatgtgtgatttccattttatgaataaaaaggaaatataaacttacctggacctgaacttttagacctgctacaacaattgttccctccttttcaggatccctgttttgatgaatagcagaatgggggaagaaaaataatcatgagacagcaggcctttcttaagagcacagaccgacctagaatatcccctccagcgccacatctgtgctgacctcacgcacataacagctgtgtgagagtgaggctgggatctgtctctgaactcacaccaggtttctagatcaaaggtatgggaatgcagtggttctgaaacatgcagctgcccacacagcggctccaactgcgcagtcttccaacctgtcgtcccaggagtctgttttagggacacttctaattcaaaagtccaatcgccaacccaggtctgtaccttcttgctgggaaccttcatcccagagctcgatatttgacttccctcttggggacactgctgtgtgcaaacaccgaggccgtgaggagggtagagggtcagtgacacacaccagagagccaggcacctgtctcagcctcacacccgcacccacacccgcccaacccggtcctgacaggcgccccgtcgcgcgcacacacacacatacaccgtctgccacattttgtcacacaatttcccttctccgctccccaagcacgcacaggcctgaggctccctgcgggcacgacacgccaggtctgggccctggagcgcctcactttgggcggcagttctatccccagtcctactcgtaagagtcccgttccgcctcacctagctcggacttctcgcccgcaagtgaataataacggttaaggtgactgaaccgttaagaacgcaatgtaaagggcccttggggtccaggcaacactgcccaaggggcttctgggaaatgtagtccacagccggaaactgatccttttgggcggaggcgcaggcgcgcgcgcatccggcgggttcgactcacttaccaggaacccacgcaggaagctgaggaggagaacagacgcctctgggccactggccgggccacttgagcgtgggaccgccgagtgtgaccctgaggccgagtgcgtgcgggactgggcgatagctccgccaggcaggattttgtttgtttcacctcttgaggtagtcccggcgtgtagtacataataggcgcttaatatgtgtattgtaaagaatgagtgcctggccatttgtatttgccttgtgagcgcgtgtgtgtggcactgtgagggttgcgggaccgacggaacctctctggctctggcgggttgtgtttccgcgtgtgtgtaatttgagtgtgagtcagtgtgtagtgagtgaagggatctgactggagaaaaccacagtaaatacccggggctgtgatttttgtgactttggtcaatgggacgacaggctctgtggtagactggctgtgcttgacgtaacaatgtggtactatgccgtgtggttgccggcaaggctatgtgaagatgagaatgtgtgatttggaaaatctggatgtggaacatcacgggtgccagtggaattgtgactctgtgtgtgtataaaagtttgcaaccataggcctatatgtctgtgggataaagagaatatgttgcgtcttcttggagtatcagctttatttaaacatttgcatcagagagttgcgatttatgtgccaaagatttttgtctttttatattgaattaaatgaattttttacaaagagaaaaatgaaaataatagtaactttcaaaaaatattaagaatttccttccactcttatattctggcaatggatctttggcaatgggtctttggcagatcaatttgaaaagcttggactgaggaaattatacttggaaagcacattaggcagtcagcccttggttcctaaataccatgctccactgaaaggagcaaggctccatggagaaatggcagattccagagctggggaagggaaagttcagaatgaacttggaacatcttgtgcttgaaagtaaggcagtgctcaaagaatggtggggacgtgttcaaaggacatggaaaccagattgaagggacttccactgaccaaacttgacatggtttgagcatcaaaataaataatgctagttatagattaaaacccattaaataacagagggaatcataattccaaactgatataaattagtacgtgaaaaaaaattgaaagtttgatgagggactggatgtttacattgttgcaaagaacccctgcccccccccaaatcccttaaaaatgtgtcaatataaggctgggcacggtggcttatgcctataatcccagcactttgggaggccgaggtgggcggatcgtgaggtcaggagtttgagaccagcctgaccaacgtggtgaaaccctgtctctactaaaaaaatacaaaaattagctgggtgtggtggtgcgtggtgggtcctgtaatcccagccactcaggaggctgaggcaggagaattgcttgaacccaggaggcgaaggttgcagtgagcctagatcgcgccactgcactccagcctgggtgacagagtgagactccatctttaaaaaaaaaaaaaaaaagtgtccatatgaaaaaatgctcaacattactaatcatcagagaaatgcaaattaaaaccacactgagataccacctcacagtgttagaatagctgtaatcaaagagacaaaagacgacaagggttggtgagggtatggatataagggaacacttgtacactatttgtggaaatgtaaattagtacaaacatagaaaatatccggagttttctcaaattaaaaatataaccactatatgacccagtcatcccactatatatatctgtatatatctgtatatatccgtatcagtccattcttgcattgctataaagaaaac

SEQ ID NO: 1561440 - DNA, 4001 bp, Homo sapiens
aaaaaaaaaaaaaagaaagaaattaattattattgataatgagttctttataaataacattgttcacaaggaaatactaattgatctactgatatgtgacatgagacagaatgtactatttttaaatataaaagaaatttcattaagtttagataagctgagaatacacaaaagatttccaggctatttaatcaagtaatttacaatgtacacattcctgagtatacaccattgtggtgatataatttattttggaattttctccattcagcttaaaaggtgtttcttcccaagaaactgaacttttctgtcaaatgcacttgatcgaataggagaattgggttcataaaatggattcattgaaaattttatatataaatcataaacatcagtaaagaagttctttattccatcttcttgtcttatgtcatgaagcataataaacctcatatgccccgcggtgacaaatgctgacacaaaccactcgttgaacttgtccacagttttcaagtacatgttgttcgacagccacatgttctcatctacgaggtcgagagcagcatgagctatgaactggttcagatgacgatggtcgtctttggattctgccttcccagctggcaaaaactccatttcaaaaactggattatcatggtgaccaacaattacaaagtagaagcttccagacatggtcttcaatatatggctcctgcagcgggaggccgacaacggaaacgcaatgtcagtttccgcggaagagacccgcgctccgcacctttttttgacacggaatctcgctctgtcgcccaggctggagtgcaatggcgcgatcttggctcactgcaatctccacctcctgggttcaggcaattctcctgcctcagcctcccgaatagctgggattacaggcgcgcgtcaccacccccggctaatttttgtatttttactaaagacggggtttcaccatgttggtcaggctggtcttgaacgcctgaccttgtgatccgctcgccttggcctcccaaagtgctgggattaccggcgtgagccaccacgcccggccaccctctattcttttgaagaatctacaccagttctcctctgtagactccacacctttctgtccccctacccatgtgacattttcaacttgagacgcctgagaatcacactggccaaactccaacccatgatcttctccatgaaacctacttctcatgctgctgacttccccaacttcattctttcagatgttcgggcaaaaaaaaaaaaatgacccttcactccctatttttgctcacagacatatctgatacggcaggaaaacctgttggctctatcttccaggtctatccagaatcccatcacattgtccctcttataccacggctctggtgcagcctctgggatccactgcagtggcctcttctgggtctctctgtgtcaattccccatcctgctcgttctaactctggacctgcccctcccactggtcttcccttgacaaccttccatggttataccggctgctcaggctgccattccaagagaaaattcacaaaaccctctctttcccgcagaaacaacccacactccgggctccccgacgcggcccacttggcagcacctccatgctctgaacctgagatccccgaagggagctctgaggctgcatcaaaccagctgatacggggaccccacacaggaacgcccctctcttcgagacaaggggcctgacctgcagggccccttctatgggcttcagcactggaaggaggggtcgggcggaggtgggggggggcctgggacggggcacccacctcgggttcttcggcggggactccgcaagtccagccagggaagagaggggcgggggcgacaaaggcaagacaaggacaccgccgtccccagtccttgtcagctgagcttctgccactgtcagttgtgcctgtgtcactaccgcctctgcgtacaaggaaccaagccgcttctcgcgcttttccgctccgtcacttcggtgacgtcatagagcgccaaaggccggaactagtgaaaacaccagagaaaatcaaatcaaccacggcaagaggacgccggaagtcccgccctcctacgatgcgcgagcacgaggacggacgcacgcacgcacgcacgcacgcaaaggttccttcctgcacattcattgggtcagtcgcgctgccgagaaccgcagtgtcttctgggttatgaagtttcgacaccgcttctggacttgccttagagcgttggtcagtccttatatggcggatagaggctcagtggcaccgtcaggggagctggtaaacagagtgccggactccacggacaggacggggcttgggttgctcttaaaggcgacataaccagattttcttgaagtaaggtctaggatactcacagaaatgtgagggacctatgatatcggattgtgaagcacagcaagttctcaacggctacaccgccaaagggacacactataccacaaaggcactctgtctctactcatgcctctcagccatatgttgcttttcaaatacacatacagttaaactttgacttctatttattaagcttcaatatggttggtccaagagaacaaagaaagactacatggctgggaatttgcacaaaagaagacaggagataccgacgtagattgaaagggtgacgctgtgcctctggatccagaagaaaacatcattactgtctgtagagtcagtgattgtgttcctaccaagagtgcaatgcttttattctaataatacttattacttcatgtctgaaatattttacatttattttaaaagtctcaatcctgtctgaaaatgagagtgactgatacatgccatttcctgacaggacattttgtgccattccatagttggagtatatgtacacagggaacgtattatccccaataaaaactgtgaactttcatgatcttatctccttcctgagaagtgagttatcattttacagggagttgaaattatctgtgaaaatacttgtgaaatgaaaattacagaaatctattaataataactgttaggttttgaagggaaggcgagggttaaagaaaggcagagttggcagctctacagcaatgcaggttttatgtccagcacgagacctgtgatggggagaactagcttagtgccagaacccctcactgcttacaggctggggcaattataggcctggatgagaggggtcaggggtggggggcagggggcgcggcgggagggtatgacttgctgcccaggaggatggtgggtttttttttgtttttggaggagtctcgctcttgtcgcccagccttgagtgcaatggcgtgatctcggcccactgcaacctccgcctcccggagttcaagcgattcttgaactccgcctcccgagtagttggctttacaggcgcgtgccaccacgcccggctaatttttttgtatttttagtagggacagggtttcaccatgttggtcaggccagtctggaattcctgacctcaggtgatccgcccgcctcggcctcccaaattgctgggattacaggcgtgagccacagcacccggccaaaggatgtgcgtaagatgttcctgaggcagtttggccttttatccggcaggatgtgatagtgaccttccttggatcttttcccagaacgatgtgataagaaagtcaggcagttgggcaggatgtttctcaaggccctcactccgtggaatgcttcactctgaccaaggtctgtgagatggcagggggcttacaggatggtgcagtttggactaacagtgattatgttatttcaaaactagtggcagaaatagtcctacagaaatctctctgtgacatgtgaaggggggaaaaagcaaggttacagtagagtttgagcaagagtctgagaagtcaaagaatgaagttgagactggctgtgctggaacctggacacattatgcttctgtctcctatatgtatttcttatttc

SEQ ID NO: 1561441 - DNA, 4001 bp, Homo sapiens
ctgcactccagcctgggcgacggagcgagactccatttcaaaaaaaaaaaaaaaaaaaaaacagtaagcacagggcagacatttttcaaaaagaagacacataaatcgcaagcaggcatataaaaaaatgctcaacatcattaatcatcagacaaattcaaattaaaaccacagtatctccttacaccagtcagaatggctatcatttaaatgtcaaaaaacaactgatgttgcccaggatatggagaagagaaaaaggttacacactgttggtgagaatgtaaataagtacaacctcaatggaaaacagtatgaagatttttcaaataactgaaaatagaactgccattaaatccaccaattccactactgggcatctacccaaaggaaaataaatcattacattaaaaaaaacatgtatttttatcacagcactattcacaatagcaaagatagggaattaaccaattatccatcaatgtatgactgggtaaagaaaatgtggcatatatatacacaaggtaataccactaggccacaaaaaaaaaaaaaagcatgaaactatgtcttttacagcaatgtggatggaactggaggccattattaaatgaaacaactcagaaacagaaagtcaaataccaaatgttctcacttacaagtggaagctgaataatgtgtacacatggacaaagagtgtggaatgacaaacattggagactccaaacaggtagaaggatgagacgaagatgagtgatgaaaaattacttaatggatacaatgtacattattcaggcgatggatacattaaaagcccagacttgaccactatgcaaatatatccatataacaaaactgcacttgactccttaaatttatgcaaacaaacaaacaaaaaaaacccgagaccgacctactcaatctgatcctcagaccattctctggcccagtccaagccctccatccgtctggtatcgccaacccaatccccttcctcagactccacacctttatgtccacctgtctgtgtgacatatccatcttgagacatttgagaatcaccatgtccaaaatccaacctgtgatcttctcccggaaatctgctctttatgctgacttccccaactccattcttccaaacgttcaaacagaaaacaaaaaacaaaacaaacacttgaaacggttcttcactgcctttgttcagacataactgaagcaccaggaaaacctacgggccctatctttcaggcctatgaagaatctcatcacatctccctctactgtcactggtccagccccaaccataattctcctgggtctactgcagtggcctcagggccttttcgcgtctccctgtgtccattcctaacctggttttcctaacttgaaacttcgaactctggacctgccccctccaactgtccctcccttgacaaccttccatggttactggctgctcaggttgccattccaagcgagaattcacaaaaccctctctttcccgcagaaacaacacacacccctgacgccccaacacagcccactcggcagcgcctccatgctctgaacctgaggtccctaacgggagctctgaggctgcatcaaatcggctgatacggggaccccacacaggaacgcccctctcttcgggacaaggggcctgacctgcagggccccttcagggggcttcagcactgggaggaccggtcgggcgggggagcctgggacgggacacccacctcagtcaggttcatcagcaaggcctccgccagcccagccagggaagagcggggcgggagcgacaaaggcaagacaaggacgccactgtccccagcgcttgtcagttgactcactcccgcctctccgtggtgggaaccgagccgcttctcgcgcttttccgttccgtcacttcggtgacgtcagacagagccataggccgaagttggtgaaacaccacacagaaccaaaacgaccaccaccaggaggacggcggaagtcccgccctccgacggtgcgcacgcacgcaaacgtccccttctaagcctttattgggtaagtcgtgccgccgagagctgcagtgtcttctgggttatgaagtttcgacaccgcttccggacttgtcttagagcgttgatcagtccttatatggcagataaaggcccagtggcactgtcaggggagctgggaaacggagtccccgactccaaagacaggagggggcttggcttgctcttaaaggcaacatacggtatttttttggattgtagtataggatatttacagaaatgttagcaacttattacttaagactctattaagcacagctaattcccaataactacaggtccaaagagacaccccataccataaaggcagtctgcctctactcatgcctgccagccatattattgcttttcaaatacacatacagttacgctttggcgtctgtttagtaagcttcaatatgtttggtccagaagaagaaagaaagactacgcagttagggctatggactggaatttgtaggaaggatgacaggagacgctgaagtaggttgaaagggtgaagctatgcctctggatcaaagagaatacatcttacctgactgtagagtcagcgattgtgttcctacgaagggtgcaacgcttttattctaataatacttactacttcatatctgagatattttccatttattttaagaatcacaatcctatctgaaaatgagagtgacgaccaaaatgagtgattgaggcataagtcacaaatcatggaggattactggaccagcctaagggcacatccagaaaaatgtaagtcacagaagcatctgtggctggtttttccaaagaggttcttaggaggtttagtatttattatacattttccttaaaaaggaagaggggttggcagtgagacaaatgattacagacatgtgaaactttagttagtgcccagtaaatctacattttacataagatagagtaaacacgtgaggggaaaagggaataaagaagatgtctcagagaaggatgaaggaatgaataatctcatcttctctctgttctgtaccttggaagataagctagtagtcttctgaaaaggttgatttctatttagcccttagggaagaaaacctaatgattgtagtgtggtaggggatataatgaggtgtgtctgatttcccgttcctctatagtggtgaattcagcttccaaagttattctagggttctcatggtcaagagggcatccattcagtcagttagggggtgcttagaattttatttttatttctcaagagcagctgatacatgccatttctggacaacattgtctaccgttttcatagttgaagcatatgcacatcttatcctcaaaaaaggtgtggaattccatgatgttatcttcttcctcagaagtgatttaaaatttcacctgtgtttacaactgtatttgcacagggagtcgaaatgtgaaaaacacttgtgaaataaaaaaattaccgaaatctattagtaattatgtaggttattccaaaagaaaaaaaaccagaagccctagagaaatcgatctgtaatgtgagaaaaagataagatctcaatgtttgagtgagagacagcaaattctgagaagtcagagaatgaagttgaacctgtggctctgctggacacttggacacactatgcttttgtttccaaaatgtaatttttttacacacttgaaaacattgctcattaactgcttagaggggtaagtacagatgataaactgaaagacttgccacagataaaaatgaatagagaagctgtgtgataatgtgtatttacttctctagtaaatgttcaatgagcacatatgtattgggtttcagatcaatgataggtgcatgggacacactgggaataggtttcccagctgctatgtgtatacaggactgttctatgttttcttagattctgtatttgtctgtttgatattcattaatcacagggtcaaactaat

SEQ ID NO: 1561442 - DNA, 4001 bp, Homo sapiens
aagaaacatagtatatataggttgggtactatctgcagtttcaagcctccgctggggttcttgaaaggtatcctctgaggataagggggaactactgttcagacattcattgttcaactactaaatggtatagcctattgctcctaggctacaaacctgtacagcaagttactatactaaatactgtcagcaactgtaacacagtgataattatttgtgcatttaaacatttataaacttagaaaatgcagtttgcctcctgatcagaaagaaagaaaatgaaaaggtacagtaaaaatatggtatcataatcttatgggaccaccgtcactgatgtggtcaacactgttgttatgcggtccatgacttatcacaagacacttttcactgaggaaattacaacgattttaggaattctgtgccaggaaagcatgacaaaaaacaaacatttattttttattagagcacagagttatagtgacattttattcggttaactaattgcttgcataaatttaatttgttaaatctatacagtctaaacttgtattttcctgggagagctgctcttgctgggcttgggcttctctgctagtctggctgacctttctctggctccacatagagtgaacagttcgccaagtcttctgaatggtgactctacacagtgtcccaccctcaaatccatcctatgcagtgtgtattccttacacattccctttggaagtacccccggaaccccatggccctcctatctgcaggcagcttcgccaaggccgacccacactttcccagcctccagcctcagccctccctctcttcatctcaaagtaaaaccttaagatttcccgtctaaatttaaggcttggcttgagtctacgccccagcctgtctccatttacacatcactgagtcagtcccctcccatgaattttctacttatgattccaactgcccatgtaacaacttcactctgtggcaatttagaaacaccacgtccaaaattcaactcctactatttccctgaaacctgctccctcaccagatttctttgtcaactcttccagatgttcaggtaaaagaaaaacttgggatcatacttcactcccacttttgctcataggcacaaatgatggagcagaaaatcctgctggctttacctttaagatctaccaagattcttattacttaggtcccttcagcaacccgtctggtccagaatccaccataatcctcctggagcctactacagcagtctcctcaccagtatccctgcgtccacccccatcactccgtaacagtctgttttctccactcattgcctttgaaatattttttcagaccctcactcagatcgtgttctcctttagttcacaaccctccatggctcccaaagactcagaattaaaaaccccggttgctcaggctgccatggcagccgtgccttcttctcctcattctctctgctccctgcagacacaggtccgcccccaagtttccgaatgctcgcgaccccggcgcacctcccaggctctgcgcgtgcagcccccacggtacgcaacgctctcccttcttcacctcaccgcccgtcagctctgaggaccccacccagaactcctcgctgtcctggagaagaggcctgaactgcagagacccacgcaggtgaccccagtccggggcctcaggacccaggtgaggatccgaggactccgctctcacctgcggcgtaatcactagcgctgcctcggccatgggactttaggcggggcggggcctggaaaggcgggcggtaaagcccgggatccggcgtgcgtgcggtggcaaatcgctgggcgacgctcagaccgagaccaggcaagctcctctgcgggcggacaccacctccaccggtttccggctccagttacctggcccggacccagcgagccggaaacgcccagcccgcggacgcgctcgcaggcagcaaaaacgaccaccaccggaaagacgccggaagattctggcgtattgcgcacttacggaggtgcccctttcctgggcaatgattggtctaaggccccggcacgctcggcgcacagtattctgggtggtgtagttcctaccacgccgcagtccgccgcgctgtgaggactcaatccaagaaagagaggacaaaggaaaaaacccatcaaactagggtcagcaaagcctattacatacacaggataaaagaatacgatttgatcttcatttctcaacacaaaagttgacatatattgcatacaatacattaaaaatgttgacaattgagaattgacgcgacccttaatttttttcttttttttaatgtagaaactataaccaaaaataaaattcaaaggcctcccaactatctgaatggaccccctcctctcagcattatagagttaacctgaaaatctagttcaggccattatggaagaaggggttggacatgcctcattctacccctacagcaataacatcagcatagaccttaagtctgataagaaacatttacaatctatttctctgaaacttgctacctgcaggcttcatctgtatgataaaacctgggtctccaaccaaggtgatcactaacagtggggtcagcatccccttatcccacacgtttgtgtttattctgtttttttgccctcaagtgttagtgacttaaattacataatgtatctattatcataagtggaactgaaatgagattgcagaaacattatatcttctttttcttttctttttttccttttttttttttgacagagtctcactctgtcgcccagactggagtacagtggtgcaatctctgctcactgtaacctccacctcccaggttcaagcgattctcctgcctcagcctcccgagtagccgggactacaggcatgcgccaccacccccggataatttttgtatttttagtagagacagggtttcaccatgttggccaggctggtctagaaccggcctcaagtgattcgcctgccttaaagtgctgggattacaagcatgagccaccatgcctggcttttttcccccatatttagcaattagcttttgttgctatccattgtcttcatttctctttagtttttaattgtttataattttgacattttataattacttaagaaaggttagaaaaattaccatttagattggagtcatattaaataagacacctatattgtaaaaatatctttatgaatgtaatctttggctatagtgttgtaaccgagcgagttatagagaaatgccacactctgagactaattctggagtccttttattgccagcgaccgagagacagctagagctcaaaattcttggccccgaagaaggggctagatttctttttataccttgatctaaataggggagggggagtttagctgaagcaatttttacagaagcagaacaggcaaaaagttaaaagataaatggttacacaaacatttacaggaaaataaacagttccaggtgcaggggcttaattatcacaaagtgataaacgcaggggctttgggtaccattaactgagtgcgttcctaggagctgctggtacagcgtgcctcagtgtctatcagtaagtgcattcctggatgtgcttggagtcagcttgcactagttatgtccttaagggagggggataagggggctgcaagtgaagaaacaaaaatggagtctgtttggctctctcagctgagagagacaatcaggttaaaacaaggtagggcatcacaatcgtttgtctccactattatttatttctgatccttttatttttttattattttttttttttgagatggagtttcgcccttgttgcccaggctggagtgcaatggcacgatctcggctcactgcaacctccacctcccaggttcaagcgattctcctgcctcagcctccctagtagctgggattacaggcatgtgccaccacgcccagctaattttgtatttttagtagagacgggatttctccatgc

SEQ ID NO: 1561443 - DNA, 4001 bp, Homo sapiens
caacacaataactattcccatctcagcaggcagctctaagaactaaacagaaaatgttcacttaggcaatcagtggagtgcctagcacatgtaagtgcctgatgtgtttgggaactttattaatcccctgacaggcccagaggtaaatgtcgttatcacttccatttcacagtcagcaaaggctcagggagctttagaaatcaggcacagcctcacatttaaaaagcaaaagcagcatttgagcaccgctaaaacacctcaccaagctgccagagagcaggcaggtgggagtgaggggtgcttttagctacagccagcactgccaggatgggtgtggaactgcagccccgcagagacctgagaacaatgtctcagacaaagggaagtgcaagggcaaaggctgaaaatgggaaagagcttggcaagctcaggattccctggatgaatgcagtgagaaaggggacaatggaagaggagaaagaagatgcggtcaaaagggcaaaccaagtacagccttgcagaccatgctggtaggagggggtggatttattggaaatgtgatgagagtccctataagagaggcctattcaatcatcaaccatttattaagtacaataaatgtacttaagcctggctgttctgggtcttgggagagggaagcaacaggcactcacattccagggttggaaaaagatcctaaacaggcaactaaataaatgagtaaggcaatgtcagatggccttaaagattcagatgacaagaaaacagagcaaggagaccaaagagactctggtcagctttaaacggtgcaacagacgagacctctttaagcagcggacaccagagggagtcagaaataaagcaaaggagggagaggtggatgagaaattaacaactacgacaggagctgacagtaatctgggctatcatgaaagtaatcagagtgactgctagagagtaaccctgggcctcatgtgttatctccaaagggacactacatcctgcataccatcgccactgaacattttaatggactcgtttttcacctgtaactaaatgtcttaaacaggaaaatatactgttagttgcaacccagcgtcccttgccctaaactgaaagacaaattcctcagcctgccctaccaccttttctgccctggcatagcagcaaccgcagaaacgctcctcccacctctttcagccgctgcccttcgtgttgtagagacaggaggccaaggaggccagagggtcagactcctgctggggttgagtctccaaacctagcacaggcccagggagcagctccggaaacaacatcctgagcgacgtccccggaccgtgctgtgcactgagacggacacacacacatcacccagggagccgttcaagcttcctcaaccccgggggggggaagagtaaatatttctactttgcgcgcgcaaaaatgaaggacgaggacagtaacgggacttgttcaaggtcgcaggcccgagaaaggacatggttggaagagccacgaggaggactgcggtcgctcctctcacctgtgaggggttccgggaccctaaaagccctatttcataccacaacgccgcgcaccccagaaacggggacgctccccacgccaccgcgggcctgcattccggacccgggaccgcgcgacccccttctaggcctctaagaagcaacggcagggactgcactgaggacgaccctgaaacgccgtccttccgctcgtcgggcccgggacactgaggccgggtggccgcggggagccgagccagtctgctcacctgcgctgcgtccttcgtctccgccatccgaccgttggcaggacgaggccgcgtggggcagctcccacgggctcaaaaccctaccccgggtcctacaacggtgcggaggtgagccccagtcgccctaccatccttcccagcacagttctgagagcgcggaccaacacgccccaccacaaacgtccacgccagcgaggccggaagtcccgcccctgtgtcgcggtcgcctgccacgccttttcctgcgccggcccactgccttctaggtaatgtagtcttgtcccgtaagaggccaggcttggctctttttccttttttattatgcacaccatgtttctgtatatctcagatgatcttagcggagcaagtgtacacactggattgtaaatttttaaaacttcctattattcggatgcctcaacgtccctacaagcaggctgtgagcactcgcccaggcacccaggtaaacgagtttgataaagggggccctgccacgaggttccccgcttgcctcctctgagtgacccagtgacattcccatgtaccagtaaaatcttacgcctggttactgcgtcctcctccaccctgacgccaggcactgtccctgggactggcgtggatctggacccccgcttcccgcgtggagccattcccgggacatgctcgtggggttccgtctgtgggacgtctgcctcctctgtgtggactggtgttgcccagggctcaggaaggtctccaggggccgtgagtccccgcccgcttccggagtccagcttcgtgacaccatcgtgagaaagaatgcagggatgagtcaaaatgaagccaaaggcaagaagcttttattgggaagaaaaagtacacatttttgagaagagtgtacttttcccaagagaagagggaaatgcggacgtacgagggagagcgggtcatgcacaatggagtttgggtttctaattttatgggctcttctaattagggggtgggataatcatgaggtttttctaggaaaaggtgggaatttcttagaattggggtgccaaccatttttatactaaatgtgggcgtgcttggattggcctggcactggtgggtgtgtgatttaatgtggcaatgagtgtataattaggtctggggtaggaaatgggtcaaatctagcgtcatgggacagcctagccccaatcctgtttgttaaggtctcatcagcccagtcttcttgttggagtagctaattttaacagcttgatgttttcccccttctcctgtgaccacacagcattcctattttgtgggtgtttctttaattagagagtggaataattattaggtattctggaaaaggagggaaattcagggacccacctggttactgccccctttctctcttatttggctttgcccagaagagtcatggacatgtcatcctgactgggattttggccattctttctcttattttgggttttctgttatcctatggtttctttgcctagttcttgtttttatttgttgttcgaatttttccatcctcctgcaaccacccagtgctattcctatatcactgtgagtataaacaccctttaaccttataggcttcttgaagtataattcccaagaccatgttgcagtggtccttaaagaaccaataaggcagagagaaacaaacatgttccaaattttgttctcaggagtaaaccttactcaattgttaaaggctgtagctagctcaaaagaagtttccttgactctgaaaaacaaaacaaggatcagcaatgttccaagcaaaagtcaaaaagattatttcagtttttctattagttcagcctattctgttaactcttgttctgcttgatatttataaacattttagcttttcatgagtcctgtatgtttttcagttatcagaaacctgcatttaggaatacctgttaaagtattcctacatctgattatgaaccatattttgaagaggattaaaacaagacaacaattgtctgtaaatgacaaaatgtccagggtggttagtcaaaaacatgattgacaaaaaaaatttggttatctccgtggtttacaataacaacataacaaccttaattgtggttgatagtgtatactttcacattagagttttctaaatcccatgcagttttggaacacatattaatagtatttgctgaaatataacctgaagaagattagacatcattttggc

SEQ ID NO: 1561444 - DNA, 4001 bp, Homo sapiens
cacagatggccaattatgcccctaagataacgtgacagcctgactgaaacttcccagatcccaccaagagttaatataaaaccctggtcagtctgcagagaggtgaatacgcaccagtcctagcatcatcctgtctaactcctatgcctctacattcatctcatgtctactcacccctgagaagccttggccacatgctagatcataatctctgtacgaccctcaccgtgaacacttctgtccaagacctgtgttgcaacacctcacacaaccaggggctcacacaggagacctgtccttgaccttcccctccccttccttgacaactattattatcattgtgagcaggcttcccctctactaaatgtgatccacagctccaccccggcccacagattgtccactaccttttggaaaagtctccattctgaatctctcctcactgttcctgacctacagttccagcagcccatgaaccattctctgaaagctctcatactcttagcaggtcaaaaataaaacttctgatatcccaaatgaaaactactcctactatgtacttccccatcttagttgatggagcttccacacttctaactgccaaaataaaacctttcagtcatccctgactccactctctttctcaaaactaaaaattcaggcagccctacttaaaaaatgaatccagaatccaactgcttctcgcatcttcacagccaccattttggcctatcacattctatcacattcacctggcctatcccagtagtctcctcccaggtctccccacctcatccttcagttggcttcccatgctgcagccacagggagcctaataagaccagaaccagatcacctccctcttccactccaaacctcccactgttactattaagtaacgaatagacaactcaacttctcagggaaccattccgggtctgacttctactacactgctccctgttctcatgaaaagaaaataattgtaggttcctgaactatcttagcctcctctccaaacttagcatatactggtaactttgccttggacaaccttctacatctcctttcccccggctgccaacagcttcatataatctaacctggacttaagactctgggctttgtatttgctcaaagtctcagggcccaaggctagacgagtggcgaggctcaggtcgcccaatgaccctggtccagttttggagccaggtggcctgggctggctgcactatctccgcacctcagttctcagtgctgactttaccagctgcgtgagcttggacaagaactcagtcttcctatgcctaactactattacctctcttcagcctgttcttcccctgagcaacttttggatagctttaggaaatcctagcccagtgtccctatctgttcacaaatctcgaaggctgccagtgtcctcagaatcgtcaaattcgtcaggtgcaactctgcctcactctatgttcctgcagacccgagacggaccccaggctcctgaatcccccccagcttagtcgcagctccaagttctgcacgcgccagtcaactgcccgtcacatttccgtacacactgggcgtcacaaacgggtccaatccacaagcgccttcttgtccagggtactggggcctgggctgcagggctgtgagcaggcatccctcactgggccttaaggcttctgctgggggaggtaggcgagacccggaggacgcacaactcacctgagccgagtccctcagcgcgactgccgccattgagctccgtggactaggcggggagcggcggccgaccggggcgggcattcgaacacaacagtccctatcccgggcctggcgcagctcacccgaggtggtgtcgcagaacctctggcccactttcgcgacttctctgtcccgtccctcagtcgcgacctccactgcagaaactggcgggctggacaaacaggacagaggccaaaatgaccgccacgaggaggacgccggaagttccggcccgtcgcgctgcgcgtgcgcggaagtgttgctatcctgggctgtcattggctcaactccgccgccgttttgcgctctgcactctggataatgtagtttccaaaactccacggagctcttcggagtgtgtccactgctttgacctctgcgaacttgtattctgaggtgctgtgccccgtgcagggaaatggcgacttcggcctctaggggagaaggaggtatttactccttcttaaaggggcttttcccagatttctgggaagtgttttccgtaactgatcacttaagtgtttagagacattatttcagactccacgaagctcagggtgcccctagaggcaaacaaatattatttcagggggttgggcgcggtggctcacgcctgtaatcccagcactttagaaggccgaggcgggcggatcacctgaggtcagaagttcgagaccaggctggccaacatggcggaaccccatctctactaaaaatacaaaaattagtcgggcgggccgggcgcagtggttcacgcctgtaatcccagcactttgggaggccaaggtgggtggatcacgcgatcaggagttcgagaccagcctggccaacatggtgaaaccctgtctctactaaaaatacaaaaattagccgggcatggtggcgagcgcctgtaatcccagtacttgggaggctgaggcaggagaatcgtttgaacctgggaggcagaggttgcagtgagtcgagatcacgccattgcactccagcctgggcgacagggggagactccgtctccaaaaaaaaaaaaagaaaaaaaaaatttggattttggagcattttggattttagatttttggctcagggatattcaacctgtattttgttctcattaaataggttcctctttcactttgttattgtttgatatactaaagttttaattttcatgaagtctaattggtctatttttcttttgtcacatgtgtatttggtgtcaaatccaagaaattatggccaaattcaatgtcataaaactttcaccctatattttcttttaagtgttttatagttttgggtcttatgtttaggtttttagtccattttgagttcatttgtgtttttggtgttaggtaagggttcaccttcattccttagcatgtgaatatttcattttcccagcatcatttgctgaaaagatcatcgtttccccattgagtggtcttggtagccttgttgagatcatttgaccatatacattactattgcaaatgatattgttttcttaatttccttttcagatttttcattgttagtgtatggaagggcatatgagttttacatgttgacttttgcatgttgactttgaattcagctacacaggtgaatttgtttatcagttctttttttttttttttttcccagacggagtctcactctgttgcccaggctagagtgcaatggcttgatcttggctcaccacaagttccacctcccaggttcaagcaattcttctgcctcagcctcccaagtggctggcactacaggcgccagcaccatgcccggctaatttctgtattttcagtagagcgagggttttaccatgttggccaggctggtcttgaactcctgacctcaggtgagccactgcgcctgggcttttttgtttttgttcttgagacagtgtcttgctctgtctcccagggtggagtgcagtggcgcgatctcagctcactgcaacctctgcctcccgggttcaagcgattctcctgcctcagcctcctgagtagctggggttacaagcatacaccaccatgcccagctaatttttgtatgtttaaattaatcaaagttgccagcaaaaaaaaaaaaaaatattaattcctcccttagaagttacaataaacatctttttaaaatttttttgagcctgtcacccaggctggagtgcggtggtctgttctcagctcactgcaacctctgcctcccaggttcaagtgatcctctcatctcagcctccc

SEQ ID NO: 1561445 - DNA, 4001 bp, Homo sapiens
tctatgtaggcagtgacaatgtcaatgaagacaattcctggcacagggaggcatgaagaaataacaggtagaggaatgaattagatcccgaacctgaaatctggatgaaatcacacaaacatccacaggacaaacaaggtagcctgcattaagttgcctgtaagacttctgactctgaattcttccctgggagctcaatagcaggtgttggggctgctccaagaatggagagggcagtatgcatacctcagtcctaccaaccaagaactgaagtaggaagctgtgtccatgctcctgacatgagaaagtcttgccaatagaaaaagagggggaaagacagagactagctcaggtcacaggggtgagtgtgggcaacttacccagggaggacataagtgccaggttctccagcgtcacatcacggtacaggcatctctgagcctcactaaggagattccattcctcctgggtaaatttcacagccacgtcttcaaaagtcactgtgccctgttatgatgttgacagatgaaaccacaaaccacccctatgctgaggtatcacaatccatctctcccacacatctactctcgcacatcctcctctcaaggtcctcaaacataggagaaactaggcccactggtcatggggtacagccaccaacaacaatagttagttgaacaaataggtatctgtgcggtggctgtgatataagagtccaccccctcctgacaggcacttcccctagtatggccgaggtcatggaaagcccaatgtggcaccttcagcacagcagagataccctctctgaacgcacctcattcttttttttttttttttttttttttttttgatacggagtctcgctctgtcacccagggtggagtgcaatggcgcgatctcggctcacgcaacctccgcctcccgggttcaagcgagtctgctgcctcagtttcccaagtagctgggattacaggcatgcgccaccacgcctggctaattttgtatttttagtagagacagggtttctccatggttggtcaggctggtctctacctccggaccaacccgcctaggcctcccaaagtgctgggattacaggagtgagccactgcacccggccccaccctccactttcttgtatgcgttccttaaatgcttctacagccataaaggcctgagggaagaggctgactttacaggactgtgtccctgataggatctggtaagctcaggcctccctgaacgcttttgtgtccacggagccaggtgaccttggactattgtctaacctgcgtgtctcagcacaaagtgtcatctctaccacctatatgatctacaaggattcaatctcaaagggccccaacgtcatcccctctctactctgttatttatttggcctttaggaaactttaaaagcctggactttgatccagtcccttctttcttggaaattctcctatttctagtgtcctcgcaatgatttcacagcccccagcctccttgcttttccaggaggagttccgcctcacaggttgttccctacaggcgcctgtggaccccaggttccatcctcccggatccgtccatctccaggccattgcccgcgcccctccctgtacctgtcgctctccccaccgcatcccacgggtgtctgaaacagggatccctcccgagagcgcctcagtgtcccgacgccgggtccgggttgcagagccgtaaacaggtgccgctccctcgctgctttaggacttgtgtgactaggaggtgaccggagagcacggaaggcgccacaattacctgaacggggaaccttagcgcggccgccgccatgggaccacgtggggtaagctgggttgagagcagcgggcgccgttaaagagctgcagagtcacgtctgtgcaaagagaagaacgactctcgacctcctggatccagtcaccaccacggtcccaacacagcgctccaaggactccctaacgccaatggaaatggtcgctactaaagggcgccgggagtcccgcctctaccttacttgcgcacacggaaacgccttcaatgtgaactctcactggctctgccgtgctgtcatttgacgcagagctttctgggtaatgtagtttcccaggttccaaggccgtaaagagagagattcccaggggcgcttcggaaggaaaagcccagctccacctccggggccctcagggaagcctcctgacccgcacggtggcgcgcgcctgtaatcccaaattttgagaggctgaggtgtcaggactgcttgagcccaggtggtccaggctgcactgagctatgactgcaccactgcactccagcctgggcgacagaacctgtctcaaaagaaaaagaaatgttaattaagcgtttgtgctgttaagggaggagaccacctctcatattgttttatgcccaatttctgcctccaaagaaacaagtaaaaactaaaaggcagaaatgaaatccacaggcagacagccaggtgccaaccctgggcctggttaaagatcgacccctgaccaaaccggttatgttatctatggattccagacattgtatggaaaagcattgtgaaaatccctgtcctgttctgttccgttctgattaccactgcatgcagcccccagtcgtgtaccccctgcttgctcaatcgatcacaaacctctcatgtggacccccttagagttgtaagcccttaaaagggacaggaattcctcacttggggagcttggtagttggagatgtgagtcttgccaaagctccaggctgaatacagccctgcggcttgtcctgctacatttcttggttccctgactgggaagccaggtgattaacagatagtcgaggcagccccttaggcagcttaggcctgccctgtggagcatccctacaggggactctggccagcttgagggacgcagaacctgagagcactcccgggtaggcaattgccccagtggaacacctcgccagagtggcgtgtggcaggcccccacagaggatcaatgcagcggctgaacactgggaaggaacaggcacttggagtccggacatctgaaacttggtaagactagtctttggaacttgcccactccatttgagtggaagggtggcctgatcacccacggcatgcctgtaccggcactttggtttttgtttttgacttgatttggattgcttgatactttcgttttggttttgacctggcttggatttctggatactctgatttggattttgattctggtttggtgtaaacggtaaaagtgtatgtgtgccctttttacctgttctttgttttgtggtgtgcgtgtggtgtgagcgtggtgttttgtctcaaagaagcatgggtcaggcacaaagtaagcccacttcactaggaactatgttgaaacatttcaagaaaggatttaagggagattacagtgttactatgacaccaggaaaacttagaactttgtgtgaaatagactggccagcattagaggtgggttggtcatcagaaggaagcctggacaggtcccttgtttgaaaggtattgtgtccagaattggttccttccggtgggttcttggtctcgctgacttcaagaatgaagccgcagaccctcacgggcagtgttaaagttcttaaagatggtatgtctggagtttgttccttcaggtgttcagatgtgtctagagtttcttccttctggtgggttcgtggtctcgctggcttcaggagtgaagtggcagaccttcgcggtgagtgttacagctcataaaggcagtgcgggcccaaagagtgagcaacagcaagatttattgcgaagagcgaaagaacaaagtttccacagtgtggaaggggacctgggcgggttgctgctactggctggccagcttttattcccttatttgaccccacccacatcctgctgattggtccattttatacagcgacagagtgagactccacctcaaaaaaaaaaaaaaaaaaaaaaagaagaa

SEQ ID NO: 1561446 - DNA, 4001 bp, Homo sapiens
tggccaacatggcaaaacccccgtctctactaaaaatacaaaaattagctgggtgtggtggcgtgcacctgtaatcccagctactcgagaggctgaggcagaattgcttgatcctgtggggtagagattgcagtgagccgagatcgtgccactgcactccagccaggtgacagaccgagaccccatctcaaaaaataaaaataaaaacaaaaaaggagaaagagacacagggaagaaggccacatgatgatgcaggcagagcttggagtgatgtggccccaagccaagggacaccaactatggcaggccacccccagaagctggaagagacagagaagatcctcccgccagagccttcagaagcaccacggccccaccacatcttcatgttgggcttctggcctccagacttgtgagagaataaatttcaagcctccccctgccccctggtttgtggtgcattgtcacagcagctccaggaggctcatgtaagaaccaaaggcgccgggcgcagtggtcactttgggaggccgaggtaggtggatcacctgaggtcaggagttcgataccagcctggctggccaacatggagaaactctgtatctactaaaaatataaaaattagccaggcggggtggcgtgcacctgtaatcccagctacttgggaggctgaggcaggagaatcacttgaacccacgaggtggatgcagtgagccgagatcgtgcaactgcactccagcctgggcaatagggcgagactgtctcaagaaaaaaaaaagaagaagaaaaagaaaccaacctgtttgggtaggggagagttcagggaggttggggttgctagagcagcagaaaggtcagctgcctccctcattcctcaacatgggtggtgggtataaacagaatagacccttgcagctgcgcggtggctcacgcctgtaatcccagcactttgggaggctgaggcgggtggatcacctgaggtgggagttcgagaccagcctggccaacatggtgaaaccccgtctctactaaaaatgcaaaaattagccgggcgtggtggcatacgcctgtaatcccagctacttgggaggctgaggcaggacaatggcttgaacccgggaggcggaggttgcagtgagccgagatcatgccattgcactccagactccgtctcaaaaaaaaaaaaaaaaggacccttgctgtcttatcaccaggacagcggtgctaacgtataagtgaggtctctccctcagggcgctgtggacactggagcctgggtcattctctgggctgggcagggtgctgagttgcatccctggcctccacctactccatgccaggaactgcccccagttatgacaaccacagacgtccccagacatcgcccggtgtcccctggagggcaggaccgcccctcgctcagaccctctgatgtggcctcactgcagtgcgagcgtggcagcccctctctgcctttagggtagagtcaatgcgtcttctccctctccttgcaggctgggcctcggaaagcttatgcgtctctcacccaggggcgttttcacagggcaagggcagaccgtgccatcctgggcgttggggccctgggcgagctgccggctcccgaccctcccgtggggaccctatcgcgacagggtcatgccccggccacccggccccgccagacccagccccaccagagccccggcaggcccggcacggaggtcgcggcgcgggaggcggcggcacttacggctgagctgccgggagccgcgcgcgccggcccaggtgggcgcaggtgaccatcggggcgcgcgctgaggcgccagacagggcccccgaggcgggagcgccccgtgcaggccggccggcctcccctgcgtgtccctgggacgcctcctccgctcggctcctcggcgctcggagcggacgccccccgcaggcgcccctcaggaactcgccgcagccgccgccaccaaccccgacgcgcgcagaggtaaactcggcactgcgcctgcgcaccccgaacctgcgaactacaagtcccagcaggccccgcagcgcggcgctgggctcctgactctccaacctgggtcacagcgccgcctccgggcgggcggcgtctccgcaggaccacgatgcccctgcggctgttggatccaccccgtgtggttcgctggagtccccgggtgttgtggggttcgcggagccaatcctcaaatcccagctccgtcgtttcccggcggcttgccattggatattaataactactattatttattaagcaagttatataaacgtataatgtattacatacttattaaaatgattgcttaagtaattgttgtttgtttttgagactgagtttcgctcttgtcgcccaggctggagtgcaatggcatgatctcaggtcactgaaacctccgccccctcgggttcaagcgattatcctgcctcagtctcccaagtagctgggattacgggcgtgcacaaccacactcggctaattttttatatttttggtagcgacgcggtttcaccatgttggccaggctggtctcgaactcctgacttccagtgatctgcccgccttggcctcccaaagtgctgggattacaggcgtgagccaccacgcccagccaaattaaattattgtttaaatatttatttaatattctactgattgttatttatgagaaattaaaatagtaaaactactataattaatatactgttgtaggatacaacaaattcctcttcaaaggttttagcctgtaaattgttaagtacaatcagttatgagctcctctccaaagaaccaatgtttccgtatattcagctcccctgttctttttttttttttttttgagatggagtctcgctctgtcgcccaggctggagtgcagcggcgcgatctcggctcactgcaagctccgcctcccaggttcacgccattctcctgcctcagcctcccaagcagctgggaccacaggcgcccgccaccacgcccggctaatttttttgtatttttagtagagacggagtttcaccgtgttagccaggatggtctcgatctcctgacctcgtgatccgcctgcctcagcctcccaaagtgctgggattacaggcgtgagccaccgcgcccggccacctattctttgttcttcattttaaactttaacttcctcgttcttttcgtttccttgcccctagtttcagtaaacaacccctcctagcccctatcacctgctctgaccttagtcacccttggtcacctgctctgaccttagtcatccttggtcacctgctctgaccttagtcatccttgtcacctgctctgaccttagtcatccttggtcacctgctctgaccttagtcatccttggtcacctgctctgaccttagtcatccttgtcacctgctctgaccttagttatccttggtcacctgctctgttcttagtcacccttgtcacctgctctgaccttagttatccttggtcacctgctctgttcttagtcacccttgtcacctgctctgaccttagttatccttggtcacctgctctgaccttagtcatccttggtcacctgctctgttcttagtcacccttgtcacctgctctgaccttagttatccttggtcacctgctctgttcttagtcacccttgtcacctgctctgaccttagtcatccttggtcacctgctctgaccttagttatccttggtcacctgctctgaccttagtcacccttgtcacctgctctgaccttagttatccttggtcacctgctctgttcttagtcacccttgtcacctgctctgaccttagtcatccttggtcacctgctctgaccttagtcacccttgtcacctgctctgaccttagtcatccttggtcacctgctctgaccttagttatccttggtcacctgctctgaccttagttatccttggtcacctgctctgttcttagtcacccttgtcacctgctctgacctta

SEQ ID NO: 1561447 - DNA, 4001 bp, Homo sapiens
gaaaagaacaaggctggtcgaggagggagaatcacctgagctcaggagttcgagaccagcctgggtaacagaatgagaccccatccctagaaacaaaaaaatacaaaagcttaggcatggcggcacacacctggagtccctgtgttcagaaggctgaggcaggaagattgcttgagcccaggaggtggaggctgcagtgagctgtgatcgcaccagtgcactccagcatgggcaacagagctcccaaaaaaataatagtaataaaagaaaacagaaaataacagatctgagaaacgacacacactccagggaatgtttaacaaatggaatgtaagacacagattttaatttttttcctgaaattcaccccgttggaagtttttttttttttttgagacggagtctcgctctgtcacccaggctggagtgcaatggcgcgttctcagctcaccgcaacctccgccttctgcgttcaagtgattttcccgcctcagcctcccgagtagctgggactacaggcacccgccaccacgcccagctaatttttgtatttctagcagagacggggtttctccatgttggccaggctggtccccaactcctgacctcaagtaatctgctcccctcggcctgtcacagtgctgggatgacaggcttgagccaccgcgcccggcctggaaatattttatcttccaacttctactaattaaatgtacgtttcacttcctaaaaactgctgactcgaaaaaaggaaaatcttttcacagtgacaaacccagggaggggtcaagtctggccaggctaccacgacggacgccctcccacccccaactcaggtgttgcctcagcaaggaatcccattgctagtactcaaaacagaactgagaaacgtcttcaaatccacactttctagggaaccgtgaaagaatatatttccgtggttttagccccctcgtttgcagtcagttgctacagcagtccgaggacactaatgcaccagcctcccgggcgtccccgctgtgggtctgcgtgcgtttgcttttggggtcctcgctctcccttgtttctctagtcttttcagttacttttcttccttgtgtgtgagagcccagggaccaggaacccttgttttttttccccttacctaccccaggcatcttggggtcagaggggacaagaagtcctcaagaaggaaaaccgggactcaggggaggaaacctcgcacgccccaggggctgcctttgcaggtgggggcgtctccgcccccgccgaggccccaccgctcccgggctgtcccgggaggaacccagggtcccccagagaccgcggccggaggcgcggggcctccaaggagctgagccgcgggagcgcgagcggaggcggcaccgaccagggacccgcaccccaggaggcaccgcggcgtcggccccagggcgggtcccgggggagcctggaccgcacctcggggtctcgggcgactctgcctcccgcggcccgggggtcccgaagccgcagcgaaacgctccgaggcgtcgcggccccgggcggggcgtggggggtcgggagcgcagggacgcggggaccccgggacgacggggacggagtcgggctccgggcgccgctccccgctctgcagccttggggccagaggcgggcggggacccggagctcggagcgccctagccgcgacctcagcgcgggaggcggggccgggcgggacccccggggcccaggctcccgtcctgcgccgccctcgccggggccgccccccgcgtccctcagctccccccaagccgcggtctcgggcggtcgccggttcctgctgccccgcaccgggatcctctcctgcgccacactcaccatgtcccggggcgatttcttcgctaccggcgcaggtgagcgcgacaggaaccgggacgccagggaccgctaggggcaggcggggcactcacggctaggacagaggcgtcccgtcccaggggcctgattagacagagctcgggaagccgcgcttctgattggacagtgctgccaacgtcggcgactctgattggagaattccccagtccgtcccctggcgctgtaaattgggcagttccccggattccgattgggcgtccctcattggatacttgtctcggccccgcccccgcccgtcctgactgggtagttccctagggcccaccccctgccggtgagtgacgggagcgttgcgaacacgcgtggctgtcccgccctgcggggacactggcttctgggcgaactggtttcagcccggggcggaatcgccctctccccgcagttcgggcgccccgcccgcgtcctcctccgggacgggcgtgggaactccagactagtttcctcacgaggcgaccccttgtccggacaggaggtggatgcaagcgggcggcccgggcctggcagggcgaacgggggctgggcgccgggtccgaagggccgagacctacgtgggggcgggacccgcagacgtgacgtcatcgcgctgcgggcgacatggagaccccgcccagggggctgcgaatccggagacccggtctgggggaggccgaacccaaagcctggcagggggcaggagctttgctcaaatcaaccagaagatatgagatgttcattaaaaccctcacatttggctgggcgcagtggctcacgcctgtaatcccagcactttgggagaccgaggtggacggatcatctgagttcaggagtttgagaccatcgtggccaatatggtgaaaccctttctctactaaaaatacagaaatcagcccggcgtggtgccgggcgcctgtaatctcagctactggggatgctggggcaggagaattgcttgaacccgagaggtggaggttgtagtgacccgagatcgccccactgcagtctagcctgggcgacagagtgagactccatattaaaaaacaaaaaaactctcaagttcatattttaaactctaaggaaaatgttttcagatcatttttttaagtacatccccccaaaatttggaagattgaaaagctggccgggcgctgtggctcacgcctgtaatcccagcactttgggaggccgaggcgggcggatcacctgaggtcaggagttcaagaccagcctgcccaacatggcaaaaccctgtctctactaaaaatacaaaattagccgggcgtggtggcgcgcacctgtaatcccagctagggaggctgaggcaagagaatcgcttgaggccgggcacggtggctcacgcctgtaatcccagcactttgggaggccgaggcgggcggatcacgaggtcaggagatcgagaccatcctggctaacacggtgaaaccccgtctctactaaaaaatacaaaaaaattagccaggcctggtggcgggtgcctgtagtcccagctactcgggaggctgaggcgggagaatggcgtgaacccgggaggcagaggttgcagtgagccgagatcgcgccactgcactccaccactccagcctgggtgacaaagcgagactccgtctcaaaaacaaacaaacaaacaaacaacaacaacaaaaacaaaaagaatcgcttgaacccagggaggcagaggttgcagtgagtcaagatcattccactgcactccagcctgggggacacagcaagactccgtctcaaaaaaaaaaaaaaaaaaaaaaggaagtctataatattgcacaacaggaacgtatctaacgccactgaactttagacttaaaaatgatgaacatggtaaatatttgttatttgtattttactacaatttttagatgttatatttaaaacagaaaaggctatatttctaaggatattgaatccctattttaactgatataagaaaaacacgcaaaagtttaaatgaattggattgaaccttaggagggaagtgttttttttttaaatttttggttttttcagtcttgctctgtcacccaggctggagtgcaatggcaggatcccgactcactgtaaactccacc

SEQ ID NO: 1561448 - DNA, 4001 bp, Homo sapiens
ctcaaggtggggcaagacagagcaggaagaatcaaggaagactaattatttcacacaggaaagctggaataatggagttaccagcaactgagatgtaggcggtaatatgtggaccaggctcttggggagaggatgaggatatactgcagtgcagctgagaataaggcattcaagtggacacacatgtaataatgtctttaggggcactggtcacaatggaaaaaatttgaaaatacccgaatagtcactagcaagcagtggaattaatgaacactaacaatatatccctatgagtgaatataaaagagtgataaaggggccaggtgtggtggctcacgcctgtaatcccagcactttgggaggctgaggtgggtggatcagctgaggtcaggagttcgagaccagcctggccaacatggtggaaccccgtctctactaaaaatacaaaaattagctgggtgtggccacacgtgcctgtaatcccagctattcgggaggctgaggtaggagaatcgcttgaacccaggaggcggaggttgcagtaagcagagatcgcgccattgcactccagcctgggtgacagagcgaggctccatctgaaaaaaaaaaaaaaattagctagtcatggtggcacatgctgcctgtaatccaagcattctgggaggccaaggcgggtggatcacctgaggtcaggagttggagaccagcttggccaacatggtaaaaccctgtctccactaaaaatacaaaaattagctggacgtggtggcacacacctgtagtcccagctgctggggaggctgaggcaggagaatcaatcgcttgaactcaggaggcggaggttgcagtgagccgagatcgcgccactgcactccagcctgggtgacagagcaagactccgtttcaaaaaataaaaacaaaaaataaaagaacagaattatcatctatcacaaattctccatcctggaaaaggagaataactgatattttagcgagtttttgtaattcaccaaattatataccaaacatttttttcttgtaggaatgtattcatttcggggcgtgtcataataaaagagagattttctctctttctctgcgattctttttcccgggagccccgtcaagggctaagccctggaatcccatttgtcatcaccgaaaataaaacaacagatgtgagaaacttaaccacacgggcaaaaaaggaacagaaaataaaaagaaaaaaaaaaggcacgctagaatttttaacaaatggaatgtaagacgagaactttatttttttctgaaattcacctccttggaaatattttatctttcaaactctattatttactgtatgttccattgactgaaaaaatctgaggctcaagtaaccaaatcaatctttagaaggagagaggcccaggcaggggcggctgggctggagtccggcctgcgggcctttggggtcaggccagcccgtgccgccacgtggagcgcccgcaccacctgtccacccctcgcccctcccagggacgtgggcctgggcccaaagtctgcatccaaagcgcattctgctttggggctgttgcaccgcctcgctggggtgaggttttttttttttttgttttgttttttgtactttgggttagtttttcttccaattaacttcgcgagaccccacagggcaggagtcatttctgcctttttttcccctccatcccagcgtcctgacaactacgactttccagggaatgaagactggggcaggggaggaaactccccgcaggacccgggggtgacacagggacagaggctgcatgggggttccgggcggctcccccgggagtttcagcgtgttctggccgcttccaaccctcccctcccagggctccggctccggctcggctcctgccctgcactcaccatgtcctgtccgttcctgagctctttgaggagctccctgctcctcgcagccggtgcaggtgagcacgacggggacacctgtggtcactcagggcaggccgggtgtgctctgcagggaggacagcaacgccccgcccctggggctgtgattggatggttctcttctctgctcatctctgattggagagttcaccagtcacatcccaactcccctgattggacagttctttagactctgcccctcctcttctggttggtcagcttgctatcccctgagctcccctgattgggcagttcttcaggccccaccccagctttcctaattggtcatgtttccacgccctgcctcagctcctttgatttgacaggtctccaggctctgccccaacccccctgattgacagttctcatccggatgctccacctcaactcccctgattggtcagttctctaggccccaccccagctgcctgattggtcagttttcaggtctcgggtcctgcaggcagcagcccccatccacggtggtctccttcctgaaatgaaagtggtactgacttagagggaaacctgggcccttggggtatccaccgtagaaaaaagcagcttcttctgtcctcagtctgttgtcagattccatgacactggaggaggtcccctctctctcctgaccagtagacacctggggaggcccatggggtcaagtgagtgaccaacgaaagctttaccattccctaactagggtcagcacaattgctagaactgaactcttgagccattagcaatggtctagccagccgggcgcggtggctcatgcctgtaatcacagcactttgggaggccaaggtgggtggatcacctgaggtcaggagtttgagaccagtgtggccaacatgatgaaaccctgtctttactaaaaatacaaaaaattagccgggtgtggtggtgggtgcctgtaatcccagctactcggaggctaagggggaagaatcgcttgaacctggaaggcggaggttgcagtgagctgagattgccccactgcactcagcctaggcaacaagagggaaactccgtctcaaaaacaacaacaacaacaaaaacatagaaaacaaaacaaaacaaaaaaaccgaaaacacacttaaaaaaaactgtggcaacaactgtatcctaggtcaatattttgaggttaaagcactctggggatattttgcctcacagtttctcaagtaaaaatcaaggtcacgaatatctgtgtacctatgaaaactcaaacaccacagctgagcgctcaatgtgcaggcagatgaatagtctacaggcaaatgacatataatcaaggaggcataatccctggaagcctgttggtagggctgagagcaaatagattttatagggtccccgcccacctttgcagaggctattccgtatactgtgatcacggaagccacttaaatgcaaatattccttaccaatcccaccagacgttctcctgctgagccacaatacagggtttcaccaagacccgcccttcccttggggttacagatgctactgacagtgatcaaggtgctcagttcttttctcaaacgacactgtagcgagattgataaggaatcagagagaccgatggggttcaggaggatatttattatttagctgcaccagcccagtccgattaacacccaaaggactgagccctgaacaaagagttaagttacctttgaagcattttgtggggccgggggagatctgtgcagggggaagcatattacagaagcgagagacaaagagagttattcaattaattgagacgtgcattacatcatttcttacttttcaaggcaaaacatgttttgcaacttgagtttatctgtctagtgaacttgcagctgcacaactagggaaacagggccttcacaatgcctgggaagggaggagagataaggctcactagccacagaaaaacaggcagttaatttttaaaagactccagctctttcttgttctcagggggaattgggttttcttacatacaactgagtttctgcttacacattctttaatctgttttaattcctgttccaacaca

SEQ ID NO: 1561449 - DNA, 4001 bp, Homo sapiens
ggaaatgatcttaatctttgctgttcaataggggcattaaccacatgtcgctgtcaagcacttgaaatgtggttagtgcgactgagaagctgaatttaaaattttatggaatcttaattggtctacatttaaattaaaacaaccgcatggaccagcagctaccttattatacagcataagtctacaggctggcaggcctgttaggaaaagaaaaaaataaaagaaaaattgagatgtcttggaaggttgaaaaaaaaacttttaaatagtgtttacatgttttgtgtactgatttgcatatagctgtatttactgacttattttgacacacattatcacacaccccttagtatccttctcttgaatataaggcatcaaacaaataatttttaagataccctcactcgtggctcacacctgtaatcccagcactttaggaggccgaggtgggtggatcacctgaagtcaggagttcgagaccagcctggccaacatggcaacaccccatctttactaaaaatacaaaaattagctgggcgtggtggtgcacccttgtcattccagctacttgggaggctgaggcaggagaactgcttgaacctgggaggcagatgttgcaatgagctgagatcgcaccactgcactccaggctgggcaacggagtgagactctgtctcaaaaaaaaaaaaaaaaataccctcactgttagtgagtccttgtgtttacaacctgaacacaggaaaaatccattcacaggttttctacacagtggagtcttgcaacttgcaggttctacacggtacctacctgatcatacagaagtccacggatcagtgaggataggtgaaacttgaggctggtttcaacacaaatctgagcttgaattatacttttttcgtctaaataaaaagggcacaaaaatcgcttatgaggccttttgtagggagtaatatgtacgtatagtaaaatgtatttactgagactaatacagttgttgcatagaaagaccaccccattcacttaaaaaaaattgatttaaagaataagaacccaggctactggctgtgcctgaattcaccagattcctatccagccatctggtccctaaaatgggacaagaagcttaaagctgttttcatctgacttgcttaactcatttggctggagattgtatggtgactccagatgctttaaattcgtcactttaggccttataagtggactcggctgaattctaaataatttctacagtgtattcaggactgcagagattttaatgccctccagcagggtttcccaacctgggcactaatgacatttggggctggatgagtctttgctggcggcggctgctttacgcgctgcaggatgctgagctgctagcatccctggcctccaccctctagattacagtagtagcacagtccctcctaccctccattttgtgacatcccaaaccgtctccaactatagccaaaagtcccctggggcgcagaatcgccccgggtgagggcgacagggtgaggacgacagagtgaggatgacaggggcgcggggcccggacaccggaggaaacagcagcttcgggcttaactgagcgcacagcccgaggcctcaggggcggaaacccggctcccgggagggacgcaggcccgcggctggggcccctctctggactcggactcacggaatgaagcacctctcgcggagaccgaaagattctcccagacgctgcaagcgcggctcttctcacaagacacaagcgcgcttccgcttccggtctccggctagccacactgcacctccgcttccggctccagctggtcccagcccaaaatgcggcgtgtcaggacccccgggttcaggctgcaggtgcagcagccgcgcaccccagcctccggctgaggtgttctagtttgcttagttattaatagaaccaggttgggccctggctagggacagccgcggaggcagggtcgtcctggcgcgggtctgtggcagggttgggggcggaactagctcttgagcggggctgtgggcggtaccaggcctggaggcgggcctgagtgttgacggggaccagttccgggggcggggaccaactctggagcggggctgtgggcggtaccaggcctggaggcagggctgagtgtgggtggagatcagctccgggggtggggagaagttctggggcgggaccgtgggcggtaccaggcatgggggcggggctgtcaggacagagactaagttccggggcgaggttgtgggcgggcattaggtttgatgggcggatcttgctgtgggttaataccaggtttggtgggcgagtatgtggacaagataaggcagtggtggggcatggaatggggttgagctagtaggctgagaggacaagacttggtggaggtcagtttttgggtgtagggctttttgtggattttaaaactgttcaggtagcaggatgcaaaatgaactctttaaagttttcttcagtcatttctccacattcaccgcctgttaaaatgatatagccacacatttagggcgtgtgtgtgtgtgtgtgtgtgtgtggcttttcgtttgtttgttttgagacagggtctcactctgtggcccaggctggagtgcagtggtgcaatcatagctcactgcagcctcgacctcctgagctcaagccatccttccacccgggcctcccacactaccaagcctgactatttttgtatttgtttgtagagaggaggtctgtgttgcccaggatggtctagaactcatggcctcaagtcataccccacttcggcctcccaaagtgctgagattacaggtgtgagccacaccacacccagcctttttgtgtgattttgagcttcctaatttctttcaaaaatgggatcatgtatgcatatttctcccatccagagggggacgaggggagggaggactagggagggatgtctccaagtgaaagccaaagctgattaattgtctagtgcacatctggatctactgaaaagagaactacatttctggtggagaaaataggtgttggattcataggaagaaataaaaaaggaaattttaaaatttaagagatcaaaagaaaaaatgagaaaaaattattaatgacatactacttgttacatgtctggctaaggtttagatgctacaaatggtaaatattgatgtcataaaatgataaacattgaattttgatttatccagattccttaaatgattatgtttggtgaggaaaattagttttacagtacgtaagagttatgtgctaattgtttcggagaagaaagtaattcaatatagtttaaagctgataaatgaaaaagcagtataaatacctaacttacaaatatgtaattactatcagaaaaaaaaaaaagttgcttctaggagccaggctacagggtgaggaagggagcttttcgttgtgaaaattaagatgttatttgagatctatgtgtgaacacatacagcctgaatttgtatgcaaaaggaatcgctaaactctagggaaaaaatgtgaatatgattcactttacaacaatggaatgtatttgaagactctggaattcaagaattaaaaggaaaaaaaaccaaaaaccctatggccatcctagtggacaaatgaatgggacattactttccaacctgcctggtaataaacagttttacatacattatccctaaatattttcacagagacctataaggaaggtgttactatctatcactatttatagatgaggaaacatatggtgatctgtgtgctaaatttttcatatttcattgtgggcaacaagccatccaggtgccgaggcaagagaccgagggcatgagctgttccagtataataaaatatataaaataagaatagttatactagatacagatcatagatatgattatatgtgaatagcattaatcattagtttgtagcaattactctttattccaatattataataatcctaactctacaatcataa

SEQ ID NO: 1561450 - DNA, 4001 bp, Homo sapiens
caccagatgagtggttaccagcagcagtgggtagggaaagtaacgggtattggctgcttcatagggacggggtttccttcagggtgatgaaaatatggtgatattagatagtgttgatggttgcacaataccatgaatgtatgaaaaaccactggactggatatcttagaatggttaaaaatggtgaattttatgttgtatggattttaccacaataaaaaaagtaagcaaagcaggcaagtgttgccactggagtcattaaataaatgcaggaatgacattaggcttacctagtgaggccaggttcctgcagttctccagcatcacatccctgtacagtgtcctttgggcagggtccagcaacgcccactcctcctgggtgaactccacggccacatcctcgaaggttaccaagccctaaagcattgcaaacatcacggcttagccaaggaccacccccaccaacgtgcacaggaagaggggccaggagaacagagccagggctggggaaacctgagcacgagatgttggggggggtggttctgagctcacctcccagggttctgagctcctctcccagggttctgagctcctctcctggggttctgagctcttctccctggcttctgagctcagccctcaatgcttgtctccttaggccattcccaggtccagtgcacagtaccacagagcagctgccttttctcactcagactgggagctcctgtgatcttatttccctcaatctccaggggatcatgggcccgtgacatggcagaaagcagagaaatacttggtaagtgaatgactgatttccgtggcgtttattaattgcttgggtttagaacatcatcacgtctttacttggctttcccttaaaactctcaggagcacatgatgtactcagggaccctggagggagctctgaacctgcagtaaatgttgacacacactgacattttctgggcagccctcaccctccatctgatgcctggaaatcctgggatgcctgaggacctggtttggccatgaggctccaggctgctggaaggtatcaagtccaaccttctggccaaaggaataatgatttgggaaaaggaacatctgactcacccgtagccagcttgtcaggagctcattaaccagctctccgccctgtgtgtgtcctttttgctgagaggctgggaacagggaagacggagctggaggaggagaaatgagtcccatggattcaggcttgtctgacacccacagatctgcccctgattgaccacacccacctcccacacccacacggatgaggcaccacacagtgcccacctacgctccatgcaaacacctacccacagctctcctaagatacccaaacacagccctgtctcaccaaccaaagacaatagggctcaaggtctgactgcacttggggaagggattattcccacttcacagatgaggaaacaagttccaagggcgtcactgtgtttttatcagattcacagaaagaactaaagggagaattcaaaagctccagcacattcaccacacaggtgacatccacagacacccaaatgcctaagtcccaaatcccgagagctgcccgatcagacacggaggacctctgggcccctggggctccactcctgcctcacctgctctgcccaaccccgctcgtgtcccatgctgtgggtcagaacctttcaaggctggactctgagaaatgtcaggaccccacgactcaccagcagtcgagggcaggatgacagccgccatcctgtgactccgacagcaacagggcagccgggaagcaggacgctcctcctttatcccgcagcgctctggaagaaacgggaatgctccaagtctccgtggcctcctccctctcgggctgctggggatgggccctcctcaacccatccttcccatccttcttcaaatgcaagttccggcttccacactgggcctttattttgctgagcaggcaatgaattcagggccacctgatggaaaacttgccttcctctgtccccaacacaacgaccagtacctccctgacccacccgctttgagaacctcggcttcacgcagtctcacggcatgttcttcccatccaagcgcaccacaaacgcattcccggctactccctccttccccggggactccggcgcctccataactcctcccacctccagtcccagctcctggaggatgtcagagacccccagagtctcaggagttcctcagctccagggccctttgttccttctctcatcagccacatgtttccacaggtcccctcagccttggtcatcaccgggcactgtcccaccacccagaacaacgttcagaaactcccctctctctgaacccaacctccctcctcaacttccacggcgttcactccttttttctctcaccgcatgtcctccgaccacacgcaggcctcagtcacctcctcctgcctcggtcacccccctcctgcctcagtcaacccctctcctgcctcggtcacccccatcctgcctcagtcagcccccctcctgcctcggtcacccccctcctgcctcggtcacccccctcctgccttggtcacccccctcctgcctgtgctctgcctcagttaccccctctcctgcccatgttctgcctgttaccccaactcctgcccttggtcaccctgctcctgcctgtgctcggcctcagtcacccccctcctgcctcagtcagcccctctcctacctatgctctgccttggtcaccccctctcctgcctcagccaccccctctcttgatttcatcctcacccagcttggatgtcactgtccctcatttcagctgatttcctcctccctaccccccactgtcatgccagcccagcagaactccagccaggcgtgacttcaatcatccacctgctccaggggacattcgggcagaccaccctgtgcaaaggctgtgacgttgccactctggaataacacggtcaccaacgtgtagagaaccctcagcctgcagggcgatcccacaggtcagcatggcttcccactcgtcaaacctcctctcctctctttaaacttcacacctcctcccctgtcccctctgtggtaactgcttcctaacgagcccttgacgatcccagcctcccggtgctcacaccctgtgtaggcccgacgcacacacggaattagagctgacctgtgtgaccagcagaatatggctgaggagacagcgggggtgggtgcaggggtgactttcaggaccaggtcttggaaggcactacagctgcttccgccttggtctcctggatgttgctctagaggacaccagttgccatggtgggaagacgctcaagtggccctgtggagaggcctatgtggagaggaactgaggcctcccaccgacggccagctctgactcgcaggccatggagtggcccccggtacccgttgagccttcagatgatgcagacccagctgacagccttctgcaagtttccagccagagccttccagccaagctgctcctgaattcctgaaacacaaaaacagtgagagacgatacatggtcattgtttcaagtgactaaggtttgagatcatttgttaggcagcaagagatgacaaatcatctcattttcagcagacaatcccgatcctgcttctcagggtaaagatcatgaggaggaatctactttcctgtgttgctgccagcactgcaacctgtgccccacccttctgcctcctcccatcgcagacaaggagctgcctgccttctccgcagggcttgctgggcagttctggcctggggtccaccctcctgcttttgaggagctgtctgtgctcgaagctctctcctccgccctttcccttctagctctcccgtgctgctagacccttcctcatgcccctcaagcctgatgtggcatcttctgtagtgcgatgagcccatccttggggtacagctttctttccggttactgccccgtctgtatcccccatcccagcc

SEQ ID NO: 1561451 - DNA, 4001 bp, Homo sapiens
gcactgttgcccaggctggaatgcaagggtgcaatcttggctcactgcaacctctgcctcccaggttcaagcgattctcctgcctcaggctcctgagtagctgggattacaggtgcccacgcccggctaattttttgtattttgagtaaagacggggtttcactatgttggccaggctggtctcaaactcctgacctcgtgatccgccagcctcagcctcccaacatgctgggattacaggcgtgagccaccacacctggactaaagacatttgttttactcgagctacagatgttctctagatcagtatttgtttttttttcttctttttgaaacagggtctcactctgttgcctaagctggaatgcagtgacacaataatggctcacagcagcctcgacctcccatgctcaagtgatcctcgcatctcggcctccaaagtggatgggaccacagacaccaccatgcccagctaattttttatttttagtagagacagaggcttgccctattttttccaggttggcatcaaattcctgggctcaagcgatcctccagcctcagcctcccaaaacgctgggattacaggtgtgagccaccttgccccgccctcagtaagactttcaaatgagtaactggtagaaaacccacctgtcaaaagttatcttcgcattcattatcaattcaatccctcctgctagtaaatcagcccgcaccgtgttcctggggatgccctcgttttgaacctctgggggaatctacagggcgctagagtgagatctaggtgatggcctggaaccacagttgagtagtcctgtgtttttccttggtggtaaattttacagttatgtgcattcatccactcatgcattcgatggtatcagatccatgtgctctcgaacaaccacctgaaaaggtttctttccacctcgacacaacttaaacttcaagacccgacacccacagccagaacaagtgcatgaagtgctcaccgggacacgacagaattgtcaggttgctgaggccaggaggacaccaagcgaaggtcaccgtgaacaggaaggcagagatgctgttccttatagagaaaaggcacaacgctggatgtggagacttttttttttttttccattagagatggttgggggggggggtctccctatgttgccctgcctggtcttgaactcctggcctcaagtaatcctcctacccaatccgcccaaagcgctgggaatgacaggcgtgagccgccgcgccgggccctatgaggcttctgcagaggggagcagggaaaatggaaaggccgtgccccccgcctcctcccgggccgaggccccagcgcagccgcctcgacccctgaggacagacctgactgtggctctcagaggaggggccgcgacttgggagagcccacaagatgctcgaaatgcccgaaagtgcacgggacaggctccatttcactgggcacctcccctttccacccttctactctcgcgtggctgcaccgggacaccaccgaacgccgcccagaaacaaaaacttacctcagacgccaacgggaacgcgctgttaagatggcggccgttatgcgcatgcgcccacgcagacacgccgcgcacgcgcaaaggctaggaccacctagggggcggggcctcgggttcccgggcccatcagctgctgcggctttttccaacccagagctgagaggaaatgctgtttacctccccgaagagcgcaagtgtcaccggtagggggtcttgactgcaagctgtccaggttactggcgttttgaacaaagaattagacaaaacgcccagcaaagcaaagaaagaatgaagcaacaaaagaacaagagctgggatttgttgaaaacgaaagcatactccacagtgtgggaactggccaagcggcagctcaagggctccgaaacagaaccttcatgagtcccaatacctcctagaattttcccattggccacttcatgctcacctcctgtaaatgaagcggtagcccgcgttcagtctgattggttgcagaaagcagccaaccagagtctgaagttacaaaggtcacactcctgtgcaaacatctgattggttgcaaaaagcaaccaatcaaaggctagggtgaagttacgacgttacaaagttacacttctatgcaaatgaagactcaaccggccatcagtctgatttgttgcagacagccaatttcctatctgccagcagaaaaggtcaaagggagtagcctctggtccttttgttatttaggcgaggaaagtgagggttttcctttcaatttagttctaggaagtcggcctgaaacagccttaagttccctgcctcccgactctattcagcctcacaagggcttgatttttggtcatctcacactcagagactagaatgctcctattggaatttgttcaaaaattagcacatagaggctgggcctgatggctcacgccagtgatcccagcactttgggaggctgaggcaggcagaccacttgagctcaggagttcgagaccagcctgggcaatatggcaaaaccctattcctataaaaaagacaaaaaacacaaaaattaggacgtagttaagagcatagataagattcatgcggacttcctaaaagtgaaaacaccaagatctggggtcggggaatctaaggccaattcgtgataatttcctaaagttaaatcaaaggaaaaacacctggggctgggggcagggcacctaaggccaattaacacaaacttcctgaagctaaaccaaaaggaaaaaccccatctccccaagatcaaagactactctctctacagtaaaaagtaaagtagaggttcctcttcaaagactttcctgcccatctaattaggaataaatagtaacttctgttagaagcaaaatttattcaaagacctgtactaatgtgtccggaattggtgggttcttggtctcaccgactccaagaatgaagccggggaccctcgtggtgagtgttacagatcttaaggtggcacgtctggagtttgttccttctgatgttcggatgtgctcggagtttcttccttctggtgggttcgtggtcttgctggctcaggagtgaagctgcagaccttcgcggtgagtgttagagctcttaaagcggcgcgtctggagttgttcatttctcccggtgggctcgtggtctcgctggcttcaggagtgaagctgcagaccttcgcggtgagtgttacagctcataaaagcagtgtggacccaaagagtgagcagtagcaagagttattgcaaagagtgaaacaacaaagcttccacggcgtggaaggggatcaaagcgggttaccactgctggctggggcagcctgcttttattctcttatgtggccccacccacatcctgctgactggtagagtcaagtggtctgttttgacagggcgctgattggtgcctttacaatccctgagctagacacaaaggttctccacatccccactagattagctagctacagagtgtcgacacaaaggttctccaagtccccaccagagtagctagatacagagtgttgattggtgcattcacaaaccctgagctagacacagggtgctgattggtgtgtttacaaaccttgagctagatacagagtgccaattggtgtatttacaatactttagctagacataaaggttctccaagttcccactagactcaggagcccagctggcttcacccagtggatcttgcactggggctgcaggtggagctgcctgccagtcccgcgccatgcgcccgcactcctcagcccttgggtggtcgacgggattgggtgccgtggagcagggggcggcacttgtcggggaggctccggctgcacaggagcccacggaggaggaggcgggggaggagggggtaggagggggaaggagcggggggtagggcagggggagaggagggtgggggtggggaggggggtggggaggagggtgggggggaggaggg

SEQ ID NO: 1561452 - DNA, 4001 bp, Homo sapiens
gagtcaggagaatcgcttgaacgcaggaggcagaggttgcagtgagctgagatcacaccactgcactccagcctgggacagacagactccgtctcaaaaaaaaaaaaaaaaaaaaaaaaaatcaggtgaatagtctagttaaaaaacagatttaacagatctaaaaacatgcaaacaacctggcaactataatggtgactatggtgacttttggacagctggggaaatctgatttgatttgggggtggggatggacaatgaagtcttgttttaagcttgtcttcactttcaggaggtatttgagatacacgcttaaaaggggaaagttcattcacttccaatttaaatggctcatgataaagtacatatacaaaaaaatgaaacaaatcttaacaactagtgaatgtagttaagggttaaagacttttttttttttttttggagacggagtctcgcactgttgcccaggctggaatgcaagggtgcaatcttggctcactgcaacctctgcctcccaggttcaagcgattctcctgcctcaggctcctgagtagctgggattacaggtgcccacgcccggctaattttttgtattttgagtaaagacggggtttcactatgttggccaggctggtctcaaactcctgacctcgtgatccgccagcctcagcctcccaacatgctgggattacaggcgtgagccaccacacctggactaaagacatttgttttactcgagctacagatgttctctagatcagtatttgtttttttttcttctttttgaaacagggtctcactctgttgcctaagctggaatgcagtgacacaataatggctcacagcagcctcgacctcccatgctcaagtgatcctcgcatctcggcctccaaagtggatgggaccacagacaccaccatgcccagctaattttttatttttagtagagacagaggcttgccctattttttccaggttggcatcaaattcctgggctcaagcgatcctccagcctcagcctcccaaaacgctgggattacaggtgtgagccaccttgccccgccctcagtaagactttcaaatgagtaactggtagaaaacccacctgtcaaaagttatcttcgcattcattatcaattcaatccctcctgctagtaaatcagcccgcaccgtgttcctggggatgccctcgttttgaacctctgggggaatctacagggcgctagagtgagatctaggtgatggcctggaaccacagttgagtagtcctgtgtttttccttggtggtaaattttacagttatgtgcattcatccactcatgcattcgatggtatcagatccatgtgctctcgaacaaccacctgaaaaggtttctttccacctcgacacaacttaaacttcaagacccgacacccacagccagaacaagtgcatgaagtgctcaccgggacacgacagaattgtcaggttgctgaggccaggaggacaccaagcgaaggtcaccgtgaacaggaaggcagagatgctgttccttatagagaaaaggcacaacgctggatgtggagacttttttttttttttccattagagatggttgggggggggggtctccctatgttgccctgcctggtcttgaactcctggcctcaagtaatcctcctacccaatccgcccaaagcgctgggaatgacaggcgtgagccgccgcgccgggccctatgaggcttctgcagaggggagcagggaaaatggaaaggccgtgccccccgcctcctcccgggccgaggccccagcgcagccgcctcgacccctgaggacagacctgactgtggctctcagaggaggggccgcgacttgggagagcccacaagatgctcgaaatgcccgaaagtgcacgggacaggctccatttcactgggcacctcccctttccacccttctactctcgcgtggctgcaccgggacaccaccgaacgccgcccagaaacaaaaacttacctcagacgccaacgggaacgcgctgttaagatggcggccgttatgcgcatgcgcccacgcagacacgccgcgcacgcgcaaaggctaggaccacctagggggcggggcctcgggttcccgggcccatcagctgctgcggctttttccaacccagagctgagaggaaatgctgtttacctccccgaagagcgcaagtgtcaccggtagggggtcttgactgcaagctgtccaggttactggcgttttgaacaaagaattagacaaaacgcccagcaaagcaaagaaagaatgaagcaacaaaagaacaagagctgggatttgttgaaaacgaaagcatactccacagtgtgggaactggccaagcggcagctcaagggctccgaaacagaaccttcatgagtcccaatacctcctagaattttcccattggccacttcatgctcacctcctgtaaatgaagcggtagcccgcgttcagtctgattggttgcagaaagcagccaaccagagtctgaagttacaaaggtcacactcctgtgcaaacatctgattggttgcaaaaagcaaccaatcaaaggctagggtgaagttacgacgttacaaagttacacttctatgcaaatgaagactcaaccggccatcagtctgatttgttgcagacagccaatttcctatctgccagcagaaaaggtcaaagggagtagcctctggtccttttgttatttaggcgaggaaagtgagggttttcctttcaatttagttctaggaagtcggcctgaaacagccttaagttccctgcctcccgactctattcagcctcacaagggcttgatttttggtcatctcacactcagagactagaatgctcctattggaatttgttcaaaaattagcacatagaggctgggcctgatggctcacgccagtgatcccagcactttgggaggctgaggcaggcagaccacttgagctcaggagttcgagaccagcctgggcaatatggcaaaaccctattcctataaaaaagacaaaaaacacaaaaattaggacgtagttaagagcatagataagattcatgcggacttcctaaaagtgaaaacaccaagatctggggtcggggaatctaaggccaattcgtgataatttcctaaagttaaatcaaaggaaaaacacctggggctgggggcagggcacctaaggccaattaacacaaacttcctgaagctaaaccaaaaggaaaaaccccatctccccaagatcaaagactactctctctacagtaaaaagtaaagtagaggttcctcttcaaagactttcctgcccatctaattaggaataaatagtaacttctgttagaagcaaaatttattcaaagacctgtactaatgtgtccggaattggtgggttcttggtctcaccgactccaagaatgaagccggggaccctcgtggtgagtgttacagatcttaaggtggcacgtctggagtttgttccttctgatgttcggatgtgctcggagtttcttccttctggtgggttcgtggtcttgctggctcaggagtgaagctgcagaccttcgcggtgagtgttagagctcttaaagcggcgcgtctggagttgttcatttctcccggtgggctcgtggtctcgctggcttcaggagtgaagctgcagaccttcgcggtgagtgttacagctcataaaagcagtgtggacccaaagagtgagcagtagcaagagttattgcaaagagtgaaacaacaaagcttccacggcgtggaaggggatcaaagcgggttaccactgctggctggggcagcctgcttttattctcttatgtggccccacccacatcctgctgactggtagagtcaagtggtctgttttgacagggcgctgattggtgcctttacaatccctgagctagacacaaaggttctccacatccccactagattagctagctacagagtgtcgacacaaaggttctccaagtccccacca

SEQ ID NO: 1561453 - DNA, 4001 bp, Homo sapiens; identical to SEQ ID NO: 1561452

SEQ ID NO: 1561454 - DNA, 4001 bp, Homo sapiens
acttatattgataactggatatgctgcatttttaatatattaaaaatgatatcacacatacatttaacattttctaatttggctactaaaatttttaaaaattacatctgtgccttgcattatatttgtattagacagtaccactgtaaccccaacatccactttacaagaaatacaggacataggtaaatcaaataaaatcacaggaaaacatcattgcatgagaacggcagcattttacaagataatgctcctgaaatcttcaaaggccaaaattttatttttaaaaattcaggtgaatggcggggcatggtggttcacgcagtactttgggaggccaaggccggcagatcacgaggtcaggagttcgagaccagcctggccaacacggtgaaaccctgtctctactaaaaatacaattagccgggcgtggtggcacacgcctgtaattccagctacttgggaggctgagtcaggagaatcgcttgaacgcaggaggcagaggttgcagtgagctgagatcacaccactgcactccagcctgggacagacagactccgtctcaaaaaaaaaaaaaaaaaaaaaaaaaatcaggtgaatagtctagttaaaaaacagatttaacagatctaaaaacatgcaaacaacctggcaactataatggtgactatggtgacttttggacagctggggaaatctgatttgatttgggggtggggatggacaatgaagtcttgttttaagcttgtcttcactttcaggaggtatttgagatacacgcttaaaaggggaaagttcattcacttccaatttaaatggctcatgataaagtacatatacaaaaaaatgaaacaaatcttaacaactagtgaatgtagttaagggttaaagacttttttttttttttttggagacggagtctcgcactgttgcccaggctggaatgcaagggtgcaatcttggctcactgcaacctctgcctcccaggttcaagcgattctcctgcctcaggctcctgagtagctgggattacaggtgcccacgcccggctaattttttgtattttgagtaaagacggggtttcactatgttggccaggctggtctcaaactcctgacctcgtgatccgccagcctcagcctcccaacatgctgggattacaggcgtgagccaccacacctggactaaagacatttgttttactcgagctacagatgttctctagatcagtatttgtttttttttcttctttttgaaacagggtctcactctgttgcctaagctggaatgcagtgacacaataatggctcacagcagcctcgacctcccatgctcaagtgatcctcgcatctcggcctccaaagtggatgggaccacagacaccaccatgcccagctaattttttatttttagtagagacagaggcttgccctattttttccaggttggcatcaaattcctgggctcaagcgatcctccagcctcagcctcccaaaacgctgggattacaggtgtgagccaccttgccccgccctcagtaagactttcaaatgagtaactggtagaaaacccacctgtcaaaagttatcttcgcattcattatcaattcaatccctcctgctagtaaatcagcccgcaccgtgttcctggggatgccctcgttttgaacctctgggggaatctacagggcgctagagtgagatctaggtgatggcctggaaccacagttgagtagtcctgtgtttttccttggtggtaaattttacagttatgtgcattcatccactcatgcattcgatggtatcagatccatgtgctctcgaacaaccacctgaaaaggtttctttccacctcgacacaacttaaacttcaagacccgacacccacagccagaacaagtgcatgaagtgctcaccgggacacgacagaattgtcaggttgctgaggccaggaggacaccaagcgaaggtcaccgtgaacaggaaggcagagatgctgttccttatagagaaaaggcacaacgctggatgtggagacttttttttttttttccattagagatggttgggggggggggtctccctatgttgccctgcctggtcttgaactcctggcctcaagtaatcctcctacccaatccgcccaaagcgctgggaatgacaggcgtgagccgccgcgccgggccctatgaggcttctgcagaggggagcagggaaaatggaaaggccgtgccccccgcctcctcccgggccgaggccccagcgcagccgcctcgacccctgaggacagacctgactgtggctctcagaggaggggccgcgacttgggagagcccacaagatgctcgaaatgcccgaaagtgcacgggacaggctccatttcactgggcacctcccctttccacccttctactctcgcgtggctgcaccgggacaccaccgaacgccgcccagaaacaaaaacttacctcagacgccaacgggaacgcgctgttaagatggcggccgttatgcgcatgcgcccacgcagacacgccgcgcacgcgcaaaggctaggaccacctagggggcggggcctcgggttcccgggcccatcagctgctgcggctttttccaacccagagctgagaggaaatgctgtttacctccccgaagagcgcaagtgtcaccggtagggggtcttgactgcaagctgtccaggttactggcgttttgaacaaagaattagacaaaacgcccagcaaagcaaagaaagaatgaagcaacaaaagaacaagagctgggatttgttgaaaacgaaagcatactccacagtgtgggaactggccaagcggcagctcaagggctccgaaacagaaccttcatgagtcccaatacctcctagaattttcccattggccacttcatgctcacctcctgtaaatgaagcggtagcccgcgttcagtctgattggttgcagaaagcagccaaccagagtctgaagttacaaaggtcacactcctgtgcaaacatctgattggttgcaaaaagcaaccaatcaaaggctagggtgaagttacgacgttacaaagttacacttctatgcaaatgaagactcaaccggccatcagtctgatttgttgcagacagccaatttcctatctgccagcagaaaaggtcaaagggagtagcctctggtccttttgttatttaggcgaggaaagtgagggttttcctttcaatttagttctaggaagtcggcctgaaacagccttaagttccctgcctcccgactctattcagcctcacaagggcttgatttttggtcatctcacactcagagactagaatgctcctattggaatttgttcaaaaattagcacatagaggctgggcctgatggctcacgccagtgatcccagcactttgggaggctgaggcaggcagaccacttgagctcaggagttcgagaccagcctgggcaatatggcaaaaccctattcctataaaaaagacaaaaaacacaaaaattaggacgtagttaagagcatagataagattcatgcggacttcctaaaagtgaaaacaccaagatctggggtcggggaatctaaggccaattcgtgataatttcctaaagttaaatcaaaggaaaaacacctggggctgggggcagggcacctaaggccaattaacacaaacttcctgaagctaaaccaaaaggaaaaaccccatctccccaagatcaaagactactctctctacagtaaaaagtaaagtagaggttcctcttcaaagactttcctgcccatctaattaggaataaatagtaacttctgttagaagcaaaatttattcaaagacctgtactaatgtgtccggaattggtgggttcttggtctcaccgactccaagaatgaagccggggaccctcgtggtgagtgttacagatcttaaggtggcacgtctggagtttgttccttctgatgttcggatgtgctcggagtttcttccttctggtg

SEQ ID NO: 1561455 - DNA, 4001 bp, Homo sapiens
gggggggacagggaggaaggcaagaaaaacaaaagacaacaaagaagatcctggccaggtgcagtggctcacgcctgtaatctcagcattttgggaggctgaggcaggcggatcacgaggtcaggagatcaagaccatcctggccaacatggtgaaaccccatctccactacaaatacaaaaattagctgggcgaggtggcacgtgcctgaaatcccagctactcaaaaggctgaggcaggagaatcgcttgaaccagggaggcagaggttgcagtaagtcgagatcacaccactgcactccaccctggcgacagaacgagactgtgtctcaaaaaaaaaatagaatgaaatcctgtcattttcaacaacgtagatagaactggaggacagtacgttaagtgaaataaaccaggcacagaaacacaaagttgggcgtggtaagcggtggttgcagtgagccaatatcatgccaccgcactccagcctgggcaacaaggcaacatcctgcctcaaaaaaactctcaaaaaaaaaaaatcttgaatagagctcagatccaaaaacattccgttatattttagaagaatttggagaattttcatttattatacatagtaaatattagataacattattatttttaattttcttgatgcaaatagtattacggttttagtaaaacaacactcttatcattgagtcaggcattacccactacttaaatgtcgagcttaccatcctggctatcacggtgaaaccccatctctacaaaaatacaaaaaattatccgggcacggtggcacacccctgtaattacagccacttgggaagctgaggcaggagaatcgcttgaacccgggaggcagaggttgcagtgaggcgagatcgcgccactgcactccagcctgggcgacacagctagaccccctctcaaaaaaaaaaaaaaaaaaaaaatgtcgagcttcatctctgcaatgaatttcccattgactctcaaactgttcaccataaaatttatttacgagacggcgaatacacaaaacgctaaaaaacaggtgcagctacaatggatatttattcgtggtactggatggtcaacatacccataggtttaagttttttcgaaaaaaaatgcgggaaaaatacacttagtacagtcatcctgttaatggtaaattcgattattctagtattagtgtgtaaaccctccatcctttcttccaggaagcctggttatgaagctctttggagacgtacagagctaggaacttcagatgaaaagaatggctgagtattcttaggtttctttagtagaaagactcgcggtctacaaacgtttatatgcacatgcagaaatacgcacaccctagacaactaagaaagcacctttctaccggaacgtaatgtgtcaataaaaaatatacaggtttcacaaaggcaaaatgccaaaatctcacatgaaacactcgtttgcataaaaaaggaagcagctgcccccttaaaccaactttttcccaatgctcacccgaacacggtggagtcgccaggtccgtggggctacaggatcttggggacggagtcaatcgaacgcgaacggcaaaattcttttccctctgaaacacaattcacaaacgttgccttggagacttattttttaaggcctcagaacgcttggacacttttgaagacgggaacacacggctgaaaacagccctcggacgcgcccatactgcacttcccacccggctcctctaggggaccgaaggtcccaatggcctcttcgacgtggcctcacccgatggctccgcgactcctgcggactcctgtggagtggtccaggcctctgtaaggaggttcctcgattaccctgggtcgattgtgacctctgccaccccccgaaacaccgcccaacccactagtccacacgagcctcaccaaagtagtgaacgaccagacaacacaaaggaaaaagtggctctgaggaaacaggcgccagcgaccaaaagagagaactggcgcgccgcaacgtcacttccgtttggggcattggaaggggcgtggctcgttgtgtgggcagttggacaggatggaactcttcaggattctagtttccctccgcgtgggtgcggaggtatcaaggggtcggctcagtgcctgggtgggcaagagagaaatggacccacagagaaaggtgggggttaaatcagggctgtgggcggggcccatgcccgggggcggggctggaggtgggaccagacccagccggtggcttcggtggcagaatggaccaggaaggcgaaacgtcgggcgatggactcgcccctcaggatgctcattagaaactttccccacgttcctggacccctttcaggattctctccagttgataacctgccaatccacaaaatggcctgcttcctgcattcgatcacgtctttagaactttattttctcttatttctttttatttatctgaccttgctaaactctaatcattgattcctctgcgttttcagttatcgatactttctgtaaatattgcaatttttttcttttctttcttttttcttttcttttctttttttcttcgaggtagggtctggctcggttgccaaggctggaatgcagtggtaggaacacggctcactgcagtctccacctctccaggctcaagccatccttccacctcagcctcccgagtagctgggaccacgggcgcaccgcacccggctaatttttgtattattattattatcatcattattattattttgtagagacaggatctaaccatgttgcccaggctggtctggaactcctgggctcaagtgatctgcccgccctgcactcccgaagtgggattacaggcgtgagccatcatgcaccatgcctggccttattgtatttttttttcttcttcaacaatgtatttgttactatttctcaaatcttatcaaatgattcaaagcctcctgtactactttatgaaataacactgataccaggcattcttcacttattctgtgcagaaaaagaaaggactgttggacttgtggtagagatttagttgaatcttcgggttatattggtatctttataatactgagtcttcctatgtgtgaatatacaatatctctctatttaggtcttctttaaactctttcagtaatgttttgaaattttcagtttacaaatattttacctcttggggtaaagttattcccatgtaacttatttgtaaaagggatcacattctcagtttccttttctgattgttcattgctggtgtatagatacaaaactaattttcatctcttgatgttgtactgtgcaactttacggaatttattacaagctctgctagttttcttgtagattcttcaaaattctctatatatcaaatatcacctataaatatatttttatttgttctattctaattgagaaaccttttattttattttcttgtgtaattgctctggctagaatttcctgtagaggctgggcacggtggctcactcctgtaatcccaacattttgggaggccgaggtgggtggatcacctgaggtcaggagttcaagaccagcctgaccaacatggtgaaaccccgtctctactaaagatacaaaaaattagccaggcgtggtggttggcacctgtaatcccagctactcgggaggctgaggcaggagaatcacttgaacctgggaggcggaggttacggagtttgcagtgagtggagatggctccattgcactccagcctgggtgacaagagcaaaacttcatctcaaaaaaaaaaaaaaaaaaagaatttcctgtagaatgttgaataacaatagaaaaatcagacatctttctctccttcctggtcttagggagaattttcaggcattcactattgaatatcacgttagctgtgttttcgtaagtgcgttttgtcacgttgaataaactcccttctgtttctagttttcttaattttttttttgagacaatctc

SEQ ID NO: 1561456 - DNA, 4001 bp, Homo sapiens
aacaagattctgtctcaaaaataaataaataaataaataaataataaaacagcattctgttctgtggttcacttcaattcctcctaaaagaaccagctgcatgcctgctcaggctcagctcactggacgcttgtgttgtggagggtgacctaaagcagaatctctgaaaaagagcatcaacaaagacttaccacgggacaaataaatggctgccattctctgaagctgatggtgtgatgatgtgcatcccttccttgatgccaagatcacctcaggccagcttatgaatctaggtggatagaggcaatctccattcctctttgtacagggttatttgcggtcctgttcatatcaatcatcaaacaacaagcatgaaacatcagtcatcaaacattatgcctgagctttgtctctgcaggtgacagatgtgaaggccaccaaaaattgcccactcagtaccgtcactcagtaacaaaagtattaataacagtaactgacatttactgaggactgatatgtcagaagtagctctagtagctttatatatacatgctcagttaattatcatagccatccttcccagtagctatcattacctctatctatctatatctatctatatttatctatctatatctatctatctatatatctatctatatctatctatctatatctatcctatctatctatctatctatctatcgagacagggtctcactctgttgcccaggttgaaatccaatggcactaacacaactctctgtagcctagacttcccgggctcaagtgatcctcccacttcagcctcctgaatagctgggaccataggtgcgtatcatcactcattattattattattattttgagacagagtctcactctgttgcccaggctggaatgcagtggcatgatctcaactcattgcaacctctgcctcccaggtgcaagcgattatcaggcctcagcctcccgagtagctgggatttcaggtatgcactaccatgcctggctaatttttgcatttttagtagagacgcagtttcgccatattggccaggctggtcttgaactcctggccttaagtgattctcccacttcagccccccaactagctgggactacaggtgcacaccactgggtccggctaattttttgtagttttagtagagacaagttttcaccagattgcctaggctagtctcaaactcctgggctcaaacaatcctcctgacttggcctcccaaagtgctgggataataagcataagccacgatgcctggcccattacttctatttaatactgaaaaaaacctacactcaaacaaccctagtagtcggtctgatacttgtccctagagcctgatctcctgtatatggtgttacccccccgccatatgaccagaagacagtgcagacctgcacagaacaattcagtagtcaccagccacgtgtgttattgataacttcattacgtacctaagatgacttaagaacaaaatctaaaattttcaaaagtcggccgggtgcagtggctcacacctataatcccagcactttgggggaccgaggcagacagatcacctaaggtcaggagttcaagaccagcctggccaacatggcaaaaccatctctactaaagatagaaaaagtagccgggcgtggtggcacttgcctgtaatcccaggtactcggaaggctgaggcaggagaactgcttgaccctggaggcagaggttgcagaggttgcagtgagccgagagagcgcgcagcctctccgaactggacgcacagggaggactgatagtccctggagaagcgagtgaagtgaagcggatctgagaggctcctaggcgacagcgcgcaatcattcctttgccgccccctgctatccccgggaccgccaaggaggtggaactcaccacagcctgggcagactccaccaccataaaggcgaaaccgcactgacggagaggagccagcgccggaaaagatggcggtggtgcgctgacgtcacttccgcttcaacactctggccgggcgaggctcgtgggctccagtttcagccacgtaggaccgggtagaacacagaaattctagtttcctctcgggtgggtgcagaaagggcctggggttggctcagggagggggatgcagaactaggtccagagaaaaaggtgaggttagaaccgggcctccagacggaactgtgggcgaggggaggggctcgtactcggggggtgatttagaggagggacccggcctagccggtggttcaggtggccggtcgggctggaagggcggggatgagggatgggacgcatccccgggggatgctcctccaaagcttttatcgggcgagcgcagtggctcacgcctgtaattcctgcactttgggaggctaaggtaggtaaatagcttgagtctgctgggaatgggtgctcgcttggtgtcacaaaatcaacactgagacaaaggatctcagcaaggctagttttactttctgcagaatgggtgccactggctggcagtcttgccaccagagcacacattaacaaaggagacagggtttttttaaacttgaagtgtccatccttctgctgtgtccagcttccattggctggaacgggacctcaccttcctgtacttcactggattggctagcaacttagaacttcccaaaagaggcaatggcagaggagaacaaaggaagagaggaagtaacttgtggactgttgagagaggcaaaaacacttctaaatagggaaaggaataggccatgacctaatagttgcttggaccagttcaggcatgccagggcaaatatctaggctaaaatgtgggagctaaaaacagagtctattgatttctttattacggctggcagaatttaacaatattaccacaggtctttgagaaaatttggcttctaagagggattactatttatttcaatcagactgggaggaaagtccctttgaagaggaacctgtatttatttcattttctacaagtccaagagtttgagaccagcctgggcaaagtagcaagaccctgtctctctctctctctctctctctatatatatatatataaacatatatgtataaatacatataaatatataaatatataaaaaatatataaatatacatgttcaaaatgcttgttccctggtgccataaagaaattagcacttgaacataaatttaatttactcagcaaggccatttttacttcctgcagaaacggtatactcaccagcagttttgccacgagagtacaccaaacaaaggagatagggtcatttataacctgatgcttccaacctactgctgtgtccagtttccactggctggaatgggacctcacgttctggctagcaacttataactttttaaaagaggcaagggtagaggagaacaaaggaaggaggaagtaacttgtggaatgctgagaagggtcaaaacatcttcaaataaggaaaaagaacaggctatgccctaatgcttgcctggaccagtacaagcatgccagggcaaatatgtagactaaactgtgggagctaagaatataaagtacattgatttctttatcacggctcacagatacttgagaatgttagcacaggtctttgaataaattttgcttctaagagaagttactatttattcctaattaaatgtgaaggaacgtctttgaagaggaacctctgctttactttttagatataaatataaagcttgtttgtatgcctctcctcatgttcctagagcctttccatgattcttccatattgataaagctgccaatgaatggcatggtctatcccttccattcagtcagagtttctgtaggcctttttttcttcattctttattttttagaacctgctgattccattgggttttctttttctttcttgcttgcttgcttgcttgcgacagatctcactggatcagaccaggctggagtgcagtggtgtgatctcagctcaccgca

SEQ ID NO: 1561457 - DNA, 4001 bp, Homo sapiens
attccactctttgaaactgcacatcccaccatcatgactcacacatccccctacccttccttatttggggaaaatattcacagatagccaatagggtcagtttagattctgcggtctgaccctaacccacgggggagagacacagaagtagggacccagcgttagaaataaaaaccccttcccctcccttatctggtgtactctcgccatcactccatccacgagactcacccttctatagaaataaattgcgttgctgagaaaacttttgcctgagtgctggtttcactttgcagcacccagcgttttatttttttatctccaacagctgggattacaggggcccaccaccaagcccggctaatttttgtatttttagtagagacagggttttaccatgttggctaggctagtctggatctcctgacctcaggtgatccgcctgcctctgcctcccaaagtgctgtgattacaggtgtgagccagtgcatctggcctggctttaagtagaaaggcttgcagctggtaacaattagaaaaaaaataacctgcaagaaaataaaaattaaaaactaaaggcttagtctacacgcgttcatatttacatacaaaaacgggcacaccctaaacaactatgttttttccatctgaatgtaatgtgtcaaaaataagtggcgggtggatcacttgaggtcaggagttcgagaccagcctggccaacatggtgaaaccccatctctaccaaaaatataaaaaattagccaggtgtggtggtgcacgcctggaatcccagctactcgggaggctgaggcaggtgaatcatgttataaagttttcatgccacaaaaaaaaagcactcaaatataacattttcttttctcagcaaggcaatttacttctacagaagggtgtgccctcacagatggagcaatggtgagcacacaccaggacaagggaggggaaggggttcttattcttgaggaaagtggcccctgccgctttgtccttccccgatggctagggttagaccccacaggctaaactaattccaattggctaatttaaagagagtgacagggtgagtggtttgttggggaaaatggttataacagagcaggaaattggaatgagtcagggtggaaaatgagtcagggtggagtaagtaatcgaaataagtctgggtggagcaggtaatcagaatgagtcagggtggagcaggtgatcgaaaaaggttgctttacggagaagtttaaaagtagaaggcaaagaattaaacatactgacatattgattttttaaaaagaaatttaaaactcatatctaacaatcacttgaacccgggaggtgaaagttgcagtgagccaacatcgtgccactgcactccagcgtgggcgacagagtaagactccaaatcaaaaaaaaaaaaaaagtaaaggacatcaagacaacgccagattctcagatgagacattttttagcaaataaatggaagtcacagccctcttgaaaccatttttccgccgttgctcaccaggaacatgccggaagagataggttccagacgcgggagaatgcggggccagagccaacctcaccagaagggcagaaatccttttcctttcggaaagaaaaaaactcccaaaggttgctttccaagcttttcaagagaggagcacagcggatgaaagtactcaagaaaacacccggcggaggcggaacaaacacacttcccgacgcagccagacggactgtgcggcctctcggaactggccagaggccgcaccaggaggactgacagcccctagaaaagcgagtgaaactaggcggatctgagaggctcctgggcgaccacgcccaatccttcctttgccgccccgctggtatgtcccggacccccaagcaggtagaactcaccacagcggggtggactccaccacaataaaggttaaacggcactgaccatgctgagccacagccggtaaagatggcggtggcacactgacgtcacttccgctccgagcctccggccgggtggggctccagggcttgagtttcaggcacgtaggacaaagaaattctagtttcctcctgggtgggtgccggacagtgcctggggttggctcagggagcgggatgcagaaacgggttcagagaaaaagatgagtttagaaccggacctctggacggaaccgtgggcgaggggtggggcccatatttgggggcggtttagaggtgggacccggcctagcccgcgtttcaggtgcccagacgggttggaaaggcggggatgggggatgggacgcaccccagaggatgctcctccaaagcttatcctgggcgggctcagtggctcacgcctgtaattccagcactttgggaggctaaggcaggtggatagcttgagtccaagagttccagaccagcctgagtgaaatagcaagaccgtgtgtctttttttttcttttctttttttttttttttttttttttgagacagagtttcactcttgttgcccaggcctgtgcccggctcgaccctgtctctattaaaatatatatataaggccaagcgccagtggttcacgcctgtaatccctgcactttgggaagccaaggcgggcggatcacctgaggtcgggagtttgacaccagcctggccaacatgctgaaaccccgtctctactaaaaatacaaaaaaatagctgggtgtggtggcaggcgcttgtaatcccagctactcaggaggctgaggcaggagaatcgcttgaacccgggaggcggaggttgcggtgagccgaggttgcgccactgcactccaatctgggggacaagagcgtgacttcatctcaaaaagaaaaaatatatatatatgtgtgtgtgtgtgtgtgtgtgtgtgtgtgtgtgtgtgtgtcaagcttttttgtatgccgctcctcatgttcctggagcctttccatgattcttccatattaaacctgccagtgatagatggcatggtctgtctcttccattcagtcattctttctgtaggcctttattttttctttttctttttcttttttttttttttttgagacggagtctctctctgtcccccaggctggagtgcagtggtgcaatctcggctcactgcaagctccgcctcctgggttcacaccattctcctgcctagcctcctaagtagctgggactacaggcgcccgcgaccacaaccagctaatttttttgtattcttagtagagacggggtttcacggtgttagccaagatgatccccatctcctgacctcatgatccacccgcctcggcctcccaaagtgctgggattacaggcgtgagccaccgcgcccagcctattttttcattctttattttatagaacctgctgtttccattgcgttttctttttacttttttttttttttttttttttttttgagactggagtctcactctgttgcccgggctggagtgcagtggtgcaatctcagctcactgcaacctccgtctcctgggtgcaagtgattctcctgcttcagcctcctgagtagctgggattacaggtggctgccactatgcccagctattttttctattttcagtacagagggcatttcaccatgttggccaggctggtctcaaactcctgacctcgtgatttgcccatctcagccttgcagaatgctgggattataggtgaagggggccagcccctccacacctgtgggtatttctcatcaggtgggatgagagactgagaaaagaaataagacacagagacaaagtatagagaaagaacagtgggcccaggggaccggcgctcagcgtccagaggacccacactggcaccagtctctgagttccttcagtatttattgattactattttcactatctcagcaaggggaatgcagcaggagaacagggtgatagtggggagaaggtcagcaagaaaacatatgagcaaagaatctgtgtcacagataagttcaagggaaggtac

SEQ ID NO: 1561458 - DNA, 4001 bp, Homo sapiens
tattcactaccctccaagacaaggctgctgtatccacttggtgccagtcccaggcagttatcaaagccagtaccaggaaaagatagtgtgggctcaggactcatcagctggtggtttccaaaggggaacctcaacccaaacacttccagataaggtgcctgtgcccagagaagataaaaggagaagaggcgcagacatttttcttgttggtttttacagcagagtggttaaaccacctgacaggtggttattctctgcatcctcacatatgaaatattcacaaacaaaaatcatatcttctaaaaaagaatcatatattgctacctggggaaaaaaatgacagttaaaatactgtatttgtttgaaatacagcctgggggacaaagagttcattatgttgctgtgaactgaggacagtgtagagtcttaattagggaaaaggctaaggggaacaggggaaaaggctgttaaattaaagtcttaattagggaaaggctaaagggaacaggggaaagcagaaagataaaacaaaaaagctataaatctgcctatcttcatgtgcagagaatttaaacaaaagagaatgcaggtaagttacgggtctaactttgttttttttcttttttctttttttttttttttttgagacggagtctctctctgtcgccggcccagactggagtgcagtgacgtgatctcagttcactgcaacctccgcctcatgggttcaagcgattctcctgcctcagcctctcgagtagctgagattacaggcatgtgacaccacgtctggctaatttttgtatttttagtagagaaggggtttcgccatcttggccaggctggtctggaactcctgtacatgtctaactttctttatggcccaagacatggccttcttgcccagataacgcacttaattcacagacttcctgctcaccatcaaacgcctcaatttatcaaacaccggggctgacagaggaatgcaagttaagctccctgctgccttggcactctgctgccttggcactatcaatcagcccaagttccattctataaaatcacccacaagcctctgcttctctcctgcaggcttcccatggcctcccttgcgatggattttgcttctttcgctaataactttacctacaactgtcttagtaaaaattattttaccccggcgttaccggcccagatagcagtcgttcccctgtgacggagaggaagtcagctttatgaaatgcagggcaaaatctggaaatctagggatttactgccagccccaggagttagggtgaggggacaagataagcattagacatctgccttcccaaacctttgaagactcagagggacaccggtcccctttaggaagaaaacagagactgaggatcccacagatcacagctcctcacaggcacgaaccccacacacgagtggggattccctccatgacccttccgtgaccctcccccaatcctggggagatggggggctgcgggcgaggagctgcccagacagggctccgaggccgggaccgcagttgccgcgcagggaccggataggacgcccggggtcccggctgccagctcagcctcactctgtggctgaggggaccgagggtcgagctgcgccagggggactcgggtcccagaccccggagctgacggcgggggaggcccacgttcgccgcggccggttctggacggttccaaccagctctttcccacttttgggacgcctgaccctgcacacgcaccatttcccggcttccgggatgttccagggtcctccctctgcctcccgctgccagtgcgggtcccactgtgacagaggctgccacagacgttccagggcgtctctcagcgactgaggctacacagacgttccagggcgtctctcagcgagcgactgagtctagagctgagcgcaggggcgtgaagacgccgcgggctctttgaacctggcaccctactgccagccgtgcgcctgattgacagttctcacgaccccgccccatagctctgattggatagggctccaggtcccgccccctgggcactgagtgacagaagaagcgatcacacagtgctgagtcgagcgggatgaacgagttccaggcacagcccttgacagggcaggcttcctccctgtgctgtcctgatccctcccagggaacatttgcatttatgcagaattacctgcccgtactcagcaggcccttactgccttttcctcctggagaaggagtcacaagtgttttgcagggaatcccagactcacagtccagtggagccattcccctggcctcagagcagaggggagcccaaggccacacaggccacactgcagcaggagggtggcctgatgtccaccgggcatcaggatttgaggatgagactcttggcggcaaggttaagccttcctctctcaccttgcctctcaatctgctcattttcagccaaggaaataaaaacaagtcaagaacggtattaaaatatcaaatgtgtggaagaactgaaatcacacggcagcaataaatgaatgaatgaatcaaaacaaaaatacaacaggaaaaaaaaagcaaaaacttgaactagtgcagataagcagcctgctgccctcatacttcagcaaacgtcccattcaggaggctaaacatatgcccaaacttggcagccactcttaactgttgaaatggaaccccagagtgaaccaaaacctggtgatgagactgggacactgaaggatttgactctgggagctcaacatacttccctgtgccctctgcagagtgtggaaatgcccccaccgtcaagatgtgcattttcaccaacaggaaagtttcatgtaaagttagtttaagggcccggggcggtggctcacgcctgcaatcccagcactttgggaggccgaggcgggtgaatcacctgaggtcaccagttggagaccagcctggccaacatggtgaaaccacatctctactaaaaatacaaaaattagctgggcatggtggcgggcacctgtaatcccagctactcgggaggctgaggcaggagaatcacttgaacctgggaggcggaggttgcagtgagccgagatcgtgccacggcattccagcctgggtgacagagtgagacctggtctcaaaaaaaaaaaaaaaaaaaaaaaaaaggttactttaaggtactgacctacataaactgtcaaattcataaaccctttacccagattttcctaacacataaatggtaaattctgattctatgtgcagcttcgtgctacgtggaggcgtgcgcaggctgctgaggaagcaccaaagggggctccatttctctccctttgcagccttcagaatgggctcggtgtagagtcactggttcaaactctgctgcccactccaggtggctggggctcagaaaacaataccccaaaaagaagaccttggaagaagcctcagaagcaaaagttttttctccacagagggcagaggaaaaacttagtcccattcttgggactcttagtcctactcttctatccaaggctagccttagaaactagaatctctcttctccaaagtgggtcgtagaatccagaacccttttcccctaaatccaggcataaaatcaaaacatactactctaactttccattgtcctttctgtgtaaaaactggccataagcaaattaactgtccaactttgtttgactgcaggtcagggtggccctggggcttccctgggccacattggaagaagatgaatcgtcttgggccacatataaaatacactaacactaacaatagctaatgagcttaaaaatatatagcaaaaacaaaaattcctaatgttttaagaaagatcatgaatttgtgttgggctgcatccaaagccttcctgggccatgggttggacaagcttgctgtaggtcataagaccctccatttcagagtgggtcctgcctcatactgagaaggaaggaatgcatgctcagaaaggcca

SEQ ID NO: 1561459 - DNA, 4001 bp, Homo sapiens
agactaaaaacaatccagaggtcaggaatcatttgtgtcttttcctctcagtaacagcctaagattgggtaaccatcaatgtgtccctaaggaacggaaactggggttgaggaagaaaagctgagcgtcccaaagggtaaacttttcagaggaaggggataccgggagactcctcccacctcagggcatacagctgctcccgtgagaggccccacccctacaccttaagctgtcctctgggaggagtgacccaggggttgataatcactagatcctccaagagaagtggcagctgtgggtatcctgggtcaggcccaggcagttctgaaaatcaggaccaggaaaagatagagggccacatcaccttgtaaagtttccaaaggggaaactccacccaaagacattctgattaggcgtcggggcttaggaaagataaaaggaggggaagcacaaaaatttttttaccacggccgggcgcggtggctcacgcctgtaatcccagcactttgggaggccgaggcaggcggatcacctgaggtcgggagttcgagaccagcctggccaacatggagaaaccctgtctctactaaaaatacaaaattagccgggcatggtggcgcatgcctgtaatcccagttacacgggaggctgaggcaggagaatcgcttgaacccaggaggtggaggttgcagtgagctgagatcgcgccattgcactccagcctgggcaataagagcgaaactctgtctcaaaaaaaaaaaaaaattttaccgtagagtgtcaggttcttattctccgtttccctctcaggttacaagtacacaaacaagaggccgggcgcggtggctcacgtctgtaataccagcattttgggaggcggaggtgagcggatcacctgaggtctggagtttgagaccaacctggccaacatggagaaacccagtttctaccaaaaatacaaaaagtagccggtcgtggcggcgcatgcctgtaatcccagttactcaggaggctgaggcaggagaattgcttgaacccggaaggcgaaggttgcagtgagctgagatcttcccactgcactccagcctgggcgacagagcgaaactctgtctgaaaagaaaaaaaaaacaacaaacagaaaacaaatcctttcaaaagagtatggtgaaagaaactataaacaactaaaatactgtgtcttaaatgtcaaacaaaaaacagctgataatgttgatttggcgaggggaggtcacctttgggaatgcggggaaggaaccggaaatttaggcatttatttccagccccagaaaaagctaggctaaaaaaaacgggagtcgtaggtttgagattctttttccagtacgtttggaagactcggaggaagaccagtcccccggaaaaaaagacgatgtactgggaaggccacagcccacagctcttcccatgcacgaaccgcacacccgagacgggattccgccttatgaccctcccgtgtcccagtacaaacaatctggagagaggcggggctgcgggcgcggagctgcccagacagggctccgaggccgaggccgcagtcgccgcgcagggacgggacaggacgcctggggtactggctacggcccaacccaccctgcggccgaggggacagagggccgagctgcgccagggaactcgggtcccagaccctggagtcgctgcagggaggccagggtgcttccacagccggttccggccggttcccacaagcccctcccccagtctccaggcgcccggccccgcacacgcaccatttcctggcttccagggtgtcccggggtcctgcctacggctctctccggcctgtgcaggtcccagcgcgccagacgctgcggtggagccaccggggccactggagaagcggagaccggaacccaaacgcagcggacacgaaacaggaagaccccgcggagttgttgaacattgcccctgtcccccttgcagagttcctgattggatggtttgcaggttcccgccccagtgcccctgattgggtgatgattcaagtcctgcccccttggtactgagtgacaggagaagcaatgcggtatgtggctgagtaaagacagattgacagggtcttggccactgcccttcgcgggccgggcttcctccttctgtaaccttctgtgccggggaggatatttgcatttaagcagaaagtgtttcaggctctgcagaggtgacactggcgtgtttctgcactcagggtgcccttcctgccttttcctcccggacacagagtcacaagtgtgcacagggaatgacagactcggcgtccagtggagccatcccctggcctcggagtaggaggcgcgcccaggccaggccagaccacagtgtaacaggagggaggagggcttgcttctttcaggcaagaaaattaaaacggacaaagaaataaaagtattaaatgtataggaaaaactggagtttttatgacagcgatcatctataaagaaaccaagagaagtaagcaaacatttgaactagctcagacaagcagcctgcttcacccgcagttcacaaggaaaacccacaatcataacgttaaaaatattcccaagcgccgggcgcggtggctcacgcctgtaatcccagaactttggaaggccaaggtgagaaaattgcttaaggtcaggagttcaagaccagcctaaccaacatggtgaaaccccatctctactaaaaatacaaaaattagccaggcgtggtggcaggtgcctgtaatcccagcaactcgggaagctgaggtacgagaatcgcttgaacctgggagggggaagttgcagtgagccgagatagcgccattgcactccagcctgggcgacagagcgagactaaaaaatgaaatatgaaatgaaatgaaataatgaaatgaagaaatgaaatataaaataaaataatcccaagcttgggacccagactctaactgctgaaatggaaccccagtgtggatcagaacctggtgatgagacagggacacttaagaattcaactttgggagctcaaggtgccctccagtcctctcctcacagtgtggaaacactctttccttcaaaaccttcatttgtaccagcaggaaactctcacccggagtcaatgtaaagtcgtgacctaaataaattgtcatgttcccaaaccttttctccaggggacaatgcaaacaagtttttcactgagtctgaccctcacagattttcttcatgtatacaaattacagcctgactcagcgaccccatgaatgctaaaaccaaaacactgtccaggaaatggccccaggcgccaaaggtacaacctcagaaaagacagaaccctccacccccaacccaaccacatctgcacatgggtctcctgcttttcacagctctgcagcttctcagaatccacattcctggccaggcgcggtggctcacgccagcactttgagaggcccaggcgggcggatcacctgaggtcaggagttcgagaccagcctggccaaatggtgaaacctcgtctatagtaaaaatacaaaaattagccgggcgtggtggcgcgtgcctgtaatcccagccactcgggaggctgaggcaggagaaccgcttgaacccgggaggcagaggttgcagtaagcccagactgcgccactgcactccagcctgggtgccaaaacagtgagactctgcctcaaaaaaataataaaagtaaaaaataaaattaaaattaaaaaaagaatctgcactcctgagcagctggaggccacctgcaagggcgggcaggctgcccaagaagcaccctttccctctctttgcaggctccagactggtctcaggctctcctgcccactgcagtttattcacttgcttctcaccaacactgatccacttaggtaagaaaaaagaccttcaatcccctttgctgtttgtttgtttttaagaaactagcagagttcctgctttccttctgtggttatgtataagctg

SEQ ID NO: 1561460 - DNA, 4001 bp, Homo sapiens
aggtcactcctgtccagggccagaatctgtcctaacttcaaaggttctgcatgggtcaagcactagagtcactggcacacttggtgctgcacatacagtcagtgtcacacaaacataaccacacatccactcttttatttttttgagacagggtctcgctctgtcacctagactggaatgcagtggttcaaacacggctcactgcagccttgacctctcaagctcgagatcctcccacctcagcttcccgggtagctgggaccacaggtgtgggccaccacactcagataatttttaattttttgtttgtttgtttttgagacgaagtctcgctcttgtcccccaggctggagtgcgatggcgcgatctcggctcactgcaacctctgcctcctgggttcaagcgattctcctgcctcagccccctgagcagctgggattacaggcacctgccaccacgcccagctaatttttgtatttttagtagagacagggttttatcgtgttggccaggctggtctagaactcctgacctcaggtgatccacccgcctcggcctcccaaagtgctgggattacaggtgtgagccaccgtgccagccattaattttttttttttttttttgtacaggccaggctggtctcgaactcctgggctcaagtgatcctcccacctcggcctcccaaagggctgatgtgagccaccacacccggccctacatccactcctgagacacaggacacaatcacagacacctctatacctttccagtcacaatatctttccagtcacaatcacacacccgctaagacacacccagtcacacaatctactctccactgtgatacagttactcccgtatagtcacaagccccacacaccaacacccacaaatgcctcatatagtcacagtcacacacccactcaggggacacacgccatcactggtactttacggcacccagtcacaactgaactttcactgtggacatacacacagtcacactcacacaagcaacccacacaagcagtggcaccccactcccgcatacacagcaccacacacatacacacaaacacacacaccaagggatacaggaatacacaagcggcgtcaccacacagtcacaggcacaggcaattgcacacggccacagtgtcacacaaccaaaaccacgcacacaccttggagacatgaatcacaaccgcacacccgcagtggtcacacagtcacaactgtactcacaccccaggaacagggcgaacaggccacatatacaacggggacacacgcagtatcacccccggtcacaaggaccctgcaccccgatactctctatcacacatggttacacaaaaaccaccagacaccctggagacaggcggttacacgtgcacagttgcagacacccacacccagccacacagccacaaagacacattcagaacggcgcatccgcagccagctcccgcctgcgcgcacagattcgaggctccggacacgccccggccccgcccaggactcccagacccctcaccttctgcctcccctggtcgcgtccgggtccttgcggagctaactagctcgccacgacgtcaagaacgacgtaacgtcaggccgctgtgggctctgggaattgtagtccagagctagatcggccacggacagaatggcgttctcttatctctgagtcggggcctggctcgttttgacatttttgcgcccacgagtcttcggagagggcgtcgccactccagaccttccagcaagcttgaagtcatctgacgctaaaggactacttacctcaagagctccatcgtcacagaaggaggcggccaagttcgcggggggaggggaggagacagagagtcgaccagtaaagcctcaagggaaatgtagtccaaggcctgagaagcgacgttgctggtaatagaaggtaattcagtaccagcctgggcctggccgcggtgaccgaggcgggccgcgtcgcggagacttctgggagtgcttcctcgctctccgagtgcgcaagcgcagcgcaccgagtggacattttggtctttgtccgcgggtcagtacggcccctgggtccacgtggcgcgaaagtaggaggtgggatctgggcgtctcgggtcggtcggaccggggaggttaaaggggaggattcctgatctttaggggcgcggcgcgagggcagggagtgggtgtaagagcttctggcctacgtgcggggcggagatgggggcctctgaggcgggtttgagcgagtgtgaccgagtttgtcctcaaagtttgacctgatgtttgggattgttgagtgaatgtgaaactgggtgcgggattgtgtgtgattgtgcctaagagggagatgtaggagaccagcattgaggtataacgtttgagctgcacttcccttgtcgaaagtgctgataattataacggtgccatcttcctggagcgtcttttttacttgaaaattgaaggggtggaaaagctaagtggtgaataattttaaaacgagtttttatataaaagcatttctttttaattggagtggcatgcaaatcaccgtgacttttttttttaattaaacgagagtgtttcgaaggaactttagtttcggggtgcctacttcagactattcaaatccccatctttggggtacttaaatagggctgttaagcaaagccctagactaaacagcattgtacgctttgagaagcaatcccatataacggcgcccaggatgagggagtcaacggttttaggttaggcacagttatcctcattttttgaagaaagcttaattgttgcagtgtttatctatgagtctggactaaatcctaggtgtcttaattccttaatgagtcgaggcgttctcaggttgtatggattttgtgaagtaatggagaatgctactgacgtctccaaagatgcgttttctaaggaaatcaccccgcccccgctgtcgtcattgacatagttttaaattacaaaaagttaaataaagtaattgggtaccaagttaatatctataaataaatagccttctaatttacaaatatcagttagaatacatagttgaagaaaactaatatttacaatagcagtaaaaagataaagtattgtggaagaaacttaaaggttcagaactattaggaaagaactttaaaatactactaaggggcataacaaatgtgaacaaataaatataccatgtgacattaagaagtgtgcgcaaacttaagtgaatgtattaatttactgtgatcttggtcgggtgcggtggctcatgcctgtaatcctagcactttgggaggccgagatgggtggattacctgagatcaggagttcgagaggagcctggccaacatggtgaaaccctgtctctactaaaaaaaaataaaataaaaaaatacaaaaattagccgggcgtggtggcgggcgcctgtaatctgagctaccgcggaggctgaggcaggaaaatcgcttgaacctgggaggcggaggttgcagtgagcccagatctcgccactgcactccagcctggacaagagcgagattccgtctcaataatagtaataatgtgatcctaataaaagtatggacaggcttttctcttttggaactaggggaactgatcctagacttactatggaaagagacaagctgcaagagccagtacagactgagaaagaaaaggcgttgaggtgtggggagatggggacccaacacattttaaatataaagcctcaggccgggcttggtggctcacacctgtgagccaaggcaggaggatggctagagtccaggagttagagaccagcttgggcgacatagtgagatctcccgtagtcctagctgcttgggaggctgaggtgggaggatcacttgagcctaggaggtcaaggctgcagtgagcagagatcctggcgacagcattccagcttggtggacagccagtccctgtctttttttttttttttttttttttttgagat

SEQ ID NO: 1561461 - DNA, 4001 bp, Homo sapiens
ttaaattcaaaatgaaaagtaaagaaaaaaatttaaaagaacattaggtatgcagggagcagggaggatataggcctttcagtccatctccaaggcacgcagtaaattactcctatggcaaatactggagaccaggttactttggtaggggtgagggtggtggtggggtggttctgaagtttcagaagaaggaaagaaaagcatgtcctgaaaaacaagaaggatttcagagaaataagaataaaacctgatgtacttgaacttggcacctttcttggagaagggttaagagcaaggaatcatgaacaaccaggtcatttttgaaccaccatcctccttacctaccatatagggaagtgtggtcacagaacaccaggcatctgcctaaatccagtgtcactcagaaggctgaggtcactcctgtccagggccagaatctgtcctaacttcaaaggttctgcatgggtcaagcactagagtcactggcacacttggtgctgcacatacagtcagtgtcacacaaacataaccacacatccactcttttatttttttgagacagggtctcgctctgtcacctagactggaatgcagtggttcaaacacggctcactgcagccttgacctctcaagctcgagatcctcccacctcagcttcccgggtagctgggaccacaggtgtgggccaccacactcagataatttttaattttttgtttgtttgtttttgagacgaagtctcgctcttgtcccccaggctggagtgcgatggcgcgatctcggctcactgcaacctctgcctcctgggttcaagcgattctcctgcctcagccccctgagcagctgggattacaggcacctgccaccacgcccagctaatttttgtatttttagtagagacagggttttatcgtgttggccaggctggtctagaactcctgacctcaggtgatccacccgcctcggcctcccaaagtgctgggattacaggtgtgagccaccgtgccagccattaattttttttttttttttttgtacaggccaggctggtctcgaactcctgggctcaagtgatcctcccacctcggcctcccaaagggctgatgtgagccaccacacccggccctacatccactcctgagacacaggacacaatcacagacacctctatacctttccagtcacaatatctttccagtcacaatcacacacccgctaagacacacccagtcacacaatctactctccactgtgatacagttactcccgtatagtcacaagccccacacaccaacacccacaaatgcctcatatagtcacagtcacacacccactcaggggacacacgccatcactggtactttacggcacccagtcacaactgaactttcactgtggacatacacacagtcacactcacacaagcaacccacacaagcagtggcaccccactcccgcatacacagcaccacacacatacacacaaacacacacaccaagggatacaggaatacacaagcggcgtcaccacacagtcacaggcacaggcaattgcacacggccacagtgtcacacaaccaaaaccacgcacacaccttggagacatgaatcacaaccgcacacccgcagtggtcacacagtcacaactgtactcacaccccaggaacagggcgaacaggccacatatacaacggggacacacgcagtatcacccccggtcacaaggaccctgcaccccgatactctctatcacacatggttacacaaaaaccaccagacaccctggagacaggcggttacacgtgcacagttgcagacacccacacccagccacacagccacaaagacacattcagaacggcgcatccgcagccagctcccgcctgcgcgcacagattcgaggctccggacacgccccggccccgcccaggactcccagacccctcaccttctgcctcccctggtcgcgtccgggtccttgcggagctaactagctcgccacgacgtcaagaacgacgtaacgtcaggccgctgtgggctctgggaattgtagtccagagctagatcggccacggacagaatggcgttctcttatctctgagtcggggcctggctcgttttgacatttttgcgcccacgagtcttcggagagggcgtcgccactccagaccttccagcaagcttgaagtcatctgacgctaaaggactacttacctcaagagctccatcgtcacagaaggaggcggccaagttcgcggggggaggggaggagacagagagtcgaccagtaaagcctcaagggaaatgtagtccaaggcctgagaagcgacgttgctggtaatagaaggtaattcagtaccagcctgggcctggccgcggtgaccgaggcgggccgcgtcgcggagacttctgggagtgcttcctcgctctccgagtgcgcaagcgcagcgcaccgagtggacattttggtctttgtccgcgggtcagtacggcccctgggtccacgtggcgcgaaagtaggaggtgggatctgggcgtctcgggtcggtcggaccggggaggttaaaggggaggattcctgatctttaggggcgcggcgcgagggcagggagtgggtgtaagagcttctggcctacgtgcggggcggagatgggggcctctgaggcgggtttgagcgagtgtgaccgagtttgtcctcaaagtttgacctgatgtttgggattgttgagtgaatgtgaaactgggtgcgggattgtgtgtgattgtgcctaagagggagatgtaggagaccagcattgaggtataacgtttgagctgcacttcccttgtcgaaagtgctgataattataacggtgccatcttcctggagcgtcttttttacttgaaaattgaaggggtggaaaagctaagtggtgaataattttaaaacgagtttttatataaaagcatttctttttaattggagtggcatgcaaatcaccgtgacttttttttttaattaaacgagagtgtttcgaaggaactttagtttcggggtgcctacttcagactattcaaatccccatctttggggtacttaaatagggctgttaagcaaagccctagactaaacagcattgtacgctttgagaagcaatcccatataacggcgcccaggatgagggagtcaacggttttaggttaggcacagttatcctcattttttgaagaaagcttaattgttgcagtgtttatctatgagtctggactaaatcctaggtgtcttaattccttaatgagtcgaggcgttctcaggttgtatggattttgtgaagtaatggagaatgctactgacgtctccaaagatgcgttttctaaggaaatcaccccgcccccgctgtcgtcattgacatagttttaaattacaaaaagttaaataaagtaattgggtaccaagttaatatctataaataaatagccttctaatttacaaatatcagttagaatacatagttgaagaaaactaatatttacaatagcagtaaaaagataaagtattgtggaagaaacttaaaggttcagaactattaggaaagaactttaaaatactactaaggggcataacaaatgtgaacaaataaatataccatgtgacattaagaagtgtgcgcaaacttaagtgaatgtattaatttactgtgatcttggtcgggtgcggtggctcatgcctgtaatcctagcactttgggaggccgagatgggtggattacctgagatcaggagttcgagaggagcctggccaacatggtgaaaccctgtctctactaaaaaaaaataaaataaaaaaatacaaaaattagccgggcgtggtggcgggcgcctgtaatctgagctaccgcggaggctgaggcaggaaaatcgcttgaacctgggaggcggaggttgcagtgagcccagatctcgccactgcactccagcctggacaagagcgagattccgtctcaataatagtaataatgtga

SEQ ID NO: 1561462 - DNA, 4001 bp, Homo sapiens
ctggcataaaacagtacatgctgcataattgcatatatacatgaagttcaagaatgtgtaagacagccagatgcactggctcatgcctgtaatcccagcactttgggaggccaaggtgggcggatcacctgaggtcaggactagctttgccaacatggggaaaccctgtctctactaaaaatacaaaaattagccgggtgtgatgggtgcctgtaatcccagctactcaggaggctgaggcaggagaatcgtttgaacccaggaggcggaggttgcagtgagccaagattgcatcactgcactccagcctgggtgacaagagcaagactctgtctcaaaaaaaaaaaaaaaaaaaaaaaaaagaatgggtaaaactagttaatgatagaattctgaatagattgtgtgggggagaaattactgagaagtggtatgagggaagcatctcaggtcctggcaaagttctttgtatagatctaagagtgttacacagctgtacacttaagatttgcacactttatataggctctatgtatctattgacagcctcctgctctgttgcccaggctgaagggcagtggtatgatcatggcttcctgcagctgcaaagcactgggctcaagcgatcctctcatctcaacctcctgagtagctaggacttataggtgccagccaccatgcccggctaattttttatgtatgtatgtatttatggtagagttagggtctcactatgttgcccaggctggtctccagctcctggcctcaagtgatcctctcaccttggcctggcaaagtgctgggattacacgcatgagcctccacacttggcctacaaaaatttttttaactcttggaactatgctttggtagggatatggagcaataagatatttcaaacattgctgttcaagtacaaatttgtgcagccactcgggtatatattttgacactgtttagtaaagtggaagatatatgaaccggcaattctgctggtaaataaactcaagcatgtgtaccccatgtgaaagaatgtggctgtgttgtttataaaatgaaaagctataaataactaatagggcatcattactagaaaggatgaataattgtggtatacttcagaagggagaatatagcaaagaaattgaattaaccgcgattttatctaatagggatgattcacagaattgtaaaaataaaccaaagacagtatgacaacattcatataaagttttaaaacggggaaaaactggagtataatgcctagagaagtatacgtaagtgataaaacctcacactgtgtgacttaccctgccacacaaacctgatcacactcccaccatggggacattcagctacagacaatccacgcccaaagcaacagggtcgcacacgcagggcctctatcggtcacataagcacaagtgcacgcttaccgaggaggcagtcacagtcacaaccacattgtcacagtcggcgcacacctgtaccgggtcacagtcacgatcacacattaaccacagccacacacacagatagaaacatgcagttactcgcaggtatccccacctgaactctgccgcacacagtcacacagcatatagtcgcacaccactacggggacaaacgcagtaacactcaaccaggcacaagctccccacagccgcacacacaatgccgcacgtggtcctgctccctctcacacacacaccagcagccacagtctccgaggccgtgctgcacacggtgtgagcgttggaaacacactcatcacaagggcagcctgtcacaatcgcgcgatcattcaccacacacctccacacagacgcaagcgcacgctttcaatctcacctccaccgccgcacaaagccgaggcttggcccccggccccgccctctcccgggtttctcacctcaggccttaccagctttcgaagcagcagaaccctccccggcactggggtagttgctggtaaagccctgagggtcccgccagcgcgtgagttggaagctgaattaccgcgagaagtacagtcttgccgaggagacctctgggaagcgtagtcagagacgtatcaaggccggacaagatggttcccgatcgtcagaattcctgtccgcgccttgcgtcagccccgccgaaaggatcgccccccctagtcaaaccgctcgcgccccagaggcctcatggagtcccgcctcaggctcgggccttggcccccaaagaaagccactccgacgtgtttgagatgggcttagttcccggacccgtcctactgcccccaggcgctggacagcctcagaaagaggacaagtctgcatggaaagataatcgcacaactgagccttctgggagatgtagttcggagctgggaaggcggttggaccctccgaaagtcatcttaattgctctcacagataagccggtgctgggctgccggcctgagtactgtgcgcccagagtgcgcaggcgcaaacatcctgggttgctgttttggcctctttgttcgggcgtgaattttgtttattgctccttagtgcagaggggttatgggaccagaggttgtgagactcagaagtggttggggacgcagaaggggtgtagaccaggaacctgcgacctgatggggggaggtcgaagggaaaggaatcgccaaacgtgggacaggtttggagaggcagaaagagaggagtctgaaattgcaaagggcaggtgttattctgacttctgtgtgctttgtgataaatgagtggggcaggaagtaagaggagtttcactttctccttctgcaattatttgtgtacttggactaagtgtatctcatggccagtatttgactgcttttgacctataaaggtattgtatacacagtcatgcatagtttaataataaggatatatgctctccccacggtctccctctccctctctttccacggtctccctctgatgccgagccaaagctggactgtactgctgccctctcggctcactgcaacctccctgcctgattctcctgcctcagcctgccgagtgcctgcgattgcaggcgcgcgccgccacgcctgactggttttcgtatttttttggtctccaccaaacacagggtttcgctgtgttggccgggctggtctccagctcctaaccgcgagtggtccgccagcctcggcctcccgaggtgccgggattgcagacggagtcttgttcactcagtgctcaatggtgcccaggctggagtgcagtggcgtgatctcggctcgctacaacctcctcccagccgcctgctttggccccccaaagagccgagattgcagcctctgccccgccgccaccccatctgggaagtgaggagcttctctgcctggccgcccatcgtctgggatgtgaggagcccctctgcctggctgcccagtctggaaagtgaggagcgtctctgccaggccgcccatcgtctgggatgtggggagcgcctctgccccgccgccccgtctgggatgtgaggaacgcctctgcctggccgcgaccccgtctgggaggtgaggagcgtctctgcccggccgccccgtctgagaagtgagaccctctgcctggcaaccgccccgtctgagaagtgaggagcccctccgcccggcagccgccccgtctgagaagtgaggagcccctccgtccggcagccaccccgtctgggaagtgaggagcgtctccgcccggcagccaccccatccgggagggaggtgggggtcacccccgccaggccagccgccccgtccgggagggaggtgggggggtcagccccccgcccggccagccgccccgttcgggagggaggtgggggggtcagtcccccgcccggccagccgccccgtccgggaggcgaggggcgcctctgcctggccacccctactgggaattgaggagcccctctgcccggccagccgccccgtccgggagggaggtgggggggggtcagccccccgcccggccagcctctccgtccgggag

SEQ ID NO: 1561463 - DNA, 4001 bp, Homo sapiens
aaaaaaaaaaaaaaaaaaaaagaatgggtaaaactagttaatgatagaattctgaatagattgtgtgggggagaaattactgagaagtggtatgagggaagcatctcaggtcctggcaaagttctttgtatagatctaagagtgttacacagctgtacacttaagatttgcacactttatataggctctatgtatctattgacagcctcctgctctgttgcccaggctgaagggcagtggtatgatcatggcttcctgcagctgcaaagcactgggctcaagcgatcctctcatctcaacctcctgagtagctaggacttataggtgccagccaccatgcccggctaattttttatgtatgtatgtatttatggtagagttagggtctcactatgttgcccaggctggtctccagctcctggcctcaagtgatcctctcaccttggcctggcaaagtgctgggattacacgcatgagcctccacacttggcctacaaaaatttttttaactcttggaactatgctttggtagggatatggagcaataagatatttcaaacattgctgttcaagtacaaatttgtgcagccactcgggtatatattttgacactgtttagtaaagtggaagatatatgaaccggcaattctgctggtaaataaactcaagcatgtgtaccccatgtgaaagaatgtggctgtgttgtttataaaatgaaaagctataaataactaatagggcatcattactagaaaggatgaataattgtggtatacttcagaagggagaatatagcaaagaaattgaattaaccgcgattttatctaatagggatgattcacagaattgtaaaaataaaccaaagacagtatgacaacattcatataaagttttaaaacggggaaaaactggagtataatgcctagagaagtatacgtaagtgataaaacctcacactgtgtgacttaccctgccacacaaacctgatcacactcccaccatggggacattcagctacagacaatccacgcccaaagcaacagggtcgcacacgcagggcctctatcggtcacataagcacaagtgcacgcttaccgaggaggcagtcacagtcacaaccacattgtcacagtcggcgcacacctgtaccgggtcacagtcacgatcacacattaaccacagccacacacacagatagaaacatgcagttactcgcaggtatccccacctgaactctgccgcacacagtcacacagcatatagtcgcacaccactacggggacaaacgcagtaacactcaaccaggcacaagctccccacagccgcacacacaatgccgcacgtggtcctgctccctctcacacacacaccagcagccacagtctccgaggccgtgctgcacacggtgtgagcgttggaaacacactcatcacaagggcagcctgtcacaatcgcgcgatcattcaccacacacctccacacagacgcaagcgcacgctttcaatctcacctccaccgccgcacaaagccgaggcttggcccccggccccgccctctcccgggtttctcacctcaggccttaccagctttcgaagcagcagaaccctccccggcactggggtagttgctggtaaagccctgagggtcccgccagcgcgtgagttggaagctgaattaccgcgagaagtacagtcttgccgaggagacctctgggaagcgtagtcagagacgtatcaaggccggacaagatggttcccgatcgtcagaattcctgtccgcgccttgcgtcagccccgccgaaaggatcgccccccctagtcaaaccgctcgcgccccagaggcctcatggagtcccgcctcaggctcgggccttggcccccaaagaaagccactccgacgtgtttgagatgggcttagttcccggacccgtcctactgcccccaggcgctggacagcctcagaaagaggacaagtctgcatggaaagataatcgcacaactgagccttctgggagatgtagttcggagctgggaaggcggttggaccctccgaaagtcatcttaattgctctcacagataagccggtgctgggctgccggcctgagtactgtgcgcccagagtgcgcaggcgcaaacatcctgggttgctgttttggcctctttgttcgggcgtgaattttgtttattgctccttagtgcagaggggttatgggaccagaggttgtgagactcagaagtggttggggacgcagaaggggtgtagaccaggaacctgcgacctgatggggggaggtcgaagggaaaggaatcgccaaacgtgggacaggtttggagaggcagaaagagaggagtctgaaattgcaaagggcaggtgttattctgacttctgtgtgctttgtgataaatgagtggggcaggaagtaagaggagtttcactttctccttctgcaattatttgtgtacttggactaagtgtatctcatggccagtatttgactgcttttgacctataaaggtattgtatacacagtcatgcatagtttaataataaggatatatgctctccccacggtctccctctccctctctttccacggtctccctctgatgccgagccaaagctggactgtactgctgccctctcggctcactgcaacctccctgcctgattctcctgcctcagcctgccgagtgcctgcgattgcaggcgcgcgccgccacgcctgactggttttcgtatttttttggtctccaccaaacacagggtttcgctgtgttggccgggctggtctccagctcctaaccgcgagtggtccgccagcctcggcctcccgaggtgccgggattgcagacggagtcttgttcactcagtgctcaatggtgcccaggctggagtgcagtggcgtgatctcggctcgctacaacctcctcccagccgcctgctttggccccccaaagagccgagattgcagcctctgccccgccgccaccccatctgggaagtgaggagcttctctgcctggccgcccatcgtctgggatgtgaggagcccctctgcctggctgcccagtctggaaagtgaggagcgtctctgccaggccgcccatcgtctgggatgtggggagcgcctctgccccgccgccccgtctgggatgtgaggaacgcctctgcctggccgcgaccccgtctgggaggtgaggagcgtctctgcccggccgccccgtctgagaagtgagaccctctgcctggcaaccgccccgtctgagaagtgaggagcccctccgcccggcagccgccccgtctgagaagtgaggagcccctccgtccggcagccaccccgtctgggaagtgaggagcgtctccgcccggcagccaccccatccgggagggaggtgggggtcacccccgccaggccagccgccccgtccgggagggaggtgggggggtcagccccccgcccggccagccgccccgttcgggagggaggtgggggggtcagtcccccgcccggccagccgccccgtccgggaggcgaggggcgcctctgcctggccacccctactgggaattgaggagcccctctgcccggccagccgccccgtccgggagggaggtgggggggggtcagccccccgcccggccagcctctccgtccgggaggtgaggggcgcctctgcccggccgcccctactgggaagtgaggagcccctctgcctggccacgaccccatctgggaggtgtacccaacagctcattgagaacgggccatgatgacaatggcggtgttgtggaatagaaaggcgggaaaggtggggaaaagattgagaaatcggatggttgccgtgtctgtgtagaaagacgtagatatgggagtcttttcattttgttctgtactaagaaaaattcttctgccttgggatcctgttgatctgtgaccttacccccaaccctgtgctctctgaaacatgtgctgtgtccactcagggttaaatggattaagg

SEQ ID NO: 1561464 - DNA, 4001 bp, Homo sapiens
caaatatccatcaacaatgtaatcgactaatatactacaatatatccccagtatagtgagagctaagtacaattacactgaacaacatgaatgaatttcacaaacataatatataacaaaagaagcctggcataaaacagtacatgctgcataattgcatatatacatgaagttcaagaatgtgtaagacagccagatgcactggctcatgcctgtaatcccagcactttgggaggccaaggtgggcggatcacctgaggtcaggactagctttgccaacatggggaaaccctgtctctactaaaaatacaaaaattagccgggtgtgatgggtgcctgtaatcccagctactcaggaggctgaggcaggagaatcgtttgaacccaggaggcggaggttgcagtgagccaagattgcatcactgcactccagcctgggtgacaagagcaagactctgtctcaaaaaaaaaaaaaaaaaaaaaaaaaagaatgggtaaaactagttaatgatagaattctgaatagattgtgtgggggagaaattactgagaagtggtatgagggaagcatctcaggtcctggcaaagttctttgtatagatctaagagtgttacacagctgtacacttaagatttgcacactttatataggctctatgtatctattgacagcctcctgctctgttgcccaggctgaagggcagtggtatgatcatggcttcctgcagctgcaaagcactgggctcaagcgatcctctcatctcaacctcctgagtagctaggacttataggtgccagccaccatgcccggctaattttttatgtatgtatgtatttatggtagagttagggtctcactatgttgcccaggctggtctccagctcctggcctcaagtgatcctctcaccttggcctggcaaagtgctgggattacacgcatgagcctccacacttggcctacaaaaatttttttaactcttggaactatgctttggtagggatatggagcaataagatatttcaaacattgctgttcaagtacaaatttgtgcagccactcgggtatatattttgacactgtttagtaaagtggaagatatatgaaccggcaattctgctggtaaataaactcaagcatgtgtaccccatgtgaaagaatgtggctgtgttgtttataaaatgaaaagctataaataactaatagggcatcattactagaaaggatgaataattgtggtatacttcagaagggagaatatagcaaagaaattgaattaaccgcgattttatctaatagggatgattcacagaattgtaaaaataaaccaaagacagtatgacaacattcatataaagttttaaaacggggaaaaactggagtataatgcctagagaagtatacgtaagtgataaaacctcacactgtgtgacttaccctgccacacaaacctgatcacactcccaccatggggacattcagctacagacaatccacgcccaaagcaacagggtcgcacacgcagggcctctatcggtcacataagcacaagtgcacgcttaccgaggaggcagtcacagtcacaaccacattgtcacagtcggcgcacacctgtaccgggtcacagtcacgatcacacattaaccacagccacacacacagatagaaacatgcagttactcgcaggtatccccacctgaactctgccgcacacagtcacacagcatatagtcgcacaccactacggggacaaacgcagtaacactcaaccaggcacaagctccccacagccgcacacacaatgccgcacgtggtcctgctccctctcacacacacaccagcagccacagtctccgaggccgtgctgcacacggtgtgagcgttggaaacacactcatcacaagggcagcctgtcacaatcgcgcgatcattcaccacacacctccacacagacgcaagcgcacgctttcaatctcacctccaccgccgcacaaagccgaggcttggcccccggccccgccctctcccgggtttctcacctcaggccttaccagctttcgaagcagcagaaccctccccggcactggggtagttgctggtaaagccctgagggtcccgccagcgcgtgagttggaagctgaattaccgcgagaagtacagtcttgccgaggagacctctgggaagcgtagtcagagacgtatcaaggccggacaagatggttcccgatcgtcagaattcctgtccgcgccttgcgtcagccccgccgaaaggatcgccccccctagtcaaaccgctcgcgccccagaggcctcatggagtcccgcctcaggctcgggccttggcccccaaagaaagccactccgacgtgtttgagatgggcttagttcccggacccgtcctactgcccccaggcgctggacagcctcagaaagaggacaagtctgcatggaaagataatcgcacaactgagccttctgggagatgtagttcggagctgggaaggcggttggaccctccgaaagtcatcttaattgctctcacagataagccggtgctgggctgccggcctgagtactgtgcgcccagagtgcgcaggcgcaaacatcctgggttgctgttttggcctctttgttcgggcgtgaattttgtttattgctccttagtgcagaggggttatgggaccagaggttgtgagactcagaagtggttggggacgcagaaggggtgtagaccaggaacctgcgacctgatggggggaggtcgaagggaaaggaatcgccaaacgtgggacaggtttggagaggcagaaagagaggagtctgaaattgcaaagggcaggtgttattctgacttctgtgtgctttgtgataaatgagtggggcaggaagtaagaggagtttcactttctccttctgcaattatttgtgtacttggactaagtgtatctcatggccagtatttgactgcttttgacctataaaggtattgtatacacagtcatgcatagtttaataataaggatatatgctctccccacggtctccctctccctctctttccacggtctccctctgatgccgagccaaagctggactgtactgctgccctctcggctcactgcaacctccctgcctgattctcctgcctcagcctgccgagtgcctgcgattgcaggcgcgcgccgccacgcctgactggttttcgtatttttttggtctccaccaaacacagggtttcgctgtgttggccgggctggtctccagctcctaaccgcgagtggtccgccagcctcggcctcccgaggtgccgggattgcagacggagtcttgttcactcagtgctcaatggtgcccaggctggagtgcagtggcgtgatctcggctcgctacaacctcctcccagccgcctgctttggccccccaaagagccgagattgcagcctctgccccgccgccaccccatctgggaagtgaggagcttctctgcctggccgcccatcgtctgggatgtgaggagcccctctgcctggctgcccagtctggaaagtgaggagcgtctctgccaggccgcccatcgtctgggatgtggggagcgcctctgccccgccgccccgtctgggatgtgaggaacgcctctgcctggccgcgaccccgtctgggaggtgaggagcgtctctgcccggccgccccgtctgagaagtgagaccctctgcctggcaaccgccccgtctgagaagtgaggagcccctccgcccggcagccgccccgtctgagaagtgaggagcccctccgtccggcagccaccccgtctgggaagtgaggagcgtctccgcccggcagccaccccatccgggagggaggtgggggtcacccccgccaggccagccgccccgtccgggagggaggtgggggggtcagccccccgcccggccagccgccccgttcgggagggaggtgggggggtcagtcccccgcccggccagccgccccgtccgggaggcg

SEQ ID NO: 1561465 - DNA, 4001 bp, Homo sapiens
atgcccagaggaagcactggggcagcagctggagaagaggctatgcccatgagaagggaagtgtatctggaggttccaagcagcaggttctcttggaaggtaagagatgacttacactaaattatagtggtatcagtcatgttagcctcttcttgtctctgacttctgtcttctcattcctttcccagctcccaatccatgagagctaaagactgcctatagggagtaaagaggagacaaaataaaggttggggaattagagaagaaactaatcatgtatcctttcacatttcaggcttccagcagaagaaattcatccagcaaaaaaaaaaataaatacacacacacacacacacacacacacacacacacacactctcaaataggaattttgagagtggcagttatgagataaagtttttttctgtgtggtcccagtggtattctattcatttaagcatatcagtcatcagtcaataccaggtttcccaataaatgatcttttttggaagggaagggacggagtctcgttctgtcgcccaggctggagtgcagtggcgcgatcttggctcactgcaacttccacctccgagttcaagcgattcccctgcctcagctcccgagtagctggggctacaggcatgcgccatcatgcccagctaatttttatattttttagtagagacggggtttcaccatgctggtcaaactcctgacctcaggtgatctgtccgccccagcctcccaaagtgctgggattgcaggcgtgagccaccgcgcatgggcccaatcttttttttttttttgagacggagtcttgctctgccacccaggctggattgcagtggcacgatctcggctcactgcaagctccgcctcccgggttcacgccattctcctgactcagcctcccaagtagctgggactacaggcgcccgccaccacgcccggttaattttttgtatttttagtagagacggggtttcaccatgttaaccaggatgttctcgatctcctgacgtcgtgatcggcccgcctcagccttccaaagtgctgggattacaggcgtgagccaccgcgcccggcccgcatgggcccaatcttaccctctgaaaattattttgcctcttcctctccattaaaaaaaaaaaatcactacttattttacttgtctaattaccagagtcaaattctacaggcatatataaaatgcccaatactcataaatcaatctaaacaatgcatactttagtcaacactcggtttctcaagcactccacctaagtcacacagtgtgccacattcacagtcatcataggtcgtgtacaccaaatacttttaaaattaggcatattcatagctgtatcacccactacatagtcataatcccataggcccccacgtcgtgcacaatttcacagaacttctacaaaaagtaacaacctttcactcacaatgccctcactgtcgcctctccagagtcggacacaggctcaaacacaaatcgactcgcatctaatttaaattaaaacttaagacacgcagggaccctatcactttcataaacaaccggttccacaacgtcacacagaataacacattcccctaccacaacacacaggacaggtacgaaaagccacacacacacacacggagcgcctgttgtgtgccaggccgtgctccaggagccaggggacgaaaatcagacgaaattcctgccactggggagctcaccccccgcctcgggcaaccggttcccttcttcaggtgctcccgggcccgcgctctggttcctgcttccctcccagccttctctgaggcccggactcgcactttcctccagccaactcctcgtcccaggttgctcctcttcccttcttgctttccccagcccaggctcccgcctccctcctcagccttccttacgggtcacaccgtcacccgccttctccgcgcccgcgggacccaccagcctcaccttcggttgccggccgggcgtctgcgcatgcgcactcccacgcggacgatgcctcccaggtgtctccgcggcgcgttcctgctgtccaccggctacgcgcgccttctccacatccgggcgtttccggccttggactacatttcccacaggcgcccgggcggttttcgaactttgatctctggttccccttccaaattctcatagtgcgtggctgggatgagggcggcgctcacggtgaggaagccccgagctcccgggacgcagacagggtgtgcagggccgtagctcgggcctgtgtatgcacctgtgcgtgtgtgtttgatgccaggacaaggcggcggtgtgcgcggcgaggaggctgcgacaggtgcgtgattgtgttcctgtccctgctcggatgcgggacctttgggtggccgtggtcggctgtcgggtgtgtgacactgtagggtttgagaccttccatcatgacagtgctgctgtggccgtgtgatggaagagccttttaggtctgtggtgttgtgtgtgtaacgggtaaagcttcatttctgcagtgctgtgtttaatgttgggactgaggggtctgtcgaagatctccccaatgtgcctgtgaggactatgatccatgcctatgttaagcagagtcatcttgcaatgaagcatggcccgcgttgtcttctcagggcacacctgtccccagttctcagcctggtgtttgacacaggggatcctggcggagtgcccacctaagcggcagttttagactcgattgtttcttgggctctgcatctctgagttcccagcttccttttttctcccgctttatagctgtatagaccccagctgcagtgaaatggccatcaaaaagggaagggataatcgagtggtggaataaaatctgcaaacagaaaaaggacagacctgttttcggaacgaggcttttcgagttgtaagtgtcccttaagcagagttctgggaagacgtcgtggggagaacctaggagtaggattccttcctcagaggctctcccttgggaactctcagaggtcaggttccatgtgatccacatcattcccagagctgtctccgcaggagacttaacgtgaattttgagaaagtccccagtcctggatatcagtgaccctggcctttcccttgaatactaagaagggttagcagtactcccatctcccttttacttccatctgagtatgtttatggtagatgatgagagctcgtgtggtggcaataattttttccaatttagccaatctgggttccaagaaaggtctgatgtctcatgattccttaccccttctcccttgccttgaggttctctaagagccctgaggaaagggaaccattgctgagcatatctgaaaaccaaggtcaaggaagttttgttgtattttctatttttgttctctttgattttgtttttcagcaagggagtattttttctcctcctgaaatgctagtcagtggttaggttactattaggcagggccttgtgaggtgctttgaccaatagaatgtggtggaagtgatattgtgagacttctgagacaaagcttcaggaagtcttgcagctttttctcttccccttttcctgccctgagaccaccatgactgaaggctaagagcaacttgcttgcgcattaaagatcacttggagagagaggtccagtgagcaacaacggccagaaatttcagggagaccatcttgaaccatccagcctccaccaggccaacagctgacagctgtcacatgaatatgatcagcagaagaaccactcaggcaagccaagcccaaattgccaagccccccaaataataagctaattgttttttgttttaagccataaacttttgaggtggttatatagcaataaataactgaaacaggtgtttaactttctagactttttaaatgaccatattgatataattgtattgttcaacctgttttgtaaagtgatttctctgatacagtatcttgaaaatattccttaactattttcta

SEQ ID NO: 1561466 - DNA, 4001 bp, Homo sapiens
tgagcctaggagttcaagaacagcctaggaaacatagcaagacccccaactgtacaaaaataaaataaaataaaattagccaggtatggttgtacatgcctgtagtcccagctacttgggaggctgaggtgggaggatcacctgagcccagggagatcgaggctgcagtgagccatgatcaagccactgcactccagcctgggcaacggagggagaccttgtctcagaaacaaacaaacaaaacaagaaaacaaaaaaatccaaagtatcctggaggcccttctccataaatccatgcaactgatcccttttcatggctgcataatactcctcagtggcactgtacttggttaatccaaccagtttccttctcttggatatttggaattcaattatttctttacactttccaaaataattccctgtgatgtagatccaatgaccctcacaaaaaccctgagtgaggtaggtcctattatacctgaaattgactaacatgactaacacaggagacactcatggcttgctcagtgttacacattgcagaggtggcctagccaagattttttaaatgacagcattgagatataatttacacaccataaaattcatccatctaaagtatacgattcaatggttgttggtatattcacaaaccatcataatgaacaatcatccacaacctaattttagaacatttcaatcaccatgaaagaaactccaaaagaatgcatgccaaatttaagatcattaagatgtatgcctatgtgttttttcctaagagttttatagtttcttttgttttgttttgaaacaaagtctcactctgttgcccaggctggagtgcagtggtgtgatcacggctcactgcagcctcgacctccctgggctcaggtgatcctcccacctcagtctcctgagtagctagccacaggggcgtgccactacgcctggctaatttttgtatttttgtagagacagggtttcactaagttgcccaggctggtcttgaactcctggactcaagcagtgcacacacctcagcctcccaaagtgctgggattacaggtatgagccaccaagccccaccaaaagtcctattttaaaatgtgctctttaataacatatcatgtaattagtaaagtcacttcctttgtatctcttatttttgatgaccactgtaaataagtctttttccccatactttccacatacacacacaccccctatttatttgttaatgttttttccaacaaccctgagttttctaattgttatcactgttcaatttttaataggatgaaaacttagaaatatttctgcctcagcctcagctgatatcccaaagatagcaaatgaaacaaaattctaagagaacttcattcaagaacaggatcttatagagctgttgagtgtaaaattttgctatcattaaactcctcctttaaagacagtggagaggctgagagaggagcatgtatttttaagagactgttatttttagaacagtgtttttccagggggaaaaacgtgagtgattctcccttttttacaacacacaaggggtccctcagaccctgaggccaccaggaaccaaagtggtgagagaattcttggcaaaaattttacatatttctaagatttgggagggcaaagtgactgaggtggctaattctcaccttagcactaggtgaagaccccatgggtggaggctgtctgggttgtcttgggtcctatcaaagaggaatgactggacaaacccacccaccagagtcggtgggccactgaatgcccagaggaagcactggggcagcagctggagaagaggctatgcccatgagaagggaagtgtatctggaggttccaagcagcaggttctcttggaaggtaagagatgacttacactaaattatagtggtatcagtcatgttagcctcttcttgtctctgacttctgtcttctcattcctttcccagctcccaatccatgagagctaaagactgcctatagggagtaaagaggagacaaaataaaggttggggaattagagaagaaactaatcatgtatcctttcacatttcaggcttccagcagaagaaattcatccagcaaaaaaaaaaataaatacacacacacacacacacacacacacacacacacacactctcaaataggaattttgagagtggcagttatgagataaagtttttttctgtgtggtcccagtggtattctattcatttaagcatatcagtcatcagtcaataccaggtttcccaataaatgatcttttttggaagggaagggacggagtctcgttctgtcgcccaggctggagtgcagtggcgcgatcttggctcactgcaacttccacctccgagttcaagcgattcccctgcctcagctcccgagtagctggggctacaggcatgcgccatcatgcccagctaatttttatattttttagtagagacggggtttcaccatgctggtcaaactcctgacctcaggtgatctgtccgccccagcctcccaaagtgctgggattgcaggcgtgagccaccgcgcatgggcccaatcttttttttttttttgagacggagtcttgctctgccacccaggctggattgcagtggcacgatctcggctcactgcaagctccgcctcccgggttcacgccattctcctgactcagcctcccaagtagctgggactacaggcgcccgccaccacgcccggttaattttttgtatttttagtagagacggggtttcaccatgttaaccaggatgttctcgatctcctgacgtcgtgatcggcccgcctcagccttccaaagtgctgggattacaggcgtgagccaccgcgcccggcccgcatgggcccaatcttaccctctgaaaattattttgcctcttcctctccattaaaaaaaaaaaatcactacttattttacttgtctaattaccagagtcaaattctacaggcatatataaaatgcccaatactcataaatcaatctaaacaatgcatactttagtcaacactcggtttctcaagcactccacctaagtcacacagtgtgccacattcacagtcatcataggtcgtgtacaccaaatacttttaaaattaggcatattcatagctgtatcacccactacatagtcataatcccataggcccccacgtcgtgcacaatttcacagaacttctacaaaaagtaacaacctttcactcacaatgccctcactgtcgcctctccagagtcggacacaggctcaaacacaaatcgactcgcatctaatttaaattaaaacttaagacacgcagggaccctatcactttcataaacaaccggttccacaacgtcacacagaataacacattcccctaccacaacacacaggacaggtacgaaaagccacacacacacacacggagcgcctgttgtgtgccaggccgtgctccaggagccaggggacgaaaatcagacgaaattcctgccactggggagctcaccccccgcctcgggcaaccggttcccttcttcaggtgctcccgggcccgcgctctggttcctgcttccctcccagccttctctgaggcccggactcgcactttcctccagccaactcctcgtcccaggttgctcctcttcccttcttgctttccccagcccaggctcccgcctccctcctcagccttccttacgggtcacaccgtcacccgccttctccgcgcccgcgggacccaccagcctcaccttcggttgccggccgggcgtctgcgcatgcgcactcccacgcggacgatgcctcccaggtgtctccgcggcgcgttcctgctgtccaccggctacgcgcgccttctccacatccgggcgtttccggccttggactacatttcccacaggcgcccgggcggttttcgaactttgatctctggttccccttccaaattctcatagtgcgtggctgggatgagggcggcgctcacgg

SEQ ID NO: 1561467 - DNA, 4001 bp, Homo sapiens
gaaaccaacccctcctggatacgaactgtatatagaataaatgagctactactactaatttggggatttaaaactagaagagaataggctgggcatggtggcttacgcctgtaatcccagcactttgggaggctgaggtcggcaaatcacgaggtcaggagatctaccatggtggctaacatggtgaaaccctgtctctgctaaaaatacaaaaaatcagccgggcgtggtggcgcgtctgtagtcccagctactcgggaggctgaggcaggagaatcgcttgaactcgggaggcggagtttgcagtgagccgagaccgtgccactgcactccagcctgggtgacagagcgagactccgtctcaaaaaaacaaaacaaaacaacaacaacaacaaaaactagaagaaaataatatatgagacaagaataacacagaaattggtggatattttggagttcaagtattttaaagtcttaaggttgagttttgttaagcatgcatattaaaaaaggataatagcagaaaccaacctaggggagaaaaagggataaggtgaatttgcacaataaaaaaagatatatgtgcaactattatatgtcaatcaaaaatgtttaaggcgtaatagaaaataaaacattttttatgagcaatcatgataaatgccactgaactatactcacctattaaaataacagtcaaacaagataaacggatgtaagcccagcaatatgctctttacaagacacagatctgaaacataaagacacaagggggttagaaaatgaaattcttaagaaatacaataaaacttgaaaagcaatattatcagacaaaagagaacccggactaaaaggcattcaccaggataaagaggtatgtttcttaaggtggtagactggaattttagtccaattcctcacaccctctaatagattattattcatactctttgcgaggtaactttgctctccaactgtgggcataattgattttaggcttagccatgtgacttgctctggttgaggcaatctctcttgcgctctggtgacccatcaggagcagagcatgccctggcaacaaatgtccttttggcctgagaccctgaaagaacacatgcggcgcagatcttaactcgtcacgcagcctatccactcagccaagccccacctagatcagctgaacacagtcaatgcgcaagcctgtgaacaggagagtaaggacttgctgttgtatggcattgagttcaggggtggtttttagacataattattatcatggcaatagctaactaacatacataaaagcagcaagtcataagataataatgaacctgaaaagttcgccaaggaatagtggaaaattacaaagggccaagggctactagggtaaaaaagacagcaaagaagactacagaggagtggccaacaaggagggaggatcagtagaaaacaaataagtgtttttcaagccgttaccaactgtgccaaatgctacagaaaagccagctcaagacaagaactactagacatattacaatcacgcacacttcgccacgttcacactcgctacagccttaatcataatcacacacatatcacacatttcatcataatcccgcgcaaccaaatatcacaatcaccccatcagattattcgtgccgtcacactcacacacacaaccacacacccacactaactcccatcacagttttttgtcccatcaactgcaaccactcaccattagcgtaccctgagcactccccactgccgctactcgggacactctgggccttagaggatccgtgtcccgtcaaccgcgagtcccttgctcgccccctgctgcggggactcggcagcgtcacctgccggaaacacccgaatgttcatcccgcgcgcagtttctgagatgctgggtgaaggcgacccgcagataggtctgtgacagacgcctaaagcgccgaaccatccctccgcgccagcgacgtttccgaggacaacacctcccagcaggccccgcggccccactcaacttccggccagaacacatctgctttcctgtgtgagggtgaggcttgggccgggttccccgggaggctcatctccattgcgcagcgctacggcgacccgcaactccgaggctcggctggatgttgagagttgagggagcagccgtttcgggtgggcccaggcgaggagctgacaggaatcggcgtgggtcccgctctggactacatttcccagagggcctggtggcctgccacttttctcgcaggaattcgaacgtttcgtcactcctggcgggacccttagatctgggaggtgagatattttggtccccaggagaactggctcaggtctgcaagttcccatccgggatgactggaaagggcttaggtgaggataccgaagaccgatggggagctggcgccttgggcccctgcgggcggagcggcctgaaaggtggaggttgtgtttgggaggccgaggcaggaggatcacgaggtcaagagatcgagaccatcctggccaacatggtgaaaccccatctctactaaaaatacaaaaattagctaggcatggtggcgcgcgcctgtaatcccagctactcgcaggctgaggcaggagaatcacttgaacccgggaggcggaggttgcagtgagccgagatcgcaccactgcactccagcctggcgacagggcaagactctgtccccaccccaccccacccccccaaaaaaagaggggaggttgtgaaattgtctgggagataataacactgcggcttatgtgcggatatgggatacctgtcactgtgggggttgtggctgtgtgttcccgtggtgatgtgtgattgtgactctgcgacagtgtggggtgcctacgattgtgcagctgtaattgtgtgtttcctatggtgtgtatgtgattgtaactgtgttgccgtgtgtggctccttgtgggcaggtgagacgtgcatgtcgccttaagtgtgactgtccctaaatgtatgtggcattctgtgtatgagtatggggtcctgtcaactatgcgattgtgactccagaactctgtctctaggaaacctctctgaggtctggtcagattccaaccctggacagcagtgaacacaacctttcccctgagccactggaattggacagaatgccccattctcctctgatctccattcctcatgtgtggtgggtaatggggctggggaagaactcttacttgactaatctgggtaccaagaaaaacctggtgtctcacagttactcttccctctcccaattttacctttctccaggtgtcacccagaagaggaggaaagaatgcatgatgaacttctacaagcagtatccaaggtgtgttggggtttcctctttttcttctgaaaattcttgcttaaaggaatgtcatttaattataggtccctataattttcccatcacagaaaaggatggttgctccacttatgcttgctgaattttcttctcaaatatttattctgatttaaaaataaaaggatgattaatttagagatctcaaaaacacagcattaccaagaaaaaataaaatttagccactcagataactagggttaatattttaatgtattttcattatttgtcaaaaaccaaattttatttcatttaccatttgatgttctacatttttgcaaaaagaagtgtcagaaatattctcccatgtcatcaaatggtcttgggaaatacatttttgatgtttgcaaaaactatgatatacaaatcagacatgccagacttttaaatcctcatttgaatatatatctgtacttatacccgcccacccccacaggtttgaatttgggtttccgtgattaataataaaattgaacatattccatatgtttattggtttttagtcatcttttgtgacatgtcagttcaaatctttactcatttttctcttggaatagctcttattgattcgtatgagttatttatgtaatctggatctca

SEQ ID NO: 1561468 - DNA, 4001 bp, Homo sapiens
tctatgaatgaatgaatccttaatatatgaagaactctggaaaagaaatttgaaaacagaacactactttagaaaacatataatttacaaaagatttttttaaatgcttgacttcaataagtaatgaaacaattgttttagagcaaattaatttatatccatgaggttaacaaagattactactatttagaatatccattgttatcaacagtgtatgaggatataagcagtcttatactatgccaataatactgcagattattggaactttacagaataattggataggttctgggaacctttaataaaagcatacattttaacctatcaattctacttttaggagtctgctccccctccaaaaaaatttagaaaagtatatttaaacacgtgccaaatagttgctgataaacacagtttataatttcaagaagctacagagaactaaatcacccatcaacaggggtaaacgtataccatgaaatactttaaaatgaatgcataatttgtgattgtttaaatggaaagatactaatcatacattgttaaacaagaaaggttggttacagagctgtatgtatagtgttactgcaattttgaagccattatgcacacatatagaacatatgaatgtatacgtatgtatacacaaaggcgggggtgaaaagatggaaagtaaattttgacagtagttgcatggcctgtagaactatgaatgatttttgttcttcgagcttttctgtatttttctccaccccactccactccccaaatggggtggagtagggaaggaggagaatgagtttagtaagtacacaaaacaacgtagctaatacacgaaaataaaattaaaaataaataaatattaaagtgttggggatatcgatgtttcatataaaaacatatttccggccgggcgcggtggcttacgactgtaatctcagcactttgggagaacgaggcgggtggatcacctgcggtcagttgttcgagaccagcctgacccacatggagaaaccccgtctctactaaaaatacaaaattagccaggcgtggtggtgcgcctgtaatcccagctactcgggaggctgagggaggagaattgcttcttcccaggaggcggaggttgcggtgagccaagatcgcgccattgccctccagcagcctgggcaacgagagcgaaactccatctcaaaaacaaaaacaaaaaaacaacgtatttccaatgaccaaagctaaagacatgcagcgctggcacaaacgccaagtctcacacatctacacccacaagcacaccctaccttgtatccacagtttttcattcattcaagatcccactgtcatgcacgtttgcacgcaggttcatactgaaagataaaagggaaagcgcctccacgaaatccgcttacggacacgatcccggggccacactcagccagacgaatgtctggcaaatgacagtcacttcacgccagactctcacagtccttcacacgccactcccactgcctcagggaaccacaagcacaggcatcgccccgcccggcgtcctcctccaaagattggggcaccaggaccgcgggcccccactcccacccagcacaaagagtccggcgctcagagctagcggtttcccgaggactcaccaccaagcccgcggacacaggccccgattccacacttaacgctgccaaagtggcagagccggcgcgggctgggacagaggcggcactgaggccggcgctgtcggtggctgagagcgccacaagtctcggtccgttacaccaggggcgacgcttcccagaggcccccgcggctcacccgggcgggactggcttcactgtttgcgcgtcctgagaagcagaccacggtgttccagggctcacagctccgcgcaggggagctcagcctaggttttgcacgagcggcctcccgcgagcccagctctgagagattgggagcgcaacttggtgctgagaagaatcgaatcgttccgctgcttcctgcgccgaactacatttcccagaggccttcgcggccctacttccccgaccccacctgcaaaaaggcacttccttcttacagtcggctggagctgcaggttcgcaaggtccgtgaaggaagcccggctcagtgtgtttagttccgtctttttgggtctctacctgaggctagaatacagcggggtgaaggtggtgagagctccagggccagtgaaggccgggtcagctggagccttaaggtcctgacagcggctagaagagggaggagtgacgtagtgtgactgtatgtgtgaaacttcggccatggaatttggagtggggtttccagggcgagagaccctgtccagtgacatctgaggtcgtgcgaatatgcgaccttttgtgtgaccatggtcgcgttttatattctcgtggctgtttgattctgaccttgcagttttgtcagagacaatgtgcatgtatttgttctttctggacttctcgattgtgagtgtgacagtgttattggatttcatgacccgggatcgtgagcgaaaagtagtgtggccagaccgcctgacttctaaacagacttggccttactagctgtgtcatctcagactaggtacttaacttctctatgcctttcgtgtttttttttttttgtttgttttgttttttttgaggcagagcctcactttgttgcccaggctggagagtgcagcggcgcgatgttggctcactgcagcctcgaactcccgggctcaagcgattctctgcctcggccttccgagtaactgggaccacaatcaagggacactccgcccggctgatttttgtttgtttgttagtagagataaggtctcgctatgttgcccaggctgctctcgaactcctgagctcaagcgatcctcccgcctgggcctcaaaaagtgctaggattacaggcatgagccgcacggggccggtcttaatacctttaataaagagataataggccggacgcggtggctcacgcctgtgatcccagcactttgggtgggcaaagcgcacggatcatttgaggtcacgaggtttttgtttgtttgttttttaagacggagtcttgctctgtcgctcaggctggagtgcagtggcgcgatctcggctcactgcaacctccgcctcctttcgcctcccaggttcaggcaatttttctgcctcagcctcctgagtagctgggacttaaggcgcgtgccaccacgcccggctaatttttttgtatttttagtagagacggggtttcaccatgttggtcaggctggtctcgaactcctgacctcgtgatctgcccaccttggccttccaaagtgctgggattacaggcgtgagccaccgtgccaggctgagggtagcgggtgggagactgccaggagtgtagtgcgcttgcgcagtttaccaccctgcatcccccccaccccgctcccctcccaatttttttcgggtatccagcacaattctaggaattcgcctcccacccattttgagtagacgcgccactagcgcgttcccacgcacaaaccttttccctgcggccaacctgcgattctcaactccccgccctggttgctaagggaggcgcgcagagcgcttgtgcctgcgcacttccacaccagcccgtgtagtgtgacgctgggccccgtccctgtgaccgggccaggctcggagctgcagggaatccggactttcgggctctctggaaggccggggagaggccagtgtgggaggacctggtggggaggaggccgtgttacaaaccctgcgcggagctgcaccgctgctgccagacactgcgacgccgcgaccttttctactccggactacgtttcccagcggaccccgcgggagttgggccggcggcccctttgtgtcctccgggggcggaggcagctgaggcgcttctttccgggcccgtaagggctgggttccatccaactaagggtagcggtgagacccgagtgcagattccccgagccttcg

SEQ ID NO: 1561469 - DNA, 4001 bp, Homo sapiens
tcatcccgtagagtgagaatgcagcagaatcagtgctttccaccccttgtgtaagtgggggaagggagttccaaggcagtctttatgactttacatggccagaaactgcttttcccagtcagcaaacagatgatggatcagtgaagcaatactcctggtgacaaactggaaactaaccagaatggaacacgcctcagttttacaggtttttgcagaatttgcattaatctcatgtctagctgaactgaaatggaacacgatcacacactgtcgcaaactctgcaccttgtatggaagaataactattattttttgtctgattgctttggcatttgaaaaactactatttttatgaacattttaatccatctctagctgctataagatgtggaactgcgcacactttctctacaattctggtgggagacagaatattcctgagagacttccttaggccatgcttagcctgtaccccacgataaacaggtgttatcctgacggaccagaaggcagaaaacacacttgaacattttcctattgtcactaaggagaagaaaaaagccaaacaggagaacagtacagtacatttactgacaccggctgcccgaataaagctttcacagcattagtgataccctgcaacaaaacccccagggcagctaactcccaccgctgaggtcgtcccccaaactgcctctgacccccaggccgtcccttgccatccccccaagctgtcccctgtaaggttctctgagctggccgcaccatggtcaagccccccgcccttgtgataatgtactttgtgatattcccccgcccttgtgaatgtactttgtacgatacgtcctcctcgcccttgtgaatgtaccccgcccttgtgacaatacacgctcgcgcccttgtgaaggtactttgtaatattcctcccagcccttgtgacaatacatcccccaagcccttgtgaatgtactttgaaacatcgtcgccgcccttgagaatgtactttgtaacacccaccaactgtcctcaaaaaaactgctcctaactccgatgcctgtcccaaacctataaggactaatgattgccgggcgcggtggctcacgcctgtaatcccagcactttgggaggccgaggcgggcggatcacaaggtcaagagatcgagaccattctggccaacatggtgaaaccctgtctctactaaaaacaaaaattagccgggcgtgagggcgggcgcctgtaatctcagctactccggaggctgaggcaggagaatcgcttgaacccgggaggcggaagttgcagtgagccgagatcacgccactgcactccagcctggcgacagagcgggactccgtcccaaaaataaaaaaaataaaaaaataaaaccaataataatcccatcaccctttgctgagtcctttctcagactcagcccacttgcacccaagtgagtaaacagccttgtggctcacactaagcctgctcaggtgacctcttatacggacacgcgtaacatccccaacctgctgaccgtcccttgccgtccccccaaactggtccctgacccctgaccgcccctaccgtccccccaaactacctccagcccccctcctgcccaggcctccccctaagttacccccaagctccttgccgccccttccgtccccccaaactgcccccagtcctccagcccggccgctgtgatggcgtccccgggtcccaggtgctagtcctgcgccgccccgcgcgtccctcagccaatcccggccgcagacttcggcggactctggttccagccggttcccgtcgctccgaccgtcccctggctctgctcctgcctcgcactcaccatgtctcccctgctcctgggctctccaaggcgagctctccgtggcctcgcggccggcgcagctgaaaggtacaggtactcccgggccgctcgtggtaggcagggcacgcgcggcagggaggacgaaacgtcccgccctcggggcctcggagctcaggaagcggcgccctgattggacaatctctaagcccccgccctttcaacgctctgagcggacagcgttttggacacgcccccttcacccctggggccttcgattggacactactgcaaacctgcaatccgcttcccggtgtccgccccgtgccttgattggacagttttccggacccgcccccggagcacctgattggaagataacttccgcgccgccccgcctcctgtcgcccgagtgaccggcgcgtagccaacgctagtggctgacccgccagcggtggacactcccgtttgcgcgaactcgctctggcccggggtgagcccaacctctccccgcagctcggccgcgcctcccgcgtccttctcccgaacgggcacgagaagtccagactcagtttccccacggagcagccggagtgctgcgtggaggggaggggcgagcgagcggcgtgggtcgcgtggggtgagcccttcgtggggcggggtcctcagccgtgacgtcaccgcgctgccccgcgtgggcgcggaccccatggaggccctgccccgtgctggagcacgtgctgtcagtgtcctgatttttttttttttttttttttttttttttgaggtggagtctcgctctgtcgcccaggctggagtgcagtggcgccatctcggctcactgcaagctccgcctcccgggttcaggccattctcctacctcagcctcccgagtagctgggacacaggcacccgccaccacgccggctaatttttttgtatttttagtagagacgaggtttcaccgtgttagccaggatggtctcgatctcctgacctcgtgatcggcccgcctcggcctcccaaagtgctgggattacaggcgtgagccaccgcgcacggccagtgtcctgatttttttacccaaacgtttcccagcctcctgtccttcccacaggcccctgcactttggctcgcccccgacatctgagcctgcactaaaataaggaccaaacctcgagtcacctgatcccgaaaatgggcggaccccagggagcccctatcctgtctggcctcgctggatttgtttttttgttggacattgttttttgttttatttatttttttattttgagacggagtctcacactgtcgccccggctggagtgcagtggcgtgatctcggctcactgcaacctccgccttcagggttaaagcgattctcctgcctcagcctcccgagtagctgagattacaggcgcctgccaccacgtccggctaatttttgtatttttagtagagacgggggtttcactatgttggccaagctggtcttgaactcctgacctcgtgatccgcctgcctcggcctcccaaagtgctggaattagaggcgtgagctaccgcgcccggcggacattctttagatcaagaaatccggggccgggcatggtggcccaagcctgtaatctcagcactttgggaggccgaggcgggtggatcacgaggtcaggagatcgagaccatcctggctaacacggtgaaaccatctctactaaaaatacaaaaaaattagccaggcgtggtggcgggcacctgtagtcccagctactcgggaggctgaggcaggggaatggctgaacccgggagacggagcttgcagtgagccgagatggcgccactgcactccagcctgggcaacagacggagactccgtctcaaaaaaaaaaaaaaaaaacaaaatccaggccaggcgtggtggctcacacctataatcccagcactttgggaagctgaggtgggtggatcacctgaggtcaggagttcaagaccagcctggccaacatggcgaaaccctgtctctactaaaatacaaaaattagctgggcctggtggcgcgtgcctgtaatcccagctactcaggaggctgaggcaggagaatcgcttgaacctgggaggcggaggttgcagtgagctgagatcctgccactgcactccagcctgggcaaaagaa

SEQ ID NO: 1561470 - DNA, 4001 bp, Homo sapiens
gctcagccaccagggtatctatcacaagcgacaatctcacaacccagtcacaaagaagccgcgggtatcggcccaacaaggtgcagcgaacagtcgcccgctcccgcctcaactcacagcctcacattccacggtgccattgacttcctcgcacccagtcacacaggacgtggacaggcacacggggtgacagcctcgcactgaacggtaccaacctccactcgcaccggagtcacacagatggcctgcgacgagcttccggagacccacacgccactcctcagcccactcccgacctgcagaacagaactggtggaagatctccttcctgccccgaaggctcggggaatctgcactcgggtctcaccgctacccttagttggatggaacccagcccttacgggcccggaaagaagcgcctcagctgcctccgcccccggaggacacaaaggggccgccggcccaactcccgcggggtccgctgggaaacgtagtccggagtagaaaaggtcgcggcgtcgcagtgtctggcagcagcggtgcagctccgcgcagggtttgtaacacggcctcctccccaccaggtcctcccacactggcctctccccggccttccagagagcccgaaagtccggattccctgcagctccgagcctggcccggtcacagggacggggcccagcgtcacactacacgggctggtgtggaagtgcgcaggcacaagcgctctgcgcgcctcccttagcaaccagggcggggagttgagaatcgcaggttggccgcagggaaaaggtttgtgcgtgggaacgcgctagtggcgcgtctactcaaaatgggtgggaggcgaattcctagaattgtgctggatacccgaaaaaaattgggaggggagcggggtgggggggatgcagggtggtaaactgcgcaagcgcactacactcctggcagtctcccacccgctaccctcagcctggcacggtggctcacgcctgtaatcccagcactttggaaggccaaggtgggcagatcacgaggtcaggagttcgagaccagcctgaccaacatggtgaaaccccgtctctactaaaaatacaaaaaaattagccgggcgtggtggcacgcgccttaagtcccagctactcaggaggctgaggcagaaaaattgcctgaacctgggaggcgaaaggaggcggaggttgcagtgagccgagatcgcgccactgcactccagcctgagcgacagagcaagactccgtcttaaaaaacaaacaaacaaaaacctcgtgacctcaaatgatccgtgcgctttgcccacccaaagtgctgggatcacaggcgtgagccaccgcgtccggcctattatctctttattaaaggtattaagaccggccccgtgcggctcatgcctgtaatcctagcactttttgaggcccaggcgggaggatcgcttgagctcaggagttcgagagcagcctgggcaacatagcgagaccttatctctactaacaaacaaacaaaaatcagccgggcggagtgtcccttgattgtggtcccagttactcggaaggccgaggcagagaatcgcttgagcccgggagttcgaggctgcagtgagccaacatcgcgccgctgcactctccagcctgggcaacaaagtgaggctctgcctcaaaaaaaacaaaacaaacaaaaaaaaaaaaacacgaaaggcatagagaagttaagtacctagtctgagatgacacagctagtaaggccaagtctgtttagaagtcaggcggtctggccacactacttttcgctcacgatcccgggtcatgaaatccaataacactgtcacactcacaatcgagaagtccagaaagaacaaatacatgcacattgtctctgacaaaactgcaaggtcagaatcaaacagccacgagaatataaaacgcgaccatggtcacacaaaaggtcgcatattcgcacgacctcagatgtcactggacagggtctctcgccctggaaaccccactccaaattccatggccgaagtttcacacatacagtcacactacgtcactcctccctcttctagccgctgtcaggaccttaaggctccagctgacccggccttcactggccctggagctctcaccaccttcaccccgctgtattctagcctcaggtagagacccaaaaagacggaactaaacacactgagccgggcttccttcacggaccttgcgaacctgcagctccagccgactgtaagaaggaagtgcctttttgcaggtggggtcggggaagtagggccgcgaaggcctctgggaaatgtagttcggcgcaggaagcagcggaacgattcgattcttctcagcaccaagttgcgctcccaatctctcagagctgggctcgcgggaggccgctcgtgcaaaacctaggctgagctcccctgcgcggagctgtgagccctggaacaccgtggtctgcttctcaggacgcgcaaacagtgaagccagtcccgcccgggtgagccgcgggggcctctgggaagcgtcgcccctggtgtaacggaccgagacttgtggcgctctcagccaccgacagcgccggcctcagtgccgcctctgtcccagcccgcgccggctctgccactttggcagcgttaagtgtggaatcggggcctgtgtccgcgggcttggtggtgagtcctcgggaaaccgctagctctgagcgccggactctttgtgctgggtgggagtgggggcccgcggtcctggtgccccaatctttggaggaggacgccgggcggggcgatgcctgtgcttgtggttccctgaggcagtgggagtggcgtgtgaaggactgtgagagtctggcgtgaagtgactgtcatttgccagacattcgtctggctgagtgtggccccgggatcgtgtccgtaagcggatttcgtggaggcgctttcccttttatctttcagtatgaacctgcgtgcaaacgtgcatgacagtgggatcttgaatgaatgaaaaactgtggatacaaggtagggtgtgcttgtgggtgtagatgtgtgagacttggcgtttgtgccagcgctgcatgtctttagctttggtcattggaaatacgttgtttttttgtttttgtttttgagatggagtttcgctctcgttgcccaggctgctggagggcaatggcgcgatcttggctcaccgcaacctccgcctcctgggaagaagcaattctcctccctcagcctcccgagtagctgggattacaggcgcaccaccacgcctggctaattttgtatttttagtagagacggggtttctccatgtgggtcaggctggtctcgaacaactgaccgcaggtgatccacccgcctcgttctcccaaagtgctgagattacagtcgtaagccaccgcgcccggccggaaatatgtttttatatgaaacatcgatatccccaacactttaatatttatttatttttaattttattttcgtgtattagctacgttgttttgtgtacttactaaactcattctcctccttccctactccaccccatttggggagtggagtggggtggagaaaaatacagaaaagctcgaagaacaaaaatcattcatagttctacaggccatgcaactactgtcaaaatttactttccatcttttcacccccgcctttgtgtatacatacgtatacattcatatgttctatatgtgtgcataatggcttcaaaattgcagtaacactatacatacagctctgtaaccaacctttcttgtttaacaatgtatgattagtatctttccatttaaacaatcacaaattatgcattcattttaaagtatttcatggtatacgtttacccctgttgatgggtgatttagttctctgtagcttcttgaaattataaactgtgtttatcagcaactatttggcacgtgtttaaatatacttttctaaatttttttggagggggagcagactcctaaaagta

SEQ ID NO: 1561471 - DNA, 4001 bp, Homo sapiens
ctggagacagagcaagactccgtctcaacaaaaaaaaaaaaaaaaaaaatgtactcactggccaggcatggtagctcacgcctgtaatcccagcactttgggaggccgaggcaggtggatcacctgaggtctggagtttcagaccatcctggccaacatggtgaaaccccgtctctactaaaaatacaaaaattagctgggcgtgatggcgcacacctatcgtcccagctactcgggaggctgaggcaggagaatcgtttgaacccaggaggtggatgttgccgtgagccatattgcgccactgcactccagcctggcaacagagtgagactctgtctcaaaaaaaaaaaaaaaaaaaaaaaagaataaataagaatgtactcaccacattacaaggaagctagtgttgctggaactgagtgactgagttaaagacaggatgagaaaaattagatgaagtcagagggacagtcagggaccagattatgcagggccctgcaggtcaagacaaggacttacgcgtttatcttgaataagatgggaatccaatggagagtgttgataagggacatgactggttacccagaaacgtttcagcagaaggaaaattagtacctgcttgttttgaaaagcagacaggtattcaggaaatcgagaaaacaccaacacacctggtacatggctttaagaagcccaacagccattctttcttcctcctggctcttctcttgggaaatagcagtggcctcagatgactgagatggggaaaagaacatgagaaactagacttttcttgcagcatccagaatcaccagtctagactttttaggattctctttcctcctcttgcaaccttccctccaatagagagagcataatggagacctaggaatttgtttgcatacaatttaactgatgcctaaatcatttcccaattccttaggttaacaacagatgttctaggctttacaaatacagactcagaggaatgtaagttttcacataaagacacagaactaacaaataagagcaccaagatcaaataaaagaggacctgaccccacaatcctcctctccaataaatcagtgattctgaaacttggtggcacattgatatgacttgggctggctttaaaagcctctccgtggcacacagtctctcactcaatcccccacataatcagagtctgaaaaactacagtgccaaccaccgtcttacccacgccacagtcagaggccatgggtatggactgcctcacacgggcaccctttcccataccggcaaggctcagccaccagggtatctatcacaagcgacaatctcacaacccagtcacaaagaagccgcgggtatcggcccaacaaggtgcagcgaacagtcgcccgctcccgcctcaactcacagcctcacattccacggtgccattgacttcctcgcacccagtcacacaggacgtggacaggcacacggggtgacagcctcgcactgaacggtaccaacctccactcgcaccggagtcacacagatggcctgcgacgagcttccggagacccacacgccactcctcagcccactcccgacctgcagaacagaactggtggaagatctccttcctgccccgaaggctcggggaatctgcactcgggtctcaccgctacccttagttggatggaacccagcccttacgggcccggaaagaagcgcctcagctgcctccgcccccggaggacacaaaggggccgccggcccaactcccgcggggtccgctgggaaacgtagtccggagtagaaaaggtcgcggcgtcgcagtgtctggcagcagcggtgcagctccgcgcagggtttgtaacacggcctcctccccaccaggtcctcccacactggcctctccccggccttccagagagcccgaaagtccggattccctgcagctccgagcctggcccggtcacagggacggggcccagcgtcacactacacgggctggtgtggaagtgcgcaggcacaagcgctctgcgcgcctcccttagcaaccagggcggggagttgagaatcgcaggttggccgcagggaaaaggtttgtgcgtgggaacgcgctagtggcgcgtctactcaaaatgggtgggaggcgaattcctagaattgtgctggatacccgaaaaaaattgggaggggagcggggtgggggggatgcagggtggtaaactgcgcaagcgcactacactcctggcagtctcccacccgctaccctcagcctggcacggtggctcacgcctgtaatcccagcactttggaaggccaaggtgggcagatcacgaggtcaggagttcgagaccagcctgaccaacatggtgaaaccccgtctctactaaaaatacaaaaaaattagccgggcgtggtggcacgcgccttaagtcccagctactcaggaggctgaggcagaaaaattgcctgaacctgggaggcgaaaggaggcggaggttgcagtgagccgagatcgcgccactgcactccagcctgagcgacagagcaagactccgtcttaaaaaacaaacaaacaaaaacctcgtgacctcaaatgatccgtgcgctttgcccacccaaagtgctgggatcacaggcgtgagccaccgcgtccggcctattatctctttattaaaggtattaagaccggccccgtgcggctcatgcctgtaatcctagcactttttgaggcccaggcgggaggatcgcttgagctcaggagttcgagagcagcctgggcaacatagcgagaccttatctctactaacaaacaaacaaaaatcagccgggcggagtgtcccttgattgtggtcccagttactcggaaggccgaggcagagaatcgcttgagcccgggagttcgaggctgcagtgagccaacatcgcgccgctgcactctccagcctgggcaacaaagtgaggctctgcctcaaaaaaaacaaaacaaacaaaaaaaaaaaaacacgaaaggcatagagaagttaagtacctagtctgagatgacacagctagtaaggccaagtctgtttagaagtcaggcggtctggccacactacttttcgctcacgatcccgggtcatgaaatccaataacactgtcacactcacaatcgagaagtccagaaagaacaaatacatgcacattgtctctgacaaaactgcaaggtcagaatcaaacagccacgagaatataaaacgcgaccatggtcacacaaaaggtcgcatattcgcacgacctcagatgtcactggacagggtctctcgccctggaaaccccactccaaattccatggccgaagtttcacacatacagtcacactacgtcactcctccctcttctagccgctgtcaggaccttaaggctccagctgacccggccttcactggccctggagctctcaccaccttcaccccgctgtattctagcctcaggtagagacccaaaaagacggaactaaacacactgagccgggcttccttcacggaccttgcgaacctgcagctccagccgactgtaagaaggaagtgcctttttgcaggtggggtcggggaagtagggccgcgaaggcctctgggaaatgtagttcggcgcaggaagcagcggaacgattcgattcttctcagcaccaagttgcgctcccaatctctcagagctgggctcgcgggaggccgctcgtgcaaaacctaggctgagctcccctgcgcggagctgtgagccctggaacaccgtggtctgcttctcaggacgcgcaaacagtgaagccagtcccgcccgggtgagccgcgggggcctctgggaagcgtcgcccctggtgtaacggaccgagacttgtggcgctctcagccaccgacagcgccggcctcagtgccgcctctgtcccagcccgcgccggctctgccactttggcagcgttaagtgtggaatcggggcctgtgtccgcgggcttggtggtgagtcctcgggaaaccgctagctc

SEQ ID NO: 1561472 - DNA, 4001 bp, Homo sapiens
taagacagtacaaagaagcaattagctaaaagcagtatacagaatattctacgggacagatgatctagtttttctacaaatcaacagcaccaattaaaccaaaacaaaacacaggagggaaactatcatgcattaagtaagtttaacaggtttggccaccaaatgcaatgtgtggactctatctggatccagatttgaacacacctattgtaaaaatatgtctttgaaataattgggaaaatctgaatatgggggtatacaagattatgaaataaccaccacgctgttacaccaacataagaaacaaatttattgttttaaacttattgttagtttttttttttatgttggtataacagcatcatggttattttaaaatataatgtcctttttggtaatatatgcttataagaggataaaatacaattttgaaatactataggaaaaaacggggaaggattgatacaaaggtatttacaaatgtttttaattacagctaggtgttgaacatgttggggttcgtattattctttagcctgcttgaaaacatccacaataaagttaaaattttaaaactcttcaaatttcccccagaaagtacagttatttttcatcaaaaccttagaccaggccaggcgcggtggctcacgcctgtaatcccagcactctgggaggcccaggcgggtggatcacgaggtcaggagatcgagaccatcctggctaacacggtgaaacctcgtctctactaaaaacacaaaaaattagccgggcatggtggcgggcgcctgtagtcccagctactcgggaggcttaggcaggagaatggcgtgaacccggaaggcggagcttgcagtgagccgagaccgcaccaccgcactccagccagggcgacacagcgagaatccgtctcaaaaagcaaacaaacaaacaaaaaaatcttagaccagaaaggactgctgtatcattgggtggaaaggagaggtgtagtgtggctggggagtagagctaaactgatgatcccatccccgcagcatcatttatggggtgcctaaggaccagtcactagcatggctggttcttccttaggaagatgttgctggaggtagaaaacgtttcggaaaggaagaaatttgaggttagaaagaaaacaggaacttcacacaagactttcagaagtgcgatattcttttcctctgggtgcctctcttggaaaacgcagaaccgagaaaagaaataagcatcatagaacatcagagctctcggagcagacgaaacaatttaggataacaccaacctctagaaagggattagtcttccccacagggctgtcaagctagaataggacatctttaacagtggtcttcttcctaagacacttccaggggtaaagcctcaccatcagggaaacttcaaaaagagcctcttactctgcaaagaaactgcagcagctgtaaccgcacgattctcagctggcttaatgatgtccgtgtcacacgaggagtactgcggcccgggaggggccaagcgctaggagcattaacaggcggcaggtgagcccaccccgcggccgcacaagcgcacacgcacacgtccagggcggaggaacactactagtaacacccgcctccttctagcctccctatcccaaagttatggtgccgattttgtccgcggcaggggctccaggggcacactcataaattcggtgcggaggaacacaactagcagcaccacacccccgccactgccagaaccaaagtgacggtgccgacacccctccgcaagcgcaaggccgacttccataagtaattagccagagcaccgtcccgttcctgtcagcaccgagccccagccaggacaccggtattcccagcaccatacaagaactactttttcgatgaagcaacccaaaagctgcgagcggttcccggtgaggccgcccactcacctggccggcgcagacaagctccgtgcgtcaagacataacagcgtaagtgtacgacgttgcgcagcgacgcgggggccttcgggaaatgtagtctacaactggaaaccggccggatcgtgtctgcgcaggcccagcagctaagatcgggtccggcgctccagaacagaacgatccctgaggctcccttgctcgaactgtgggacttaccctactatggtccgagcctaccctatttcattatactcaagtaacgccccagaaattccagagaatctcacacaaagaggttgagtcttgccgtggtgccttcaggggaatgtcatcccgggctagaagagctgcaaaaggctgtcaggtaaggtctggatttctctctgacagctctggccgtgacgcagtggccacgataccgggttgctgctcaacggggttcggaagtgtgacgcattctttgcggccatgtgtgtgtgtgtgcgtgtgtgtgtgggtctgtgcgcgcgcgtgtccgagtgtcctctgtgggtgcagagtgggtagtggccatgcctgtgtgatgtgcgtcagattatgcttgaggctattagtggcgcatttagtattgtgtgcggaagggtcttgggaatggtttgattatagctttgagggtgactgatgtctgtttaatcagattcagcctgcgactgagtatcttataacctgtaagaaattgatttttctttgcatggtcatgaatttaaaatagattcccatgaaattatataaatgtagtgaatgattcattgagagttcgcctgtggcagtgaatgtggggaaagaagtgtgtgagcataatatggtgagaatgagcacgattgtgtgcagcgctgtattatagtgatatctcctggcttcagttttctcacctgtaaagtgagggtgtcagtcgtgtaacgctttggaacaatgctttttaataggaatttctgcaaaactgagttccattttttatatctgtgctctccaatatagtagccactagctacatatggctattgagaaattgaaatgtggctggtttgactgaggaacgaattttttaaattgtgttcaattttaataaatctaaatgtaaacagctatatatggctaatagtcttcctattgaacagtacaacctggagcattaatttgccttcaagatttgaagggggtaaaaacttaattcatctagcaaatatttgaaaatgaaattcttaaaacttccttaaatttttttttaaatttgagatgattgtagattcatatgaggttgtaagaaataatagagacattgtgtgttatcttcaacttagtcttctccaatgacaacatcttgcaggactgtagtataatatgacaaccaggatgttgacattgatagtcaagatagatcatttccatcacctcgaggatctgttgtgttgcccttttatagacaaatgcactttcttccctcttgtttgaagatattcgcgtcaacattaatgataatgtaggcatacctcattttattgtgcatcattttattgcactttgcagatactgtatttgtttgttttaaagagacaggctctcactgtctcacccaggctggagtgcagtggtgcagttatagctcactgcagtctcgaactcctgggttcaagggatcctccagctggcccacaaagcctgaaatatttattatgtggttctttgcaggaaaagtttgcagactcccaatctatattatttctgatggctactttattttctattatatggatacactagaatttatttaacctgttctttattgaagtctaatttatgtttgtatctagctttttccattttaaaattagtctatctgcacctgtctgcatatatcctagtgaacatatataattattttccttagacagggtcataggagtgggattactgaaacatctggctcatattattaaattctgctaatataaatttctaatttaccctctttaaggtggcaccagtgtataacatggcgtgagggcatctattttactccagt

SEQ ID NO: 1561473 - DNA, 4001 bp, Homo sapiens
gctatgaggatgcaaagacataataatgatataatggatctcaggaggctgaggcaggggaattgcttgaactcaggaggcagaggttgcagtgaaccgagactgcgccactgcactccagcctggccatagagcaagcctttgtcataaaaaaaaaaaaaaaagccggtcgtggtggctcatgcttgtaatcccagcactttgggaggccgaggcgggcagatcacgaggtcaggagactgagaccacggtgaaacccagtctctaataaaaatacaaaaaattagccgggcgtggtggcgggcgcctgtagtcccagctactcggagaggctgaggcaggagaatggcctgaacccgggaggcagagcttgcaagtgagccgagatcgcaccactgcactccagcctgggcgacagagcgagactctgtctcaaaaaaaaaaaaaaaaaaaaagtaatatttaagaggtggtctcttgaagtaactaatacaaattctgttgttagtcttttaggatatgactttcagatttaagctctgatacttaataaaatgtgtcttaaagtctcattggtaaattgggagaaaatgtcatttagcatataaaatagtctgaagatgaagtaaaataatccacataaggctgggtgcggtggctcacgcctgtaatcccagcactttgggaggccgaggcgggtggatcatgaggtcaggagttcgagaccagcctggccaagatggtgggattacaagcatgcaccatcacgccagactaatttttgtatttttagtagtgatggggtttcgtcatgttggccaggctggtctcgaactcctgacctcaagtgatccgtccgccttggcctcctaaaatggtgcgattacaggcgtgagccaccacacccggccaaatatgagaacgttaatgagattcagctcaatggctcccaacatctactggaaagaaagcagattggtattaggacattcagacacatttcagatgaagtaaaacatactctaaaaccagtaaccttaggaaagaaaaaagccaactagcctaaacattgagttttagatgtgaaagaatttttttcctcctcattagagtccttttgaggaatagcaggaccagggagggagaaaaaaatcatgagttatcaggcctttccttgaagcacggaatgcctccttacacaataccctccacgccttccctgttcacacactttaacacatggaggtaggagagaggctggaatctgggtatgagttcacagcaggttcctggggtcagagctctgggaaagacgaggttctgagacaggtagctcgctctcagagctcacaaagaaataacctcccaggcgtttccaatctcacagcaagtcaatgccttcttgctggaaaacttgatgtagagttcagtatccaacttccctcttgcagacattttttgtgtgtgtcagccgcaagcagctgtgaggagggaggagagaagcagcagccgggaacctacagccaagactcaaagtgacaccgcagtgccaccgcaatcaacgtacatgaaaaggacaagcacctcatatccccgtcacgcaagcacagccactcactcacctgtcacagcctcacaaccgcacccaccgtcaaggaggcacatcccagcctctcacacgcagtttctctgtcacacactctcaaacattccccatctgacatatacaacattctctcacgtgcgcactcaaataccctcctctgctgttcatgcacccacgggcctgagattccgataacaactggccgtccacactagaggcttccacggttaaagggcttcctccaccaccccggctggtttaggttgggctccaacgtaacttgattgcccagagccctccctgcgagtactctgtgcctgttatatactgaaatgagttcaacccaccttgcaaaagaaccacgcgaaaacggaagggaagccatagattgggtgttcccgttgccctctgggaaatgtagtttaagcctaaagctccatgaccgcggtggcttgtgggaaaagtggctcggaaccccaaatcccggttagattgcaggcaccgccggacgctggctcccggaggttttagttttccctctaccaggagtgtgaagacacagagacttattgcgctggcgaagatggctgaggcgaaggcgtgtccgacttgtcctcggagttctgagggtttcagtgaccccagaaggctgagaagtggaatccgaactcgaggctgcccgaagcctcgggctgtttgagtgtagagccggtaggggagggctttcaaagtgtggccgcgagggcgagcgtgggggatcggttatgagctcccgagggcggggactctgctctgtgtcccctgaggaagtccagtcttgttataaggtatgagaaaagtaactttttaaaaatggacaaataataattgtatgttttatatactgatagggtacaatatgctgttttgatctatgtttacaatgcgaaatgattaaatcaagctaattaaatccatcacctcacttttttgtggtgaaaacatttaaaatctacttttagcaattttgaaacatgcaacacattatttatgtagttgctattctatgcaatcgattaacaaagtttatttctcctgactaactgaaattttgtactgttttaattaacatctcccttttccccatttttcagtctctggtaaacaccattctttgcctcttaagagttagacttttttagattccacaaataccacttatgtggtatttggtatttatctttctgttactggcttctctcacttagcataatgtcctcctggtttatccatgttgtcacagatgacagaattttccttgttttatttttattttttatttattttttaaaaatctatttacttattattattttttgaaacggagtttcgctcttgtcacccaggctggagtgcagtggcacagtctcagctcactgcaacctctgcctcccctgttcaagcgattcttgtgtctcagcctcccaagtagctgggattataggcatgcgccaccacgtcggctaatttttgtatttttagcagtgacagggtttcaccatgttgatctggctggtctcgaactcctgacctcaggtgatccacccaccttggcctcacaaaatgctgcatttacaggcgcgagccactgtgcccggccgattttcctcttcttaaaaagtgaatagtattcctttatatatacatatatatatgtgtataaggttatatacataatatatataatatgtaacattttctttatccacttataacatgctggacacctaggttgcttccgtatccaatgcagaataatgctgcagtgaatggtagtgcagttatctcttcagcatgctgatttcaattcctttagctatacacccaccggtggggttgctggaacatatagtaattctatttttagtttctgatgaatctccatattattttccatcatggctgtattaatttacattgggaaatgtacgtacttttgatgttgttgtgaatggactggtttattcaataaattgtgttaggtacattgactaatagtgtgtagaagtaaagttatatttacttaattcttaaaggtatagtcaaaacagactgaataattaaatgtaaaaatgatctggagaaaacctttttttttttttttgagatggagtctcgctctgttgcccaggctggagtgcagtggcgcgatctcggctcactgcaatctctgtctcccgggttcaagtgcttctcctgcctcccgggttcaagtgcttctcctgcctcagcctcccaagtagctgggattacaggcatgtgccaccacacctggctaattgtatatgttttaaaaaattaacttaggaatagattttctaagctaaattgaagggaaatgctaaggaaatagtga

SEQ ID NO: 1561474 - DNA, 4001 bp, Homo sapiens
tcccagccacacccctcccatggcctctgctccttctcccaggttctcagacttctttttacactcagaccactcaaactgcccaatgccccaccactccactttcagcactgtacaaggtgccacccctcccctttacacgcaacccctgctacccaccaactcttcctcaggtgcccagattcctcacgtcaaactatatcccttccccccagtcaaattttctcacactggcctaacccatctccacacccagactttgcccaccttaaccacttcatgatacgcagccctgtttaattacttaacctcctctacaaatcaaggccctctcctacaaccctaaccccctatccagaatacccagacccattttcacaaaagcctactcctccccgcttcggacctaggcccttccaccaccctagctcctgtctccagggtatctatccactctttacattcatcacctcttctttgtaccaagaccaaatcgacaattctaatcccctctgagatacccagatcccctcttcccattgatttaaacccttcctgttcatacacagccactcattcagggatgcccataccctcattttatatcaacctatgcctctcttgcaaacagagccccccctcaaatccatctcaggaatatccagatcctcctccacattattaacctaatcttttttaatttgctagaagacccaacccaccctaacccattctagggatgctcagaccctcctcttcgtagcaacataactcctcttctttgtgtaaagatccacacacccatctttcacaatggcttaagctccttttacacacacccctcgtgctgcccaaaccccctttagggatacccggacctcctattctcatacagaacctccatcaccaccttaatccagcacagacccctcttcctcacactcaagcccctctcaccagcctcctattctgggggtactcagaccccccagcgtcttagcaacctctcagtctcattccaggaattcccaggcacccctcactttagcacacagatctctcccaccctacttcctccccttccaataaccaaatcccatcttcaccttggcctaattacctgtacttaaaaaagactaccttccccagctcattctagggacacccagacacccttttaaaatacacttaatccttctttgtacaaagactcctttccacgcattccaagggtacccaacctcctgacacattggtttaaggcctcttcacattaatttaaccccatccattacaactggacccctccttagctctaaaccgttcccttggggatatcgatttcctaatgtcttcacaccaaaacccctctcaccgccccaattctttccaggaagaactagatatttttcccctgcattaacttaattatctttctcacgccctaagcccctaactgggcacccacgtgccgtctaaccggcccagccccttcgtcctggacttgccacaccaccaagtcctttaccccaaaccctggggagccgcggagccctcttgggacagctctgaggcctccccttcccgcccaggtgccccaccaaagcctcagcccgagccccgcccctcctcactcagccccgcacgcgactccaggccccttccccacccgccgctccagcccggcccccgcccggctgcccgcgcgccgggtcggccgttggtgccgctccgccctaactgcccggcgcgcaccccctcaggccctcagtgcgcaggcgacctggcaagaggaggccgcggcggcagggagcgcagcccggccggcctctgcgcgcccgctcgcgctcacctgcttccgccgtctcgcacgccccgggcccgggccacggctccccttgcacggccaccctaacgctgcgcccgctctagctctcgccgtcgcctctcgcctgctccgtagcctcgctctcgcccccagctaccctcagcaacgcccctcccaccttcctcctcggccgccgcacggacggccggacgcaaccaatcattgcccgctcgggccctgccgttcggccaatcgacgttcatgtctctgaggcttgggccaatagtgaggagcgtcgagattccccgcagcgcccaaccaatcctttagcgtcgttccctcaccggtcagccctcgggtggatagtgcccgcccctttaatcctccttagaggatgctcctcctcctcctcgactccgcctccgacggctccagaggggaactctgagcggagggcggcgcgatgacgttaggcggcggagcgcggccgcgggcgccattttggggacgccgtgagggagtcagcgttggggacagggagagggaggaaaagagcctgggaaattgaggcacgcggcaccttgagggctggagcgggggaatggaggcacgggaacctttgtggtttccccgagggtcagagggagaaagtgaaaccacttagcgcgatggggagagggcaaactgcatgcagcaccagtcacatggagagagaaaagggaaaccaaggttccagactcactttattaaaaggaggggaatgaaggcaacaggaagaaacagagaaaagaccgaggggacttttgggaggtggagagaggagaaatgtcataggggaagcaaggagagcgaggatatggagaaaaagaagcagggacaatttcattggaagaaatagggagtgtggtgggtagaggacctgaaggacaatcggggtgagagcctgaaggaagtgagccggtaacgggcggactccactccacctccttccggggtgactctgacccttacacctcgagattggggccccatgtgtccaaggggctctggccattcctactcacctcgttcctgcgcccctcagggccttgggagggagttgccccagtactgttagaaacgtttccaggctgggcgtggtggctcacgcctgcaatcccaacattttgggacgctgaggcgggttcacttgaagtcaggcattcgagacccacctggccaacctggtgaaactaccatctttactaaaaatacaaaacattagctgggcgtggtggctcgtgcctgtaaccccagcaactcgggaggctgaggctcgagatttgattgcacccaggaggccgaggttgcagtgagccgagatcacgccactgcactcccgcctgggcgacagagcgagactccatctgaaagaagaaaagaaacatttccagacctactccttgaacccaaacacagaggaatttcaacttatcggatgaggaaactgactctcagaattgtgttatttatttacttacctgaagccactatgggatgcgtctcacagtgagacccggggccaattctatggccatttggtcactagatgtcctaaccttctcatggattaaattccctaacaccaggcatgtatagttaaaacagattcccggattggaatcctggttctagggcaagtcaactgtcctgagcctaagtttctaatctgtgaaatggggctaataacagccccatttcatgtgagccccatttcatctcatgtgaggcagagagtaaaagacatctaggagttactcattttatttttattttattttattttattttattttattttattttattttatttatgagacagagtctttctctgccgcccaggctggagtgcagtggcgcgatctcggctcactgcaacctccgcctcccaggttcaagcgattctcctgcctcagcctcctgagtacctgtgactacaggcgctcgccaccacgcctggctaatttttgtatatttagtagagacggggtttcaccgtgttggccaggatggtctcaatctcctgacctcgtgatccacctgccttggcttcccaaagtgctgggattacaggcgtgagccactgcacctggcctatttttaaaatttaatttaattttttttttttttga

SEQ ID NO: 1561475 - DNA, 4001 bp, Homo sapiens
gtggccagcttggacgggtacgagaaggccttgtcacagtcggggcagcggtgcgggcgctggggcgggggccgccggcgaggccggggaggcgagcccgcggacgcggtgggccctggagctgactggctgggcttctgcggtgggccctggtggggagctgggggacaggagggctggtgggctccaggaagcagccaacgccctgggcctaggccaggctccgccacgactttgatattcgtggggctcctccaagtgtacctgggcacctcaagcatcacattgagactccccaaattgcatgtttctgctcccccctccccccaggcgtcattctgagggactccaaagggttactttcctggatccccaaagctactaaggcttcctcaaagctaccaaggtatccgtttctagtatcttcccagtgatcaccctgacatcccgcatgtcatccctgacccgtcccttctgtaaggctcatttcctgagccttagcaaatggtcactgaggctctctctgagccaaatgggaggatttcccagaatgtggcagttttggggatcccaaatagtcatcaccctagggccctcaaattttcaccctgagattcccccagaatgtgattattttggcccccgttcctggagaatgctccctactcacaggcggggcactctcaccttctttggtcactggttccttgccagtgggactaggatcggtagccccggccgcggactccgcgcctcgctccagcatcttgctggcacaggaacctaggggcagggcgcggggcgggggtgacgccggtgatgaccaggctgatggggatagggttggagggcctaaaatgagggatcacactgtttaggagcaaggtctgcaagtatgggatgctaaggcgggggcaggcttagcggggaggcggagcctaagagcacagtgagcggggctatgcaaattcaagccagaggcagtcccttcgctatctaaacccagggttggagtctttcagcagagtgggcggagtctccacaactaactcagcggccgtcttaagcgcggagccggcggggcctatgcgcagagtgggcgggaccttccccaccagaccctgcagtcctggaatgggcggggctgtacaaaaaaagtcttgttctgaaactagacccagggggcgggggccttcgagcggagtgggcaggtctttcatcaccgtcccaggggaggggcctatgggcacagtgggcggggcttcacgtcgaagacctagctttacccggcttttgacttagtctcagttcattgacgccgcgtcaactgcgcccttcttgccgttaaatttcatccctggcttggatggggccgtggaggatagaggggggacctggaggaagatacggaaggaacctggcatgcgtcgcggtccagagacccctaatggacttttccctcagagtcccaagcgtaaaggattcaatgcacccctcggaatcagacattcaggcaccgatgcaccctcccgaggctctggcaccaatgcacagtccctccagcatctccagaatctaggcgtccggaccacaaccgatctccctcggggtgattctggcattcagcctgcaagccaatatccgcgcccgaacccctgcgccctcacctgcaggacggcccctccccgggggcggggcttccggctcctcccgccacggccacggccgcagccgctgtcgccgctgctgcactgccctcggaccagcggagctgccccgcccggcgcgcgtccggcgtcgggggagggcaggcaagggagcgcgcgcaagctgcttagcccaacctcatttccatcccctcctcccacgctggaccaaagggggcgtcagaaagcatgcgcagtgcgggctggcagaggctgcagagagggggaagaaggaatggaaggaggggctgggtgcgccagccaggcaggcaagttcgtgagcaagcgcgaagctaccgtatcgacagaaagtgcaccgccggtggcggggcctacggtggctgactggagtcaagcatgtacaagactaacatggacaaactgcgcttggaaatcagtgcatgcacccgtctttttaatgtccctcttcttttcgagaattccgctgagttccatctccagaggcagtttcaagagctcgctgctaattctacccttcaaggcgtttgcaaaaagtctggccagttcttcgagagagggcgggggcgggactccgggctcaaagagagccagtgcccaataaaaggcacgttatttgcacagcgccttggcacacctcgctattgggtgattcaagattctcagccacgcacccatctaccttccccctcggaagcctgggtggtcccgaggtgccctggcccatgctcttggtgccaggcctggggtggcatgcagcttagcattcttcccgagcagtggcggtgcaccttcctgcctggtgcagaaaggaccaggaaatgcccataaaagtcctctgcatgggtgggtctcagtccgataacccgcaaggtctggcgatccctgggagtttggcggggttatttggactctggagccagattgcctgggtaactggtttggaatacggctgtgccactttctagccgtgtgaccctttctagctctctttctaggcctgtttcctcatctataaaatggagcgtttttaggattaaatatgataatcaatggaaagtgtttagactagaaagtgcctaggccgggctccctgtctcatgcctgtaatcccagcactctgggaggcagaggcgggcgaatcacttgagcccaggatttccaaactagacgggggctaggcacggtggctcacgcctgtaatcccagcactttgggaggcggaggtggacggatcacctgacgtcaggagttcgagaccagcctggccaacatggtgaaaacccgtctctactaaaaatacaaaaattagtcaggcatggtggcacacgcttgtaatctcagctactccggaggctgaggtgggaggatggcttgaacctgggaggcagaggttgcagtgagccaagatcaagccactgcactccagcctgggcaacagagtgagactccgtctcaaaaaaacaaaaaaaccaaaaacccaaacaaacaaaaatcccagcctaggcaacatagtgagacacctccccatcttaaaaaaaaaaaaaaaaaaaaaaaaaaagtctggcttaatggcagcctgtagtcccagctatttcacgggggtagggagtggggactcacccaggagttcatgtctgcaatgagctatgattgtgttactgcattccagcctgcgcaacagagtgataccccgtatctttaaaaaaaaagtttttaaaataattattcactcatgaccagtattgtttgatttaccccccatccactcttcccaaatgattctgaagctaaatgtcaaacatcatatctcataaatatctttttattacacttgatttgcttgacttaagatctaaatgagctccacacattgtattagtttgaagtgacacttcggtctctctctctctcttttttttgagatggaatctcgctgtgtcccccaggctggagtgcagtggcgcaatcttggctcactgcaacctctgcctcccgagttcaagcgattctcctgcttcagcctcccaagtagctgggattacaggtgttcaccacaacacccagctaatttttgtatttttagtagagacagggtttcaccatgttggccaggctggtctcgatctcctgacctcgtgatccacccgtcttggcctcccaaagtgctgggattacaggggtgagccactgtgcccacctctttctttttttgcacggagtcttgctctgtcacccaagctggtgtgcagtggcgagatatcagcccactgtaacctccacctcccaggttcaagtgattctcctgcttcaacg

SEQ ID NO: 1561476 - DNA, 4001 bp, Homo sapiens
gttggaacccagagagtcagcctgcccaacagaggggtatggtgattacagcacagcctttggagccagactgcttgggattgaatctcacctccaccacttcctaggcaattacaccagtttccttatctggaaaatgggctaataacagtatctactccataggaccgttggaaggaataaatgaattgctgtacagtcatttgcaattatgactaatgatacagagaaatccagcccgacatccaggatctggcctggtactcacagctagaccttggtgttctgttgaacataaattttcacagaatatcaaggacagacaaggccacgctgtgactaaaatgaatcaagacaagactacatcatcataatgtctgagcacagacaaaatatgaatactgtccaagcagaaaaatgaccaaacatcctcctatcctggctaatgtgaatgtctgctgctgctttatcagtcagagcttgagcctcgcctccttccttcctccttctgggtaagatttattacgatagccaatcatagaattgcccctgcttcctggtagcatccaatccagagcaaaacaattttgcttgaaccttccccaaaatcaccacccacaagcccaaatcctgtgtcgtttttaccattcttagtgagacaccccacagtccccccatggtctgtgttcattgcagtgagaaacccaacgtgttcaactgcaggtgtgttcctggtagtctctggctcaagggcattgagactacagctcttgttacaaatacctctctctgcctcagttcccagtttaaagggcctattattagaaggactcaatgagataatgaatgttaaaatggttcataatatgagaataaatacacctagctcataataaaacactgagcaggaggtgttgctattacatgtcaaactggctaccatcattaacccctagctttcccctttgctgcagttaatcccatacccaccctgtgaggtgggaagtaccaccctcttttgacagtcaaggaaaccaaggcccaagttacactgaaagtctagggcagagttgggaccagaatcttggggtttctctcccaatagaaccattcccagccacatctccaacccaagcctctcctggaagccaccctatccctctgaatgcataagcattgcaatcctgcttatgtggccagaggagggtgagtactctggccacataagctggtgtgaggagatgcacttcctgctagagcagctcagggaccattacagccccttctcaacaggcaaaactctgtggcgccttggacaccgaagtgccacagagatcttagcatcagctcctgcaccccaccctcctctagcccgccagccatgtgtactcacagatgttgcctcctgggctctggggacttctctccttgggtgaatcctgctgcttcatgttctcttcagggttcgggtcctccatggtgctgggacccttctagtcaggagaggagcgtgcataagtgaagctgttcatctgttaccagtcttagagggcaccctaagtctatgacctttgacatcgccagaggctctccttgcctgcctttgacccctacgacatactatctccttgaactctaattgatggagttcttgctaaaagaagcttcaaacctcccaaaggactggatttcctgggtttgggactcccctagagtcttctcactggtgtgacctatgacctgctgcatcaaactaactccctgaactcagcgtggaagccttgatctttgacaccagcgtcatcccaatctcaagtgtcttggggcaggtagtgatacccaccctttatcccagttcttcccgggaaacatcctctgacatcctgtgatttttgttccgcccagagcccccgcctcccacgcgcgcttgcagctgctatcccgctaccctcaagcgctgcctacaggttcctgctcccaggcctcagttttcctccttacagcagagggctgcctttcgctgcgcctgtcagccgctggctacagcgccgccccagagagaagtgggatagggaccactcagtctcagggcccccgtggtttccgcgcccttttgccagatgagcctctcggagccgagatcccggatttgccatccggcagtagtatagtcgcaccagcccggtcctcaaaataacgggaggggtccttctctgccctatggcgcgtttgatgacgttcagcctcccgcggcttagctagctaagccttttgcgcatgcgtgggtaggctctcgtggcgcgcaggcgcgttgactcattcattgttctaggccctgaggccgccaaagaggggcgtgcacacttcggccgttctgcgcaggcgcggcgaagggctgggtctctgctgtcggccttccaagacacacccccttgggagagggagtgacgtcaggttaaagctaccgggacgggtcccggcatctctaaatcaccgctccctggcctcttcggcctccgtccgccgcggcccaggggccgggcttctcagctgctgacctactgccaccgactgcgctctctcccgtgggtcggctttttgctcggttggtgatttggaagggggaaggggaaagatgaaaataacaatgtgtccgagggaggagggactggaagccagatttctgaggttttatttttatttatttttcagagagggtcttgctctgtcgcctgggctggagtgcggtggtgtgatcacggcccactgcagcctccaagtcctgggctcaagcgatcctcccgccgcagccttccgagtagctggggctacaggcgcacaccaccatgcccggctaaattttattttttatcgagacggagactctaccagagagtccccccacatgttggccaggctggtctcgaattcctggcctcaagcgatcctccggcctcggcctcccaaagcactgggattacaggcatgagccaccgcgcctgatttcagagtttttgaagcagaaagggaaacgtttccatctagagggagggcggacagacaggacgcctgggattctgggggaatagggtctgggctctggattttttaggtcctggagagtgacactcaagaaccgaaggggacagggtgaaggactgaggcctgggttccgagtggggcggctaggaaaggaaaaggctaggtgctccctgacccaggtcttctctacccgttgctttccagccatgcctccgccgcagggtgacgtgaccgccttgttcctggggcctccgggcttggggaagtccgcgctgatcgcagcgctgtgcgacaaggatgtggagacgctcgaggcccccgagggacggccggactccggggttcccagcctaagagctgcgggcccaggcctttttctgggcgagctgagctgcccacccgcagcgccggggccctgggcggcggaagccaacgtgctggtactggtgctgcccggacccgaggggaacggggaaccgttggctccagccctgggagaggcagcgctggccgccctggcccgagggaccccgctactggctgtgcggaacctccgtcctggggattcacagactgccgcccaggcccgtgatcagacagcagctctgctgaacagcgcggggttaggagctgcggatctgtttgtgctaccggcgaactgcggcagcagcgacggctgcgaggagctagagcgcctccgggcggcgctgcagagccaggcagaagcgctgcggaggtgagtgccggctttctggctgggtccgttagtcgagaccctaggcacctaggtgcgaccatggaggtccatgagatccctcccccagtgagtttggggcaaggcttagctctattattattatttttttttttttcctgagagacagggtctcgctatgttggctaggttgaatttgaactcctggccttaagcaatactcccgcctcagcctcccaaagtg

SEQ ID NO: 1561477 - DNA, 4001 bp, Homo sapiens
tacagtcatttgcaattatgactaatgatacagagaaatccagcccgacatccaggatctggcctggtactcacagctagaccttggtgttctgttgaacataaattttcacagaatatcaaggacagacaaggccacgctgtgactaaaatgaatcaagacaagactacatcatcataatgtctgagcacagacaaaatatgaatactgtccaagcagaaaaatgaccaaacatcctcctatcctggctaatgtgaatgtctgctgctgctttatcagtcagagcttgagcctcgcctccttccttcctccttctgggtaagatttattacgatagccaatcatagaattgcccctgcttcctggtagcatccaatccagagcaaaacaattttgcttgaaccttccccaaaatcaccacccacaagcccaaatcctgtgtcgtttttaccattcttagtgagacaccccacagtccccccatggtctgtgttcattgcagtgagaaacccaacgtgttcaactgcaggtgtgttcctggtagtctctggctcaagggcattgagactacagctcttgttacaaatacctctctctgcctcagttcccagtttaaagggcctattattagaaggactcaatgagataatgaatgttaaaatggttcataatatgagaataaatacacctagctcataataaaacactgagcaggaggtgttgctattacatgtcaaactggctaccatcattaacccctagctttcccctttgctgcagttaatcccatacccaccctgtgaggtgggaagtaccaccctcttttgacagtcaaggaaaccaaggcccaagttacactgaaagtctagggcagagttgggaccagaatcttggggtttctctcccaatagaaccattcccagccacatctccaacccaagcctctcctggaagccaccctatccctctgaatgcataagcattgcaatcctgcttatgtggccagaggagggtgagtactctggccacataagctggtgtgaggagatgcacttcctgctagagcagctcagggaccattacagccccttctcaacaggcaaaactctgtggcgccttggacaccgaagtgccacagagatcttagcatcagctcctgcaccccaccctcctctagcccgccagccatgtgtactcacagatgttgcctcctgggctctggggacttctctccttgggtgaatcctgctgcttcatgttctcttcagggttcgggtcctccatggtgctgggacccttctagtcaggagaggagcgtgcataagtgaagctgttcatctgttaccagtcttagagggcaccctaagtctatgacctttgacatcgccagaggctctccttgcctgcctttgacccctacgacatactatctccttgaactctaattgatggagttcttgctaaaagaagcttcaaacctcccaaaggactggatttcctgggtttgggactcccctagagtcttctcactggtgtgacctatgacctgctgcatcaaactaactccctgaactcagcgtggaagccttgatctttgacaccagcgtcatcccaatctcaagtgtcttggggcaggtagtgatacccaccctttatcccagttcttcccgggaaacatcctctgacatcctgtgatttttgttccgcccagagcccccgcctcccacgcgcgcttgcagctgctatcccgctaccctcaagcgctgcctacaggttcctgctcccaggcctcagttttcctccttacagcagagggctgcctttcgctgcgcctgtcagccgctggctacagcgccgccccagagagaagtgggatagggaccactcagtctcagggcccccgtggtttccgcgcccttttgccagatgagcctctcggagccgagatcccggatttgccatccggcagtagtatagtcgcaccagcccggtcctcaaaataacgggaggggtccttctctgccctatggcgcgtttgatgacgttcagcctcccgcggcttagctagctaagccttttgcgcatgcgtgggtaggctctcgtggcgcgcaggcgcgttgactcattcattgttctaggccctgaggccgccaaagaggggcgtgcacacttcggccgttctgcgcaggcgcggcgaagggctgggtctctgctgtcggccttccaagacacacccccttgggagagggagtgacgtcaggttaaagctaccgggacgggtcccggcatctctaaatcaccgctccctggcctcttcggcctccgtccgccgcggcccaggggccgggcttctcagctgctgacctactgccaccgactgcgctctctcccgtgggtcggctttttgctcggttggtgatttggaagggggaaggggaaagatgaaaataacaatgtgtccgagggaggagggactggaagccagatttctgaggttttatttttatttatttttcagagagggtcttgctctgtcgcctgggctggagtgcggtggtgtgatcacggcccactgcagcctccaagtcctgggctcaagcgatcctcccgccgcagccttccgagtagctggggctacaggcgcacaccaccatgcccggctaaattttattttttatcgagacggagactctaccagagagtccccccacatgttggccaggctggtctcgaattcctggcctcaagcgatcctccggcctcggcctcccaaagcactgggattacaggcatgagccaccgcgcctgatttcagagtttttgaagcagaaagggaaacgtttccatctagagggagggcggacagacaggacgcctgggattctgggggaatagggtctgggctctggattttttaggtcctggagagtgacactcaagaaccgaaggggacagggtgaaggactgaggcctgggttccgagtggggcggctaggaaaggaaaaggctaggtgctccctgacccaggtcttctctacccgttgctttccagccatgcctccgccgcagggtgacgtgaccgccttgttcctggggcctccgggcttggggaagtccgcgctgatcgcagcgctgtgcgacaaggatgtggagacgctcgaggcccccgagggacggccggactccggggttcccagcctaagagctgcgggcccaggcctttttctgggcgagctgagctgcccacccgcagcgccggggccctgggcggcggaagccaacgtgctggtactggtgctgcccggacccgaggggaacggggaaccgttggctccagccctgggagaggcagcgctggccgccctggcccgagggaccccgctactggctgtgcggaacctccgtcctggggattcacagactgccgcccaggcccgtgatcagacagcagctctgctgaacagcgcggggttaggagctgcggatctgtttgtgctaccggcgaactgcggcagcagcgacggctgcgaggagctagagcgcctccgggcggcgctgcagagccaggcagaagcgctgcggaggtgagtgccggctttctggctgggtccgttagtcgagaccctaggcacctaggtgcgaccatggaggtccatgagatccctcccccagtgagtttggggcaaggcttagctctattattattatttttttttttttcctgagagacagggtctcgctatgttggctaggttgaatttgaactcctggccttaagcaatactcccgcctcagcctcccaaagtgctaggattacaggcgtgaaccaccacacccggcctttttttttgagacaggttctcactctgtcgcccaggctggagtgcagtgccgcgatcctagctcactgacggcctccacctcctgggctcaaatgatcctcctgcctcagcctccagagtagctaatactacaggctgcaaaacagcatctcactgttt

SEQ ID NO: 1561478 - DNA, 4001 bp, Homo sapiens
gaatactacacagtaatgaaaaagaaacgagctactgctatatgcagcaacttagatgattttcacaacaaaaatattaagcaaaagaagccagccacaaaagaatgtgtaccttaggatttcatttatataaagatgacaaccaagcacatctatgatgtttttaagataataattacctttggagaggagagagaagatgagggcttctgggatgctacattattctatttttttaacctggtgattttcaagtataatcacttgaaaaaaacttaagagaccaatttctcttataaatgtataggcaaaaaaattttttaactttctactatgaaaaatttcaagcaaaagaacagtatactcaaattccacatattcatcatgtgacttcaagaatgacgaactcacatctaattttgttttatctataccaccattcagtccctctccagcaatggattatggattattccgaagctaatccaagatatcttttcattttttgatgcaaaaatattaaataaaattttagcaaataaaatccagtctcatattaaaagaacaaaccattattgacaagtatggtttattccctcaggaatacatgaaattgggaaatagagcaacacaaatcaaagaaaattttaaagagaaaaaaataaatgaaaataattgtaatggtcaaaagcccttaggaaagagaaataaaaacttgataaatcacagtaattatttattcagaccatactacgtacctagtactacactttgaacatacttaaagaacatttgctcacttaatcttcataatgattccatgaaaaagaaactatgacagcttttttccacaaataaggaaactgactcagagattaacgtacccaagtcagaggcagaggcaggtacttcttactccacagtccatacacttgccacctggctaaaattatttgcagatgacaaaaatgctcaactagaaaaaagacgtcaatttataagttatatgtaatgacatgagtacaatgaagtgacagaataaacatatatatttttaacttctgttcttgtcaactaagtaaaattaggaacaaaaaaggaaagggggaggggtcttatgcaaaaaaaaagtcacgatttacaacaaaaagtattaactatgtagaaataagcataaccagaaatgtccaagatacgtatggaaaaacactacagatagtcaaacaaataaaaatattgggttaatagaaatccatcacatgttcctgaaagtgttgtatctagatctacatcaattctacccaaattaaagcaaccacttgatgaaactgcagcaatttaaaaaactctcaaagagcatgtaatatgggaatacgaagttgacaagatgttattaaagacgaataaaattataccaatacctagacacctgatcccaacattaaacatgaaatacactaaaccagagttattttctggaggagtatttaaaatgatggggatgttattacttgggtcgcaatgaacctgaaaacccattttctacagaatatacagcagcagggaagcaaggggaccagcagacccctttttaagtacgcatgtgataagcaatgaacacgaactgcccagagcagtctccaacactgacacgattcgcttccccaccacgacgccctagcgctactgtgcaacgaagacctcccaagcactggttccaatgcggagaccatgggctcccagactctgggaactccaacacgactgcgaaacgaactccgagcgaggactccccgagagctccccgcaacacggacctcacgcgctagcgaacaacagaaaaaaaaaagcgcgctctccctgcccctgaaacattcccagaagcccacgcagaccagaccgatgacctgtctccactgctggaggcgagtcagggacccgaagtctctaaacactcgcctctacccgccgccccgcgaaccccacacactgcagacgcgacactcgcaagtttcggggatggcggccggcgagggccatactgcgtctttccggagacacggaatacggcaccagccgtccctttatgatgcaatatgtctgcgcccaggggacgcttgctgggagcagccattttcaaccctactgccgtagagcaggcggagtccctcttttcgcgccttaagacaggtaggttctgacgatgaaaagcaattgaaaacgacccatttcaccctttttccagtccacgtgaactgctagatcttggctttgcaacattagccaggggcgctacataaactgcttagtttctcaaaggctcaagcctgccctgatctgtctacaggatgggtagagatggtcacagacatttaggcactttgatcctaagaagaatggaaagaaaccatgtggcgcggcagtcttacaggaatttcaagagggagggacctgagcaacaatcggaggggttattactcctgaggatgcatctggctggagaaagcagcctttgagaactgcctaagaagtatctttacatctacatcagatgtagcctcagaggaaggagtcagtcatagaatggataaaacaaccgcgtgttaaagctttggttataattggtgtggagaatggagaacacagttgatcagcagttgacaaagtggggaaccaacacgaaaacagggctctctcaccctggaaaagccaaaggcagaacaagcctttacatccaggaaggtgggagcaacttgaaatcaaaactctgaaggggagatgattctgttcaatactgaaactcagctgatcaattaactgatgaattctagcaccaaacctgctccctataattttataaccagcctcagagaacctttaaagggattgatcattcactcatttatccagcgaatgtttataaaatgcctaatgtgtcaaacactgttgtgcgtgctgggaatacaacagttggaaattcaggcacaaagactctcattcatggagattacattctactggcaatttcagtgtgtgagctaaattgagtggtgctaactgttgacttggctggttgactgaaacttggactcaaaatttgcctacactaaatgaagtttaaatgccagaaatttcctcatatattataaagtacccaaagataaatggagtttggaatgctagaatgaatttatcatgtaaaatcaagattacccatacctcaaatatgtattccagtagcatctagaagacaatctcttcactgacactgatctggtcacaggaaatagagatatactactgtaagattattttattatacagtaagtgatataatgtccttgaagttagaatgataagttcatgattttctttcagtcagttcaggctactagaaaaaatacaccatagactgactgactgccttaacaaacattcatttctcacgttccagaggctgaggagtctctagaactggactctaaaacacaatcaaggtgttggcaggtctagtgtccagtgagagtccatttcctggtttatgcatggtcatctcattctgtcttcacatggcaaagagcagagaaagagaaaacaaactctcttctgtgttgtctcataagacacataatctcatcatgagggttccactttcaagatgtaattaccttccaaaggtcacacttcctaatgccatcccttagggattaggacttcaacatgtaaatttggagaggacataaatatgcaatccctcacaatgatgtatgctataaaatctcaaggaatcaaatgacaaggatttacagttaataagccaacaaaggagacaatatgtaatataaacacactcagctactctaagggaaagcagaaaaagaagaaaaggagaacaaagaagacatagaataaacaacaaatagtaagttagtaatttaaacctaaaaacatcaatacattgaacgtaaatgatctaaataccccagtaaaaagacagagat

SEQ ID NO: 1561479 - DNA, 4001 bp, Homo sapiens
tatgcagcaacttagatgattttcacaacaaaaatattaagcaaaagaagccagccacaaaagaatgtgtaccttaggatttcatttatataaagatgacaaccaagcacatctatgatgtttttaagataataattacctttggagaggagagagaagatgagggcttctgggatgctacattattctatttttttaacctggtgattttcaagtataatcacttgaaaaaaacttaagagaccaatttctcttataaatgtataggcaaaaaaattttttaactttctactatgaaaaatttcaagcaaaagaacagtatactcaaattccacatattcatcatgtgacttcaagaatgacgaactcacatctaattttgttttatctataccaccattcagtccctctccagcaatggattatggattattccgaagctaatccaagatatcttttcattttttgatgcaaaaatattaaataaaattttagcaaataaaatccagtctcatattaaaagaacaaaccattattgacaagtatggtttattccctcaggaatacatgaaattgggaaatagagcaacacaaatcaaagaaaattttaaagagaaaaaaataaatgaaaataattgtaatggtcaaaagcccttaggaaagagaaataaaaacttgataaatcacagtaattatttattcagaccatactacgtacctagtactacactttgaacatacttaaagaacatttgctcacttaatcttcataatgattccatgaaaaagaaactatgacagcttttttccacaaataaggaaactgactcagagattaacgtacccaagtcagaggcagaggcaggtacttcttactccacagtccatacacttgccacctggctaaaattatttgcagatgacaaaaatgctcaactagaaaaaagacgtcaatttataagttatatgtaatgacatgagtacaatgaagtgacagaataaacatatatatttttaacttctgttcttgtcaactaagtaaaattaggaacaaaaaaggaaagggggaggggtcttatgcaaaaaaaaagtcacgatttacaacaaaaagtattaactatgtagaaataagcataaccagaaatgtccaagatacgtatggaaaaacactacagatagtcaaacaaataaaaatattgggttaatagaaatccatcacatgttcctgaaagtgttgtatctagatctacatcaattctacccaaattaaagcaaccacttgatgaaactgcagcaatttaaaaaactctcaaagagcatgtaatatgggaatacgaagttgacaagatgttattaaagacgaataaaattataccaatacctagacacctgatcccaacattaaacatgaaatacactaaaccagagttattttctggaggagtatttaaaatgatggggatgttattacttgggtcgcaatgaacctgaaaacccattttctacagaatatacagcagcagggaagcaaggggaccagcagacccctttttaagtacgcatgtgataagcaatgaacacgaactgcccagagcagtctccaacactgacacgattcgcttccccaccacgacgccctagcgctactgtgcaacgaagacctcccaagcactggttccaatgcggagaccatgggctcccagactctgggaactccaacacgactgcgaaacgaactccgagcgaggactccccgagagctccccgcaacacggacctcacgcgctagcgaacaacagaaaaaaaaaagcgcgctctccctgcccctgaaacattcccagaagcccacgcagaccagaccgatgacctgtctccactgctggaggcgagtcagggacccgaagtctctaaacactcgcctctacccgccgccccgcgaaccccacacactgcagacgcgacactcgcaagtttcggggatggcggccggcgagggccatactgcgtctttccggagacacggaatacggcaccagccgtccctttatgatgcaatatgtctgcgcccaggggacgcttgctgggagcagccattttcaaccctactgccgtagagcaggcggagtccctcttttcgcgccttaagacaggtaggttctgacgatgaaaagcaattgaaaacgacccatttcaccctttttccagtccacgtgaactgctagatcttggctttgcaacattagccaggggcgctacataaactgcttagtttctcaaaggctcaagcctgccctgatctgtctacaggatgggtagagatggtcacagacatttaggcactttgatcctaagaagaatggaaagaaaccatgtggcgcggcagtcttacaggaatttcaagagggagggacctgagcaacaatcggaggggttattactcctgaggatgcatctggctggagaaagcagcctttgagaactgcctaagaagtatctttacatctacatcagatgtagcctcagaggaaggagtcagtcatagaatggataaaacaaccgcgtgttaaagctttggttataattggtgtggagaatggagaacacagttgatcagcagttgacaaagtggggaaccaacacgaaaacagggctctctcaccctggaaaagccaaaggcagaacaagcctttacatccaggaaggtgggagcaacttgaaatcaaaactctgaaggggagatgattctgttcaatactgaaactcagctgatcaattaactgatgaattctagcaccaaacctgctccctataattttataaccagcctcagagaacctttaaagggattgatcattcactcatttatccagcgaatgtttataaaatgcctaatgtgtcaaacactgttgtgcgtgctgggaatacaacagttggaaattcaggcacaaagactctcattcatggagattacattctactggcaatttcagtgtgtgagctaaattgagtggtgctaactgttgacttggctggttgactgaaacttggactcaaaatttgcctacactaaatgaagtttaaatgccagaaatttcctcatatattataaagtacccaaagataaatggagtttggaatgctagaatgaatttatcatgtaaaatcaagattacccatacctcaaatatgtattccagtagcatctagaagacaatctcttcactgacactgatctggtcacaggaaatagagatatactactgtaagattattttattatacagtaagtgatataatgtccttgaagttagaatgataagttcatgattttctttcagtcagttcaggctactagaaaaaatacaccatagactgactgactgccttaacaaacattcatttctcacgttccagaggctgaggagtctctagaactggactctaaaacacaatcaaggtgttggcaggtctagtgtccagtgagagtccatttcctggtttatgcatggtcatctcattctgtcttcacatggcaaagagcagagaaagagaaaacaaactctcttctgtgttgtctcataagacacataatctcatcatgagggttccactttcaagatgtaattaccttccaaaggtcacacttcctaatgccatcccttagggattaggacttcaacatgtaaatttggagaggacataaatatgcaatccctcacaatgatgtatgctataaaatctcaaggaatcaaatgacaaggatttacagttaataagccaacaaaggagacaatatgtaatataaacacactcagctactctaagggaaagcagaaaaagaagaaaaggagaacaaagaagacatagaataaacaacaaatagtaagttagtaatttaaacctaaaaacatcaatacattgaacgtaaatgatctaaataccccagtaaaaagacagagattgttaactggataaaaaaggaaggcccaactgtatgttgc

SEQ ID NO: 1561480 - DNA, 4001 bp, Homo sapiens
aaattaggagagaggtctatgagggatggagacataaaggtagggtttaaaaccatgagatgaaatgataaagaaaggcagtggctgggcgtggtggctcacgcctgtaatcccagcactttgggaggccgaggtgggtggatcacgaggtcacgagttcaagaccagcctgaccaacatggagaatccatctctactaaaaacacaaaagtagctgggtgtggtagcacatgcctataatcccagctactcgggaggttgaggcaggagaatcgtttgaacctggcaggcagaggttgcggtgagccaagatcacaccattgcaatccagcctggacaacaagagcaaaactccatctcaaaaaaaaaaaaaaaaaaaaaaagatagaaaggcagtagacgtggacagagaggaaaagtggttggaggactaagctgtgggtcattcccacattcagaaaacagtgagtcaggacacatcagcagagaaaaacggtaagagatgaagatgacatcaagaaaattaaaacaaagagcagggacagatccttcccagtcaatactgagtagaaagcacggggcttgagacaggtaagtgagcctgttacaaatatcttcccttcactgagacaggaaaaaaccaaactgttttcattgctctcgtgctcaacacaggatactttacttctggtcaagaaaatgtgtggtttccctacactgaccagttccttgcagacttccacctgggaatcctaaaatttaactcaattcttacactatctacaaggagatagtgtcagatcccatgggtgaaaagctcagtcccacaagactacccttcaccttagaagctgtacacaagtagtagttttcacctctacttctgactgaccagataaacaccacggttcccaaatcctctcctgcattcaactaattttctagaactgctattccatctgtctatctgcaacctttgtaatatcctttaaaacaaatgagtaaacccaactaaaacgtttctgagttctgtgagctactctggcaaattaataaatactgaagactgggtcatgggaatcctcaatttatatccagtagcttagaagttcaggttccaatctgggacttgtaaccgacatctgaagtggagaagtcttgtggactgagcctttaatctgtgggatccgatgcttacaccaggtacagctgtcagaagtgaggtaaattatgggacaccgagttgatgtctgatagagaactgcttgttagtggggagaaatccccacacattcggtgaccacaagtgaagtattctgggttcagtgtttactaccgtgttgagtttcagaggaggaaagaataaatcaatcgtttttcctctggaagagcacattttccagcgggtgcaatttggaacggaaaaacactgagtgtcaaaagccaggccccgtcacctccctcaatgcggggtaaggaatgtgggttgtgaaggggaaacctggggaacacaagggcccagcccaaggaggacaaggttgggggtggattaggagaggggtggggtttccaaaatcccagggccgggcagaggacacggcgctgatgcatcgagactgcgggaccgagctccaagaggccagaagggcgaggcttggaggacccactgggcgtgaatacacctcatgggtgagggcttttacatgacgcgggaccgaaggagtggtcagtaaagggttttaagcaggtaaacgggacgaaaagcgtctacgtggcccgaaggcagagagctcagggaaaggaccagcagcctccaagcgattttaacctccgaatttcttggcgacgtattaatatacctaggatggagggaacggcgggaggattttaagatccgtaagaacccctccgccaacaccaggtacagaagcgctggaagcggatctaatctagacaaagggaaactcacccgctgctccaagaccggctccccacgcgatcggcttccgggtcttcaggaaactgcgcttgcgagttcacgccccatgattcacttccgggtttccaggaaaccgcgcgcagctgaggccagggatgggcgagacccgagagaagagagggtggggcggtgaggggcggggtctgcgctgccttcggcctgtctctgggcgcgtctgttctccaggtttttgaggaaagaccctatcggtgaccagcagccaagcagtctgggacctgggatctctatgagagggtcaaagtaggggacagtgattggacctaagatagttcctgcaattaaagttaattttagtattttaatttaaaagccctggaattgtctgggagaggaagcgaactagaatatgaaatgcaaagccctgcctgggcggaacatgcaatttgatgctgtcgtcccacagaacagagtagaaatcctctccttttctattccccctacactctggagggtgaggatcaaccctgtgctcagctcctgacaatttcccagggacaacgccttgggcatggagggttaacgccagggataagttaggtcaccaaatgttgcttttaaaaaggaaagctaaaacttttagatgatagatataaatgactcttaaacttttaaacaatagatataaatagctctcccttatacctgttactctattccaaacttcagatgaattaacctcaaacgtctctgcgataaactttattgacatcataatgtcaataatttcgatacgtagagtgaatttcaaatttacacgcactctgaatgtaaatagaaaagacgatttttggctgggtgtgttggctcatgtttctaatcctagcactttgggaggctgagatgggaggatcacttgaggctaaatgttcaagactagcctgggcaacagagtgagtcccagtctctcttataaaacacacagggccaggcacgttggctcacgcctgtaatcccagcactttgcgaggccgaggcgggcggatcacctgaggttgggagttggagaccagcctgaccaacatggagaaatcctgtgtcttctaaaaatacaaaattagccgggcgtggtggcgcatgcctgtaatcccagttactcgggaggctgaggcaggagaattgcttgaacccaggagttggaaggtgcggtgagcagagatcgggccattgccatccagcctgggcaacaagagtgaaattccgtctccaaaaaaacaaaacaaaaaaaagaaaacacacacacgcacaaaacaaaaacaaacttttttttttaagttgctgaaggggtatcatttcttgagttaaataatacaggattttttttttaatctgtaattgatgtacatttaagaagacactgtttacatcaggtcaccacaaagtagatttacaaataaccatcaactgcagaaaaacaaagtttctttgtgatccaaacacaaagaaatgctttttttaaatgatctcttctttgatcataaaaaaaaaatgcagtacttttagaaggtaaagctagtaagtttacagaagtgtaaaacaccaaaacactttaagcaaaaactctttgtttttaagaaaaaggtatgacttctcgttttctgttcttggcataaattttaattctttccggtagagccaaaacctcctgatccccttttggtgtcatccaaagcttgaacttcttctatttctggattaaaaaatccgttcacaaatgagctgtgcaattcgatcacctttttttgacttcaaacttttctttgcaaaaattaaagagtacaacaccaacatttcctctataatcttcatctgtgataccagctcctacatcaacaaagtgttttgcagccaagccagaccttggagctactctccataacatccagaaggaagcgctgtctgaatgtccgttttcacaagagccttctccataggtggtggtgtgtaatcacaggcactgtacagatcgtagcccgcgtgcccg

SEQ ID NO: 1561481 - DNA, 4001 bp, Homo sapiens
ggcgggggccccccttccccttcctgttcgccctcggggcgcagacacgggtgcgccttgagctcgcccttggtggcgaaggcttcgcggcagcgcagacacagcagcgtccagtctgcctggagcaggacctgtttctcctcctgccgcccggccgccagcgccagctcggccctcagctctgctgccccggcctcggcctcctccgactccgactcccggggctccgcggcgctggtgggcgcagccagcgtggaaggctcccccgcaggccacgtctcaggccacgctgcgaccgcctcctcctccgtggcccctgctgcagcggtggtgggcggctccgagccctcgtcctgcgggccccagctgggttcggccgtctccttggccaccctctcgatggccagctcgacctcgccgcccgcgtgctcctgagccaggtggcgcctgagctgggccggttctgggaaggtgcgggggcaggcggcgcagcgcagcgggggctggggcccgtggccgcgcaggtggcgggaaaggtgggccggccggcggaaggccttggggcacagcgggcaggcgtggggccggagccccgagtggctcagccggtgccgggagaggtagtaggggaaacggaagaggcggccgcaggtggggcagggcaggggcgccctaggggctccagcgccccccctgccacggccacggccccgaccacggcctcggccacggccccggcctcggccacggtgaggtgggctgccctgggcgggtggaggaggctgcggatccatgcctgtggggagagaggggagagatgggaagcggggcagagataaaaagaggtgcgtggggtgtggcagaaagagaagcagagacagtcagagatggagaggcagagagggtcaggtatttagccaggagagagatatgagacagagacaaagatgagagacaccgaggggaggccagagatggagagacaggaggagagagatcagagacagagcgacagagcagggaatagagacaggagaaggcagagatgggagacacagagaagtggggatggacagacagagaccaggagtcgcagaaagacaggatggtgaaaggcagagcagagaagagacagaggagagtgaggaacacccagcagagagacagagacacagagaagaggaaacaaagagacttggagaaccagaggcagagatagtgcaagagcagagatcagaagagcagtggcgggttgggggccggagagacagggagacagagacacagagggagtgaactgggcagaggcacggagggggacaaagtcagcgaaccgcttctgctccaggtcccccggccaggctgaacgttttgggaggggctgggacacagcccatggggcctgagtggagggggtgggatttgaagccggtaggccccggaaatagagtgtgttctcagatgccaggggctgggagaggtcggggagtaggagggttcagacttctggtctgagttgggagggggctaggggcccagactcttgggactgatggggatgggagctggggattgagactcctgggtccaggtcatgacggattggggaatctggactctggtatggaggaggtgtggattcctgggtcccggtggaggaggggctggggagggggctgggctcccaggacaagggggaggcgggggctggggacccagctgccgggaatccccagggaggaggcgactgagggccggacccctggactcgggagggaggctggtgggggtcgggggtcccaggtcctagaggggggccgatctcctccgggccaagcctgcagctccccgaaggcatgatcagcagaattggggccgggtcgaggccttgaggatttctcagccctgggcctggggcttggtcctggtcgctggggctgggttcttacctcgcctccttggctcctttcttccttccccacggccggccaaacgcggacggtggtggcggggagggaggggggcctgagcgtggtggggggtggaggaggaggctgggctcggtgtcactgcctaagccttccccccggaaacctggcctttcctcggagcctgaaagaggaaagactggctgggaagccggaagcgggaggacgggggacctggagaggggagggaaggcagcttgcactacagggtcctgtgaggggagggggctgggggcctgtcccccgggctcccagagggcggagggtgctgagggcctggaacactgggtccagctactcccggctccccaacatgcacacacacatattcattcattccttcaacaaatacacatttatcaggtcctgtctgtgccaggcactgtgtcaggccaggggagtggccgggggaggaagatgaatgaatcagtgacagaggcttcaggaagtactggcactctggatcagaacctggctccagccttcccttggctgtctgggtgaaggattctcccacttcgagcctcggtttccccctttgtgaaagcccctgcatatactcattcaaccctaagcgaccaatatttactgaatatctactacgggccagcctgcatatatttgtctacatatacgcatattcactgggaccttagcagccaatgtttactgagcacctactatgggctggtgctgtccttggtgctggagtcacagtggcaaaaaccggagctcactgtctgatggggaaggcagatagatacggatcaatcacgctggagtgcatgtgggggaacgtgtgctccgaggcagggaactgctatgggaatgcagagaacagaaggcactgagctgagctcacactgggaggaggtgattcctgaggtcttcctggaggcagcaatgtttcagctgaaattggcagaatgaaaccaacctggcgacatctcagaaacctattctggagcagaaaaggcattttgcaggagtatacccacagcttgacgctgtttgtttaaggttacattcctgccaaacagtgctaatgagagtgcgagcaaacaggtcctttcatacacggctggggcaagtagaacctggaacattcttaccgagccagcaattccaggaatttattcttcagaggcatctactcggaactgcacaaaataatgtctgcaccaggttaatcattgcagtactgcacatcactgcaaacagctgaaaccaatctaaacacccatctgtaggagagctgagtaataaatcatgactgatccacccagtggaatactaggtgtccatagaaaagaacaaagaagctcaccgtgtgcatatatggtaagtctccaagtgataacctgtagaagagaaaaatggaaggtcaagtacagcctgcagcctgttctgggtttgtgtgtgttctgggattgtgtccagatgaactggaacaagagagaagaaactgaaactggcaacatagtctaacttccaggacagaaatttactacactctatccttgtttttttgtttgtttgtttttttttgttttgttttgttttcttttgagatgagatctccttctgttgcccaggctggctggaggaagtgcagtggtgtgatctcggctcactgcagcctcgacctcccgggctcaagcaatcctcccacctcagcctcctgagtaggtggggctacaggagtgtgccaccatgtctggctaatttttgtatgttttgtagagatggggtctccctatgttgcccaggctgggcttgaactcctgggctcaagcaatccacctgcctcggcctcccaaagtgctggaattacagacattagccactgtgcccggctttttgtactttttgaattcaaaaccgtgtgaatgtgctatatactcaaaaaagtaaaggaggccaagcatggtggctcacgcctgtaatctcagcactttgggaggcccaggtgggcagatcacctgaggccaggagttcaagaccagcctggcc

SEQ ID NO: 1561482 - DNA, 4001 bp, Homo sapiens
ggacccccaggttccggccctctctccagccacgtgtctgaacaactccgtgctcccacccgtccacccacctcaggttctctctagtcctcgcccggcctccaccaggctcgttctaggtcccagcgctctccggggttccacccccggggccgcagccctcgctttctgggcctttctgtgtaagttctcgccccctccaagctccagaacagccccctccggcgtctgccccactcccgccccggcccaggtaccctccacgcggtccagcccctcccgccgcccgcccccagcccccttcctcctcccggcccccgtacccagtgcagcagcctctcaggtccgggcgactccaagcggccccgggctaccctcgcagttgcaggcggcggcgagaaggggacctctgggtgtgccccaggaactggcggcgccggccgaaagagagaagccgaagggagagaagagggtctagggaaggaaggttggggcggggcgcccgggccgtcgcgaaacggctccggccagaaacacacaccgagaggaaagtacccaagcgaggaagatccggtctccaccccccagcacccaacgtgcacgcacacgcaaggaagagcctgaaaatggagtgcggaatgtttattgagcaaagggtcgggggcgtgggcggaaggggggtagatacagaaatgaaccagaccgtgcccgtgctctttatcatctcttccccgcagacaaccaccggttcaccgctccagagagcagaaaaccaaggtttagagaggtcatgtcacttgcacaggctcacacagcacagctggactggaacccagttccgactggttcccaggcccagggaggggcaacgactttggtctacatcacacagctagaaagggggtaaggaaggaatgatgctcctccctttggaaggtggggaaactgaggcccagggtaaggcagtaacctcagcagagccagggggtgtgtgtgggagtgagtgacgctgtgtgggtcagacttggtggccctgagacgggcagggcagcacaggccgggtctcgagcttagtggaggcgcacgtgctgcgccagctccgcggcgtcctggaagcggcgtgggcagagcgggcaggtgtgcggcggcccggcgcgggcgcggtgcgtggcgcgatgccgcgacaggtggctggagcgcttgaaggccttgccgcaggcgccgcacgtgaagggcttgaggtccgagtgcgacacgcggtggctctgcagccgcagagggctggcaaagacacgggcgcactccgggcagctgtagcccttgcgagggccgggctctcctgggggcgcctcgcgctggggcgggccccggggctcctcctccagctgcaccgtgtatgtgtaggggaccccattggcgtcgatgaggaggtggcggcccagccgcgggggtcggggccccgccgccgaggaaggagtggaggaggggccttccgccttggggaaagggggagccttggggggcggtgggtccatggcctccggagaggaggaccgagggtggggtggccgcggcggcagcagcagcatctggagcggcagctgggagcggcggaggggagattagttaaaattgccacttccttttaggaaaagtttcctaaaatggaaagcatccccactatcactgcttgttaccctttgtgcgccactgactacctccctagcaaaataaaaactgtgactccagcccggctctcccacgttccatcaagctgcctcggagagggcctccaactgagctctgcaaaaccccgccaccacctgccactcctcctgggtccacctctcaccactcaggtcaggtctgaggacgtagtcccccgacttttcttcccttttctcctctcaacccaccccagcagacaatcaatccctaaatctgtttacctctttacatcttagaccccgggcctcctgaccgccgagatttctctaatctgtggtttcttcttttttcctgttgcccagccccagttcagtttacttcccctccctttgccgccccctacccccccaccggcccccgtatcggcctcctggccctccgtccccactacatgccgcagggcctccccatcttcatattccgtggcctccctcacttcctctctaggtacctccccagagccccactaacccaattccccacatttcactagggcttttccatcctgttcctacacttagcacctcgaagtctagtcacctctccccactacggaacccatcgtcttactacatctatacaccccaaaatggctcaaatgccttccttctgtataccccgcccccccaacctggctacctgctacattctccccaaaggcccccttttctctcgccccccatatatggcggtgacatcgttacttctttctgtacccatcaggggccttctcccaaaccccgttatgcacaccaggctccgggactccgcttcccacagcacctctcccaagcccactttcccctcctttctgtgtacgtctggcatctctctttctcctcgtgttcacctcttccaggagccccatccctctccctgttacacacagcgtggtcccccgcccgttcttttgctctgctccccttgtttatgggaaccccagcgcccgggcgttttcgcccccatcccgctacacaccgcctgtcccctggccctggggcccctcctattgccttcacttccccaaggagccctggcgcctcgacttcccctcccgtccctccgcccgatcctgccgctcccgacccccacccccatcccgggtggctccagcgcactcccccagcctgcctggccccggcgtcgtcccagggccaggctcctccctccatcccggcccccgtaccccgtgcggcggcctctcgggtccggaggaacgggccgaggtcccgggcggccccgggcttcccctggcgagcgccggcggcggaaccgagacttccgggcagctccgggccggcggcgccggggacgcggggactgggggcgcgggggtgcgaggggttggcggagtccctgggaaaaggcgccggccggaagcgcgcgagcccagtgcggaggttccgccgcctggagccggcgctcccacccctcgcctctgcggagcgccctgcggggaggggaccggaggcgtggggtccactgaagacgcccgcccccggcggccccgctcccctcccacctcccgaacggaacgattccgccgcttgacaagagatcggccaataaaccgagactaagcaaagttacgtcttcgccctaaggcccacaagggtttgtcctctttccactgggccgtcgctgcctgctcggccgtggccacccaccgaggtagagggcgggagaagggatgttcctgccggctgagcaaatgtggagaccgaggtccagagaccagccattggctccgatgtggccgggccgtgattctccacccagcaaatggggaggccgaggcccggagaaggccagacgctgccagatagttggggaaggtatgttctttccacggggcacatgcgggaaccgaggcccacagagggccagacggctgcatgcgcaggtggggaggtgtgatatttccagaaggcatgtggcgacaccgaagcgcagcgaaggccaggctttgccagatgcggaggtgggaaaggctggcactgcccacggggcccactggaagcctgatgcgggctcgcgggctgcgccaggtcctggggcacttgaggcccgggcgctggctgcgcatgcgaaggactccggcgtcgaaagcaacgcgcggtggcgctgcagccgcactggagagctgcacacgcggcagcactcggggcagctgcagctcctcctccagccacgtggcgccacggcctcgcaggagggcggcagcagcagcatctgcaggtgcagctgagagtgggggacagaagaggagtaac

SEQ ID NO: 1561483 - DNA, 4001 bp, Homo sapiens
ctccgtgctcccacccgtccacccacctcaggttctctctagtcctcgcccggcctccaccaggctcgttctaggtcccagcgctctccggggttccacccccggggccgcagccctcgctttctgggcctttctgtgtaagttctcgccccctccaagctccagaacagccccctccggcgtctgccccactcccgccccggcccaggtaccctccacgcggtccagcccctcccgccgcccgcccccagcccccttcctcctcccggcccccgtacccagtgcagcagcctctcaggtccgggcgactccaagcggccccgggctaccctcgcagttgcaggcggcggcgagaaggggacctctgggtgtgccccaggaactggcggcgccggccgaaagagagaagccgaagggagagaagagggtctagggaaggaaggttggggcggggcgcccgggccgtcgcgaaacggctccggccagaaacacacaccgagaggaaagtacccaagcgaggaagatccggtctccaccccccagcacccaacgtgcacgcacacgcaaggaagagcctgaaaatggagtgcggaatgtttattgagcaaagggtcgggggcgtgggcggaaggggggtagatacagaaatgaaccagaccgtgcccgtgctctttatcatctcttccccgcagacaaccaccggttcaccgctccagagagcagaaaaccaaggtttagagaggtcatgtcacttgcacaggctcacacagcacagctggactggaacccagttccgactggttcccaggcccagggaggggcaacgactttggtctacatcacacagctagaaagggggtaaggaaggaatgatgctcctccctttggaaggtggggaaactgaggcccagggtaaggcagtaacctcagcagagccagggggtgtgtgtgggagtgagtgacgctgtgtgggtcagacttggtggccctgagacgggcagggcagcacaggccgggtctcgagcttagtggaggcgcacgtgctgcgccagctccgcggcgtcctggaagcggcgtgggcagagcgggcaggtgtgcggcggcccggcgcgggcgcggtgcgtggcgcgatgccgcgacaggtggctggagcgcttgaaggccttgccgcaggcgccgcacgtgaagggcttgaggtccgagtgcgacacgcggtggctctgcagccgcagagggctggcaaagacacgggcgcactccgggcagctgtagcccttgcgagggccgggctctcctgggggcgcctcgcgctggggcgggccccggggctcctcctccagctgcaccgtgtatgtgtaggggaccccattggcgtcgatgaggaggtggcggcccagccgcgggggtcggggccccgccgccgaggaaggagtggaggaggggccttccgccttggggaaagggggagccttggggggcggtgggtccatggcctccggagaggaggaccgagggtggggtggccgcggcggcagcagcagcatctggagcggcagctgggagcggcggaggggagattagttaaaattgccacttccttttaggaaaagtttcctaaaatggaaagcatccccactatcactgcttgttaccctttgtgcgccactgactacctccctagcaaaataaaaactgtgactccagcccggctctcccacgttccatcaagctgcctcggagagggcctccaactgagctctgcaaaaccccgccaccacctgccactcctcctgggtccacctctcaccactcaggtcaggtctgaggacgtagtcccccgacttttcttcccttttctcctctcaacccaccccagcagacaatcaatccctaaatctgtttacctctttacatcttagaccccgggcctcctgaccgccgagatttctctaatctgtggtttcttcttttttcctgttgcccagccccagttcagtttacttcccctccctttgccgccccctacccccccaccggcccccgtatcggcctcctggccctccgtccccactacatgccgcagggcctccccatcttcatattccgtggcctccctcacttcctctctaggtacctccccagagccccactaacccaattccccacatttcactagggcttttccatcctgttcctacacttagcacctcgaagtctagtcacctctccccactacggaacccatcgtcttactacatctatacaccccaaaatggctcaaatgccttccttctgtataccccgcccccccaacctggctacctgctacattctccccaaaggcccccttttctctcgccccccatatatggcggtgacatcgttacttctttctgtacccatcaggggccttctcccaaaccccgttatgcacaccaggctccgggactccgcttcccacagcacctctcccaagcccactttcccctcctttctgtgtacgtctggcatctctctttctcctcgtgttcacctcttccaggagccccatccctctccctgttacacacagcgtggtcccccgcccgttcttttgctctgctccccttgtttatgggaaccccagcgcccgggcgttttcgcccccatcccgctacacaccgcctgtcccctggccctggggcccctcctattgccttcacttccccaaggagccctggcgcctcgacttcccctcccgtccctccgcccgatcctgccgctcccgacccccacccccatcccgggtggctccagcgcactcccccagcctgcctggccccggcgtcgtcccagggccaggctcctccctccatcccggcccccgtaccccgtgcggcggcctctcgggtccggaggaacgggccgaggtcccgggcggccccgggcttcccctggcgagcgccggcggcggaaccgagacttccgggcagctccgggccggcggcgccggggacgcggggactgggggcgcgggggtgcgaggggttggcggagtccctgggaaaaggcgccggccggaagcgcgcgagcccagtgcggaggttccgccgcctggagccggcgctcccacccctcgcctctgcggagcgccctgcggggaggggaccggaggcgtggggtccactgaagacgcccgcccccggcggccccgctcccctcccacctcccgaacggaacgattccgccgcttgacaagagatcggccaataaaccgagactaagcaaagttacgtcttcgccctaaggcccacaagggtttgtcctctttccactgggccgtcgctgcctgctcggccgtggccacccaccgaggtagagggcgggagaagggatgttcctgccggctgagcaaatgtggagaccgaggtccagagaccagccattggctccgatgtggccgggccgtgattctccacccagcaaatggggaggccgaggcccggagaaggccagacgctgccagatagttggggaaggtatgttctttccacggggcacatgcgggaaccgaggcccacagagggccagacggctgcatgcgcaggtggggaggtgtgatatttccagaaggcatgtggcgacaccgaagcgcagcgaaggccaggctttgccagatgcggaggtgggaaaggctggcactgcccacggggcccactggaagcctgatgcgggctcgcgggctgcgccaggtcctggggcacttgaggcccgggcgctggctgcgcatgcgaaggactccggcgtcgaaagcaacgcgcggtggcgctgcagccgcactggagagctgcacacgcggcagcactcggggcagctgcagctcctcctccagccacgtggcgccacggcctcgcaggagggcggcagcagcagcatctgcaggtgcagctgagagtgggggacagaagaggagtaactgtcacagcgagccccaagaccctggggtgccacagctacatcct

SEQ ID NO: 1561484 - DNA, 4001 bp, Homo sapiens
tagtggaggcgcacgtgctgcgccagctccgcggcgtcctggaagcggcgtgggcagagcgggcaggtgtgcggcggcccggcgcgggcgcggtgcgtggcgcgatgccgcgacaggtggctggagcgcttgaaggccttgccgcaggcgccgcacgtgaagggcttgaggtccgagtgcgacacgcggtggctctgcagccgcagagggctggcaaagacacgggcgcactccgggcagctgtagcccttgcgagggccgggctctcctgggggcgcctcgcgctggggcgggccccggggctcctcctccagctgcaccgtgtatgtgtaggggaccccattggcgtcgatgaggaggtggcggcccagccgcgggggtcggggccccgccgccgaggaaggagtggaggaggggccttccgccttggggaaagggggagccttggggggcggtgggtccatggcctccggagaggaggaccgagggtggggtggccgcggcggcagcagcagcatctggagcggcagctgggagcggcggaggggagattagttaaaattgccacttccttttaggaaaagtttcctaaaatggaaagcatccccactatcactgcttgttaccctttgtgcgccactgactacctccctagcaaaataaaaactgtgactccagcccggctctcccacgttccatcaagctgcctcggagagggcctccaactgagctctgcaaaaccccgccaccacctgccactcctcctgggtccacctctcaccactcaggtcaggtctgaggacgtagtcccccgacttttcttcccttttctcctctcaacccaccccagcagacaatcaatccctaaatctgtttacctctttacatcttagaccccgggcctcctgaccgccgagatttctctaatctgtggtttcttcttttttcctgttgcccagccccagttcagtttacttcccctccctttgccgccccctacccccccaccggcccccgtatcggcctcctggccctccgtccccactacatgccgcagggcctccccatcttcatattccgtggcctccctcacttcctctctaggtacctccccagagccccactaacccaattccccacatttcactagggcttttccatcctgttcctacacttagcacctcgaagtctagtcacctctccccactacggaacccatcgtcttactacatctatacaccccaaaatggctcaaatgccttccttctgtataccccgcccccccaacctggctacctgctacattctccccaaaggcccccttttctctcgccccccatatatggcggtgacatcgttacttctttctgtacccatcaggggccttctcccaaaccccgttatgcacaccaggctccgggactccgcttcccacagcacctctcccaagcccactttcccctcctttctgtgtacgtctggcatctctctttctcctcgtgttcacctcttccaggagccccatccctctccctgttacacacagcgtggtcccccgcccgttcttttgctctgctccccttgtttatgggaaccccagcgcccgggcgttttcgcccccatcccgctacacaccgcctgtcccctggccctggggcccctcctattgccttcacttccccaaggagccctggcgcctcgacttcccctcccgtccctccgcccgatcctgccgctcccgacccccacccccatcccgggtggctccagcgcactcccccagcctgcctggccccggcgtcgtcccagggccaggctcctccctccatcccggcccccgtaccccgtgcggcggcctctcgggtccggaggaacgggccgaggtcccgggcggccccgggcttcccctggcgagcgccggcggcggaaccgagacttccgggcagctccgggccggcggcgccggggacgcggggactgggggcgcgggggtgcgaggggttggcggagtccctgggaaaaggcgccggccggaagcgcgcgagcccagtgcggaggttccgccgcctggagccggcgctcccacccctcgcctctgcggagcgccctgcggggaggggaccggaggcgtggggtccactgaagacgcccgcccccggcggccccgctcccctcccacctcccgaacggaacgattccgccgcttgacaagagatcggccaataaaccgagactaagcaaagttacgtcttcgccctaaggcccacaagggtttgtcctctttccactgggccgtcgctgcctgctcggccgtggccacccaccgaggtagagggcgggagaagggatgttcctgccggctgagcaaatgtggagaccgaggtccagagaccagccattggctccgatgtggccgggccgtgattctccacccagcaaatggggaggccgaggcccggagaaggccagacgctgccagatagttggggaaggtatgttctttccacggggcacatgcgggaaccgaggcccacagagggccagacggctgcatgcgcaggtggggaggtgtgatatttccagaaggcatgtggcgacaccgaagcgcagcgaaggccaggctttgccagatgcggaggtgggaaaggctggcactgcccacggggcccactggaagcctgatgcgggctcgcgggctgcgccaggtcctggggcacttgaggcccgggcgctggctgcgcatgcgaaggactccggcgtcgaaagcaacgcgcggtggcgctgcagccgcactggagagctgcacacgcggcagcactcggggcagctgcagctcctcctccagccacgtggcgccacggcctcgcaggagggcggcagcagcagcatctgcaggtgcagctgagagtgggggacagaagaggagtaactgtcacagcgagccccaagaccctggggtgccacagctacatcctagagcactgtccatcagaactttctgcaatggtggaaagttctatgacagtcactagccacgtgggactcttacactcttgaaatgtggctggtgtatcagaggacctgaattttaaattgtattacatttcccataatcagcacggtggctcacacctgtaaccccagcactttcggaggccaaggcgggcggatcacctgaggtcaggagttcgagaccagcctggccaacatggtgaaactccttctctactaaaagtacaaaaattagccggccgtagtggtgctcccctacagtcccagctacttgggaggctgaggcaggagaatcgcttgaacccaggaggtggaggttgcagtgtgccaagatcgtgccactatactgcagcctgggcaacagagggagactgtctcaaaaaatactaatttcccataatcaaaatttaagccacatatggctcctaccttatggaacaattccagagaccactgtcaaccagttgtaaactggaggcccaagggcccaaaaggcctcacagttatatttggtttgggacacaaggtactttttaaacattttactgggcagtatgtatattttttgagacagagtctcactctgtcgcccacgctggagtgcagtggcatgcttctggctcactgcagcctcaccctcccaggcacaagtgatccttccacttcagtctcccaaacagctgggactacaggcgtgggccaccacacattttgagccggaccactctttgttgtgggggcccatcctgtgcactgtagagtgttgagcagcatccttggcctccacccaccagatggcagtagcaccctcccccaaccccaagttgtgacaacccaaaatgtctctacacattgcccgtgtcctctaggaggcaacatggctcctagctgagaacccctggtctacttagacaattatccaacctgagtgtcttgccaagatccctgatatagttaagatgtctgtcccctccaaatctttttttttt

SEQ ID NO: 1561485 - DNA, 4001 bp, Homo sapiens
gagtgggaaacgtgtttattgtttgatcagtctcaggcctggttggggggtggaaggcaggactggggtcccttccccaacaacagcgcagaagccccaggaagatggcgcagattcctgacgacccacagccaccttttatgaggccagagactttacacaccacactccccacctccatccagtcaaggctctgccatggaacagctgatatctttaggctagaggactccattctgtgtaggggctcattcccatctcagctccagaacacggaggacctgaagattactcacggattcctccttcaggcagggctctgcctttgagatgcggctgctctgtgtctgtgtccagggccctgaacaccagcctcaggctctcaccaggtgtctggacaggagtccaggctccctgcaaagtcctgtggtacctggggcacccggcagcccggctcatggatgcttccaccgcgtgtgtttctgcagtgtgttctgctccataaagcggcgagggcagtgtggacactgaaacgggcgttccccagagtgcacccggctgtgctgggccagctcacccgcatcccggaagcggcgagggcagagcgggcagccgtggggccgcccaccacccgccaggtgaatggaatggtgccgtgccaagtggctggcgcgcttgaatgccttcccacagatgtcacactcgaagggctttacctccgagtgggtgatgctgtgtcgctgaaggtaggacatgtactcgaagacccttgagcacacggggcagctgtagcactttttctggcctggagccccactggcccctggctccctctgtgactcctcgtccaccagcactgtgtaggggacaccctgagtgtcaataagcaggtagtggttgggccttggaggagatgaagcctggggagatccgatggaggaggaaggtccaggttctggggagcggcaagtccgacggggagggccctccatggtctcaacggaggaaaatgccagaggctgagggcagggggatggcagcaccagcatccggagggctggctgaggcctggtggatgggagatgggataagaaggttatatagaagagggcagctcagcaccacaggctccatccttttccctccctatacccggcccaggacctctgcatcctgctgcccctcagtccctcttttccagtcccgctcacagctggagtctgtggccccctaaaaggtccccagggtcttcctccttggaaaacctctcctagcctcggtgctccaccatacactgtactcacaggatctcttgacctcctctgcacaacctggacctcgctctaaccttcctctttgtgccctcccaggtcactgggtgccccaccccgcaggcctccaggcctctccctcccctccttctagccctttccagggtctgcgtgttggcctatgctacatactcaagcctttcctgaccccctccatacaagccaagcctattcacaggggctccgacgttaggacccccaggttccggccctctctccagccacgtgtctgaacaactccgtgctcccacccgtccacccacctcaggttctctctagtcctcgcccggcctccaccaggctcgttctaggtcccagcgctctccggggttccacccccggggccgcagccctcgctttctgggcctttctgtgtaagttctcgccccctccaagctccagaacagccccctccggcgtctgccccactcccgccccggcccaggtaccctccacgcggtccagcccctcccgccgcccgcccccagcccccttcctcctcccggcccccgtacccagtgcagcagcctctcaggtccgggcgactccaagcggccccgggctaccctcgcagttgcaggcggcggcgagaaggggacctctgggtgtgccccaggaactggcggcgccggccgaaagagagaagccgaagggagagaagagggtctagggaaggaaggttggggcggggcgcccgggccgtcgcgaaacggctccggccagaaacacacaccgagaggaaagtacccaagcgaggaagatccggtctccaccccccagcacccaacgtgcacgcacacgcaaggaagagcctgaaaatggagtgcggaatgtttattgagcaaagggtcgggggcgtgggcggaaggggggtagatacagaaatgaaccagaccgtgcccgtgctctttatcatctcttccccgcagacaaccaccggttcaccgctccagagagcagaaaaccaaggtttagagaggtcatgtcacttgcacaggctcacacagcacagctggactggaacccagttccgactggttcccaggcccagggaggggcaacgactttggtctacatcacacagctagaaagggggtaaggaaggaatgatgctcctccctttggaaggtggggaaactgaggcccagggtaaggcagtaacctcagcagagccagggggtgtgtgtgggagtgagtgacgctgtgtgggtcagacttggtggccctgagacgggcagggcagcacaggccgggtctcgagcttagtggaggcgcacgtgctgcgccagctccgcggcgtcctggaagcggcgtgggcagagcgggcaggtgtgcggcggcccggcgcgggcgcggtgcgtggcgcgatgccgcgacaggtggctggagcgcttgaaggccttgccgcaggcgccgcacgtgaagggcttgaggtccgagtgcgacacgcggtggctctgcagccgcagagggctggcaaagacacgggcgcactccgggcagctgtagcccttgcgagggccgggctctcctgggggcgcctcgcgctggggcgggccccggggctcctcctccagctgcaccgtgtatgtgtaggggaccccattggcgtcgatgaggaggtggcggcccagccgcgggggtcggggccccgccgccgaggaaggagtggaggaggggccttccgccttggggaaagggggagccttggggggcggtgggtccatggcctccggagaggaggaccgagggtggggtggccgcggcggcagcagcagcatctggagcggcagctgggagcggcggaggggagattagttaaaattgccacttccttttaggaaaagtttcctaaaatggaaagcatccccactatcactgcttgttaccctttgtgcgccactgactacctccctagcaaaataaaaactgtgactccagcccggctctcccacgttccatcaagctgcctcggagagggcctccaactgagctctgcaaaaccccgccaccacctgccactcctcctgggtccacctctcaccactcaggtcaggtctgaggacgtagtcccccgacttttcttcccttttctcctctcaacccaccccagcagacaatcaatccctaaatctgtttacctctttacatcttagaccccgggcctcctgaccgccgagatttctctaatctgtggtttcttcttttttcctgttgcccagccccagttcagtttacttcccctccctttgccgccccctacccccccaccggcccccgtatcggcctcctggccctccgtccccactacatgccgcagggcctccccatcttcatattccgtggcctccctcacttcctctctaggtacctccccagagccccactaacccaattccccacatttcactagggcttttccatcctgttcctacacttagcacctcgaagtctagtcacctctccccactacggaacccatcgtcttactacatctatacaccccaaaatggctcaaatgccttccttctgtataccccgcccccccaacctggctacctgctacattctccccaaaggcccccttttctctcgccccccatatatggcggtgacatcgttacttctttctgtacccatcaggggccttctcccaaaccccgttatgca

SEQ ID NO: 1561486 - DNA, 4001 bp, Homo sapiens
gtttctcctcctagcagacgaaaaccatcaggagatgcagaatgctatagagaataaatctgtgggcatttgtcagaggggagaggacaatgggagaggagactcctgcctggtccttttattccctaaaatgggaaagtctgagaaccaaatttctggatggaacccaggtggaaagtttcaagataaggaaagcaaatatttatgggatttaaaaactcacaagggacatgacttttagaatttcaagggctgataggtcctccttctggttcctctcttggggaagggcagagtcctgcgacggtagagctgggggaggaaagagcaaacatgagaggctaggcttgcctcacagttcctagaatgccaagttacaagtccccacctgcttgccctctgcccaccaagaaaatgagaaggagggggaggcaaagggatcctcacccaaccccaggaaaccagctttagctgctgcaaggcaaaggggaaccagtggtcctttccctcccatttcccctaaacatccagtggttctgttttgctgcaaatgcaagtctaagacagggatgctgagggctgttctagtgactgagacccacatgttacctcaaggacaaggagggcttccctcaagccagggagcatagaaggcctgcatcatttgcatagccccagcctagaataaagcctttccaggactaggccatttaactctctcctgcagcaaatataacacctttgaaagtctacctggctcttttcccaaccgccaaatatacaaaaagctctacagcccaaactgaggctttgtgcatgccacttcatggagcatgccttgcatcaacaaatgggatagagttggaaggaacagtaagagacaaattacacacagcacgcccagtgctccattatcagcacataaatgtgtccttccatagagacacagcagtgcacaaagctgcatgtccaataatatttgctaaataggagaactgaaaattagtacgtaagtaggcaagtccacaagtagccaagaggttgaatcatttttggcacagccatataatgggatgccaagtgactatcaaaaatgactatcaaaaactgacaagcaaagatattaactactgaatcctttgagaacattcagcaaaaagaagtcaaactcactaacacacaggctaaaaacaaaacaaaacaaaaaaattggaagaaaaaacacccaagtattcgcagtgttgtcatttaaccagttcttgagctcactgttaaacaagaagtactctgtaaaggagtatataaggtgcctactgcattacaaacatttggttctaagtaacgtgtaagtgaaataattatgaatgttgcttaatatgatgtaataggcagcttttccttattatgaccacttttataagcattatttgtattaactgcacgatatcctatttacaaaggatggcctgtgatccactcaagtgtttccccattgctggacatagaatttgaacatataaaatgttcccaagtataagtttttctaaactagcggttctaagtcttctggggtcttgtaactctctgagaacctcatgaaacaagatttcctctcagattaaaaaaaaaaaaaggcacgcataacagtgaatgcaaaacatccgcaatttcagggggtcggagacccctgcgcacccacctaaggggtccatgcacctgggctatgaggctggaagcagaaagggggcgccagaaagcgcacgccgcgagggccggcgggaaatgtagtctcacgccggtaaagccacagagcgacgatgaggcgagacgtctgcgttcttctcaggcctgagacccaaccggcccgggcaccagctcctgctggaccccagagcgcctggaaagctccggaacctctcacctgccgcctcctcgggtccaagtgccaccgcggccgcgcccccggcagcccagggcgcgcttccaccacggtaccggtggattcgccgtgcgcagccggaagatggcgcagacgcacaaagcacaccgatgctgcgccatgatagggccggcgccgcagtgtcttccgggaaacatagtctttaggcgtaaaggcagcagcccggccttgaagccggatctcgcgatgtttcagggtgagccggacgcaggcgtgcctgcgcagtgcgcggaggagtgctgttcgtgtgttcgagtccctgggttgcttcctggggtctgtggtgctgggtgtgctatctgcgtgtgattctctagcgagagattgtgggcgagtgaccgagtgggcaaggggccgtcactgtgtgtgcgtgattttgacagtgtgtggtggtagcttctgactccgcgtgggtcgttgaatgtatgactgggaccgtttagcggtggatacacaactgtgtgcggctgtggaagattgcctcatccgttacgttcccatttccgtggaacaacagttttaccagaaggtttcgaaggaaccttaaagtttggaagcgtaagagtttatctggtaactaattttaaacattacatctatggtgagttaaatgtgggttatgaaggagaacgcaaaataaaaacgttataaagatgtaaaggagttttatggggcggcatctcttgggcaaatatcagaccgccgtaggtagttgttaattctctcttgtttttaggcggctttggtgtcatcaaatgtgagaagccctggactttacacatcccgagccagtgtgatccagtatgattgggagtccgagtgccagatgccggtcaggacctgttatgctgggtctcagaatgcggaaactctccctgtccgaggtggaacagtttgtccttgagtgaggactggagtcctgagtgactcttttgatttgatcctgtttccctcaaacctggtgagctctatggtgtaataaatggttaagagtgtgaacccttaaccatctctaagactggagccagaatgcctgaactccagtcttagagatgtgcctcggtctccacatttgaaagtgaggatgattgtggcatctaattcattgagttgttggggaggagtaactgatatgtaaaataatgctactgctgctggataaggatgctaatatgactgaagctaatgctttctttctgcaaagatgctttttccaaaacacaccatattgcctctttacacattcttcaggagagggtagaggctgcattttccttgtaggtgcggtgatgtggtggaaagcacacttttagaattagacagatgtggattcaaatagcatttcagccatttattagtttcttcgtgcctatctcggttttgttttgtttttttttttttgtccataaaaggaagaatgtaatgctgggcttgcagctttgtcctgagggtcaaataaaatgatttaataatataagcaaagctcagaggttggttattgctgattactgatattaaaagacaacttcagcaaggatggttgaatttcacacttgtgagcggacagttgaggagacagttgtagatttatcctacttgaccttatttgtggttcaagacagtgttgcgagttcaagaggagagggtagatgcaaaaagtcatcatctttcctatgttctctgatcttgggaaggggcgagtggctctagtttccctttaacatcccactgtgttgagtgtgtctatatgtacatgcgtcagtatttgcttatggaggaaaggaaggaaaaagaccaaacaggtacaaagccagccatctctcaggctaactttcttctataccatttttactttctcacattcattaatctgccaaagagaaatttagaggatgatgaaatggccacttctgactctgaaccaagcctctgaagtcatacaccattatactcttggtcacaaaatcagctgtgagtctaagtaggtggaggctacacaagagtataagtactaggaggcagggatcattcagggtcgtct

SEQ ID NO: 1561487 - DNA, 4001 bp, Homo sapiens
agcagacctcactgccttgaagaataaagccattacctatgaagtggcataactcagtggtaagaactactaggcttaaggatcagaacacctggtctcaaacagccaaaccaccacatgctacctatacaacctctggcaagttaggtaaccactgcaaacctgtttctctatcagtgaaatggtaactattccctatcaattgttgggaggattctgaaatgatctacataaagcattgagcacagtgcttaattttcatctttctgtcatttattttcataaccagcacatggtaggtctcccattcctttttccttttaaattcctcacgtgcccccagagactgagagggatggaaaaactactgtgccagaggacaagcagccagcgtggtcagcttttcaggcttaaggctgaggctcctgtctgtctctcccttttcagctctcgtccctccctttctccatcttttcccctttatctcaatctttctgtctctccaccacaacagcagtctcccaaaccccagagcacaccagcatctccaagcacccacacagcttcctgcccacacaaatcacagacaacaaaccacatagtttctcattctggcacctcccctggcaacctatggacatgcccccacattgtagcccgccctgctctcacaatgggtcatataaggccattctcagtcacactgtcacactcactgtcgggatgacatacagtgctaagtcacaccatctccctcagtctcacataatcacacacactgtcatgcacaatctcaaacactgtcacatacaatcttagtccaacaacaaaaactctgttcacatacagtttcacatacagtgacacagtctcacacactgtcacacaaattctgtcgcagtttcatgtggtcccatatcaacagccacacaccgtacacaaccacacatagcctcacacacggtgacatggtctcacatactgtcacagtctcatctaatcctacacacacggtcaagctctgttcacaaagtcacacacactgtcacacagtcttacattatcccacacacacaggtcacacacacagtgacatggtcttacacactgttcacacgtggtctacacataatgacagtttaacactgtcacacattcccagtctcacacatggtgacgtggtcttaagcacatacagtgtcacacagtcccacacggtcccatatactgtcaaaggctcccgcatacaccggggcaacggtctcatactgtcgcacacattctcacacccagtctcatactgtcacacatagtcccacatttgtcccacatggtctcacactgacacacatattcacacacggcctcacattctcacactgtcacacacggtctcaaattctcacacagtcacacatggtctcacacacgattccacactgtcaaacacattgtcacacacggttccttaatgtctcacacattctcacacactgtcacacacggtcccacacatggtggcatggccgctcccggcgtcagctccatcccgcgctcctcaccgcctcctccctccagtgggcacctccttcggcgcggtccttggaggccggggctgggccagggcccgggccagggctcgatcctggccggcggccgcgctcacaaaggcgccgcagccctagggcaggccgcaggggccgctgggaaatggagtccggggccggcgcggcgcagaggatgctgggatgttggccgagggccccgggcggccgcagatcccgccgctcagttgcgggtagttactgctgcgcccctttccctagtaagcccacctccgctggccttcagaatcccacccggaccagctgagccctctcaggccgttcgactgtccgctcccccacccgttccacccgttccacctgcgcaggcgcagctggttcaggtccccaaaggctgccaggccggggtgccagcgcggtgaggcgcacgcgcagtgaccgcgtccgcgctccagcgctccgggtggggctgtgagtccatcgctgagaaaagggagctggaggaccagtgtggagcctgagccagctggagaggggcccggtaggatgtacgtgtgattaagcgctctggcggcccgggctttctctttccctttctgtttcttctctctccgccttgccctgtctttcattcgccacttattgagcgcctgctgtatcgggcactgtcgtgggccctgggcacacagcagtgaacaagcagacaaaatccccacctcatggagcagcattctaatgcgggaggaattcaataggaaaaaattaataataaaggacactgatgcatattgggaagtaatgcgtattatcaagaaaagcgaagcagagtattaagatcattctttcagttcttcattctttcagttatgccctctgaatcagtggaaaaaacgcaaggtgcatttttttctattatctcaacgacaactaatcataacagaagacttttctgaccaaatataggggagtttcccacacatctcaagcaagcaatgagttcagtgagttctgcagcgggcaccagctgggtgtcctccagtttaattccgacgccgtctacttggagatgggtcagacaccattcgctgagggctcagtccccaagcctgcctcccccttcccacttcccactaaagtctagcctctggaacatctgactccaccaccttcaaattgggattttcaccaccccctctttgcggttcgatattttgctagagtggctcacggaactcaggaaacacttatgtttactagtttattataaaggatattacaaatgatatagatgaagagatgcgtagggcaaagtacagaaaaaagggtgttgcaccttccagtaacctccacatgttcagctgggtggaagctctctaaaccctgtcttttgggagttttacagaggcttcattacataggcatggttgattaaaatcccgtcccctccttagggttgggggtggggttgaatgtcccaaccttctagtcatgtcttggtctttccataaccagtccccatcctgaaactctataggggttgccagctgtcaactcattagcatacaaaatgagtttttactgttactttgtagtttctaaggattttagaagttctatgctaggaagatcaaatatatatttcacaatatcatactcttattcctattcttcaatctgtctttgaaaatattttataaactcctatctctagtttatctcccaatcctgtaccatcccttccaaaatcctgttgtgcccttcaattgcttcatttaattgtctgaccaaagttgccagtgacaaagagcatcatataagctgggaattttatttgaggaaattaaacaaacgcaactatgatatcagcaaaaaatactaactgaaacttttttttgagacggagtcttgctctgtcacccaggctggagtgcagtggcgcaatctcagctcactgcaagctccacctcccaggttcatgccattctcctgcctcagcctcccgagtagctgggactacaggcacgtgccaccacgcctggctaatttttttgtatttttagtagagacggggtttcacctgttagccaggatggtctcaatctcctgacctcctgatctgtctgcctcagcctcccaaagtgctgggattacaggcatgagccaccgagcccagctgaaacattgtttataataaaatgttgaacataaacaatatacctactgtcatgggtagcaactagatagggcttgtatcaaaggcggtaaagaaaacagtctcatatttaccaggacagtcctaaagaaaggcagatttattagagaacgtatgaaaatacattgcaaggttgcaactggcagcacaggagagaaggagctgtctgcaaagaggcaggagctggaaggaagttttatagggtcatcctggagagagctgtt

SEQ ID NO: 1561488 - DNA, 4001 bp, Homo sapiens
ctaacttttaattctttccacccgatcatgatgttgaaaggaaatatgttcccaccctttctgcaaggatgacagataaagctacaaagtgaaatttctcagagaaagcatctctatacacagagtgagtatcagagggtccatgtagtgtggtggacactcgatcaaagagtcaagacggcctacttctggtcctggcttatgacaacccacaactgaaaactaatctcttgacttttctgggcaatctcctcagacagaaagaaggagagagggagggaggagcaggctatgcttgaacagtcatccaaaccccctatggtgaattcttgtccagcagacctcactgccttgaagaataaagccattacctatgaagtggcataactcagtggtaagaactactaggcttaaggatcagaacacctggtctcaaacagccaaaccaccacatgctacctatacaacctctggcaagttaggtaaccactgcaaacctgtttctctatcagtgaaatggtaactattccctatcaattgttgggaggattctgaaatgatctacataaagcattgagcacagtgcttaattttcatctttctgtcatttattttcataaccagcacatggtaggtctcccattcctttttccttttaaattcctcacgtgcccccagagactgagagggatggaaaaactactgtgccagaggacaagcagccagcgtggtcagcttttcaggcttaaggctgaggctcctgtctgtctctcccttttcagctctcgtccctccctttctccatcttttcccctttatctcaatctttctgtctctccaccacaacagcagtctcccaaaccccagagcacaccagcatctccaagcacccacacagcttcctgcccacacaaatcacagacaacaaaccacatagtttctcattctggcacctcccctggcaacctatggacatgcccccacattgtagcccgccctgctctcacaatgggtcatataaggccattctcagtcacactgtcacactcactgtcgggatgacatacagtgctaagtcacaccatctccctcagtctcacataatcacacacactgtcatgcacaatctcaaacactgtcacatacaatcttagtccaacaacaaaaactctgttcacatacagtttcacatacagtgacacagtctcacacactgtcacacaaattctgtcgcagtttcatgtggtcccatatcaacagccacacaccgtacacaaccacacatagcctcacacacggtgacatggtctcacatactgtcacagtctcatctaatcctacacacacggtcaagctctgttcacaaagtcacacacactgtcacacagtcttacattatcccacacacacaggtcacacacacagtgacatggtcttacacactgttcacacgtggtctacacataatgacagtttaacactgtcacacattcccagtctcacacatggtgacgtggtcttaagcacatacagtgtcacacagtcccacacggtcccatatactgtcaaaggctcccgcatacaccggggcaacggtctcatactgtcgcacacattctcacacccagtctcatactgtcacacatagtcccacatttgtcccacatggtctcacactgacacacatattcacacacggcctcacattctcacactgtcacacacggtctcaaattctcacacagtcacacatggtctcacacacgattccacactgtcaaacacattgtcacacacggttccttaatgtctcacacattctcacacactgtcacacacggtcccacacatggtggcatggccgctcccggcgtcagctccatcccgcgctcctcaccgcctcctccctccagtgggcacctccttcggcgcggtccttggaggccggggctgggccagggcccgggccagggctcgatcctggccggcggccgcgctcacaaaggcgccgcagccctagggcaggccgcaggggccgctgggaaatggagtccggggccggcgcggcgcagaggatgctgggatgttggccgagggccccgggcggccgcagatcccgccgctcagttgcgggtagttactgctgcgcccctttccctagtaagcccacctccgctggccttcagaatcccacccggaccagctgagccctctcaggccgttcgactgtccgctcccccacccgttccacccgttccacctgcgcaggcgcagctggttcaggtccccaaaggctgccaggccggggtgccagcgcggtgaggcgcacgcgcagtgaccgcgtccgcgctccagcgctccgggtggggctgtgagtccatcgctgagaaaagggagctggaggaccagtgtggagcctgagccagctggagaggggcccggtaggatgtacgtgtgattaagcgctctggcggcccgggctttctctttccctttctgtttcttctctctccgccttgccctgtctttcattcgccacttattgagcgcctgctgtatcgggcactgtcgtgggccctgggcacacagcagtgaacaagcagacaaaatccccacctcatggagcagcattctaatgcgggaggaattcaataggaaaaaattaataataaaggacactgatgcatattgggaagtaatgcgtattatcaagaaaagcgaagcagagtattaagatcattctttcagttcttcattctttcagttatgccctctgaatcagtggaaaaaacgcaaggtgcatttttttctattatctcaacgacaactaatcataacagaagacttttctgaccaaatataggggagtttcccacacatctcaagcaagcaatgagttcagtgagttctgcagcgggcaccagctgggtgtcctccagtttaattccgacgccgtctacttggagatgggtcagacaccattcgctgagggctcagtccccaagcctgcctcccccttcccacttcccactaaagtctagcctctggaacatctgactccaccaccttcaaattgggattttcaccaccccctctttgcggttcgatattttgctagagtggctcacggaactcaggaaacacttatgtttactagtttattataaaggatattacaaatgatatagatgaagagatgcgtagggcaaagtacagaaaaaagggtgttgcaccttccagtaacctccacatgttcagctgggtggaagctctctaaaccctgtcttttgggagttttacagaggcttcattacataggcatggttgattaaaatcccgtcccctccttagggttgggggtggggttgaatgtcccaaccttctagtcatgtcttggtctttccataaccagtccccatcctgaaactctataggggttgccagctgtcaactcattagcatacaaaatgagtttttactgttactttgtagtttctaaggattttagaagttctatgctaggaagatcaaatatatatttcacaatatcatactcttattcctattcttcaatctgtctttgaaaatattttataaactcctatctctagtttatctcccaatcctgtaccatcccttccaaaatcctgttgtgcccttcaattgcttcatttaattgtctgaccaaagttgccagtgacaaagagcatcatataagctgggaattttatttgaggaaattaaacaaacgcaactatgatatcagcaaaaaatactaactgaaacttttttttgagacggagtcttgctctgtcacccaggctggagtgcagtggcgcaatctcagctcactgcaagctccacctcccaggttcatgccattctcctgcctcagcctcccgagtagctgggactacaggcacgtgccaccacgcctggctaatttttttgtatttttagtagagacggggtttcacctgttagccaggatggtctcaatc

SEQ ID NO: 1561489 - DNA, 4001 bp, Homo sapiens
atcatgatgttgaaaggaaatatgttcccaccctttctgcaaggatgacagataaagctacaaagtgaaatttctcagagaaagcatctctatacacagagtgagtatcagagggtccatgtagtgtggtggacactcgatcaaagagtcaagacggcctacttctggtcctggcttatgacaacccacaactgaaaactaatctcttgacttttctgggcaatctcctcagacagaaagaaggagagagggagggaggagcaggctatgcttgaacagtcatccaaaccccctatggtgaattcttgtccagcagacctcactgccttgaagaataaagccattacctatgaagtggcataactcagtggtaagaactactaggcttaaggatcagaacacctggtctcaaacagccaaaccaccacatgctacctatacaacctctggcaagttaggtaaccactgcaaacctgtttctctatcagtgaaatggtaactattccctatcaattgttgggaggattctgaaatgatctacataaagcattgagcacagtgcttaattttcatctttctgtcatttattttcataaccagcacatggtaggtctcccattcctttttccttttaaattcctcacgtgcccccagagactgagagggatggaaaaactactgtgccagaggacaagcagccagcgtggtcagcttttcaggcttaaggctgaggctcctgtctgtctctcccttttcagctctcgtccctccctttctccatcttttcccctttatctcaatctttctgtctctccaccacaacagcagtctcccaaaccccagagcacaccagcatctccaagcacccacacagcttcctgcccacacaaatcacagacaacaaaccacatagtttctcattctggcacctcccctggcaacctatggacatgcccccacattgtagcccgccctgctctcacaatgggtcatataaggccattctcagtcacactgtcacactcactgtcgggatgacatacagtgctaagtcacaccatctccctcagtctcacataatcacacacactgtcatgcacaatctcaaacactgtcacatacaatcttagtccaacaacaaaaactctgttcacatacagtttcacatacagtgacacagtctcacacactgtcacacaaattctgtcgcagtttcatgtggtcccatatcaacagccacacaccgtacacaaccacacatagcctcacacacggtgacatggtctcacatactgtcacagtctcatctaatcctacacacacggtcaagctctgttcacaaagtcacacacactgtcacacagtcttacattatcccacacacacaggtcacacacacagtgacatggtcttacacactgttcacacgtggtctacacataatgacagtttaacactgtcacacattcccagtctcacacatggtgacgtggtcttaagcacatacagtgtcacacagtcccacacggtcccatatactgtcaaaggctcccgcatacaccggggcaacggtctcatactgtcgcacacattctcacacccagtctcatactgtcacacatagtcccacatttgtcccacatggtctcacactgacacacatattcacacacggcctcacattctcacactgtcacacacggtctcaaattctcacacagtcacacatggtctcacacacgattccacactgtcaaacacattgtcacacacggttccttaatgtctcacacattctcacacactgtcacacacggtcccacacatggtggcatggccgctcccggcgtcagctccatcccgcgctcctcaccgcctcctccctccagtgggcacctccttcggcgcggtccttggaggccggggctgggccagggcccgggccagggctcgatcctggccggcggccgcgctcacaaaggcgccgcagccctagggcaggccgcaggggccgctgggaaatggagtccggggccggcgcggcgcagaggatgctgggatgttggccgagggccccgggcggccgcagatcccgccgctcagttgcgggtagttactgctgcgcccctttccctagtaagcccacctccgctggccttcagaatcccacccggaccagctgagccctctcaggccgttcgactgtccgctcccccacccgttccacccgttccacctgcgcaggcgcagctggttcaggtccccaaaggctgccaggccggggtgccagcgcggtgaggcgcacgcgcagtgaccgcgtccgcgctccagcgctccgggtggggctgtgagtccatcgctgagaaaagggagctggaggaccagtgtggagcctgagccagctggagaggggcccggtaggatgtacgtgtgattaagcgctctggcggcccgggctttctctttccctttctgtttcttctctctccgccttgccctgtctttcattcgccacttattgagcgcctgctgtatcgggcactgtcgtgggccctgggcacacagcagtgaacaagcagacaaaatccccacctcatggagcagcattctaatgcgggaggaattcaataggaaaaaattaataataaaggacactgatgcatattgggaagtaatgcgtattatcaagaaaagcgaagcagagtattaagatcattctttcagttcttcattctttcagttatgccctctgaatcagtggaaaaaacgcaaggtgcatttttttctattatctcaacgacaactaatcataacagaagacttttctgaccaaatataggggagtttcccacacatctcaagcaagcaatgagttcagtgagttctgcagcgggcaccagctgggtgtcctccagtttaattccgacgccgtctacttggagatgggtcagacaccattcgctgagggctcagtccccaagcctgcctcccccttcccacttcccactaaagtctagcctctggaacatctgactccaccaccttcaaattgggattttcaccaccccctctttgcggttcgatattttgctagagtggctcacggaactcaggaaacacttatgtttactagtttattataaaggatattacaaatgatatagatgaagagatgcgtagggcaaagtacagaaaaaagggtgttgcaccttccagtaacctccacatgttcagctgggtggaagctctctaaaccctgtcttttgggagttttacagaggcttcattacataggcatggttgattaaaatcccgtcccctccttagggttgggggtggggttgaatgtcccaaccttctagtcatgtcttggtctttccataaccagtccccatcctgaaactctataggggttgccagctgtcaactcattagcatacaaaatgagtttttactgttactttgtagtttctaaggattttagaagttctatgctaggaagatcaaatatatatttcacaatatcatactcttattcctattcttcaatctgtctttgaaaatattttataaactcctatctctagtttatctcccaatcctgtaccatcccttccaaaatcctgttgtgcccttcaattgcttcatttaattgtctgaccaaagttgccagtgacaaagagcatcatataagctgggaattttatttgaggaaattaaacaaacgcaactatgatatcagcaaaaaatactaactgaaacttttttttgagacggagtcttgctctgtcacccaggctggagtgcagtggcgcaatctcagctcactgcaagctccacctcccaggttcatgccattctcctgcctcagcctcccgagtagctgggactacaggcacgtgccaccacgcctggctaatttttttgtatttttagtagagacggggtttcacctgttagccaggatggtctcaatctcctgacctcctgatctgtctgcc

SEQ ID NO: 1561490 - DNA, 4001 bp, Homo sapiens
atacatatatacatatatatacacatatatacatatatacacatatatacacatatatatacacatatatacacatatatacacatatatatacatatatatacatatatatacatatatatacatatatatatacacatatatatatatatatatatatatatatatatatatatatttcccaaaccgttctgattaaaattcatggctcaagcctggcccagggaggtccctgtaaaatttcttttgtagggaggcaaaacccagagcacagagaagccatgtcttcaagagagtcacatggccaggaaaaggcagagcttggtgggatttggtgggcaaactatgaaacatctgacccccaaaacctgctccactagctcctggggcaagaggtgttgaggctgccaacagcattgctcagagaaaggcagggaaagagcacaccgccgagtcccaccaccgagtcccaccacccacaatacctacaacagggaatctgggaaggaaagagcccccatggtctggcttcgttatggacagaacttcgcatggggaaaatgagggggtagtcagtgtgctgggggacagtgtaagagacttacccagtgagctaacgagtgcaaagttctccagcatcacatcccggtataggcccttctgggtcacattaaggagcccccactcctccctggagaaatataccgtcacatcctcaaacatcaccaagccctgcaatgatgggtccaactgagccttggggtcaatgatgggcagaaaaaaacaaccaaaatatggacagatggacacattcaggcccttgacctgtatctcagggtcctatcacatctccccctgacattatctttccctatgagctctaaactcttccccaccttactccctacacatacccttataccttccttctcctatcccagaggaatatcagagctgctggtgttattgatgcttctggtgttactactggaaactgtgtccagcccaaagcgacatcaggttggtgaccagactgatgccatctatgtgcagggccaagggcacaggctccactctatctcctgcctgccaattccagtcccagagatcatacctctcagacgcaaccaaacctatgctcatccttctcccttaggtctcaagtacctggtcccagggtccagtttgcctcctgctcaacaggcacaaaactggacaacagaatgcctaaaactgtacacccccagcacaacgtccccagtttaccctataggcaattgcctggccttccacacgccgttctgcacatgcgtctccagagggcctggcacagcaactacgaccccatcctgtcccagtcctgcggcacatctccaatggctcccactgccaagggcatgccccagccgtgcatcaaagacctccccctggaatcatacgcagatctcctgccctcctccaactctgccctggcacacgccgccccccacctggtgggccccctcattcctcggaggcatcctctgctcacctccgcctccccggccattggaccgtgcgggcagaacccgtggactggacccacggcctcagccgaaacgcgtcccgggcgcggaaaccctcggccgccgtggaaccttcccgggaagctctccccgcgcgggtgaaatgcgtccgaagacagggaaccgcttcccggagccgctgggaaggaggacggtacggaggcccgggagacccacggcgcctgtccgcgagcgataagtctgaggaagatggagccactcgccggtggggcacggcgcgtggaaggcgcggcaaaggtccctgcccttcacctcgcgcaggggatcgcgaggaagtcaccccggcccacgcagagctgcctgaggcgccgggacagccttcccgccgaggactgcggactgccgggcaacgccggaactcccggaactcccgtggcccgcgcctcccctcgctcggcgcccctcacgccacgacctccattcccggctctcctcgcggcgcggctgggtcgttgccaaggcgataagggagggcgccgctagctcctgaagcgggacgtgaactacatttcccataaggagcctcgacgtggggccgttcagacttggccaatggcggcccaggaacgggaacgttcgggcgggccctgcgtggggcggggcttccggcgtcggctttcggcgctggctttggggcggtttgcggcagtgggatcattgggcggtgggcggtgtggaggagtctccgctggtccgcagaaacgaacgaaggcgcgagaatcgggaagttctgcctcagtgacctgtacgcgtcctagccgcagtgaatgttgctgaaccccggtgacctcacagtggaggggcggccccatggggccatcggaccgcgccgcgcgggggcgttcgccagggcctccgcagaagcccgcctgtgcccgcaaccgccccgaaattctctccctggcaccgtgtccgctttacggagcccggagcaaggctcagaaaaatgtcccagccaaaaacatggtacatgcctgtcatcaggcaagtcttcaaagagcggctgggaccaggggccgagggacctcgtttagaggcggcttagggggaaggtcagcagttgtgtttcagttgtgttgggttttcggcgccccacaatgcgggcgacgtatgggccacaggtgtggatgccagggacaggtcgccctgcacatggctgaggcacggtaggcttgtagtctaccccatatcaggccatggtgatctcaggtatgggggcctgggagaggagagtgagtacatggctgagtacgtcagagcacggggtcagggacacatcaggggaggacgctggcaggagaataaccgggctcctgggtgtcctccgctgaattcagacgcgttcatgttagagcaggtgggcctgcgtcctcccggacgaacggagttcttaggcaaggtccagaggagcttctacctgaagtggtgctggagaactttgcactcagtgctgggtgagaccactggcaccataactctccccagcctcaactctggtttttttcctctgttctttccatgttccccttggaagtcgctgttggtcgtggcactgaggcccagatcatgccacctcctctaacaagtggctgagtggacaccccacacattctacccaagggccgtgagtggccaagatcggggctcagaagtctctgaatcttcacagctggtcacgttcagctcggtcacttcctgtaagattccaggcactgcatgcactgacatgggtgcgtgtgggcccactgggtcctgcctgggagccttccctgaatgttcattttttgcaggtctgtgtttgtcttggagtaaggattattctcgcttgctggggtcatggtgttttggcctctcctggcctggactctcaaaaactcatcatccttcataggtctgaaggcttctacattcccaccagcaggtggaccatatgaactcaaaactagttgtggcagagggaccctgaagagatctacccctggtgaatgcccccaggagtgggctgttctcacacctggtgcccagcctgtgccctcgcaggtcttggtgcctccactcagctcaattccagttttctggccatgccccgctgtgtccctttctctctccttagtgcctagctgtgcaatgtttgcctctccttaacatgtcctcagctgaccccatatcctcagtccttgcaaccctgttcctcagtgacacctgtgtattctctccagtggagacacaggtgggacacccccaagctcatggtacatgcctgtcatcagtacccctggactgtcatggtgggtcagtctgccctaggctggactgaccaacctgttcattcccccacaggattgccctttacagttcatgagttcccccaactggagtgcagacaagagcactgattgatggaccaggtagact

SEQ ID NO: 1561491 - DNA, 4001 bp, Homo sapiens
gggattacaggcgtgagccactgcgcccagccatttcttcacttttaatttcagaaatgaggatgaaaatgcttatctcaaagttacaaaaattaaatgagataatacttgtaaagtactcaacacctcccaggcacacaaaaatcatacaatacatatcagcgattaccatgcattatcagatattaaaacaatataaaaacaatgtaataaaaacaagtaaaacaataaatataccagacaatattgatctatatatgtgataaaagtggtattcaaatgagtgtgcataagacattcattgcataaatggcagtgatataatgcagtgatataactggctggccacctggaaaaaaacaaactagatctccatcacacactattcagtaggcaaatgccagcaggactgatcacttaattatgtgtatttgttaaatcacaaagactattaaaataaattttagaagtatacatgtgtataacactgtggtgggctgggagggatcttattacacgtgagaggaaacacagactctgtaacagaaaaatcagatacttttgattagatgatatttcctaactttatgttaaaatataccacaaaaaaaagtaggacaaaagatatgaaaattcacagaaaaggaaacaaatggcaattaaccaaataagatgccaactttagtaactggaaaatgcattggagcaattagatataattttccctcaaaattttaaaaacttttaaaatgcaacaatatccactgctggaaaagcatctgggaaaatgagttattttataaattgttggtataagcttgaattgttatattttgagctacttagtcatatctataaagtattaaaaatgcacatatgccgggcgcagtggctcacgcctgtaatcccagcactctgggaggcggaggcaggtagatcacctgaggtcaggagtttgagaccagcctggccaacatggtgaatccccgtctctactaaaaaatacaaaaaattagctgggcgtggtggcgggtgcctctaatcccagctactctggaggctgaggcaggagaatccgttgaacccactaggcagaggttgcagtgagctgagatcgcgccactgcactccaacttgggtgacagagcgagactccatctcaaaaaaaaaaaaagtgcacatagttattcctaataatttcacatatataaagcagaaaaagaaggacaaatggacaaataacctttccagagttgagtactttaccttcctctgtaattaagcagacaaaataatctgtgaggagacagatatattttttgaatatatgcttaattaatatctataacaatacaattagagaacatagtacactgtttctatgtaatagatgtgacattcatgaaaactgaccacgaactaggtcataaagcaatttttcaatttgaccattaaacagacattactttaaaaaggaacttctaaataactcatggatcaaagaaaaaaccacttagatttgaacaatttttaatacaaagattcaccaaaacttgagaatttttatattaaagaagactgaaaattaaaaagctgaactttcaactcaggttagaaagcaagctgattacagtcctcaccgatcaccataactgaccctacaggctctgtcactgaccacagactcccatcactgacccccaaacctcaatcactcatcccaaagagctccatcaatgacctgagaaatccgtcacaatcaacaacggacgccacagaaccccatcaccgaagcctgaaaccgcaatcactaactccacaggcaacctcgacaccccctattactggctccacagaaaccccaatcgtgatcaaccaaaatcacctcaaagatttatcggtattggaatatgaaaatactcctgacaccagcggcaaaaaagccttggaagaccacttccacttccggtccgacttctagcacctcccctttgtaggctgttgatatggcgcatgctctgaataaacttggaagccagtttcctcgaacagtcaacagggcgcagacacagcgcacaggttccgtaatgtggcgctgtccggcagagaacatggccgcgcccttatggtgtttattcgcgtgggccgccattttgaaagcatatccattccgtagagcagaggaattggccgctggcagggtttcctagagcgaggcaggtatagttacataggatgctggagtgtgacccttgtctgactaggcttctatttcggaggagaaagttactggaaatgtgggtctggtgctgtatgttatatttagaaaagctaagttacctttctgaatacaggacactgaggataataattaccagggaatagaggagccagggaaaaatcaccaagtgaaggggatcctgggagaaaccacaggcagatgataggaggaatcaggatagtacagtccattttttacagacgccattcagggaaaaggtggaaaggtcactaggggagtcatctcttgagtgaaaccaccctgaaagtctgagagacatctgaatgagtagtaggctgcaggaagagtggtacaacttttaatgggagaaaccgccttgggaaatagggtagaagtccaatagtattaatacaatcctctcctgggagataccaccagaggagggaggagaagtccgggcgtccccttctgaagggctgggtcgggtgggaaggtgaatagagatttgaatcacccattaccctccacactaaatacctcaagtgcaactatagtaggcagcaataataacaacactaatagtctttagtatggccaacgtgttactaaaagcacctaaagaagactgtttttatttaccttgaagttaaaatataattaataacaatcgccttaccatgtcaatgaagctttaagtgcagtctctgacccttagcttctcctctgtggaaattctgaaacctccttactcccctttttggagggtgtggatgaggagttgtaaagatacaattcctttcacttggtgaactcctaaacatgattcacagctcagcttctgacaggaagttctacctgaacagtggtgggaaattactacccaatgtgttcagttccagcaggtgggaaacttgttttcagggaattgaacctacactctgatgtgggcatgctggatgccttcaggccagttatgtctgtctctgggactcggcttaaaaatatgtttagagaattagactctgctgatctcaggttttctttcttctccgaaaggacggtctaaggaaacatctgtggaagtccgttagtaaacacacaatttctaccaaggggctaagaattactgttgattttgtcagtaatgcagctctgttaaaaagaagatgacttaacttttagggattcgtgtggaaatatttatgggtggaataatattagctttaaaaactccactgagaaaaaaaaaactccactgagaaggggtatatggtattgcaaaagaaaatgttgataaatgttaaagcagagtgataagtagacagaactcattataatgttctcttccatagtatttgtgtgaaattttcatagtaaatttctaatttaaaaagaaaggaattaaaaacatttacaaggaaacatcaagaagacagcaggtgtggtcatagtgttagggaagatgaaacctaggagacccagagtgacaccattttaagttcagctccatcttgacactagcaaggcacattcattgcaagtcacaactcatggtcctaatgtgtttacagcgaaggaagcagccctgtaatgcctgcaaagacaaactcctagaacaacagaaagtccagatgtccaatacccataacaataaatgctttcaagatcattatagttatactttgatgtacttactaaaatgtcagggatagttttctttaaatcaatagaataataaattttgtcataatgtcaggcc

SEQ ID NO: 1561492 - DNA, 4001 bp, Homo sapiens
tgcagatttgaactgcagctctgacacttttcacctatgagaacagaagtttcttcactttcttttgagacggagtctcgctctgtcgccaggctggagtgcagtggtgcgatctcggctcactgcaagctctgcctcccaggttcaagcaattctcctgcctcagcctcccaagtagctgggattacaggcatgcgccaccatgtccagctaatttttggtaaagacgaggtttcaccatgttggccaggatggtctggatctcctgacctcctgatccgctcgcctctgcctcccaaagtgctgggattacaggcgtgagccactgcgcccagccatttcttcacttttaatttcagaaatgaggatgaaaatgcttatctcaaagttacaaaaattaaatgagataatacttgtaaagtactcaacacctcccaggcacacaaaaatcatacaatacatatcagcgattaccatgcattatcagatattaaaacaatataaaaacaatgtaataaaaacaagtaaaacaataaatataccagacaatattgatctatatatgtgataaaagtggtattcaaatgagtgtgcataagacattcattgcataaatggcagtgatataatgcagtgatataactggctggccacctggaaaaaaacaaactagatctccatcacacactattcagtaggcaaatgccagcaggactgatcacttaattatgtgtatttgttaaatcacaaagactattaaaataaattttagaagtatacatgtgtataacactgtggtgggctgggagggatcttattacacgtgagaggaaacacagactctgtaacagaaaaatcagatacttttgattagatgatatttcctaactttatgttaaaatataccacaaaaaaaagtaggacaaaagatatgaaaattcacagaaaaggaaacaaatggcaattaaccaaataagatgccaactttagtaactggaaaatgcattggagcaattagatataattttccctcaaaattttaaaaacttttaaaatgcaacaatatccactgctggaaaagcatctgggaaaatgagttattttataaattgttggtataagcttgaattgttatattttgagctacttagtcatatctataaagtattaaaaatgcacatatgccgggcgcagtggctcacgcctgtaatcccagcactctgggaggcggaggcaggtagatcacctgaggtcaggagtttgagaccagcctggccaacatggtgaatccccgtctctactaaaaaatacaaaaaattagctgggcgtggtggcgggtgcctctaatcccagctactctggaggctgaggcaggagaatccgttgaacccactaggcagaggttgcagtgagctgagatcgcgccactgcactccaacttgggtgacagagcgagactccatctcaaaaaaaaaaaaagtgcacatagttattcctaataatttcacatatataaagcagaaaaagaaggacaaatggacaaataacctttccagagttgagtactttaccttcctctgtaattaagcagacaaaataatctgtgaggagacagatatattttttgaatatatgcttaattaatatctataacaatacaattagagaacatagtacactgtttctatgtaatagatgtgacattcatgaaaactgaccacgaactaggtcataaagcaatttttcaatttgaccattaaacagacattactttaaaaaggaacttctaaataactcatggatcaaagaaaaaaccacttagatttgaacaatttttaatacaaagattcaccaaaacttgagaatttttatattaaagaagactgaaaattaaaaagctgaactttcaactcaggttagaaagcaagctgattacagtcctcaccgatcaccataactgaccctacaggctctgtcactgaccacagactcccatcactgacccccaaacctcaatcactcatcccaaagagctccatcaatgacctgagaaatccgtcacaatcaacaacggacgccacagaaccccatcaccgaagcctgaaaccgcaatcactaactccacaggcaacctcgacaccccctattactggctccacagaaaccccaatcgtgatcaaccaaaatcacctcaaagatttatcggtattggaatatgaaaatactcctgacaccagcggcaaaaaagccttggaagaccacttccacttccggtccgacttctagcacctcccctttgtaggctgttgatatggcgcatgctctgaataaacttggaagccagtttcctcgaacagtcaacagggcgcagacacagcgcacaggttccgtaatgtggcgctgtccggcagagaacatggccgcgcccttatggtgtttattcgcgtgggccgccattttgaaagcatatccattccgtagagcagaggaattggccgctggcagggtttcctagagcgaggcaggtatagttacataggatgctggagtgtgacccttgtctgactaggcttctatttcggaggagaaagttactggaaatgtgggtctggtgctgtatgttatatttagaaaagctaagttacctttctgaatacaggacactgaggataataattaccagggaatagaggagccagggaaaaatcaccaagtgaaggggatcctgggagaaaccacaggcagatgataggaggaatcaggatagtacagtccattttttacagacgccattcagggaaaaggtggaaaggtcactaggggagtcatctcttgagtgaaaccaccctgaaagtctgagagacatctgaatgagtagtaggctgcaggaagagtggtacaacttttaatgggagaaaccgccttgggaaatagggtagaagtccaatagtattaatacaatcctctcctgggagataccaccagaggagggaggagaagtccgggcgtccccttctgaagggctgggtcgggtgggaaggtgaatagagatttgaatcacccattaccctccacactaaatacctcaagtgcaactatagtaggcagcaataataacaacactaatagtctttagtatggccaacgtgttactaaaagcacctaaagaagactgtttttatttaccttgaagttaaaatataattaataacaatcgccttaccatgtcaatgaagctttaagtgcagtctctgacccttagcttctcctctgtggaaattctgaaacctccttactcccctttttggagggtgtggatgaggagttgtaaagatacaattcctttcacttggtgaactcctaaacatgattcacagctcagcttctgacaggaagttctacctgaacagtggtgggaaattactacccaatgtgttcagttccagcaggtgggaaacttgttttcagggaattgaacctacactctgatgtgggcatgctggatgccttcaggccagttatgtctgtctctgggactcggcttaaaaatatgtttagagaattagactctgctgatctcaggttttctttcttctccgaaaggacggtctaaggaaacatctgtggaagtccgttagtaaacacacaatttctaccaaggggctaagaattactgttgattttgtcagtaatgcagctctgttaaaaagaagatgacttaacttttagggattcgtgtggaaatatttatgggtggaataatattagctttaaaaactccactgagaaaaaaaaaactccactgagaaggggtatatggtattgcaaaagaaaatgttgataaatgttaaagcagagtgataagtagacagaactcattataatgttctcttccatagtatttgtgtgaaattttcatagtaaatttctaatttaaaaagaaaggaattaaaaacatttacaaggaaacatcaagaagacagcaggtgtggtcatagtgt

SEQ ID NO: 1561493 - DNA, 4001 bp, Homo sapiens
tgcttgtaatgttaactctaagcaatcactaagcaaaaaaggccaaaaaaaaaaataaaagaaactggaaaaggtatgaaaattcagagaaaaggaagcaaatggcaattaacaaaaagataccaacttaactaaaagaaaaacgcgtcagaacaattagagagaaattttccttagaatcataaaagctttaaaaaagtaacagaccaagcacaatggatcacttgaggccaggagttcgagaccagcctggccaacatggcgaaacgctgtctctactaaaaatacaaaaattagccaggcgtggtggcgggcacttgaaatcccagctactcaagaggctaagacaggagaatagcttgaaccagggaagcagaggttgcaatgagcggagatcacggcattgcactccagcctgggcgacagagcaagactctgtctcaaaaaaaaaagtgacaacatccactgttggaaagcatttaggcaaattgcttttataaattattggttgaagcttgaattgctataatgtcttttgagctatttagtcatatctatttttttatttttttgagatggagtttcactcttgtcgccccggctggagtgcaatggcatgatcttggctcactgcgacctccgcctcccaggttcaagtgattcttctgcctcagcctcccgagtagttgggattacaggcacccaccaccacacccagctaatttttgtatttttggttagaggtgtttttccatgttggccaggctggtctcgaactcctgacctcaggtgatctgcccaccttggccacccaaagtgctgggattacaggcgtgagccaccaggcccggtcagtcatatctagcaatacactcaactgatcccaataatatagttttaaatatataaagcagaaacagaagaaaggacaggtggacaaataacttttccaatgtgagtagtttaccttcctcaacaaaataatctgtgaggagatacataatatatataacatatgattaatatccataacaatacaaattagagaacatattacactcttttcatgtaatagatgtgacatttatgaaaaatgaggaagaactaggccataaagcaattgttcaactgaagcatcacctacagacactaattgaaacataaagtgcacttcttttttttttttttttttttggtgctctgtggcccaggctggagtgcagtggcaagatctgggctcaccgcaagctccgcctcccgggttcacgccattctcctgcctcagcctccagagtagctgggactacaggcgcccgccaccacgcccggctaattttttgtatttttagtagagacggggtttcaccgtgttagcaaggatggtctcgatctcctgacctcatgatccgcccgcctgggtctcccaaagtgctgggattacaggtttgagccaccgcgcccggccataaagtgcacttctaaacagctcatgggtcaaagaaaaacaattactgaaaaaaatttttaaacacttagatttgaacaatacgaaactgctacacatcaaaacttgttaatctttatattacaggctgaaatggaaagaactgaactttcaactcaggtcagaaagcaagctgatcacagtcctcaccgaccaccatagctgaccctacaggccctcagtcactgaccacagactcccgtcactgacccccaaaccccaatcactcatcccaaagagccccatcaatgacccgagaaatccctgtcacagacaaccatcaacggacgtcacagacccccatcaccatgccccgaaaccaccatcactaattccacagacaactcctctattactgacttcacagaatccctaattgcaaccaaccaaaatcgtcacagagacctctcggcattaaaacgtgaaaatagtcctgacgccagcggcgaaatagccttcggggaccacttccacttccggtccgacttctagcacctccccttatggactgttgatattgcgcatgctctaaattaacttggaagccaatttcagcccacagtcaacagggagcacacacatatttagagacatcgtgcagtttccgtaatcggcgctcacgggcagagaatataaccgcgcccttatggtgtttatttgtgtgggtcgccatctttgatgcgtatcgattccgtacagtggaggagtccgcctcctggagtgttgactagagtaaggcaaggattttcacatagaatgcaagactgtaaccagtgtgaccacgcttgtacccaagaagaagttcctgaagataggatctggagctttatgtttttttttgtttgtttgtttgttttgagacagagtcttgttctgtcgcccaggctggagtgcagtggcgccatctcggctcactgcaacctctgcctcccaggttcaagcgattctcctgcctctgcctcccgagtagctgggattacaggcaagcgccaccacacccagctaatttttttgtatttttagtagagacgcagtttcacgtctctactggtcacgctggtctcgaactcctgacctcaaatgatccacccaccacggcctcccaaaatgctggggttataggcgtgagccaccgcctccggctgttatatttacaatacctaagttaccccttggttacggcacactgcagaaaacaacgatttactaggagaaaccatgggggaactaggaagccagggatcctgagagaaataagggagataagaggaggcatcaggatggtacaatctattttttggagacaccactcaggagaagggtggactgggatctgagttcactcctgggtgaaaccactaggcaagacggagttatgtcacagtaggtagtatcctgcaggaagggaggtacaatttttagtagttgaaaacacattaggaaatagggtagaagttgggttagtacaatcctcttctaggagataccatggaagaggggttagaagtctaagcatcccctttgaaacggctggtagaaggctttgggaggtatagatattttaatccccttaatctccatcagcatccaccctagctaactcaagcacaactatagtaagcagcaacaataaaaataataatagtcttggctggtcgtggtggttcatgcctgtaatcccagcactttgggaggccgaggcgggcacatcaccttaggtggggagttcgagaccagcctgaccaacatggtgaaaccccgtctctactaaaaatacaaaattagctgggcatggtggtgtgtgcctataatcccagctacttggggggctgaggcaggagaatcgcttgaacccagaaggcggaggttgcagtgagccgagatcatgccattgcactctagcctgggcaacaagagcaaaactccatctcaaaacaacaacaacaacaacaacagcacaataataataataacagtctttaatatggccaacgtgtgactaaaaacacctgaagaaaatcttgctttttttttttttttttttttgagacagagtctcactctgtcacccaggctggagtgtaatggcacaatcatggctcactgcaaccttgactgcccaggctcaaaagcaatcccagctgggcgcagtggctcatgcctgtaatcccaacgcattgggaggccgaggcaggtggatcatgaggtcaagagatcgagaccatcctagccaacatggtgaaaccctgcctctactaaaaatacaaaaattagctgggtgtggtggcgtgcgcctgtagtaccagctacttgggaggctgaggcagtagaatcacttgaacccaggaggtggaggttgcagggagctgagatggagccactgcactccagcctggtgacagagtgagactccaaagaactgggattacaggcgtgagcctccgagcccggccagggagttttgtttttttttttttttgattgcaaagagatgttg

SEQ ID NO: 1561494 - DNA, 4001 bp, Homo sapiens
gtaacatcacctcacccctctagtttcacttctaagtaagtatttgcacaccccagtatcagttcctgggtgaaccctccacatgtgttacattagttgacagacatagcaacaactccccataacctatgtcactgatgtaggtttggggtttgaggtttttccaagatccccagattgaaggaccggagaaatggcacttaagtgtcctaggaggtgcggtagttcctgcttggcatcccagcactttgggaagccgaagcaagaggactgcttgagcccaagggttcgagactagcctgggcaacatggcgaaaccccatctctctctctctcttttttttttttttttcagacggagtctttctctgtcgcccaggctggagtgcagtggcgcgatctcggctcactgcaacctctgcctcccgggttcaagcgattctcctgcctcagcctcccaagtagttgggactacaggtgtgtgccaccaggcctggctaattttttgtatttttagtagaggggggatttcaccgtgttagccaggatggtctcaaactcctgacctcgtgatccgcccgcctcggcctcccaaagtgctaggattacaggcgtgagccaccgcgcccggccgtgaaaccccacctctactaaaaatacaaaaagccagttactcgggagactgagatgagaggctctcctgagcccggagaggtcgaggccgtgctgcgccgtgatcgcgtcaccgcaacccagcctgggtgttgagtgagaacccgtcgccgaaaaaaaaaaaagatgccaagatctagacatgtgggataggatgaggaccagtgaaggactagagcatcccctacttcctactgtggattctgtaagtgcttctgtagccatgaggtgtgccaaaaggcagggctttcacaaatgtgtctgtgctcggatttgatagactcaggcttctctgtaagctttttttggccctgcagccagatgacttcagactgagtctctaatcttgtggcccagtgctcaatgtcacctctcaatgattcaacctctcaatgtcctcatcactgccttcaactctgttcttccttcgaacatcttttgggaatcgcaactctaacacagatttcctcctttgttcaaaactgtccatggcttttagcgtcctcacagtcaaagttcaaccctcagcctggtactgaagaaacaactccgcctcggccaggcgcggtggctcacgcctgtattcccagcactttgggaggccgaggtgggcggatcacctaaggtcaggagttcgaggccagcctagccaacatggtgaaaccccgtggtggcgcatgcctgtaatcccagctactcgggaggctgaggcaggagaatcgcttgaaccggggaggtggagcttgcagtgagccgagatcgcgccactgcactccagcctgggcgacagagtgagactccgtctcaaaaaaaaaaaaaaaaagaaataactccgtatcacacttctttcccagtagacacacgatgtccccgtgttccgcatcctcctgcctcagtcgcgcctgcaggcctttgccctccgccagtctcgctctgccgaccgcatcaactgggtgtcggaaacagggatcccacccgccggcgcctctccgtccctgacagaggcctgggctgcagggacgcgaggaggcggccctcacgatcaggggcctcagggtctgggtgggtagggtgggtaaggcccggaggtcgcagcgctcacctgagcaggcgccctcagagcggctgctgccgccatgactctgggcggggggggaacgcgggctcggcggtgttcctgtcgttgtcctgtcccgggtcgcgaccagcggcgtcgccgaacctcagatccgcctgtgtgcaatggccacaaccactcctcccgagctcgtccagacccagcatcgccggatggacctgacaggccaaaatggctgccacggctaggacgccggaagtcctggcttgactttacgtgccccggcaatggcacggcttctctgaagcttcattggctcagccacgttaccatttcgcagggcggattctgggtaatgtagttcccagacatgggcagcgcttaaggtggctttcttccgactttccgaagaaaggggcaagctccactgcgaggggcgctaggaaatggcgactccaggtccagatgcggaggagggtctcccatcttagaagaggccatacgcacatttctgggggtactgtgtgcaactgattgcccgcgtgtttggagacttcttatttcagaatttgtgatgctcggcttcttccttttttttttttttttgtcttttttttaagacatagttctctctgtcactcaggctggggtgcagtggtgtgatcttggctcactgcagcctatgcctcccgggttcaagcgattctcgtgcctcaaccatccgagtagctgggattacaggcgtgtgccaccataccctgctaatttttgtatttttagtagagacggggtttcctcattttggccaggctggtctcgaacttctggcctcaagtgatctgcctgcaatggtctaccgaagtgctaggattacaggcgtgaaccaccgttctcagcccattagcaacacttttatttatatctttaacctacagattcctctagaaatctgatatcaacatcaaaaagctaatgagacaaatgctattatgttacaggacaatggctgcggtgttcaaacatggagtatgtatgcatgagagaagagagagaccctctcacattgttttatattcagtaaaaacaacaaggaagtaaaaccaaagacaggcaaccccgcgccaggcccgaaaccaggcctaggcccgcctggcctaaacccagtagttaaaaatcaacttatgatttagaagccgatgttattcatagattccttagattgtatagaagaacattgtgaaactccctgccctgttctgttcctccctgaccaccggtgcatgcagcccctgtcacataccccttgcttgctcaaatcaatcacgaccctttcatgtgaaatctttagtgttgtgagcccttaaaagggacagaaattgtgcactccgggagctcagattttgagacagtagctggccaatgctcccagctgaataaagcccttccttctgcaactcggtgtctgagaggttttgtctgcggctcgtcctgctacatgcacagggtgcttttacactgagatatttcaagtgccttaaatccatgcgttcacctctttgctggcaagtgcttatcattgtcagtggcattggaatcagagtgactccatcttgaaaatgggctggataaagtaaggctgagaaatactcggctgcattcccaggttaggcattcttagtcacaggatgagataggaggttggcacaagatgcaggtcacaaagaccctgctgataaaacaggatgcagtaaagaagctggctaaaacgcaccaaaaccaagatggtgatgaaagtgacctgtggtcatcctcactgctcattatacgctaattataatgcattagcatactaactcccgccagcgccatgacagtataccaatgccctggcaatgtttggaagttaccctatatagtctaaaaaggggagggaacctcagttctgggaaatctccacctctttttttttttttttttttgagatggagtctcgctctgtcacccaggctggagtgcattgctgcgatctcggctcactgcaacctccgcctcttggccaagttcaagtgattttcctgtctcagccccccgagcagctgggattataggcgcctgccaccgcgcccaacctgtaaaattttctatacttaaaaaaaaagttggctgggcgcggtggctcacacctgtaatcccagcactttgggaggccgaggcgggcggatcacgaggtcaggagatcgagaccatcctg

SEQ ID NO: 1561495 - DNA, 4001 bp, Homo sapiens
tctctatgatgttcttcctttgattggcctttgggaaacttcttaaaagcctggatttggatcatgtccctcctttcttcaaaactctccatggcttctagaatcctcatgatgaatgcacagcccctggcctgcttgctctaccaggaagagctccatctcacacgttgttcctgacagatgcctgtgaaccccaggttccatccttccagctctgtccatctgcaggccattgcctgcacccctacctgtgcctgtcactctccccactgcatcccactggtgtcagaaacaggtgaaaccgactttgcaaaattataactgacgaaattatgacagtgaaagaaatcagacctaaccgactccatcttgcttccaacctttcagccgtcttttttcattcctgggcataggctgaattaactttggaaaagaattcagttcatggtttcactctgaaacaaaattgataatagccctttcctgaaaagacccctttcttgcctggggaccagcctgtctttgcaggactaacaaattagctacaagaatagaaattacggtttaggggtcatgcagcttctggctccaagagtctgaacctccccaagttgctcctgaagataaccttactattgtaaaacctaatgtgagtttctggggtgctagttgagttggtctcccctgtgtgagacacccatgggaagccatgggcggcctctgaggagaaaagtctccttattgccttcatgtctttatgccccgagagcataactcttcagcagcattccatgggttgctcagggagatcacactcccttgaagcagtggagcataatcaaacatcttggctcctcctgaaacccgcagccacccgtttcagttaagttaaagatcttaagtagtttagacacacgcctttgttcaaggaaattcacagaaacggccagtgctttacatcttatggaatgactcacgagttctcctttactgattaatccttttcctgatcgcttcctccccctccaatcagccataagaacaaagagcttgtaaaccaataaactgggtggagcccaagagctctgggccgccaggaagcctccaatgctctggccacctggacccgccttttaaatgcgtattctgtctctttctaactcctttgtctccgcaggactcggggtatctgctgggtggtgtggggctggtttccccaatatctaagatcagtgcttggggcattttgcagatcctgcactggatggatcagcggacaacacacagaccggtaatctgggtcaatcagttctgccatcccacccagaacagaaaacagcatgaaaaactcactttaaccccctatgaatccatctccaaccagactgatcagcactccccacttcccaagcccctacccgccaaattttgaaaactctgatcccagaatgctcagggagactgatttgaataataaaactcctgtctcccgaacagcaggacggctctgcgtgaattactatttctccatcgcaattccccagtcttcataaatcggctctgtctaggcagctggcaacgtgaacccactggacggttacaaggagaggcctcctgtgagcgcctcagtgttcctacgccgggtaccggctacagacccacgagcaggagccgctccctcgctggtttaggacctgggtgacgatggggtgacctgagggcacagaaggcaccacaattacctgagttgggcgcctcggcacagccgctgccatcggactacttggggaagcacggcccgggagcagtggtcgccgtcacggggctgcagagccgcctctgggcaccgaggacgattcctctccaccttctaggttcagtcaccgcggtcccacccagcactcaggggccacaaactggggaaacacccgcatcgccgatacacagccgctactagagaccccggaagtctcggccttacgttacgtgcacacgtggaaatgccttctttccgagtgctcactggctctgaccggctgtcgtttaaagcagagctttctgggtaatgtagttccccactttccatgacacaacatggttaccaggttctgaaatgttcatggctcagatgcacctccaagcctttgtacctattggttcctctacctgtattactctagctggggtgaagcctgtaatacacagcatttacctgagctaggtccctcagtgtggctgctgccatcaactgtgggtggagcaggcatcaccccagccagtgcctatgagcctcagacctgccacttgggagcagagatgactactcctcttgtgccttctcagtcccaacccagtactccctggcctgacaagcatgcccagaaatccctcatcctgggccttgcaactagcgccttctgggtaaagtacttcccagagctctcagccaacaatggtggtatcctccaagagcaaaccgaatgcagaccatgttacattctgagggctgctggaaagccctgctcacacctcaaaggaggaagattattgattctttgtaaaagcatcaaataggtatcacatcagactctaggaagctcatcctgcacccagagaataaaaatactatttgagatgctcccaaactttacttatctaagtggccatatcattggcatcattcagacttacaatgtgtgcactcagagctgagaacattaagtattgattgctctttaaattcacgtagactgaatcattacagtcagttttgcgagtttcattgttttgttgggaacaaaagaaaattctccataagacatgatgacaggatgggtacaaaaaacagtgagcaaaaatgaataagacctaatatttgctaccataacagggtggctatagtcaaaataatttaattatatatttaaaaataactaaaagagtataactggactgtttataatacagaggataaatgttgaggtgactgagaccccatttaccctatgtgattatcacatatggcatggctacatcaaaatatctaatgtaatctacaaatatatacactactatatacccacaaaaaataaaaataaaggccagacatggtggctcacacctgtaatcccagcactttgggaggccaaggcaggtggatcacctgaggtcgggagttcgagaccagcctggccaacatggagaaaccgtgtctctactgaaagtacaaaattttccaggcatggtgctgcatgcctccaattccagctactcgggaggctgaggtaggagaattacttgaaccctggaggtggaggttgcgatgagtcgagatcatgccattgcactccagcctgggcaacaggagtgagactctgtctcaaaaaaaataaaaaataaaaaataaataaattgctgggtgcagtggctcatgcctataatcccaacactttgggaggctgagtcaggtggatcatgaggtcaggagttcgagaccagcctgaccaatatggtgaaaccccatctctaataaaaataaaaaaattagccgggcacggttgctcacgcctgtaatcccagcactttgggaggccgaggtggacagatcatgaagtcaggagatcaagaccatcctggctaacacagcaaaacccatgttaaaaaaattgctgggcatggtggcagacacctgtagtcccagctactcgggaggctgaggcaggagaatcgcctgaactctggaggcagaggttgcaatgagctgagatcgcatgactgcactccagcctggcgacagagctagactccgtctcaaaaaaataaaataataataaagatctaatgacagggaaatagacggatgttggtacaccctgaagcaggtagtgaagctggcagttggccactggttcccacagaaaattgctctagtgatgctagcaaatcccaaaattggggctcaatccaggagggttcctggcttcataaaggaaataattcaa

SEQ ID NO: 1561496 - DNA, 4001 bp, Homo sapiens
gccaacatggcggaaccccgtctctactacaaatgcaaaaataagccgggcatagtagtgcatgcctgtagtcccagctactcgggaggctgaggcaggagaatggcatgaacccgggaggtggagcttgcagtgagccgagatcgtgccactgcgctccagtctgggcgatagagcgagactctgtctcaaaaaaaaacaaaaagaaaaagacaatttgtatttcacagggcactctgctataaagggtaagatgttttgtttagtaaacaaataaaaaaataaagacagccaggcacggtggctcacgtctgtaatcccagcactttcggaggccgaggcgagcgtattgcctgagctcgggagttcgaaaccaggctaggcaacatggcgaaaccccgtctctactaaaaatacaaaaaattagccgggcatggtggcgggtgtctgtaatcccagctacttgggaggctgaagcaggagaatcgcttgaacccggcaggcggaggttgcagtgagccgagatcacgccactgtactccaggctgggtgacagactgagactctgtctcaaaaaaaaaaaaaataaataaataaaataagctgggctcggtggctcgcgcctgtaaccccagcactttgggaggccgaggcaggtgaatcacctgagatcaggtgttcgagaccagcctgacctacatggagaaactccatctctactaaacatacaaaaaattagccaggtgcagtggcgcatgcctgtaatgacacctactcgggaggctgaggcaggagaatcgcttgaacccaggaggcggagattgcggtgagccgagatcacgccattgcatccagcctgggcaacaagagtgaaactccgtctcaaaaaaataaaaaataaagactgcatctaacgaggtaaggtcaccaacgagcacactgttccactatcagttctcactagaggattctgtgatgtaatgcccaaccttgtttttactaaccctgtttttagattctccctttcctttaatcacctagacttgtttccacctgaattgactctcccttacataagagagccagacagactccatcttggctctttcactggcagccccttcctcaaggacttaacttgtgcaagctgactcccagcacatccaagaatgcaattaactgataagatactgtggcgagctatatccgcagttcccaggaattcgtctgattgataacgcccaaagccccccatctatcaccttctaatagtcttaaagcccctgcacctggaactgtttactttcctgtaaccatttatccttttaacttttcttgcctactttacttctgtaaaattgttttaactagaccccccctcccctttctaaaccaaagtataaaagaaaatctagccccttctttggggccgcgagaactttgagcgttacccatctcttggccgccggctaaataaacggatttttttttaaataaacggactcttaattcgtctcaaagtgtggcgttttctctaactcgctcaggtacagtgactataaaagattaggccttcagcagctcaaaagggctgtcctgacagtcactcctaataaaaactcagcatctgctgcctatggctctgccaccttaaagactcttccttgcaagactacaggcttttgggtgatgatgaggtgacctgagggcatggaaggcaccacaattacctgagcagagagcctcagcgtggccaccaccgccatcgaaccacgtggtttaaagcagggttgggaggagagggtgaccagccaggagatatgggcatgacggtccctatcctggcccaggggtgggtcacgcttggcgccgtcacagagctccagagtcgcctctgtgcagcagaggacaactgttctccgccttctgggttcagtcaccgcagtgccgacctagcgctcaggagcctctccgacaaataaacccaacaccaatcaaaatggccgccaccagagggcgccggaagtccggacccattgtcacgtgcacacaggaaatgcctttattctgagcccccatggctcttccactctgtcattccatgcggagttttctgggtaatgtagttccctaggtaacaaggagggtaaagggcacaattcccagaggcggttctgcaggaaaagcccagctccacctcaggagtatccttaagatatgcgccctgactggtatggtggctagctcctgtaattccaccagtttgggaggccaagtcagaaggatcatttgaggccaagagttagagattagcctgagcaacaaagcaaaatcctgtttgaagggggcctgcccctccatacctatgggtatctctcatcaggtggagacgagagactgagaaaagaaattagacacagagaaaaagtatagagaaagaatagtgggcccaggggactggcacattcagcatgtgaggaccttcaccggcgccggtctctgagttccctcagtatttattgatcattatttttactctcttggtgaggggagtgtggcagggcaacagggtgatggtggggagaaggtcagcagggaaacacgtgagcaaaggaatctgtatcatgaataagttcaatgaaaggtactgtgcgtggatgtgcacataggccagatttatgtttcactttaaacaaacatctcagtgtagcaaagagcaacagagcagtattgctgccagcatatctcgcttctagccacagggtagttttctcctatttcagaatacaacgaatgggaatggttggctttacaccatgacattccattcccaggaatgagcaggagacagaagccttactcttatctcaactgcaaagaggcctccctctttcactcctcctcctcagcacagaccctttaagggtgtccggctgggggatgtaaggtctttcctttcccatgaggccatatctcaggctgtctcagtgggggaaaccttggacaatacccaggctttctcaggcagaggtccctgcagctttccgcagtgcattgtgtccctggttaatagagaatggagaatggcgatgacttttaccaagcatactgcctgcaaacatattgttaacaaggcacatgctgcacagccctaaatccattaaaccttgattcaatacagtacgtttctgtgagcacagggttggggctaaagttacagattaacagcatctcaaagcagaacaatttttcttaatacagatcaaaatggagtttcttatggcttccttttctacatagacacagtaacaatctgatttcttttccccatatcctgtctctgcaaaaaataaaaaatattagtggggtgaggtcaggcaggccagtggtcccagctgccccaaggttggggttagggttagggagcctgaaggagggagaatcgcttgagctcaggagtttgaagctgcggtaagccgagatcgtgccactgcactccagcctgggcaacagagcaagacctcttctctaaaaaataaaaataagggctgggtgtgggtggctcacgcctgtaatcccagcactttgggaggctgaggcgggtggatcacctgaggtcaggagttcaagtccagtctggccaacatggtgaaaccccgcctctactaaaaatacaaaaattagcttggcatgatggcatatgcatataatcccagctactcaggaggctgaggcaggagaatctcctgaacccaggagtcagaggttgcggtgagctgagattgtgccactgcactctagcctgggcgacagagcaagactctgtattggaaaaaaataaaattaaataaataaataaataaaagattgcagatctttctactgggcagaggatcatcctgcctttccttaaaactcctattgagatttcttgcaattattagctgtagctgattaccctagtgtatggaaaaatattatttcagagttagtgtaggtgc

SEQ ID NO: 1561497 - DNA, 4001 bp, Homo sapiens
aacagagctagaccctctttcaaaaaaaataaataaataaaaaatgtaggcttttatgctcgacatactggattgtttctgttacttatgagctatgcaaccttgggtagttaatctgagtctccggttcctcttctgtaaagaaaggaaaatgaaagaattttactctgagaagaagggcgttaaataaggtaatacacagaaactgcctctcagcacattatcaatgcgctcagtgaagaccagctactatttgttgctgttagtatttttcctatttgctcctgtcgcaccctaggagagctcaatgcagcacacatccaggagcagccttgcagagatctggcgacaatgtgacagagaaaatcgtccaatgagcttggcatgtgcaggagagaagaatggcagggggagtgtcctggtggattgggcagtgactttgcagccatggtggggtatggggtggggttgggttagatgaaatctaagtaggatgggagccccagaggatagaatctcattcattaatcacttatcgactaagtggtacaggcccagaacagaatagttttgggcctggggatgaaaaacagaacagaagctgacattctggggttgggggacagatcctcagcaataaacaatcaagataaagtcagaagactctagaaaacaacacaagagtgagaagaccacaaagactgggagagactttacatgatgcaaccagggaagctctctctgaagagaccctggaacaaggttagattgaagttagagaacagaccaggtgaggaaaaatgaatagacaactcctgaaggtgatcagagctacgaggagtaaacagtgtgacatgctggagagtaacttggggccttatgtgctcacactccaagagacatacattcatgtacactgtcattaatgaatattgtgctggatttgcttttcaaatacaagagcatgtgttaaacagaagcacggattcactgctgttaggcggcaagccagattcatttgtaataaacagacggcatctgcaaagataaatccaatgagcttcttgtcttctagcctcctgccaaaaatgctgctcccgcctcacctcttgccctcgaggctctcattccctctcccagcttttggtagggccagacttccgctggaatgatcccctaaaacaacagcaggacctagagagtccttcttcaaagacggcacctagagtgatgctctccgagcagtgaaagacaggacccacgtcacaagcgtaccctctccagctccctccacagagaaaattactgagactcgcattttagacccgagggaatggaggccgagggcagcgaggcgacagctccaggttagagccagagacagggacctctccttacaactcctgtcctggattcaggaccctgggtaggaagtgattagccctgccctctcacctcaccctctcccgggatctccataacctagggcatcaaaagggagaagcacagagtcccggcatccgccgtattacagcggatgggtgcatgcgggcggtgacccgagctcgcgcgggctgcggaaccctccactcaccaacgccggcgccgccatgggcccagggggctgggtgaggccgtgagagtcggcgaggaagccggtcctgcgggctcggccgaccccgggctccggctctgggctgcgagggacctcagtccccgccgtcgtgtaaaatgcacacaaggttcgcggcgccgcctctgcgcgccgtgaggacacagggctgtcgccaaggccccaggaagggttttgcagacgcttgtgggggtgggatcgcggctgacataaaagcgtgtaagtgggtcctatcctcctcactgtccgtctctactcggtctcgaaaagtggcccctgtctggcgttctacccagtgtagcgttggcaaccacagcagccgcaacctaacggcggacgaagactggacgccggaagtcccgcccacgccgctacgggaacgcccctctgcgccttccgtctatggcttggggtcggcttccgtcccttgtagcactgccttctgggtaatgtagtttgacggaatccgggtggtacctggagcgcactttctgttctcggtgaggcggcttctcaaggctcccaagaaagggattggcttcacctcttcttaaaggagaggcacacagagttccgtggaaattatctgaggcaatgacccactctcaaatgtctctaccaggcaactcacgccttgactttcctccctgtgtatccctgcgccagcagttcatctctctgagccttgagatggagattcctaaggaaaatgaagataattatttaatatgataatattaaaatttcccctatcagtaattttcagatgacatcagcattacctgcgaatttgttaccaatgcaagttcttagtccccacccactgaatcaggtactctggggggtgggacccagccctctgcttaacttgtccaggaaaagtggatgctgcaaaacatttgagaaccagactctttaaattccagtaaataaatgagacaaagccacctgtttggtgggaagtaactaagaattgcttagcactgggcctggaacataccgataagaacataagagctattgctgtcattattaatattctgtattattggcaacatcatcacaatacactgctaggggagggtctgagatacttctttgcagactctgatatttgtcaaaacaaatacgttgactgattcaacaggagcctcatgaatactgtttaaattttacataataatacgttgcagcatttggcgtatgcatctttttaaaacggtatatgcaggagggtttcctaatatacaggtagacctattgcccaagggatactttcttacatgattcaaaacttaggatcactgagactaattacctgcagccctaagggaagagtggagttgacatggtttctagtttgtgatgtaagatggcgtgtcactgttcatctctaattcacagcaaccaggatctgacccctccccatctgcccctccagcccccagggaagccagaaccaggcacaaaccagatggcccagcttatgcccagcaactcagggtcaccagatcttgtctcatcaagacactttcagcccaccacccaaacctgtagcccacatgaagagggcaataatcctggacactgtgaaaagtaaaagcattacatccaaagaggcatccccaggatggagcagaaataagaaaacataatgaagacacaattttgcaatcacttctgcctatattccatggcctacaaaccactcaaatagctccacatgtaagagaagccaggatgtgctgtcctccagagcatccagaaagagataatgggactgataagtccttggccattttctagtaaaatctattaatttagtcatcagatttccattctattatttatcctatacattctacactctcacatgcttcttaatgcgagaagccaaaatctgcatgcagtctctgacctcatctgaatgttaagatctcagggtgatatgttatgcatctagtccagattttgggtggggatgcagccaaaccatataatattatggggcctgttgggaggtgactggatcgtgagggtagatttctcatgaatgatttgatgccatccccttggtgctattcttgagataatgagttttctcaagatctgactgtttaaaagtgtgtggcatcttcccctcactctctcttgctcctgctctcaccatgtgctacactggctccccctttgccttgcaccatgattggaagcttcctgaggcctcaccagaaattgagcagatgctagtgctatgcttcctgtacagcctgcagaactgtgagccaagtaaacctcttttctttgtaaattacccagtctggggtattccttcgtaaattacccagtctcaggttttcctttacag

SEQ ID NO: 1561498 - DNA, 4001 bp, Homo sapiens
acagtggcatgatctctgctcacagcagcctggagctcctgggctcaagtgatcctcctgcttcggcctagagaagctgaaactgcaggtgcacactatcacacccggttaaattttttttttccttttttgacagagatggggggagcctcactattttgcccaggctggtcttgaactcctagactcaagcaatccctttgcctcagtctcctaaagtgctgagattacaggcatgagccactgcgcccagcccctctttcttcattactgtgcttccctccctaattctgtgcatatctctcattctccccttctctctctagctcttgttttcttttctttttccctgggattgtgctcctcattttgtacccctctcctctcctgctgtttatccccttcttccctctattacttctcttccacctcttctgctccattctcacagcttatttaacctcttttttttttttcctttttgagatggagtttcactcttgttgtgcaggctggagtgcaccggtgcgatcttggctctcaccgcaacctctgcctcccaggttcaaaggtttctcctgcctcagcctccctagtagctgggattacaggcatgtgcaaccgctcccagctaattttatatttttaatagagacggggtttctccctgttgatcaggctggtctcgaactccggacctcaggtgatccacccgcctcagcctcccaaaatgctgggattacaggcatgacccacagcgcccggtccttatttaacctcttgttgttctttctccccaatctttcaatcttcctcaatgtctatatattacagcctcttctcttatctctccgtctcctctgctctccctattaaattctctcttccctgttatacccctctgtccccactctccagcacctcagatccccaggtgtcctccctgctgtggttctccatctgttcttgccaccagcaccactctgctctgtctgccctggctccaaatccctcctcctctccctcactctggtgagcctccctctttgctgcccctctccctaccttgctgtccttcatctttctgtacatctagcttttctctacatttctccagttgcttttctcctcctgctttcttagttttttttctttcacttttgctgtctcttggcaaattcctaacccatcctctactttgccatctgttatgggcctttctcattcttcttttctctgtctctggttttctactgctctctcagtccctctctctatctcctgatccctttggcccaggcgggtttggagtaatcacaggcgggtttggagtaagacgcctgcatcccgtagaagcgcattttccagggggtggagctggacaggaaagaacacctggtatcataggacaagcccctgcgacccaccccaaccctggctcaggggaagcgaagacttggggagcagcagggcccggcaccaggagggacgtggtgggcgacggcaccctaagacaaaggtgggacctgcaggatcccaggaccaggcagaggacgcagcctccccggggctggggccggggcgccgcgctccaggtgccaactggggcgaggctgggaggcgcccagggctggaatccacctcgcgggtgaggactttaaaaagcacggggcgggaatagtcagaaaaatgttttgagcaggaaaaatacgcgataggaagtgtatacattgccctatagcagaaagaccggggacgggaccagcctccgagcgacttcaaacccaaaagcaagcaacttccagactcttaccgggacgtctcaatttgctctgggtgaagggaagacaggcgagaatttccaggtccgtggggatcccacgtcccaggggcagaagcgccggggacctgggaagtgcagacttaatccaaggcagagcaaaactcacgcgccgtggtaggaccttcactccacgcgatccgcttccgggtttgtgcgcgcccaggactgaagccaggccggggcaggttggctggacctgggcggggtagaggcggggccccaggcggagagaccttgccctttagaaccggcagagggagggcccggggcgggacctgtgcttctcagcctcgcactcagcgcctctgtttttcgagtttttggaggcgacagcggccaggaaggctgaggcatgattcaaaagccctggaattatctggaacgggaatgcaaactagaatgtgaaatgcaaagccctgccagggcggaacatacgatttcatgctgatggcccacagaacagaacagaaatcctctccctttctattctccattcactcaggagggagggtccaccccgtgctcagcttcaaagtgttccctagggcctccgcctgggatgcgggacggagagctcaggccagggaggagtgaggtcaccacctgctgcctaaacacagcagggatgcgggcacgaggcggaagcctgaggtcccagctactcaggaagcagcggcgggagaatccctgaacctgggggtccaggccatcctgggcgacaaagtaacaccccctaactgcagggtcctcttcctgatctctctctcgctcttttactttttttttttttttttttttttgagacggagtctcgctgtgtcgcccaggctggagtgcagtggcacgattttggctcactgcaagctccgcctcccgggttcacgcccttctcctgcctcagcctttcgagtaactggaactacaggagcccgcctaacccaaacaaaaacaagaccgggcgcgctggctcacacctgtaatctcagcactttgggaggctgaggcgggcagatcatgaggtcaggagatcgagaccatcctggctaacacagtgaaaccccatctctactaaaaaatacaaaaaaattagccaagcgtggtggtgggtgcctgtaatcccagctactagggaggctgagacaggagaatggagtgaacccgggaggcggagcgtgcagtgagccaagatcgtgccactgcactccagcctgggcgacagagcgaggctacgtctcaaaaaaaaaaaagaaaaagaaaaagaaaaagaaatatctcccctagtttgtctccttttccagaatttaccagataccagtacacagataccagtgcatacattaatgtatgactttcatacatagattctctgatctgatccacaaagagctaaatgtgcatccagatgtggcccctgaacaatccctgctgcccaatatcactgacaccttggggtccacaccccatctccatccatctctggtgtgagcccttcccaggaccatgcccagtgcagcctcttcccaagctcatgtcactaggttatagaagatggaatttaagtgaagatgacaaggactgagaaaaggcatgggttagtgtgagcaaacgtgtgaggcaggatgcttcagactcacagaagactggctactacaatacctggcatttcagaaaggaaagagacagaagaatccaccgaggaatattactccacctgaggaagagccatccctggctccttttctttgctcctcttggtgtcttcctcacgtaacatgagtctttggaaaatcaatcctgtatgtaaaaaaaaatacgagatttaatttttagaaatcactccctcctttcctgtgacaaaacacacacacaggggagacctcaccagggataaagatggttctctgctgcccactgcaccagagattatgtggagataagaaggtgccacaggaagacctacaagggcaattttgacctgttttgaggtcttgctccctcctgcaaaagtccacacacacgctgcagcaggacacagatcttcagggcacagatctggccctaaccaaaccccatgcagagcacagccccctcacctccctgtggatcacaggctgatctcagctctcaacatggaggaaactgccttgatgttcaatgc

SEQ ID NO: 1561499 - DNA, 4001 bp, Homo sapiens
cccaggaacacagcaaatcccaacctagtgacaaaagtgaaaaaagacaaaactagtcctttctcacagaagaccaagtgggaacaaagaagggaatccatccaccgaagcaacaaaaaaacttgtaaggagcatcgtaagaaaagagaatttacatgtcaaaaaagtaacacaattcctggagagaaatgaaaggtaatttgcataagctggaaaaaagagcatgatcctgaatgagagggtacaaatttgtcagctattcccaagagacagccagtcacaacacagatggaacttttggattaatctgacaattattgtaaaatcaacttgcaatcctcatatattagtggttgcctagagctgggggaaaaatgaaatggggagtgactgcttaaggggaacaagggtttctttgtggggtgatgaaatgttctaaaattagataatggggatgattgcacaactttattaatatacaataaaaccggtgaattgcacacttttaagtgcttaaagtgaacattatgttatgcaaatttaatcccacctccaaaaaaaattcacctccaagatttactaagcctaagcttgtgtgtgtgtggaggacttagagatgggcctggcgcccagacccctaactcctcaggttccagatctttgtacaagtcagcaacctctcgaatggattcctgggtatgtgtataaagcactagaacacacagtgggcctcaggagcaccggaatcagcgcgaaaacgcagaatgcaaaccgtactttgcaccattatttgcaacttgacagtgaccgccgccgtcactgcatgtttaagggaacccggagctgtttccaacccaggtctgacgtccttcacagtgctttgtgtgaactggcagggggagaaacgacggctggggaacgaacggggttattcgtcccatcaatggcctcagaagcatccttatcacctgcttccagagctcccgacccaaatttcctcctcaagaccgacgcggccgcgacgctgcaaaagctcgtcccggcctcacctggctcgcggccggcggtcccccttgaaggcggcgcagcaggatcggggtctgcccgcctggggcgtttggcttttgtcccgcgccgaggtccggcccaggagtgcgcttgggagctcccggcgcggcctcggggacaaaggcccgcggagccgacgtgcagcagagttcacccaggcccgtccgaccagaaaacgaagaacgcccggaggcgggaggccggaggcaggctgctggctggagaaccgacggcaacgacggcgcaaagccggcgcggaaagggcaggcgcaggacccaccctgacgccgcctctcccagccggctctcctgaccccccaagccccgcagctacggcggccccacagcctgagcaaaggcctcacctcagccgcggacaatggcggctgcttccccggcgtcgaccggagcgcgccgcggggtctgctgggagctgtagttccaggcgggcacttccggcgtcgggcagcggcgccgccatgacaggttcctgggccgcgccgcctcgccctgcctgggcggggttgggacctttctggcacctgcgtcgaagccggcggcaggatggactttgttgtcccggtcccagaccaccctcctccaccgtcgcctcccactgcaaaaaggcctgggtaagtcgcggccccgcgggcctcggtttgcccatccgcaaaatggcgcctcgtggtaccgggtttcccgggaggagctcggcgagttctcagcgctctcgagggatccttccatttggcgttcgcaagattgtgagaaagtgactgctgttattctctttaagataaggaacctaattcgagctacccttctctgtgaagctcgacggctgagaacgtcagggctcgttcccaagtctctttccagaggccaggctttatgggagcatgggttaccagcgacgcaccctgtgagttttcctctatcgatatgcatggagcggttcgggagcggtggctcattcctgtagtcccagcacttcgggaagctgtggcgggaggatcagttgagttcaggagttcgacaccaccctgggcaacatagcgagaccacatctctacaaaaaaaatacaaaaattagcccggtgtgatggcgcgcgcctgtagtccccgctacttaggaggttgcggtggaaggattgcttgagcctgggaggtcaaggttgcagtgagctatgatcgcaccactgcacttcagcctgggcaacagagcaagacccggcattaaaacaaacaaaaacgggccgggcgcggtggctcacagctgtaatcccagcactttgggaggccaaggcaggtggatcgcctgaggtcaggagttccgagaccagtctgggcaacatgataaaacctcgtctctactaaaaataccaaaaattagccgggcttggtggagggcacctgtacccagctacttgggaggctgaggcaggagaatcgcttgaacccgggaagcggaggctacagtaagccgagatcaagccattgcactccagcctgggcagcagggcaagactctgtctcaaaaaaagggactgagggactgtaggtggtgataccaaagaaagcatggccatttaggaagctagacttgagtgagcagtgggcaagagagattttgaagatatttccactagtaatggaggatcattttaaaaagctggcctgtgggttgggcttttgttgttgggtggtgttggcactcactgtgggtgggcaaaggggagtagccctttcagagggagaggaaaagttcaagtaggacaggctgaattcaagggagaggaaaatttcaagtaggacaggctgaattcgagggagaggaccatgagagaggtaaggtggaaggggcaaggtgttgggacaggccccagctggcaggaaggtgaacccagtcagagtgggcactgagaggaaagcaatctatggatggtacagccacaatttccatctcaggatcaagcagagaaagagaggctggagaaggaagagtgacagaagtaagaagagagtgtctctccacttccactccagccccctacagctcatcctccagcaggcagccaagggcacttttaggatctcacatcaggtccttgcctcacattctgcactggcttcccaagtaattaaagtaaaatccaaattccagctcacagcttagaaaactcagcaggactggcctctgtcctatcccacaccccacctcagtccctcaagctcatctcctgtcattcctgcccatttctggaccccagccactcctcaaacagggtaagtccattcctgcttcagggcctttgtacgtattgtttcctcttcctggaatcttcttccttgtacagccccagggttttctttttttcatccagatcacagcacagatgtcacatcctggtaacagccagctgtgactcatctccctaattctcaattgtattactctctttttattttcttcgtatcgtaactgatagtctcatacagtacagaagccaagttttaagatatgcaatcaccaaatacctgctacacaaacctcaatgttcatataaaataagactagaattcatattctaaagagagatgaggtagctctgttcacttttgagagggaactcaaatgagagagatacctttgacctaaaggtgtcaggaaaccagatgaagaaaaacacccctgctatgatttgaatgtttttatcctctccaaaattcatgttgaaacttactccccagtgcagtagtgttgggaggcagggtctaatgggatttatggaggtcataaggctctgctgtcatgaatggattaatgttgtaaaccaaaaaataaaattctaagccccccaccccccaaccatatgaatagacccctcctctcagccaagggcattccaaagttaatttgaaaaatgagttcg

SEQ ID NO: 1561500 - DNA, 4001 bp, Homo sapiens
aaattttatttttttgagacggagtctcgcgctgtcgcccaggctggcgtgcagtggctcgatctcggctcactgcaaggtccgcctcccaggttcacaccattctcctgcctcagtctcccgactagctgggactacaggcgcccaccaccacgcccggctaattttttgtatttttagtagagacggggtttcaccatgttagccaggatggtctcaatctcctgacctcatgatctgcccgcctcggcctcccaaagtgctgggattacaggcggaagccactgtgccaggcccaaaattccatttttaaaaaatgagctgcggctgggcgtggtggctcacgcctgtaatcccaacactttgggaggccaaggtgggtggatcacctgaggttgggagttcaagaccagcctgacccacatggagaaaccccgtctctactaaaaatacaaaaaaaaaaaaaaaatagccaggcatggtggcccatgcttgtaatctcagctactcaggtggctgaggcaggagaatcgcttgaacccgggaggcggaggttgcagtgagcagagatcgcaccattgcactccagcctgggcaacaagagcggaactcagtctcaaaaaaaaaaaaaaaaaaaaaaaagaaagaaaaagagttgcatatatagtttgagaactgtgatccaccactgtaactctaaatagtgttaaacattagatcacagctatttatcctgtgacagattctttacaaacataaatcttattatttgtataatatccaatcccttggacgctgtataattttcttaaccattcccataatctcgttcattagttttctgcaaaaccattcaaaggtataaaactctttgattccagatctaaaacctgagtctaaataatttggattatggacatcctagaaaaatgcaaattaacaaacatgtacaggaattctttatagaatttcagggggtttgtgatgtcccttatgcccataagggcattggtctacagacagtacaccaatgaccgagaattcctattttggaaaacttaaattctggctcacttccttcacatcacggctaagttcatattcttgttgcttttgatctacagaaatccaaaacggaatatccaaaattgcctcataatacttagcgcttatgtttcccccctccaaggctgcaggcgcgtaatttcatacacacgaccagaaggaagtatgttggatggaacctgcaatcatccttcactgcaggttcttggggtcagaattcaaggccgtgtttgttaaacatgtaaatgaaactccaagaaccgggaggtgggggcggagtaacaacccttttcaggagggaatcctacactcgaaactgacaaaccctgccagaccaaattttagtcaggctactacaccttcagctaggcccatctgtacacttcactgtaaaatctggctatagcaaagaactattctaagtcagtttagcaagaccctttcgcctccgtatcttcatcctccaccgtcccccaggtctctctctccagaaataatcctgttaggtgcgtttagtcagaatcttccttaacccagacatttcctcttagtaatttctcatccagtgatccctaaccttcttggctataaattcccacttgttcatgctgaattcggagttgagcccaatgtctgttacccactgcaaaatctcacagccgggatcccaatacctaccaccatggtcctgaataaagggttctttgcatgctttaacaagtgtcactgaatacttttttatttaacagaatctatcatacctttcttaagggcaattactcttctaagcttctcatcctatctgtttcttctcactggaaatcttcatctaagactcagtatctgatttcccattgggaccatttctctgttgtagtcgtactaggctgaggaaggcacaggaagcagcagggaacctggagccaagggtcaatagaccccacagagcccagcgaagcacgctttacaaaggacacacacggcatgtacaggtcacacaaggtcgactacgcacccctcacagtcccgcaactgcacccacgtcacacaggcaagccggtcctgtcgccgctgcgcggtctctcacgctccccgcctgtctcctagagacgggcccctcctccgcagctccagcaccctagggcctgaggaggcgggagactcgcccggcccgcctgggggcctccgcgctctgagcgcctcctgcagccccactctcaccgccacgcagggtaccacgcgggcggcgggctggggctgcagaggctcccgcagtgacctgcgccgccttcttcaggtggaaccaaaaggtcccggaaccggagccaggggtccaagttttctccgttgcctttgtaatatgtagtccaagccagaacagtcaggaccgcaggtaccggtgagaaatggagtccagaatcctaaaaacctacgagaaatacggcagcgaccacttggaccgcgcctcccacccaccgctcgagccccggagacttctgggagtggccgccttgcctcgagtgcgcatgcgcagatcggccactactgggcccctggcctgaggcttagggtggagttagtgcgttcttagggccagtaggaggcgagtctgagtagaaactgatccaggtagcctcggaagggatcacctgctggatgggtgtgagctcctcagggtggggcgccgaaaccctcatggctcctgaggtagagccggcctccttggtaacacatgggactgggacttttaataccacccgacaggcccagcttgtctcgtcaagcgctaagtaaatggactcacgtcctatatgagggtttgaagttccatcacattcttcaatacatgacattatgttcttcatctttggacacgaatatatttgactaaaaatttgactaaaaaatcatctgaagaaataactgctaaatagttttattatttttgttctggaataggcttcttgaagataaaataagaaatttaaaaaatttttttgatccttcatgtaatactttgtaaatcttcatagttatttagaagcatccaaaatttccaaatggtaaaaaacgaataagaaaaatttttaggtaagtaaatttgggggaaatatttacaacagctaaaacggacaaatatttaatagtccgaatttcctgtttctttggcttaataaaatattgatgaatacaggctgggcacggtggctcacgcctttaatcccagcattttcggaggccaaggcaggaggatcagttgaggccagaagttcaaaaccagcctaagaaacatagtgagacacccctctcctcctcccaaactctaccaaaaatgaaagttagcctggtgtggtggcacacgcctgtgggcccagctattccaaagacaaaggtaggaggatcagttgagcccggaagttcaggcttcagtgaggtatgatggtgtcaccgcactctggcctgagcaacagagcaagaccttgtctcaaaaaataaataagtaaaattaatttaaaaataaaaaatatttgtctataccctaagaggaaaaggaacaaaactaaaaaatcaccattcaaaaatacaaatagtcaaggaaaaaaaactattaaagttacaatttaagaacttattgatcactttttcttctcttaattagttcttggatttgttgctcctgaatctcctgaataatctctcagaaataccacacatagatcaatggattaaattgactccacatattattttctttttcttttttctctttttgagacggagttttgctctagttgcccaggctggagtgcaatggcacgatcttggctcactgcaacctccacctcccaggttcaagcgattttcctgcctcagcctcctgagtagctggaattacaggcatgcatcaccatgcccagctaattttgtatttttag

SEQ ID NO: 1561501 - DNA, 4001 bp, Homo sapiens
agcggaactcagtctcaaaaaaaaaaaaaaaaaaaaaaaagaaagaaaaagagttgcatatatagtttgagaactgtgatccaccactgtaactctaaatagtgttaaacattagatcacagctatttatcctgtgacagattctttacaaacataaatcttattatttgtataatatccaatcccttggacgctgtataattttcttaaccattcccataatctcgttcattagttttctgcaaaaccattcaaaggtataaaactctttgattccagatctaaaacctgagtctaaataatttggattatggacatcctagaaaaatgcaaattaacaaacatgtacaggaattctttatagaatttcagggggtttgtgatgtcccttatgcccataagggcattggtctacagacagtacaccaatgaccgagaattcctattttggaaaacttaaattctggctcacttccttcacatcacggctaagttcatattcttgttgcttttgatctacagaaatccaaaacggaatatccaaaattgcctcataatacttagcgcttatgtttcccccctccaaggctgcaggcgcgtaatttcatacacacgaccagaaggaagtatgttggatggaacctgcaatcatccttcactgcaggttcttggggtcagaattcaaggccgtgtttgttaaacatgtaaatgaaactccaagaaccgggaggtgggggcggagtaacaacccttttcaggagggaatcctacactcgaaactgacaaaccctgccagaccaaattttagtcaggctactacaccttcagctaggcccatctgtacacttcactgtaaaatctggctatagcaaagaactattctaagtcagtttagcaagaccctttcgcctccgtatcttcatcctccaccgtcccccaggtctctctctccagaaataatcctgttaggtgcgtttagtcagaatcttccttaacccagacatttcctcttagtaatttctcatccagtgatccctaaccttcttggctataaattcccacttgttcatgctgaattcggagttgagcccaatgtctgttacccactgcaaaatctcacagccgggatcccaatacctaccaccatggtcctgaataaagggttctttgcatgctttaacaagtgtcactgaatacttttttatttaacagaatctatcatacctttcttaagggcaattactcttctaagcttctcatcctatctgtttcttctcactggaaatcttcatctaagactcagtatctgatttcccattgggaccatttctctgttgtagtcgtactaggctgaggaaggcacaggaagcagcagggaacctggagccaagggtcaatagaccccacagagcccagcgaagcacgctttacaaaggacacacacggcatgtacaggtcacacaaggtcgactacgcacccctcacagtcccgcaactgcacccacgtcacacaggcaagccggtcctgtcgccgctgcgcggtctctcacgctccccgcctgtctcctagagacgggcccctcctccgcagctccagcaccctagggcctgaggaggcgggagactcgcccggcccgcctgggggcctccgcgctctgagcgcctcctgcagccccactctcaccgccacgcagggtaccacgcgggcggcgggctggggctgcagaggctcccgcagtgacctgcgccgccttcttcaggtggaaccaaaaggtcccggaaccggagccaggggtccaagttttctccgttgcctttgtaatatgtagtccaagccagaacagtcaggaccgcaggtaccggtgagaaatggagtccagaatcctaaaaacctacgagaaatacggcagcgaccacttggaccgcgcctcccacccaccgctcgagccccggagacttctgggagtggccgccttgcctcgagtgcgcatgcgcagatcggccactactgggcccctggcctgaggcttagggtggagttagtgcgttcttagggccagtaggaggcgagtctgagtagaaactgatccaggtagcctcggaagggatcacctgctggatgggtgtgagctcctcagggtggggcgccgaaaccctcatggctcctgaggtagagccggcctccttggtaacacatgggactgggacttttaataccacccgacaggcccagcttgtctcgtcaagcgctaagtaaatggactcacgtcctatatgagggtttgaagttccatcacattcttcaatacatgacattatgttcttcatctttggacacgaatatatttgactaaaaatttgactaaaaaatcatctgaagaaataactgctaaatagttttattatttttgttctggaataggcttcttgaagataaaataagaaatttaaaaaatttttttgatccttcatgtaatactttgtaaatcttcatagttatttagaagcatccaaaatttccaaatggtaaaaaacgaataagaaaaatttttaggtaagtaaatttgggggaaatatttacaacagctaaaacggacaaatatttaatagtccgaatttcctgtttctttggcttaataaaatattgatgaatacaggctgggcacggtggctcacgcctttaatcccagcattttcggaggccaaggcaggaggatcagttgaggccagaagttcaaaaccagcctaagaaacatagtgagacacccctctcctcctcccaaactctaccaaaaatgaaagttagcctggtgtggtggcacacgcctgtgggcccagctattccaaagacaaaggtaggaggatcagttgagcccggaagttcaggcttcagtgaggtatgatggtgtcaccgcactctggcctgagcaacagagcaagaccttgtctcaaaaaataaataagtaaaattaatttaaaaataaaaaatatttgtctataccctaagaggaaaaggaacaaaactaaaaaatcaccattcaaaaatacaaatagtcaaggaaaaaaaactattaaagttacaatttaagaacttattgatcactttttcttctcttaattagttcttggatttgttgctcctgaatctcctgaataatctctcagaaataccacacatagatcaatggattaaattgactccacatattattttctttttcttttttctctttttgagacggagttttgctctagttgcccaggctggagtgcaatggcacgatcttggctcactgcaacctccacctcccaggttcaagcgattttcctgcctcagcctcctgagtagctggaattacaggcatgcatcaccatgcccagctaattttgtatttttagtagagacagggttttaccatgttggtcaggctggtctcgaactcccaacctcagatgatctgcccgccttggcctcccaaagtgctgggattataggcatgagctactgcgcccggctccacatactattttcaacaaggataccaaggcattttaaggaagggaagagtagtctttgttgaaaagactggaattagagatgcacatagaaaggaatgaattgagttccctgcctctcaccatatacaaaatcaactcaaaatggatcaaacacctaggtgtaagacttaaaacagtagaacatttagaaggaaatgtaggcataaatcttctggactttatagtcagcaattgtttcttaaccgtgacatcagaatcacaagcaacaacatcaaaaaaggaaattggacataaattgtaaaacattgtgcttcaaaacccaccaagaatgtgagaagctacccaaagagtgagaaaaattgtttgtaaattatgtatccaataagggatttgtatctagaatatataaagaagtcttgcaactcaataataaaaagcccaacaaaaatgggcaaagtaactgaataagcatttctcaaaaa

SEQ ID NO: 1561502 - DNA, 4001 bp, Homo sapiens
gaaagggtcatgggaacccccggttcatagttggttggtcacaaggttcaagtcccaacccaggacttgcaagtggcacctgaagtgggagcatgcctgtggaactgagctctcaacctgtagaatctgaggctaactccacatagatagtgttagtgtgaaattgagttaaattacacaacacccaggtggtgtctgatgaactgcttgtgggtgggaagtaatccccaacacattttggtgaccagagatgtggcattctgtgttgggtgttcactattgtgttgattgtaagcgtaggaaaaacgctttggtttttcctcctgtcttacccactcacccacacccgaatgaggcaagtcactgccctctggctgaacagggattgtgaatggaagctaacttgtgatgtcaagaattataaaatgcacttcccttataggcaggaactttgcaagtctcatcttcatctgtacttttgaaataaattttgtgcttattagattacaattagagaaatcagtatatcacaatttgatcataatagtccatcaactcatcgctcatctgcactcaggttccccctcttttgtcattagtatgtttccctccctcattctgtacagctctctcattcttaccttctttctcctgctttttttcacttcatttttcccataagaattggcttatttttctgcccctctcctctcctgctgtttctccccctcttccctctattccttctcttccatttgttctgctccattctggcaatttgttttaccccttgttcctctttgtgtccaatttttgattgtccccaatttccattctgcctgtttcttgccctccctatctctgcttcctctctgttctccctgttaaatttcctcttccctgctacactctcttgtccccactctctggcccccccggatcccaggcctccccatgctgtggttctccctctgctctccttgtcatcagctgccccctcttgctgtcccagcaccatgctgctctgtctgccctggctccaaatccctcctcctctcccctactctgtctgaggagcctccccctttctgcccctctcccaatcttgcttcatcttcatctctctggagacccagcttttctctacatttctccagttacttttctccccctgctacattctcggcttcattcactgtctctgtaaatctctcagctactctctgccgtctgcttatggatctccctcatgcttctttttcaaaatttttctatttcctgccactctttcaccatctttccccacacatccataggcaggggagtacaataaggtgcccacctccgccaagagcacatttttagtgggatggaatttgggacgaagaatcctgaatgtcctaagacagaagaagtcacgtccccacacccgggggtcgggagtagcgatggctgcgaaggggaggcctggggagtaggaaggcccggatcaaggaggaaaagggtggggctgaattattagaagtgtggggtctcaagggtcccaggacccagtacaggacgcggcctcccccgccgggactggggctgcggcgctgcgcttcaggggccgggggcgaggttgggaggctccccgggcgggaatccaccttgcggtaaggacttttaaaagcgcggggcaggacgttgggtcagtaaagagttttaagcggaaaggagtctcgaaaatccgtgtttacctggcccaaggcagaacgagcggggacaggacccgtcgccgagcgattttaacacacagggaagcgagcgccggactctcacggagacgcctgaatttacacggggtggagggagcggtgcggggatttcaaggtctgtgttgactctcagatcccgggtacagaagcgcgggggagctgggaagcccagattgaatctaaacaaagggaaactgacgcgctgcggtgtgaccttctacccacgcgatccgcttccgggtctgcaaaaaactgcgcgcgcgcagcatagagagcggaccgggacgggacggggcggggcttccctaggccacgcctccagtgcctctgttttccgggttttgctggcagtgaggctggagcagctcagccctctgcaaactgggatcctgccggagcaaagcaacgtcagttgaggattagatccaggaaatttcctgctattaaaatcaattttaagccggccgtggtggcaggcacctgtagtcccagcgactagagaggctgaggctggaggatcgcttcagcccaggagttcgagtctacactgagctatcatggccactgcactccagcctgggcgtagtgtagacccagtgctatactcagtgtagactctgtcctaaaataaataagtaaataaaaactaattttaacaatttaatttaaaaggcctggaattctgtgtgaaggcgatgcaagttaaaatgtgaaatgcaaagccctgcctgggtagcatgtgcaatttcatgctgacggcccacagaacataatagaaatcttctccctttccatcatcatctctgatctccagcacgggagaaagatgtaggctgggaggttaagcccgtctagtgttttcacgttcttctgcctgcttttattctgactgtgctggcagctgattagattgtgcccacccaaattgaggtgggtctgcctttcccagtccactgagtcatctctagagtgctcatctctagagagtttccgagggacaacgccaagcgcgttggagggttaaggccaacctgggaatccgtatttacctggcccaaggcagaacgaacggggcatctccgtgagagtctggcggtcgcttccctgtgtgttaaaaacgctacaggcacatgccaccatacccatcgttcggcgatgggtcctgtccccggagggatgttaggccaccaccaactgcttttttttcttgagacggagtctcgctctgtcacccaggctcactgcaagctccgcctcctgggttcacgccattctcctgcctcagcctcctgagtagctgggaccacaggcacccaccaccacgcccgcctaattttttgtatttttagtagagatggggtttcaccgtgttagccaggatggtctcgatctcctgacctcgtgatccacaccccccccccacgccccggcccccaaagtgctgggattacaggggtgagccactgcacccggcccaactgttgcttttaaaaaaaccaataactttaaaaaatagatgtaaattacattgtgtgtgtgtgtgtgtgtgtgtttgtttttgagacagagtcttgctctgtcacccaggctggagtgcagtgacacggtttcagctcactgtagcctctgcctccccggttcaagcgactctccagcctcagcctcccaagtagctggggctacaggcttgcaccacagtgcttggctaatttttgtatttttagtacagacacggtttcaccatgttggacaggctggtctcaaactcctgacctcaggtgattctcctgcctgaaagattggtgcaatttctctgttaaatcatcttatatgtttcatcttacattctgtttagattttctgtctctactactgtcaaaattggtagagtacattttcctagaaaatttgtttcatctgtgtttccagtcaatattcatttaattttataaattactttattttattttatttttgagacaaagtctcactccaatacccatgctggagtgcagtggcgcaatctcagctcactgcaacctccaactcccgggttcaaccaattctcctgcctcagcctcccgagtagctgggactacaggcacgtgccaccatgcctggctaagttttgtatttttagtagagacgggatttcactaagttggtcaggctggtcttgaacttctgacctcgtgatccacctgccttggcctcccaaagtgctgggattacaggcgtgagcca

SEQ ID NO: 1561503 - DNA, 4001 bp, Homo sapiens
aaacttctaaattaaactttttgacttctacaataacatttagcttaaaacacacgttatatagctgtacaaaaatattttgtcttcatgtctttattctataagctttttcccatttaaaatctttttccccattaaaacttttttgtcaacaaccaggacacaaacacatacattagcctaggcctacacagggtggggaccatcaatgtcactgtcttccagtgccacatcttgtcccactggaaggtcctcaggagcaataacatgtatggagctgtcatctgggataacaatgacttcttctggatacctcttgaagaacttgcccgaggctcttctaggagagaaggcactcctttcagaaatatgtctgtggtgtgaatctgaaagttagctgagggcctggtgcagtagctcacaccagtaatcccagcactttgggaggccgcggcaggcagatcttgaggtcaagagatcaagaccatcctggccaacatggtgaaaccccatctccactaaaaatacaaaaattagctcggagtggtggcacaggcttgtagtcccagctactcaggaggccgaggcaggagaattgcttgaaccctggaggtggaggttccagtgagccgagaccgcaccactgtactccagcctggtgacagagcgagactcggtctcaaaaaataaaaaaataaatcagctgattaggaaaacgagagaggaagaaaaatatctatggtggtttacttgcttattttttcttcctaaatgttcttgtgagcaggtaatgcaccataaactttcctttctattaataaacaccttttggggttgggtgtggtggctcacgcctgtaaccccagaactttgggaggctgaggcaggctgatcacaccaggccaagagttcgagactaacctggccaaaatggtaaaaccctgcctctagtaaaaatacaaacgttagtctgggccccatgctcacgcctgtaatcctaacacattgggaggccgaggcgggcagatcacgaggtcaggagttcgacaccagactgaccaacatggtgaaaccccgtctctactaaaaatacaaaaattagctgggcatggtggcgcatgcctgtaatcccagctactcaggaggctgaagcaggagaatcgctggaacccggaaggcagacgttgcagtgagctgagcctgggcaacagagagagactctatctcaaaaaaaaccaaaaacaaaaaaaacaaaatacaaactttagccgggtgtagtggcaggcacctgtaatcccagctactcaggaggctgaggcaggagaatcgcttgaacccagaaagcggaggttgcagtgagccaagatcacactactacattccagcctgggtgacagagtgagactctgtctcaaaaaataaaataagctggccgcagtggctcacgcctgtaatcccagcactttgggaggtcaaggcgggtggatcacgaggtcaggagatcgagaccatcctggctaacatggtgaaaccccgtctctactaaaaatacaaaaaattagctgggcgtggtggtgagcgcctgtagtcccagctactcgggaggctgaggtgggagaatggtgtgaacccgggagacggagcttgcagtgagtcgagatcaccccactgcactccagcctgggcgacagagcgagactccatctccaaaaaaaaataaaaataaaaataaaataaataaataaacacctattggtgttggagttcatgttttcaaactttttaagaagcttgttgaggtctgtacaagtttctgctaaacccttcactgtgaaagttcctggattttttttttcttttccttcactttcctatcttctcacctcttcttcagctatgtgttctcatatcagttccaaccacttattcgtccattcctcatgaaccacctctaggagcatcacagtgtcatcctcacccacacccaggttaaagctgcctggcaacgatctaggttcgtttcccccagcatcaccacagacacaaggaatgcactgcactatgacgtcatgactactctgatgtagctaggcaacaggaacttctcatctccagtgtaacagtgtaatcttacggaaccaccatcatagatctgattgttgaccaaaatgtcattatgcagtgtatggctgtactatgcaactttacataagggacttgaagatcacctgattttggtatcctcaggggtcgtggaagtaatccctccaatactgagggatgactgtactgcctagatataccagaaaaggagatgattcgagtcctgggcaaaatagcatgggactggccgggtacagtggctcacacctgtaatcctagcactttgggaggccaaggtaggtggattgcctgagctcaggagttcaagaccagcctgggctacatggtgaaactgtctctactaaaaatacaaaaaattagtggggtgtggtggtatatgcctgtaatcccagctacttgggaggctgaggcatgagaatcacttgaacctgggaggcagaggttgcagtgagccgatattgcaccactgcgttccagcctgggcaatggagactcctcaaaaacaaaagagagtgggacagtgctagatttcagcacactactcggaatggcaagaaatttaaaagttgtacattcttcatttttggaactttctgtgtaatattttcagaccacggttaaactcgaggatctggaaccacagaaatcaaaccagcagatagggagcaactactgtagcatcagctttaaatattaggcctggcctccacctgagtattgaaatcagaatctctgtaaggaggcacaagagatgtttctgcaaaatgcctcagctctcaaatgtgagactagggctgagctccactcagaggggttgagccagcacagtccccaccttctggctcgtctctccccttgggtccttgctgtcaccaggatccagacagtggcaggaaaagggaaagaaagaaacacacacagcttcaaaatggaggagagttggggtggggtcaggctggagtgttaaatcgggggctatgggggggtcacagaatcctaagaaggtactaccagaacaaaggcctggggaaggaagggtgtttgtcacctgcagctgaggggccagagagttccaggcagaggaacagcccagatgaagtctctgaggcaggagaaacctgggccccctgttatgtaggtttcaaatgattccacttacatagtttgctacatgaatgacttgtgtgctgtgataagaacttggagtgtgttcctccttccttcacgagtgatgcatcaccccttagcagcccccataaataggaaatggagtaaacttccctcccaccccagagaatgtggttggattcccagctcccctggagaatgttatatggcaccttctcagaccccatatatgagattctgacctcgactactggaattcaaaatacacagaaattcaagaggttgacaggcactgtgagaccagaggctgcgacacactctgctgtcaggggcctctctgaagacctgcagcctacactgagacgtggctgtatgccagctgttctccaatgatcacaccgttagccttcaaggtgacctccgaagcctcgaccaacaccagcactgccctctagcgggaatgtatggacatgacctgttcttgcgggtctccactgggctggatgccatttctcccaagaaactgcttgtatcaaggtacaactcaaacattaactgtactttccatacaggcctatttccatcctaactgagcaaatacatttttttttttgagacagtctcactctgtcacccaagctgaagtgcaatagcatgatatcggctcgctgcaacctctgcctcaggtccaagcaattctcctgcctcagcctcctggagtagctgggattacaggcgcctgccaccaa

SEQ ID NO: 1561504 - DNA, 4001 bp, Homo sapiens
ggagacagtgattcacaactgaataagtgactgccctctggcaaatagggattccaagtggaacataacctctgatgccaagatttatagaatgtacatgtcttatagatacgaattttaaaattctcaatctcatctgtgtaatttaaacaagtttttagttattagattatatatacagaactcaacatgtcacaaccaatcatatccaatgaactcacccactcatctgaacccagtctctcgcccctttttttttgtttggagacaaggtctcgctctgacgaccaggctgcagtgtagtcacatgatctcagctcactgcagcctggacctcctgggctcaagtcatcctcccagcttggccaccagagcagctgggagtacaggtgcacaccattatgcccggttatttacttacttttttggcgggggggaggtctcactatgttgcccaagctggtctcgaactcctggactcaagcaatccccttgcctcagtctcctaaagtgtggagactacagactacaggcgtgagccactgtgtccagaccctctttcttcattactgtgcttccctccctaattctgtacatatctctcattctccccttctctctctagctcttgttttcttttctttttccctgggattctgctcttcattttgtacccctctcctctcctgctattcatccccttcttccctttattccttctcttccacctcttctcctccatcctcacaacttatttaacctcttattgctccttctccccaatctttcaatcgtcctcaatctccatctatttctgcctcttctcccatctctgcgcctcctctgctctccctgttaaattccatcttccccgatatactcccttgtccccactctgtgtctccccagatcccagctgtcctctctgctgtggttctccctctgttctccttgacacaagcaccactctgctctgtctgccctggctccaaatccttccctctctccctcactctgatgagtctccctctttgctgccactccccctaccttgtgatccttcatctctctgtacatctatctagcctttctctacatttctccggttgcttttctcctcctgctttcttaggtttttttttttttttttcacttctgccatctcttggcatatccctcaccaatcctctattttgccatctgttatgggcctttcttattcttcttttctctgcctcaggttttctactgctctctgtctcctgattcctttggcccacacaatcgcaacacggtttggagtaagacgcctgcatcccggaggagcgcattttccacgccctggagctccgcaggcaagaataccccgtgccgcaggacaggcccctgggacctccccagtgcaggttcaatgaaagcggtgactgcggaggggagacctggggagcagcaggccccggcatgaggaggaaggtgcggggcggggggggggggcgcgacggcgccttaggaccaggatggggtctgcaggatcccaggacctggcagaggactcggcctccccgggactggggctgcggcgcggcgctcccggggctgaggagggggaggctgggaggcgccctgggcaagaatccacatcgcgggtgaagactttaaaaagcgcggggcgcgaggagtcagaacaaggttttcagcaggaaaactacgcaacagaaagtgtatacattgacctatagcagaaagaccggggacgagaccagcctcaggacgactttaaacccaaaaggaagcgaccctcgggctctcacggggatgtctcaatttgctctgggcaaaggaagacgccggagaatttccaggtctgtggggaccccacgtcccagggacagaagccctgggaacctagttagcgcagacttaatacaacacagagcaaaactcaccgcggcgatatgacctacactccacccgatccgcttccgggtttgcgttaatctgcgcgcgcaggacaaaagccaggcctgggcgggaagtgggaggtaggcggggcctgggcgaggtaggggcggggcgcgaggcggagagaccttgccttttagaaccggcagagggcagggccggggcgggatctgcgcgtctctcagcctcgctcccagcgtctctgttttcaggttttggaggcgagagcgccagaaagtctgaggcatgatacaaaagccctgttgagagaagagagagaccctctgacattgttttatattgttttatagtcagtaaaaacaacaggaagtaaaaccaaagacaggcagccccgcgccaggcccgaaaccaggcctggatccgcctggcctaaacccagtagttaaaaatcaacttatgatttagaagctgatgttaggcatagattccagacattgtatagaagaacacggtgaaactcctgccctgttctctctctccctgatcaccggtgcatgcagcccctgtcacgtatcccttgcttgctcaatcagtcactatcctttcatctgaaatctttagtgttgtgagcccttaaaagggacagaaattgtgcactcggggagcttggattttaaggcagtagcttgccaatgctcccagctgaataaagcccttccttctacaactcggtgtctgagaggttttgtctgcgactcgtcctgctacactgtaattgtctggaacagggatacaaactagaatgtgaaatgcaaagccctgcctgggcggtatgtaccatgtcatgctgaggtcccacagaacagatagatatcctctccctttctattgtccattcactccggaaggagactccgccctgtgctcagcttcagagacttccctgaagccaccgcctggaatgccggacggagtgctcaggccgagaaggagtgaggtcaccacctgctgcttaaagacagcagaggcgcgggggcgggagcctgaggtcccagctactcaggaagcagcggcgggaggatccctgagcctcgggttccaagccagcctgagcgacaaaataacgcccactgccgcggtctccctttcttgtctctctctctctctttttttttaaaaaaaactttcgcaaataaaatttttgattgtgtgacatagggatccaacattattcttttccatgtggatatccagatagttgtcctagcacatttatggaagagatctattactttcttgtattattattattattattattattattattattatttttgagacagagtatttctctgttgcccaggctggagtgcagtggcgagatctcgactaaatgcatcctctgcctcctgggttcaagcgattctcctgccccagccttgggaacagctggcattacaggcgtgcgccaccatgccaggctaatttttgtatttttagtagagacggggttgaccatgttgaccaggccggtatcggactcctcactccaagttatttgcctgcctcagcctcctaaagtgctggggttacggcgtgagccaacatgcctggctaattttttgtatttttagtagagatgggatttcatcgagttagccaggacggtctctatctcctgaccttgtgatccgcccgcgtcggcctcccaaagtgctgggattacaggcgtgagccaccgcgcccggccagaaatattctttttttttttttttttttttttaaacggagtctcactctgtcgcccaggctggagtgcagtggcgcaatctcgactcactgcaagctccgcctcccgggttcacgccattctcctgcctcagcctccggagtagctgggaccacaggctcccgctaccacgcctggctaatttttttgggtttttttttttttgtatttttttttagtagagacggtgtttcaccatgttggccaggatggtctcgatctctagacctcgtgatccacccgcctccgcctcccaaactgctgagattacaggcgtgagccaccg

SEQ ID NO: 1561505 - DNA, 4001 bp, Homo sapiens
taggaaaaggggagacagtgattcacaactgaataagtgactgccctctggcaaatagggattccaagtggaacataacctctgatgccaagatttatagaatgtacatgtcttatagatacgaattttaaaattctcaatctcatctgtgtaatttaaacaagtttttagttattagattatatatacagaactcaacatgtcacaaccaatcatatccaatgaactcacccactcatctgaacccagtctctcgcccctttttttttgtttggagacaaggtctcgctctgacgaccaggctgcagtgtagtcacatgatctcagctcactgcagcctggacctcctgggctcaagtcatcctcccagcttggccaccagagcagctgggagtacaggtgcacaccattatgcccggttatttacttacttttttggcgggggggaggtctcactatgttgcccaagctggtctcgaactcctggactcaagcaatccccttgcctcagtctcctaaagtgtggagactacagactacaggcgtgagccactgtgtccagaccctctttcttcattactgtgcttccctccctaattctgtacatatctctcattctccccttctctctctagctcttgttttcttttctttttccctgggattctgctcttcattttgtacccctctcctctcctgctattcatccccttcttccctttattccttctcttccacctcttctcctccatcctcacaacttatttaacctcttattgctccttctccccaatctttcaatcgtcctcaatctccatctatttctgcctcttctcccatctctgcgcctcctctgctctccctgttaaattccatcttccccgatatactcccttgtccccactctgtgtctccccagatcccagctgtcctctctgctgtggttctccctctgttctccttgacacaagcaccactctgctctgtctgccctggctccaaatccttccctctctccctcactctgatgagtctccctctttgctgccactccccctaccttgtgatccttcatctctctgtacatctatctagcctttctctacatttctccggttgcttttctcctcctgctttcttaggtttttttttttttttttcacttctgccatctcttggcatatccctcaccaatcctctattttgccatctgttatgggcctttcttattcttcttttctctgcctcaggttttctactgctctctgtctcctgattcctttggcccacacaatcgcaacacggtttggagtaagacgcctgcatcccggaggagcgcattttccacgccctggagctccgcaggcaagaataccccgtgccgcaggacaggcccctgggacctccccagtgcaggttcaatgaaagcggtgactgcggaggggagacctggggagcagcaggccccggcatgaggaggaaggtgcggggcggggggggggggcgcgacggcgccttaggaccaggatggggtctgcaggatcccaggacctggcagaggactcggcctccccgggactggggctgcggcgcggcgctcccggggctgaggagggggaggctgggaggcgccctgggcaagaatccacatcgcgggtgaagactttaaaaagcgcggggcgcgaggagtcagaacaaggttttcagcaggaaaactacgcaacagaaagtgtatacattgacctatagcagaaagaccggggacgagaccagcctcaggacgactttaaacccaaaaggaagcgaccctcgggctctcacggggatgtctcaatttgctctgggcaaaggaagacgccggagaatttccaggtctgtggggaccccacgtcccagggacagaagccctgggaacctagttagcgcagacttaatacaacacagagcaaaactcaccgcggcgatatgacctacactccacccgatccgcttccgggtttgcgttaatctgcgcgcgcaggacaaaagccaggcctgggcgggaagtgggaggtaggcggggcctgggcgaggtaggggcggggcgcgaggcggagagaccttgccttttagaaccggcagagggcagggccggggcgggatctgcgcgtctctcagcctcgctcccagcgtctctgttttcaggttttggaggcgagagcgccagaaagtctgaggcatgatacaaaagccctgttgagagaagagagagaccctctgacattgttttatattgttttatagtcagtaaaaacaacaggaagtaaaaccaaagacaggcagccccgcgccaggcccgaaaccaggcctggatccgcctggcctaaacccagtagttaaaaatcaacttatgatttagaagctgatgttaggcatagattccagacattgtatagaagaacacggtgaaactcctgccctgttctctctctccctgatcaccggtgcatgcagcccctgtcacgtatcccttgcttgctcaatcagtcactatcctttcatctgaaatctttagtgttgtgagcccttaaaagggacagaaattgtgcactcggggagcttggattttaaggcagtagcttgccaatgctcccagctgaataaagcccttccttctacaactcggtgtctgagaggttttgtctgcgactcgtcctgctacactgtaattgtctggaacagggatacaaactagaatgtgaaatgcaaagccctgcctgggcggtatgtaccatgtcatgctgaggtcccacagaacagatagatatcctctccctttctattgtccattcactccggaaggagactccgccctgtgctcagcttcagagacttccctgaagccaccgcctggaatgccggacggagtgctcaggccgagaaggagtgaggtcaccacctgctgcttaaagacagcagaggcgcgggggcgggagcctgaggtcccagctactcaggaagcagcggcgggaggatccctgagcctcgggttccaagccagcctgagcgacaaaataacgcccactgccgcggtctccctttcttgtctctctctctctctttttttttaaaaaaaactttcgcaaataaaatttttgattgtgtgacatagggatccaacattattcttttccatgtggatatccagatagttgtcctagcacatttatggaagagatctattactttcttgtattattattattattattattattattattattatttttgagacagagtatttctctgttgcccaggctggagtgcagtggcgagatctcgactaaatgcatcctctgcctcctgggttcaagcgattctcctgccccagccttgggaacagctggcattacaggcgtgcgccaccatgccaggctaatttttgtatttttagtagagacggggttgaccatgttgaccaggccggtatcggactcctcactccaagttatttgcctgcctcagcctcctaaagtgctggggttacggcgtgagccaacatgcctggctaattttttgtatttttagtagagatgggatttcatcgagttagccaggacggtctctatctcctgaccttgtgatccgcccgcgtcggcctcccaaagtgctgggattacaggcgtgagccaccgcgcccggccagaaatattctttttttttttttttttttttttaaacggagtctcactctgtcgcccaggctggagtgcagtggcgcaatctcgactcactgcaagctccgcctcccgggttcacgccattctcctgcctcagcctccggagtagctgggaccacaggctcccgctaccacgcctggctaatttttttgggtttttttttttttgtatttttttttagtagagacggtgtttcaccatgttggccaggatggtctcgatctctagacctcgtgatccacccgcctccgcctcccaaactgctgagattacaggcg

SEQ ID NO: 1561506 - DNA, 4001 bp, Homo sapiens
ggtactatctatcttgttgtgtgccttttttttttttttttttttgagacggagtctcgctttgttgcccaggctgcagtgcagtggtgcaatctcagctcactgcaacctctgcctcccaggttcaagcaattctgcctcagcctcctgagtagctgggactacaagcatgtgccaccacacccggctaatttttttgaatttttagtagagacaggttttcaccatgttggtcaggtggtcttgaactcctgacctcgggattggccaggcttggcctcccaaagtggtgggattacaggcgtgagccactgcacctggccgttgtttgcctgtcaaagtgagctcccaagttcttcagaaatacatccctgggccgggcgtggtgggtcacgcctgtaatcccaggactctggaaggccgaggctggaggatcatctgaaatcagaagttcaagaccagcctggccaacatggtgaaaccccatctctacaaaactataaaaatcagccaggcattacagcgggtgcctgtagtcccagctacttgggaggctgaggcaggagaatcacatgtacccgagagacagaaattgcagtgagccgagatcgcaccatttaactccagcctgggcaacaagagtgaaactccatgtccgagaaagaaaagaaaagagaaagaaagaatactaccctcagaaaacagaaaatgcatttgcaaattttctaaataaatctcctaagaaaagaaatgaaaggaaagaaaatctctttctttattttcaaaggaggaattaaacctctcatttacttccttgtctgtttgagatagggtgtagctcactcacccaagctggagtgtggtggcaaaaacagggctcactgcagccttcaactccctggctcaagtgatcctcccacctttttcatcaagcatttggaagagatatctacaaaatataaacaccaatacgtttccaattaagtccagacggtaaatcatactgaaatgtgtaaatatgacacaataaacaatacttactttaaacttcccaaacataatcttcaaagtttaggaacataaaaggagtaagattctttaataaataaagggagattacatgtccttcaaatcatttctatggaagcctatttccaataccatgacaaaacactgacagggcaccaacatgtgtaagcctaaagtaaggactgtttttccactgtgaccctaaagtgcatcacagtttgcaaaaaacatatcactgtcacattaatgaaaagtatatattcttcatatttacagaatatcttctgtatacaaataaatgctaaaggaccacaaaatatactatactggtaaataatccacaacaagctcatgtaagggtaaccaaaatcaatggaaatgctgtattgtcaaataatcatagcacaaagaagataagaaaagattacaaaattagccaggcatggtggcttgcgcctgcagtcccagctactcaggagactgaggcacaaggatcgcttgaacctgggagggaaaggttgcagggagccaagattgcgccactgcattccagcctgggtgacagagcgagactccatctcaaaaaaaaaaaaaaaaaaaaaaaaaagaaaagaaagaaaaagaaaacaatgttaatacaatatttttctgaatacctgtcataaaattacctataaccacacagaacaggcacttattgaaattaacaagtgcagtgtatcagttatattacatatcacatactgaaaagccatatgtgaaatcttaaatattagtcagtaaactattgtaacccatgataaaaccagcaagcaaataagtacatttatataggctgcagaattctaaacaattccctcttaagaaaaaagccacaacttttgcttatcaccagcacacaatataagaattgaaatacgtgttaagatcactatcttctgatgtatgagttcaagtaaatacacagcattataaggaataagaactgactaaccatgtcggagggtgcaattatgatgtcacaggtacagctgcatatcaccaggcaatacagcaattttgtatatatgcattgtccttcgttatctagtcaactgtgcaaaaaatatagaaagtgtactgggaaaatttatcaactgagatcacagaaaacattgtataaaacaaattgcacaataaaaccataaaaaacatgatgtaggccgggcgcggtggctcaagcctgtaatcccagcactttgggattccgaggcgggcggatgacgaggtcaggagatcgagaccatcctggctaacatggtgaaaccccatctctactaaaaatacaaaaattagccgggcatagtggcgggtgcctgtagtctcagctactcgggaggctgaggcaggagaatggcatgaacccgggaggtggaggttgcagtgagccgagattgcatcactgcactccagcctgggcgacagagccagactccgtctcaaaaaaaaaaaaaaaaaaaaaaaaaaaaaaaaacatgatgtaggctccttggtctgaaagattatattggccaaaagcgatgttcagagttgtgtccaataggatgttcctgcagatggggcctgtgagagaatttggtcatgggtgttgactacacatgaataggtctagtgcttttatttttattatttatttatttgtttactttttgagacggagtttccctcttgttgcccaggctggagtgcaatgtcacgatcttggctcaccgcaaactttgcctcctgggttcaagcaattctcctgcctcagcctcctgagtagctgggattacaggcatgcaccatcacacccagctaattttgtatttttagtagagacggggtttctctattttggtcaggctggtctcgaaccacctacctcaggtgattcacccgcatcagccttccaaagtgctgggattacaagtgtgagcccccgcacacagccaagactactgcttttataaagagagacattaaagagctgattgttatttctttttgtttgtttgttttttgagaccaagtcacgctctatcactcaggctggagtgtagtggcatgattctcctgcctcagcctcccaagtagatgggactacagatgcatgccaccacccctggctatttttttttgggggtgggggagacagagtctcactctgtcacccaggctggagtgccgtggtgcgatcgtggctcactgcaacctctgcctcccagctgggtccaaataattctcctgcctcagcctccagagtagctgaaattagaggcgtgtgccaccacgctcagctaatttttgtatttttggtagatacagggtttcatcatgtaggccaggctggtctcaaactcctgaccttaagtgatttgctcccaaagtgctaggattacaggcatgagccaccacgcctggctttgatgttcctttctttttctttatttttttttcagacggactctagctctgttgcccaggctggcatgcagtggcgcaatctcggctcactgcaacgtctgcctcccgggttcaaacaaacctctgcctcctgagtaggtgggattacaggagtctgccatcactaccggctaatttttgtatttttttttttgtagagatggggtttcactctgttggccaggctggtatcgaactcctgacctcgtgatccacccaccttggcttcccaaagtgctgggattacaggcttgagccaccgtgccctgatgtcccttttgaaaactactatgggctaggcgtggtggcttacgcccgtaatcccagcactttgggaggccgaggcaggtggatcacctcaggtcgggagttagagaccagcctggatcaacatgaagaaaccctgtctctactaaaaacacaaaattagccgagcgtggtggtgcatgcctgtaatcccagctattcaggaggctgaggcagtagaa

SEQ ID NO: 1561507 - DNA, 4001 bp, Homo sapiens
ttacaattgcaaaaaaattaaaaactaaggtgctgatgagggtcagggagaaacatgtttgggtaaacatagaattgtaacccattcttaaaagtgataagtgaactttttaagtcttaaaattctatctaaatatatccatacacttagtgattcaagtcacagtggtgcagttttgcctcttgatggtatactattacagaaatcttaaaaaaaaatttttaaacaaaaacatggatgatatgtttactataagaacgttcataatgtaaaattaaatacggcaaattataccaatgtttcagcagcttatctgcattgtgaaaatcaagcatagaaaactgaaattgaaatatacaaaaatcttatcaaaagtcattactggggaacacattttgggataagagagatgttttacttgtgtcagaacctgaaagaaaatatttacgtgtgtgtatacacacattcacacagtaaacctgaggaagaagaacgaaaatctttaatagaaaccttatcattttcttcgttttgttttttcctttttcttttctccttttcttttcttttttttttttttttgaggcagggtctcactctgttgcccaggctggagtgcagtgctcaatcatagttcactgcagcctagaactcccggggtcacgtgatcgtcccacctcagcctcccgagtagctgagactacaggcgtgtgttaccacacccagttaatatttgtattttttggagagacaggctatgttgttcaggctgatctccaacttctaggctcgagcaattcgcccactttggcctcccaaatgctgggaatataggcgtgagccaccgcgccaggccaccttaccattttagatttgattaatctttgatcttccccaaagctttcctatttaccaggatgagagaaaggagagatgtgagaagtcaaatgagatttgtaaaccagtccttgcagagaaacttaaaagggactgagagggaatgtaccgttggacctgaacacacacaccaatcaggatgccctggctgccaaggcttcagccttcacaagcttctccacgactgtcacatctagacctccctaacatggtcacacccccttagattaatccaaaaacctggaccacacacctaggttcacatgaacccgggctcctcctcactgagtcgcatattaaatcctgattacagcctggagcgaaggctcacgcccgtaatcccagcactttgggaggccaaggtgagaggatcgtttgaggccaggagttggagaccagcctgggcaacatagtgagacccccgtctctgcaataaacagatagattagatagataaattagatagatagatagatagatagatagattagattagacagattagatagatagatagatagatagatagcgtggtggcgctcacctgtagtcccagctactcgggaaagctgaggtgggaaaatcacctgagccccgggagatggaggctgcagtgagccacgattgcgccactgcactcaagcctgtgtgacagagcgagaccctgtctcaaaaataaaaaataaaaccccgaatccgaagcagacacagttttccttgacaaaaaccactcctcactccagtcctcaatcaccgagccctacagagtgacccgcaaaggcaccaaaccctgatcacggacttccaagtgttgctctggacagactctgaccaccgaccactgggatccctcagggctgactccggagacgccccaaccccaataccccgactcccacttgctcccgcttcccccacaaactccacggctccgcactaaacggacgcccacagacaccctcctcccctcatcctgacagacagacccacacacagacctgattttgcggggaacccaccgagacttcccagaacctgcactttcctgaattattccacttctgggccctcccccagcctccaagccggcctacggcggccgaggaaggtctgaagttgcaggtgtacggagcacggacgactgggaggtagtaagttcgcgtcctctcgtcacggatactggaggcagccatctttgaatcctgcacgtacggaaggtaaagtggaccttttctgcccaagtattcagggatagcgcgggacggtgaagaactccatattttggcacctaaatcctgcgcccaagtttcatttattttcagagggtcgagcttagccaagacaaacatggtatggctacgtgcaccttagcgggctggggagaaaagtcatccgctttgcacaaagaatgacgggaatgacacaatgggcgcggccatcttaacacttaggtgtccgtacaagtgaaaacgctttctccacagaggaaaaagagcaatcgcaccctgagtcatataccgcgaaaacgcatctagctacatgtggaggacaagaggaagatttttgaggaccaaaagggtgtggagaggcaatcgaggtacgaggatattgttcaccccgtcaacggaaagtgaaaaaacagcgacccctggaacctcatttacatttgagggacacggtcaccgcccagtgcaggtaaagagagcagccaccagccaaccggaaaaggaatccaatgcgggaggcgggaattttccttaagagagaagaagggccttccctctgctgtaggtggagtcaatcttaacgtcggggctttcggagaaccaagtgcctaaaattctggaaggaataaataaggcgactctgggagaatgaaaagttgtgcaagcccgggcgcgatggcgcacacgtgtagtcccagctactggggagaccaaggcaggaagatcgcttgagcccaggagttccaggctgcagtgagctatgatcgcacctatcaatagccactgcactacacagccttggcaaccccttcatgaggaaaaaaagaaaaaagaaaaaaaaaagttgtgcaagaaaagtaatcataggatactacctgactgacctataaatattatttacatagtcatcataacgtaaattctaattctgatccaacctaaattaagacaattccattggaagaatgagaaggaaattcctgcatgcagtggagtgtttatatttataacagagttttcacgtgtccttcatgatacatctatagaaaatgccccaaaatgcaaactccatttcagaaacataccgtgttacttaaaatatcaaatctgtgaagagtgaaaagctttacagaactatatgactccttaggagaattgcaaaataaaagcaagaatcttatgactcaggaattccactcctagatacttatacaacagtaatgaaatgatatgtcctcacaaagactcacaagaatgttcttagcacctttatgcataataccctgaacaggaaacagtccaagtgtccatcagtacatgaatgtataagcaaattgcagtgtaatcataccctggaatactactgaacaataataaaaaacaaatcatagatgcatgcaccaacatagataaatctcaacaaccttatgaagggggccagcctctccacacctgtgggtatttctcatctggtgggatgagagactgagaaaagaaataagacacactgacaaagtatagagaaagaacagtgggcccaggggaccagcactcagcatacgaaggactcctgccagcactggtctctgagtttcctcagtattcattgatcactatctctaccatctcggtgagggggatgtggcaggactatagggtaatggtggggagagggtcagcaggaaaatatgtgaacaaagttctctgtgtcataaataaggaaaggtgctgtgccttgatgtgcacgtaggccagatttatgtttgactttacacaagcatctcagtgtagtatagagcagtattgctgccagcatgtctcacctccagccataaggcagttttctcctatctcagtaaatagaatgtacaattgggt

SEQ ID NO: 1561508 - DNA, 4001 bp, Homo sapiens
gtgcttgaaggcagtatgcttggtaaaagtcatcaccattctctaatctcaactacccagagacacaatacactgcggaaggccgcggggacctctgcctaggaaaaccaggtattgtccaaggtttctccccatatgatagcctgagatatggcctcgtgggaagggaaagacctgaccgtcccctaccccgacacctgtaaagggtctctgctgaggaggatcagtaaaagaggaaggcctctttgcggttgagataagagaaaggcatctgtctcctcctcgtccctgggaatggaatgtctccgtgtaaaaccccattgtctgttctatttactgagataggagaaaaccgccttagggctggaggtgagacatgctggtggcaatactgctctttattgtaccgaaatgtttgtgtgcgtgcacatcaaggcacagcacgtttccttaaacttatttatgacacagagacctttgttcacatgttttcctgctgaccctctccccactattaccttattgtcctgccacatccccctctccgaggtggtagagatagtgatcaataaatactgagggaactcagagaccagtgccagcgtgggtcctccgtatgctgagtgctggtctcctgggcccacttttctttctctatactttgtctcttatttcttttctcagtctctcatcccacctgacaagaaacacccacaggttgtggaggggtggcccccttcaaggtgaattctcagacagatcaattttaggaaagagaacacatggaaggctccaagaatgtctttaaaaaccacgtgtgcccatgtactggttcgaaagtctctgtaagctctttgggtatacatacctcgtgtcaagaccaatgtactaagcaaatcacaagaactgtctcatttcacattatgcgctaaaggagtaactttacccaagagagctttgtcctttgcccacagttcctatgaggcaaactctaagcctttggaatacgctgcttgataaaactgtctttggttatcagggcaatttaagccatgccaaattgtctatcctaataatgtgatttactgtgggagaccttggaccacgtggtattagtttgatatctggaggagctggagattgaagtcagcctcataggcagtcaattgtgtgtgtgtgtgttaactgatatccaataaaactctggacaccaaggcctaggtgagtggcaacaatggttacaatggctggcaataataatataagggtgtatatataagaatatgataatttaaaaacgtatgaagcaaaacagaatgagagaggattagacaattcaacaataataattgaagactacattaccctacttgcaataataaagaaaacaaatagaaactcagcaaggataccgaaaacttgaacaacattatcaaccaactagacttaacgaacatttaacactgcactcaacagcagtaaaataaacatttttttcaagagcacatgttatattcttcaggaaagataatatcccatgtgatagcctgagatagggcctcatgggaagggaaagacctgaccgtcccccagcccaacacccgtaaagggtgactcacaagggccccagacccagacagagtcggactcgtcgctgatttcctcagactcttcatccctacagccaaaggacccgtcattaacgccccgcttcctcagcgactgcgttcaaatacagccccaatcaggacgctccacgcaccatcggtacacagacccacaggccgcgagtccatgcccagaactcgactcacccgagcccgaacctctccagacaccactggcagcgacaaaacgccgcatccacgtccgaaaacgcttcctattcagacgcgctcctgcgcggactccgggaagctgagcggtaaagaccgtgaagcgaggcgaggaccacggagcctgcccgggatcgcgagttcagactgcgggcgccgctctatgaggtcacagggctgcgcccatcgcagcgtttctgacaggagcggccataatggctgtgggaatcactcttagtcacctcagtgcctttctctcttcgttgcaagggacactcaagagtcgggtgcccagccaaggccaacacggcgcagtggcattctattcagcctgctgtggaaaaaagatggcggcgccctttgtgcccattatagctgagagtggagccttagctggagcaccatgggcacggccatcttagaggaaggcagcagccgtacggcagagaagatgctcatatccaggacaatttggaaaaataaacaaggtttgaagaagtcacggtgctggccaggaagcggtcacagagttgccaaaaccagtggtcactgaaagtgttagatttggggatagggcgggggttctgggctgggtaaggcttttgtgggttagattagactctgactgaatggacgaagccgagaacaggagtgatgctccattaaatgctaatacccacatggggcttgctattaaaaccactgccagtggggaaggggatgaggaggtgaaggtgcaactgtgttaatatctacatgtttccttccagaagtaaaggaagatgacagtggggcacttaagaatatgaaattattagaatgcgatcatcctactttgcaatgtttccagattttttaaaaagtcacacttaaaaaatattagttctatttttgcagatgttggcgttgtaactgtagaagatttaagtaaatattgtatttttggaaggcaacctagagccaatttaattttttcgttttctttgacacagcaattctaaaagctatctaggcaaatctgtcttaatattaaccacaacttttgtaatttacaaaaaaagggaattacaatgagagatgaatactttggtaaattatggaacatctgctgaactgtaagagtatatatcaatttaaaagaatatgctacaattgttttataaaaaagaaaactttgtcagaggacaaaaaaatgatctgcaggatagtatatattttatggtcttgttattggaagaaatcataaacatcttttggaaaattgtgattggttaaacaagacatttagtttgaattaatattgtttgtgttcataggtagagaatgccatgtttttacttgaaaaatattcccaatttatacttaattttactatctttgtaccataatcatgaatatattataaaacatgttgatcttagaaaataggtatgatgatgtataataagttcatggcatgataaatgcaaaataggctgttttctttcagaaaataaatatgctcatgcatttgaaaaattctggagaatatactaacaatatttgactgttccgtacaattatggtgacttaaaatttcttcattttacttacgttttgtaatttctagagaataagaatttcatgttcgtatttcttgagtgttataacatattccatccaggattaaatttcagccccgttcatctggaatgttaatctctggtaggtaagtttagcacctggtccacaggactatgagcagcccatgatgggaccttcactgatcatttccaggagtgggctgataaaactttgccgtggcaggctgtgctgattcacgggacaaggaaggtgattcaagggcctggttggtggagcacttttgtctgattcattgctggagacaatctgccctgaatccatcctgttacagtgtgggaatggtgatgggagcaccaatccacaatttagggcagagatgttcaaatttaagaaggctctttttataaatgcagagtccgaaccccatccccagaaattctagcttggaatgtctggggagtgactcaagaatttgccttcttttacaagcttctcagagaatgctgaggcaggaaccccaaagaaaacacttagaaagttctatagtgttctggacttaaaaatatgatggctgtgtcccca

SEQ ID NO: 1561509 - DNA, 4001 bp, Homo sapiens
ttaaatgttttcattaatagaaaaaagagagaaaccaggcgggaggaagggagagaaaaaaatgaatataaatacaaattttacaaaagacaaaaccaaaaataatcctcagagataatcgtgaggaaaagatgtttaactcctcttttggccaacaagtaaagcgacacaagttatgccaatcacacaatgagcaagaagcagaatcagggctgaaaatccacttttgtttcacttcaaaatccacttttactctactttataccgaaccaaaattatctgtaaatcagatgcctccctattaagtaaataaataaagcaattaaagggctattagtagaattctagttaatcatatacagaattatttagaggaatggtacttatgtctgtaacttactttgaaatataccaaaatcgacaacaaataaggaatgattcacaaacagaggaatggatgaatacttagaaaaccagtagagctgatctaatacaatgttaatggtaaaagctaggtggtaggcatattggtattaacattaaacttctttcaatatttccataggttcaaaaattttcacaaaataatatgttaggcagagagaaaaatattgtaatactaagaattaagatgaccaaatataaaataaatatttaaaattaatttatcttttgttatagattataaggaaaggggagtcagaaagcaatacactgcaataaaagtaatagtctagattgaagattaaaggcaggaaaaacaaaattcatggataaatggataatcataaaatgttcctaaaaataatacctaaacattttaaaacatttcacttctatccaaatgtacgcataaacttaatgtgaatgcacttatagtaccaccggctcaaacagtaaaaacaacttctaaatgtttattacataatataaagcgaaaaagataatagtaccatttacataatttatctgaattatgaatattaagcacataacatacacgtctaaaattgaaatattctgaaaatttgacaaaggttatctttgagtaaccgagcttaccatggcagagatgttatcttacttgtgtcagaaagaacctgaaaagaaatatccaagaggatacgctggaaacttgcaggacaaagggtagaagccgcatcttaaatataaaacatactacttttaggtatgctagatgactgatctcgccaaaaacttccatttctgaggattcaagaccaaggggtgatggaaggtgccaaaggggatttaaaaaccagtcgtggagaagggtcttgggcagaaggggaatgctaatgagcatcaattctgttccagcagccagggctggggctaacccatcacctgccatggttcccaggcctccagagctgcagcccacatcggaatctgtggcgctaccaccaccgccaccgggattaattccaaaacctggatcagaaacctccgtaccttaacccccaagacagttcctcaatcatttagtcccaaacaaaacctgaaccataaaccgattcgctgacaaaacaaaccctccagttcgcaatcactgagccccgccaaaggacaacaccaaagacaccagaatgtgacttgggcactcagtagcggatctctagagatctttaaccacaaactacacgaggaccctgtgactggtcccagaggtaccccgatcacacacacacacaccctatcacggacctcttgtagttcccctgcgataggaatcggacccacgctaagctcctgaaagaattccactggcgtcgccaaacgctggcgccgacagataccagtccatcaccactgtccacgaacacgcccagccacggacagaatttcctcccccgtcaccacagcgaccacccagtgactgaacttacttcccagaacttggtgggctccggcctcatctctcggcctcctcagtgcctgacggcgactatccagggtcggaggcgttcccagcgtttgcgcagatgcaagatggccgcgccctcgtcgccttggctccatgggggccgccatctttgagtatctgacgtacacaaggcaaagggcgcgttttggcgctggtgaccgggggtgaccgggggtgaccggggatggccgggaagatgaaagagcactgaaactgtcccatttcctggcacctcaacccttcataaatacgggtccatatacagaggctccagtttacacaagacaaaaatggcgtggaggtaaatccctttcagcagctgaatagaaggctaagatggccgcgacgtttacactttgtacaaaggttaggaaacagttccttgtgagggaaaaggagaaccggccgagaggggacacttcggccaaagccagatttctaacaaagtagcttgaagcgccttttgaacgcagaagagggctgttagctacgctgacggaacaggggtagcagtcacagactaggtaatgaaaacggttggaacgtgccaaaattatgttgggtgaaaggcatggggaaaagccagtaaaagccagaaagtatagttcccaaggcggaggggagagcctgggacccaggtggagccaaatatgagggctggactcaggagaagtggccagaaattaagggaacaggaccacttcagtgagaaaaaaaaggttgggaaagaggccgggcgcggtggctcacgcctgtaatcccagcactttgggaggccgaggtgggcggatcacctgagagcgggagttcgagaccagcctgaccaacatggagaaaccctgtctctactaaaaatacaaaattagccaggcatggtggcgcatgcctgtaatcccagctactcgggaggctgaggcaggagaatcgcttgaacccgggaggcggaggttgctgtgggccaagatggcgtcattgcactccagcctgggcaacaggagcaaaactccatctcaaaaaaaaaacaaaagaaagaaaggttaagaaggagatcacgttatactacgtgtgccaaccgcgaatagtatgtgcaaagtcatggcaatgctgaactgtaaatataaatccaaccaaacttcctatattagaagaatgagagaaaggaaatgcctgtgtgaatctatgtgtgtgatataggtatcagtatataaatatacagagaaattgtcaaactatttttcagagtcaagttcgtgttccatttgctcttctcacccttggtatatgagagtttttctttttttttgttttttttttgtctctttttgaggcaaggtccactctgttgcccagtctggagtgcctggggagatcacagctcactgtaacttggaactcctgggctcctgaatagctgggactacaggtgggcaccaccacacctggctaattttttaattttctgtagagacaagggtctcactatgatgcccagctggtcttgaactggcctcaagcagtcctcccacttcatcctccaaaagtgctgggattacaggtgtgagccacttcacccttcacccggcctataaagagatctgaaaagaaataagaaaaaagatgggcgcggtggctcatgcctgtaatcctaacactttgggaggccaaagcgggaggattgcctgagttcaggagtttgagatcagcctggccaacatggcgaaaccccatagctactaaaatacaaaaaaaattagctgggcatggtgtctcaggcctgtagtcccatttacttggaaggctgaggcacgagaatcgcttgaacccaggaggcagaggttgcagtgagccaagatcatgccactgcaccccagcctgagagacagagtgagactcttgtctcaaaaaaaaaaataaataaaaataaggaaaagatgatcaacttaaaagctccctaaaattttctataaatacatgaaggaaataaacaggacactttttttaatgtaaatgatcctaaacaatttaaaaaataccagttttactaatattcaaa

SEQ ID NO: 1561510 - DNA, 4001 bp, Homo sapiens
aaaaaagtaaatccattaacaaaacaaaaaaccaacactctcaactctccttcaaagacatacattgtaggcctgtagaggtggttcacacatgtaatcccagcaccttcaggggctgaggaggatggagtgcagctgagaggctgcagtgagccgatataattttaccgcactccagcctgggcgacagagaccctgtctcaaaaagagaaaaaacaaacaaaaaaccaaagatacatcttgtagtgacagtcagtcatttcttgcctatttctctcctcctccatcctctactccctccctggaaagaagagttacaaaatgactgaatcaagtcactgccctgtggctaaatagggattccaaatatcttttgatataaacaaatacaaaatgcacaagccttgtagaaaagagtggtaattttcatcctcatgagtacaatttaaagaaacaaattttaaattagagtataaagtcacaaatcaatacattaaaaccaccatccatatccaatcaactcacagctcatctgggtggggtcctcgcccactctcttcactactatgtgtttcccgctctcattctgcacgtcttttttccctttgctgtttttctcccctttctttattccctcttttatgtctattctgcccaatgcttcgaaatttatttcacctcttgttgctctttctccccaaactttcccattgtccccagccgccacgtattcctgcctcttttcccccatctgagctccctgtctgctctccctgttaaaatccctcttccctgttaaattcccttttccctgttacatctcctttgttcccactctctagcacccccaacttcctaggcttcctccttgctgtggttctccctctactctcctttgttacccactcccctctccttcagtcccagcaccacgtggctctgtcagccgcggctccgactcttaccttttccgccccccgcgtctgactgcagtgcctcctcctttgccgcccctctctattttgctgcccttcagctccctgaagctctcccttttccctaatttctttatgtgcttttctccccgtgctactttctccatgcgtcctcttgcactcttgctctctttgccagtacctaaattatcatccattttgccgtgtactcattcttttctccccagtttttctttctgtcccgtcgctccccctcttttcctctcctgatccctctcacccacacattcaggaggaaaggggaggaatacgatgcccacctcccggaagagcacattttccagtggagtaaaaatttgggaaggaacgacagtgggtgtcacaagacagactcgggtgacctcctgcaacgcggagtcaggaaaagcagtggctgtgaaggggcagcctggggaggggaaggacccggcgtgaggaggacactaggtggcgcgcggaggacactaggtggcgcgggggacggtgtctcaggacagggagggtctgcagaatcccaggacctgggagaagaagcggctccttcaggagctgggcagcgggcgctcccctccaggcgtcgacaagggcgaagctcgggggtctcgactggtgggaatccacctcgcgagggaggacttgacttcgcccggggccgaagcaggggtcaatgagagttttaagcaggaacacgacctgaatggggttatcgacatggttatctacatggcagaaaggcagggggcaaggaacagcctgagagagattttaaaccgacagggaagcaattctcggacttacgtggggagaagtgcctgttgcaggggcgaaggggctatgggtattttaaggtccgtagcgatccccagatcactggtacggagaagtgaggactgcaaagtgcacgtttaatccaggcagacggagcgaagtaatgtttaatccacgtagactgaaacacacacacagcgataaggcctttccctggcgcaatctgcttccgggagtgacggaaactgctagcggagagaaaaaactgggaggccagggggcggggcctgggcgagccgcgaccagcaaggggcgggtcggaaagaggggcctgactcggggagggaccctgagagggtggagccgggccggagcggcagtgggcgtggctaggtggggcgggacggagccgcggcggaggatggggcggggtttcatggggtaagcggggccgaaatagagcctgttatttactctggttcacaggcagcatgtctttggttttctgactacttcttgtcctgtgaagcagcgttgctgcctgcctattttaagttaatgtttcaaaatttaaggttaaagcttaaagttgtggtccacttatattagaaactaagatgatttcttaacaagttgaactaagtcaaaaccgatttttacaagcttggtggactccatccactcttgccgatgatgctgaagctactcaatagtcagggaactaggatctcgctggggatttgatgtggagccgtggctggatccaggaacccggaagacattatgccaagcgaaatatgctagacacagaaagacaaatactgcctgtgcttttacacgtgcaaagtacaaacgtcaaatttacagtaacagattagaagggtggttaccagggctgggggatgtatcctatgcctttatcaccattatattttggaagcagataacttctctggcctcacagattcacagctgggcagaaattttgcctcaggatgaatcacaccttgattctcacccatgtgtggttcagataatatttagggggtattctgccctaagagctgatacaggaatggattaagacttttgagagttgatactgaaatggattaagtcttttgagatgggccagcagttttggaggcccaggtgggcaggtcacttgagctcaagagttcaaaaccagcctggacagcatcgtgagacccccatctctacaagaaatacaaaaagtagccaggcttggtaatgcactcttgtagtcccagctacttgggaagctgaggtgtcagaattgcttgaggccagggatttgagatcatcctgggcaacatagccagacctctctacaaaaaattaaattatctggacatggtggcctgcacgtgtgggcccagcaactcggaagggtaaggaaggaggatcatttgagcccaggaggtgaaggctgcagtgagccatgagaagaggagatttggttgggtgcagtggctaacgcctataatccccacactttgggaggccaaggtagcagggagctaacttgcattcttctgttagctgaggcgtttgatgataaatgaaagcagaaagtttgtgacttatttacgttctttccacagaaaggccatatgtccttggccataaagaaaaagagacctacagcttatctgcttcctctatttttttttatatgttctggaccatgaagaaagatttatagcttatttgctttatctctttgctttctcctggtcctttcaggctgactccttttccccaattagggctccacagactctaccctcaaagggcatttttttctcaccctcctataaaatccctcccacaaataaaccaggatcctatttcccagcatgaaaagtttgttggaaaaaaaactgaggctgcatgggaccttctttctcttcttcaaaactacttcacctcttctctcttttgtctctctcttcctaactgccctgcacaattctaggtccccagtgaatccttgggttgacatgcaagggaagaacccatagggaaaggaaatctctggctttcagagataactttttggatatctggatgcattcataaccatccttgtgttaccagaaaggggtcctgatccagaacctgaaacttccattgcacaattataactgagaaaattattacagtgaaagagatctgacctaatcaactccatcttgcttttaacctccaagctgc

SEQ ID NO: 1561511 - DNA, 4001 bp, Homo sapiens
aactaaaaataaaaacctaagctccccatcccaccccaatcaagtcaactgagtggctctttaccaaggggaggccccccaaaaacctgaaagttcccagttacattagtaagggagatcagacactccatactcccttctggagtttagacacagcaactgacccacattcatattaaaatagacataagacctgcaaagaggccgggcacagtggctcagtcctgtaatcctagcactttgggaggcggagggaggcggaggcaggcggattatttgaggtcaggagtttgagaccagcttggccaacatggtgaaaccccatctctactaaaaatacagaaattagccgggtatggtggcgtgcacctgtaattccagctacttgggaggctgaggcaggagaattgcttgaacctaggaggcggaggttgccgtaagccgagattgcgccactgcactccagcctgggcgagagtgaggctccatctcaaaaaaaaaaaaaaacctgcaaagaaaccctttgtaccaataaatactaaattgcaaacaagacctaaggccatgcaaggcaagggtaaagtcacgccttagaattcataaaatctagtgaaacatatctgttttttggtggggatggaatcacgtggcaggtaacagactcccttcacttaaacattccttcctacccctttcaaattttagacacaacttcacactctcagccaactgccaactacagaatccctcaaccacctgtgccttctaagccccgcttctacgtgtcctgccctgtcagccttccatgccttgattgatcttttccctgcaattcctgtctcgctgaaatgaataaaaccaaactgccatcgaacctcctggggaccacttactcgaggctacatgcggttgtttcccttggtcacgttctctcatattcggcgtagaacatagttcaagttattttgcagagttttgctctttccgttatcaaactgcaagccatgactgggtgtttctcattcaggaaacatttctcattcatttttttcaaactcctattctgagaagcaaaactctttaatttttaagaggactcagtttagtttgttgctgttgtttttgttttgttttgtttgagacagggtctcgctcagtcgcccaggctggagtgcagtggcgcgatctcggctcactgcagtcccaatctcctccctcaagcgatcctcccacctcagccccccagtagctgggattacaggtgggcggcaccacgcccggctcattttttaaaaatttatttttaatagaaactagggtctcggtatgttgcctaggctggtctcgaatttctgggctgaagcaatccccccgcctcaacctgccaggcgtgacccactgcgcctggccttcaatttagtttttcaggaaaaaaggggggactggggaccccgcagcccaccgctcctcccacacgaaccacacacccgaggcaggattgcctccatgaccctcccgtggtctccgcacaatctggggagacgcgggactacgggcgcggagctccccagagagggctccggggccggggccagggccggggtcgcagtcgcagcgcagagacgggacaggacgcctggggtcccggctgccggcccaaccccaccctgcggccgaagggaccgagggccgagctacgccagggggactccgctctgcagacccgaagtcgctgcaggaaggcctgggtcctgctagagccggttcgagccggttcctcccggcccctcccccgtctcgggacccccggccccgcacactcaccatttcccggcttccaggtgtcctggcctcctctccacggatccctctaacagtccagtcacagtgcgggcgatggagcgacagaagctatggcggaggcacctggtccctctcggggccggaaaaccgagatcccgacctccctttggtgcaagacgcctgggagtcaggaaagcgggaatgcggcctccccttccccggatggacagttggcaggaccccgccccagcgcccctgattggatgaggctccagtccccgtcccatcggtcctgagtgacagcggaagccctgggtaacaaggcccggcagaaccgaaatgacctgttccaaccacagattatctaagcgagctccctccctgcgtcttgctctttgggtatttgcatttcagccaaatttgctccgaattgctagagggggtaccgttgtcttcctcactcaatgggctgtccctgctcctttgtcttgcacaggaaattccagactcagagtccagtggaggtgaaggaaattaaaatattttacgccaaaatatatttatttgacagattttgaaatggctgtggctcggccgcaaaaaaaagtggactggcaaagctgtctttggagggggggaatttgcatctgcagagaatctccattgatgaaaccatgccctctccccctttatttctttccctttatccaagctagaagagattgtgacctgaacacaggcagggtgcggtggttcacgcctgtaatcctagcactttgggaggccaagactggaggatcccttaaagtaaagagttaaagaccaacttggtcaacacaagaatacccctgttttgttgttttttttttttaatttttatttattaaactttaagttctagggtacatgcgcacaatgtgcaggtttgttacatatgtatacatgcgccatgttggtgtgctgtacccattaactcgtcatttacattaggtatatctcctaatgttatccctcccacatccccccaccctagacccctgtttttattatttaaaaatctttacggccgggagcggtggctcacgcctataatcccagcactttgggaggccgacgcgggcggatcacgaggtcaggaaatcaagaccatcctggctaacacggagaagccccgtctctactaaaaatacaaaaaattagtcgggtgcggtggcgggcgcctatagtcccagctactcgggaggctgaggcaggagaatggcgtgaacccgggaggcggagcttgcagtgagccgagattgcgccactgcactccagcctgggcgacagggctagactgtctcaaaaaaaaaaaagaaagaaaaagaaaaagaaaatctgtgaaggtcagaattagagcaagacccatttgggatgcctcctggagaaagggtttatgaatttttatttattattttattttattgtatttattatcattttttttgagacggagtctcgctctgtcgtccgggctggagtgcagtggcgcaatctcggctcactgcaagctccgcctcccgcccgggttcatgccattctcctgcctcaacctcccaagtagctgggactacaggcgcctgccaccacgcccggctaattttttgtatttttagtagagacggggtttcaccgtgttagccaggattgtctcgatctcctgacctcgtgatccgtccgcctcggcttcccaaagtgctgggattacaggcgtgagccaccgcgccctgcgggtttatgaatttaacagtaaatttagcttaaactgactcaagtcgagagcttcctgttggtgaaaatgaaggtcttaaaggagagaataatttctaaactgaggaggggacagaagggcatttcaaactcccagataaatccttaattttctctgcctcatcatctgggactgacccgccctggggggctccatttcagcagtcacagtttggcttccaagcttggaaatatcatttaccttctgacagagggttttccttgtgaactgtgcatgaagcaggctgcttatctgaactacttcaaatgtttgctttacttttcttttgattcctttataaaatattgctgccggctgggcgcggtggctcacgcctgtaatcccagcactttgggaggccgaggcgggcggatcacgaagtcaggag

SEQ ID NO: 1561512 - DNA, 4001 bp, Homo sapiens
agggatggagataagccatctccaatgtaggagaaaagcccttttctgcctacatttttgcaacccatgaagattttttagttagctggtacttcttcctgttgcaatacttcttaggaattcattttttttttacataaatctaatattcttattttagaaagcgtaaaaagtgcctcaaaaccataacaacttcattaccagtaagaccctcccagtttcctttcatcttaatcttgactgcatctgcctgtggggccccagctttccaaggctttgtagcttctttcagaatgaaggctccttccgtggctggggtgagcagtcttgagatatccgcaagggagactccccagaaaaaaataacagggcctttaataacctcctgttggccgggtgcggtggctcacaccgataatgccagcactttgggaggccgaagcgggtctgaggcagagagttcaagaccagcctgacaaacatggagaaaacccgtctctactaaacaccaaaattagccgggcgtgatggtgcatgcctgtaatcccagctactggtggggctgaggtaggagaatcgcttgaacccagtaagccgagatcacgccattacattccagcctgggcaccacaagcgacactgtgtctaaaaaaaaaaaaaaaaaaaaaaaaataccctgttgcaggcttaatattagccttagcttggagtcactaggttcaagctttaatgtccacatcagttattcacttggtttttgaaactaagtgttagaaactccagtgaaattactcacaatgtttacataaaggaatttttaagatgcttactttttttttcttttttttgagccggagtctcgctttgtcacgcaggctggagcgcgatgattggatctcagctcactgcaacttccgcctcccgggttcaagcaattctcgtgcctcagcctcccaagtggctggtactacaggcacgtgccaacacgccgatagttttcgtatttttagtagagacgggtttcaccacgttggccaggctggtctagaactcctgaccacgtgatccacctgcctcggcctccgaagtgctgggattacaggcttgagccaccgcgcccagcaagaaaggggttttgaaccctaatgcagttcctgtttttgtttccatcccctattggctgggatcagaccgcacaatctaagctgatcctggtaagcttagacccaaactttttccaaataaagtaaatgcgcgatttgcgagaaaaggaaaagggggtagaagaagaggtagggttgatttacaacttttacaacttatgaccagaaagttgagtcatttaaaaggaacttagttgtcctaacacctctttacctcaagtgatccgcccgcctcggcctcccaaaacgttgggattacaggcgtgagccacagcgtccggccccatacatttttaataggagaaaagagaaactgtaaacccaaaggaacaaagctcttcccattcatgaacccgcaccccgagtcaggattctcccctgcccaccctcccctggtccctgcacaatctgggagagacgccacgctgcgggtgcagagctgcccagagagggctccaggccagggtagtcaccgcgcagtgaagagacaagacgcccgggtgccggctgtcagcgcagctgccattttatggctgaacaggactgaggccgagctgagcaaggagaactgggggagcagactgtggagctgactgcggggaggcctgagtcccgccacagccacttttcaccggttccaaccagtccctctcctctctcgggatgtcggaccctcactctcaccatttttggcttccaggaggtcccggtgtcttagctgtggatctcccaatacctgcaggacacggggccacacagcctgggcctttaggagaagaaccagacctggagctctgactgcagcgagagacaaaggccgcaccaaacccggaaaccgtcctcttcgctccagctgcgttcctgattggatggtttccagcccaccatccctgattggataatgcttaaggccccgccccctgaggccctgagtgacagtagatgtgatcagacgctgagctgagtgaagaaagagtgacagcctaagctgcagccttttcaggcagggcttccttcctgagctgagccaggcccaccccagagcatgggagaattctatcttttctttactctctctctttttgaatgtattcaaaaggtgaacagaagtattttgctctcatattaataatacataaaatttttgttcaagagaaaatcaacttttactttggcaataatgtattatcaatactaaaggtaattttgataaaaccttataaaaaatcaaatttgtcatttttgacctctcgagatttacatacatattttgtaatctaatgtaattttttaactttttatattttatttttatctacattctttttattttttcaatttgaaacaacctttaagtaatttcaaactgttacaagagacaaagaaatcatttagggccagtccgctggtgcacgcttgtaatccaagcactttgggaggccaaagtgggtggatcacttcaggtcaggagttcaagaccagcctggccaacatgttgaatctcatctctagtaaaaacacaaaaaattagccaggtgtggtggtacacacctgtagtcccaggtgctacggcggctgaagcaggggaatcgcttgaacccaggaggcggaggttgtgtaacggcctaagggcttcatcttgcctagacagagatgattcatcaagacaggggaatttgtggaggaaaagttaaatattaaatttgaactcagttgaacatggacacaaacaatggtcaccaagtcctggaacaggttatgtgagccccttgaggcattcacctgccgaccttcccctggtccctgcacaatctgggagagacgccatgctgcaggtgcagagctgcccaaagtgggctccaggccagggcacagtcacagcgcagtgaagaggcaggacttctgggggcctggctgtcagcgcagctgccatcttctggctgaatgggactgaggccaagctgggcaaagagaactgggcacagattgttttggagaaatctctattttaatctattcctatacgttagttattgaaaaacaatagccaatcgcaaaaaaaacaagttgacttttttgtgttccttgagcccagttgcaaagagcccagttgcaactgggcctcatgccaaacaacttgttacaaaaagagctaggatcccagactgcaccaaagctccaaagacctctccttgtctgtacagggatgggtggccgactctggagcccaggctgttgcttcctggtctgctgatgaatcctccatagtctggtgagtgtaaagatatatattttttctcttctccccttcccattgcaatgctcttattatatcaatttgcttattatatatgcattgccatttacctgggataaagcttgtttacccttaaaggtattgtgtgcgtgtcttttcttctcccctcatgtgtttcctgcacagaacatatttctcaaaggcttcatttgttcctttttattcatttttgtttaatcttgtctgcatgccttattttggcaaggtggtcttcaaactctgatgttctttcttctgcttggtcaatgcagctacaaatacttttgtatgcttcaggaggttctcatgctgtgtgttttagctccatcagatcatttatgttcctgtctaaaccagttattctagttagcagttcctctaaccttttatcaaggttcttagcttctttcaattggtttagaacatgttcctttagctcagcagagtttattacccatcttctgaagcctacttttgtcaattcatccatctcatcctctgtccagttctgcacccttgctgaagagacattttgataactt

SEQ ID NO: 1561513 - DNA, 4001 bp, Homo sapiens
aatccagagggcaagaatcatatctgtttttcccctcaataccatcatccatttggctggacaccaatgtgtcccccaaggaatgggatctggaattaggggaagaaaagctgagtgtcccaggggtgagctttgagagggaggggatatcaagagattcctccgaccccaggacacccagctcctccactaagaggccccaccccgtacttcaggctgtccagtgggagcaggctgataccagacccttcaacagatctggctgctgtgggcatcctgtgtcagcccaaacagccctgaagcccaggaccaggaaaggaggatgctctgaagacatatcacagtttaaagtttccaaaggggaaccccaacccaaagacactgttttttgttttttttattttagggtccgggtctcactatgttgctcaggctggtctcaaactcctggcctcaggtgatcctcccgccttggcctcccaaagtgttgggattacagacatgagccatggcaccaggccaaccaaaagacattctgagaacatccctgtgcctaggagagagaaaaggagaagaggcacaaaggttttttcacagcagggtctcatacatgtattctctgctttcctctcctgtgaaatgttcagaaacagaaagcaaatatttttaaaagaccaatcgattgctccttgaaaaaataatacaaattaattagtttgaaatgtgcaataaaggacaaagagttgataatgtcgtgactggagttaccttttgggaatatggtgaaagaagtggtatcaagaattatttgcaagcgccagaggagtcaggctaggggaacaaggtcaaggatttgggaccctgtccccctggggagtgttaaaataattaatttggagacaattagagggctgtggctatggtgtcctggtttcctacccaaggaaacagaaatctaagtcgaatgaaattcttttatttgattttatattttaaaaatttgtagtagttttttggtctcagtctgaatatgttcatttaaaaaaaattaacagagatggggtctcgctatattgcgaggctgatcttcaactcctgggcccaagcgatcctcctgtcttggcctccaaaagcgctgcgattacaggcgtgagccaccgcgctccagcctcaaatgaaattcttataaattaccagtttataaggaaataaaatttagggttaataaaccacaaccaccaatccacctctgactacataagcagaaaatgtccacctagatagagcaaataaggcgactgcataactgtcaccaaccaagtactgaatttggttcgcttcctcctgcaccttacagcctttccttccattccctccaacggatccccaagccacaaaccacgaccgggagcttctccatcgatgagccgctgtttgctcaaataaactctaaatttttaacgggagaaaggcgggactgtggggggcggccacagaccgcagctcctgcaacacgaaccacatccgaggagggatacccccatgaccctcccgcggcccccgcaccatgtggggagacgcggggctgcggggccgcaggcgtcgcgcagggacgggacaggacgaccggggtcccagctcctggcccagccccaccttgcggccgagggaactcgggtcccagaccccggagtcgccgcagggaggcctaggtccctccacagccggttccggccggttccaaccagcccctcccccaggtctggggacgcctgacccctcacacgcaccatttctcggcttccaggtgtcccggcgtcctccctacgactcccgcgacctgtacaggtcacggcgcgacagaggctgcggcggagacaccttgggcctctcggagaaacggagacgcgagcccgggtggggacggtcgccagaaacaaaggctccgtagggaggcgcaggccctgccctcctctcccgggcccatctgaatggacagttggcagggccccgccccagcgcccctgattggatagggtgacataccccgccccctaaggcctgagtgacgtaggaagccatggaaacgtggctgtgcgtagcagtgttgactggttctagccactgcgcctctcaggccgagtttcctccctgcacccagcccgagggatatttgagggtttgttttggtttttttttttttttttttttgagacggagtttcgcttttgtcgcccaggctggagtgcagtggcgcgatctcagctcactgcaatctctgcctcccgggttcaagcgattctcgtgcctcagcctcccgagtagctgaattacaggcacccgccaccacgcctggctaatttttgtatttttcgtagagacggggtttcgccatgttaccgaggctggtctctaactcctgacctcaagtgatacgcccacctcagcctcccaaagtgctgggattacaggcgtgagccaccacgcgtggccttgttttggtttccttccttccttccttccttccttccttccttccttccttccttccatcctccctccctccctcctttcttttttttctttcagggtcttgctctgtcacccaggctggactgcagtggcatgatctcggctcactccagccccaatctcccgggctcaaacgatcctcctgcctcagcctccctagtagctgggaccaaagtcacgccccaccacactctgctaattttattttgttgttggtgctgtgtgtgtgacgggggtggggtgggttagatggggtctcactatgttgaccaggctggtcgtgaattcctgggctcaagtgatcctcctgcctaggcctccccaggtgctgggattacaaatgtgagccaccgtgcccggccaatatttgcatttaatgcagagcttgcttctagcttgccagagtaggcactgtcttcttctggcactccatgagctcttccttctaattccttccggacacaaggtcaccagtatgtgcagggaactccacactcactgtgacatggagcaatcgccttgcctcagaacgggagggagcccaggctaggccagggaggacaggaagaggaggaagggcctgatgttccgggaaacgggcatttgggatgaggcgtgccaaggcttcctcccataccctccggtccctgaaaaaacatctatacgtggaaaaaaaagtagaaataactgaggtgagaggaaggatgctctctgatgaagtgatgtgggatgagacccaaagtaatgtattagtattaaaaggcaggttgggctgggtgcgatggagcacgcctgtaatctagcactttgggaggccgaggcaggcggatcacctgaggtcgggagttcggaacatggagaaaccccatctctactaaaaatacaaaattaggccaggcgccgtggctcatgcctgtaatcccagcactttgggaggccgaggcgggcagatcacgaggtctggagatcgagaccatcctggctaacacggtgaaaccccatctctactaaaaatacaaaaaattagccgggcgtggcagtgggcgcctgtagtcccagctactcgggaggctgaggcaggagaatggcgtgaacctgggaggcggaacttgtagtgagccgagatggcgccactgcgctccagactgggagagagagcgagattccgtctcaaaaataaataaataaataaaataaaataaataaataaataaaaatacaaaattagccgggcctggtggcacatgcctgtaatcccagctactcgggaggctgaggcaggagaatcgcttgaatcggggaggtggaggttgcggtgagccaagatcacaccattgcactttagcctggtcaacaagagagaaactgtctcaaaaaaaaaggcaggttaagctgggcacagtggctcatgcctgtaatcccagcactttgggaggctgaggcaggaggataacgaggtcaggagtttg

SEQ ID NO: 1561514 - DNA, 4001 bp, Homo sapiens
aagagcttccctgacagccctatttaaatctacaatcccttccaactccccattcccttttcctgccttatttttcccccgcagcaattatcaccttctaatgtaccaggattctcagcctcagcagtgctgagatgtggggccagaccattctctgttgagggctgtcctgtgcactgcagggtgtcgagcagcagccctggcccccggcctcgacccactggacgcctgacattggcctatgaagccctcctctacgctgtccacaaagctcactcctgcacctccgagtcttagccgcagtgtcgcccctggggagcaccgttgcccccagatgagaaccgctactatataaccagtgtgctttctgttttattctgcctccccatgctagaatgtcaacgccgggaaaataggggcttctgtctggttcactgttgtatgccatcccagtgcctacaataatgtctggcagagtgtgtgcgcagtaaacaaattttaaatgaatgaaggctaggcatccccgtcggacaagctacaagaacttgtgtgttttttttgtttttttttggagacagggtctcactctgtcaccgaggctggagtgcagtggcgcgatctcggctcactgcaaccttcgcctcccggcttcaagcgattctcctgcctcagcctcccgagtagctgggattacaggtgcacgccaccgcgcccggctaatttttgtatttttagtagagacggggtttcaccatattgcctgggctggtcttgaactcctggcctcaagtgatccgcccgcctcggcctcccaaagtgctgggattacaggcgtgagccaccgcgcctagccaagaacttcctttttaaaagataagtgtaccctttaatatgtaagcaggttagatcgcgccactgcactccagcctgggcaacggagcaagactccgtctccagaaaaaaaaaaaaaaaaaaaaaacaaacctactgatgctaagaagctgcacgtgcctttgagaagccccagcatctccttaaaagagatatccgtgccctgaaagagcggggtcccatttaacaagaagacatcccctttaaaaggccgcgccacacccgttcagcaggctggacctcccctttaaggggatgctgccactggagccccatctccacttttgttgagctaaaccagggatcgctttgaagcaaccaggactcaggagtttttgcttcaatgtctgggaaacggtcactggcctttaatgagataaccgccttttaggggaaaaacattgttttaagtcagaaagcttctgtaaaaatgcaaagcctgacccgccctctcaatgtggccccttgccctttaagagggcggacccggcctagctggcaaatgtcggaggtgaaatagtgactcccctttaaggtaccccttccggtttcacgcccccccccccgccccaccccctgcaacttctccgccctccggtccctccccccacccccaccccctccggtctctcacctgcggccccaatcgggggaacgagggtggcagccccaggaccttcccgcgggggtcgacgggaaggtggggccccggcagcggcggtgcagctgtggggaccggggagggggggcaggggcgcactccctcccaacggcccccggcgcgaggcacccaacctttatcggcggcctctcgcgcacacaaaccccgacgtcgccgtcggtgcgtcacaacgcacgtactccgagttcccgcccccggaccctcccattggctgtgcgaggcctcgtcgagctcgggcgcaggcggtgcgcggcatcctgggagttgtagttctcccagttgtggtcgcggactccagttgtcaggtcttgggggccgaggccccggtgagcccaaggccagggacggccagctcgagacgcggggtcgcaagttccccttattaatcccgattccctctcatctgcaaaaaaatccttccatgcaccacggttgtacaaaaatccctcccgtgaagcgggccccgcccccagggtgtaatcgctccagcgggaaaacgaggcctggagcgcttccagtccctcggtagagccacgtgctcaggattttcgggcgtgtgcttcgtgcacgctcatccagacgctgcagaaacctggttcctgctgggcaaaggtctgttctgggaggctggaatccacagactccttgtggggcctagggttttagtgggagaccgagctgctccaaagcccctctccacgctcaacccccgcccaacccagcgttccagccacactggcttttctgagggtcattaaacgcagtttctcaaccagagcactagtgccatttgggatggattcattgcagcggggactgtcctacacactctagggcccccactcactagatgcaggtagcatccccagccccgctccacacaccccgtaggagagctcagaatatctccagatagagattttcgcggtggctcacacctgtaatcccagcactttgggaggctgaggcaggcagatcacttgaggtcaagagttcaagaccagcctggccaacatggtgaaaccccgtctctactaaaaatacaaaaattagccgggcatggtggcaggcacctgtaaccccagctactcaggaggctgaggcaagaggatcgcttgagcccaggagtcggaggttgcagtgagccaagatcgtgccactgcactccagccagggtgacagagtgagactctgtgttaaaaaaaaaaaacaacaacaacaaaaagaatatctccagacattgccacatgttcactagttgagagccactgctcaaaggcagtaccctcagcttgaagaccattctgcatgctgtttctcaggccagaaggcccttctacccttaacccatccctgcccagcaagatcccactggaaagcctcctgtgctaggtggtgtccctcttacatgctcagcgacatttatctatgtcccatgacagcgaggacctttcgtgtctttgctgcccaggtattccaaacaaccagcatgggccctgatggagaagcagacggtacttgtttgttgaatgagtggatttttccagcctcccacaccgtttcccaagtccacaagcaggctggaactcagggctgatctgcggtggtgtggacccacccctaccttacagggtcttggtgctgatgtctccgtgcattcgtgcgtgtaaaaacccttggcatccagctcagcccaacattcctttcacgtcagcattaaccacacaaagcggctgccatgcagggtggagacgtggatgggaatgcactgcccagctggctgccaggctaggaaagcccagaggtgcggatcccacttccgtcccccttgcctcgggccattttggtctctgcagtagtgaaaggggccctcagctcagcccccctcatttacctgcccacgcagaggcattacaaaagggatgggacacccagcctgggcagtacagcaagacctcatttctacaaaaaataagcttcctgtggtgtacatacctgtagtcccagctactcaggaagctgaggtgaggggatcgcttgagcctgggaggttaagtctgcagtgaaccgagattgtaccactgcactccagcctggacaagagagcgagaccctctcaaaaaaaaagaaagagagattggcatggctaagactggctcttactctccttaacattccccactttgcagccagaaggtgaacaaaggttttgaagtcaatggccttgggcaacctgctgtctctgaaaaggtggtgtggattcaacaggtttgttttcagaacagcctcgcagccccttggagacagtgaccggaggaaactcaggccagccttgtgtccagcactttccaggccaaggaggagtctcagggacccagatggggaggtggggttgtctcctaaccccccggaacatctgtgtagccct

SEQ ID NO: 1561515 - DNA, 4001 bp, Homo sapiens
gaaggatacagatgaagaggcagatggaagggatagcacagagcaaggtttgtagcaaggggcgtgggacttccatgccctccacggaagcttattagagactcagttcaccaccctcaggcacctccacatgctcaagaatctgtaagttccccagaagttcaccagtccttttgagtttttacgctggtttcattatgtgggcatacttgattaaaacactaaccactggtgatcaactcaaccttcaacttccctgttgccaggcagagctaaaatttccaaccctcaaatgacatggttagttgccctggcaaccagcctcccccgtcctaaggccagccagaagcccccagtcaccagccatctcaatgccacacaaaaaggcactgtttactgaagaggttccaaggcttttgggagacatgtgccaggaaacaggacaaagatcgattatacatttcttataaatcgtaacaatcatagctaggcgcgatggctcatgcctataatcccagcactttggaaggccgaggcgggcagatcacctgaggtcaggagttcaagaccagcctggccaacgtggtgaaagcctgtctctactaaaaatacaaaaattagccgggcgtggtggcgggcgcctgtaatcccagccactcgggaggctgaggcaggacagtcgctagaacccaggaggcggaggttgcagtgagctgagatcgcaccactgcactccagactggacaacagagctagattccgtctgggggataggaggaaactttgatccccaaatgctcaaggagactgatgcttaagcaaactaaatattgcctgagaacgactccatacttctatatttgagtccttgtggataaactgcaacctagcttaacagacaaaattgaaaaccgaacttaatcgtatgcacctgtaacaatagctgagtggtggccagtcccagcggccatactcatagactgctgaatgttccaactgcgttcaaataaggcaaacgccgaatggtaaccaatctcactgtttctggacctcgcttccgattcctgtatgtcactttaccttttttgtctataaatttgttctgaccacgaggcacccctggagtctctgttaatctgctgtgattctgggggctgcccaattcgcgaatcgttcattgctcaaggaaactcctgtaaatttaattcggcttcaatttttcttttatcactgatttgagtaataataaaactccggtctccccgcacagccggctctgcatgaattgctctttctccattgcaatttccctgtcttaacaagtcggctctgtctaggcagccggcaagggtgggcggttatagtttcacaactcaaccccagccaggggcctgggcttgtaaaataccagattttacaagcctctgagccccacatgcctgggcctccccgaaacacttaacacacatccccgattcaccccaaaacctacaccacacaccctcgtacgctgcccagcaccccggcttcatcaccgactttaaactgcagcatttggagtgataataatggcgtcggtgataaagccggcgtgctgggcagcgtccccctagagttctccatccagtgatccagaggcctactaacagagtgaccctcagagaccccaaactctgacgccgagtctcagtcgctgaactcgacagacctttaacgcccgaccacaagaactctcccacgccggaccgcaaaggcaccccaacccaaaggctccaccgcccaggccgccagctctccccacaggctcctcagaagctccctacccctttaacctactccacggagagacccaaacactcacctgattttcttctggctacacctaaattccctgaatgcttcctttcctggcccttaaaccccggcactggcctatggcggcggacgagggcgcgagtcaattctgccgcgctaggacgatgggacatgggcttctcttcgaggaggtaacatgtccgcgccctgagccacggctctctgggcgcggccatcttggtagatctgccgtacagaagggaaacagttgttcttgtgtcattaaaccgggatgactctcctgaaagcaaaaatttgaggcgcaggagcattttctagagtttatctgaacaaacagcaattcatgaattaggaagcatcaaaccaaaagaagtctcgcgcttctatgcttaaagcattagacacaagtattcacagggtgagtgaaggagtaaaacaaagaaattatttgattagttacaattataaaaatgcatttttttaaatttgccttggaaagtccctaatgacataatagcatgtgagttgcctacttttgatcggttgagattgagttttgtccttccctaacacaagcatttaccagaaatgactcaagtgaattgttgcttatgtttgcaggttaagcaaggttaaggctgtttttaaggcctactgggttttgtttgctcaggagtttttgaattctggtctgcattttaattttgctttgacacaggagacagtgaaatggcactgatgtgttccctctcctgacacctcaacccctgcactgtgaggttggagcactaacaacagtgcactgtggggaaaagaaagagagatcagactgttactgtgtctatgtagaaagaagtagacataagagactccattttgttccgtactaagaaaaattcttctgccttgagatgctgttaatctgtaaccctacccccaaccctgttctcacagagacgtgtgctgtgttgactcaaggtttaatggatttagggctatgcaggatgtgctttgttaaacaaatgcttgaaggcagtatgcttgttaaaagtcatcaccactctctaatctcaagtacccagggacacaatacactgcggaaggccacagggacctctgccccagaaagccaggtattatccaaggtttctccccatgtgatagtctgaaatatggcctcgtgggaagggaaagacctgaccatccctcagcccgacacccgtaaagggtctgtgctgaggaggattagtataagaggaaggaaggcctcttgcagttgagacaagaggaaggcatctgtctcctgctcgtccctgggcaatggaatgtctcggtataaaacccgattgtatgttccatctactgagataggagaaaatcgccttagggctggaggtgagacaagctggcggcaatactgctctttaatgcaccgagacgtttatgtatgtgcatatcaaagcacagcaccttcttcttaagcttgtttatgacacagagacatttgttcacatgttttcctgctgacactctccccactattatcctattgtcctgccacatccccctctccgagatggtagagataatgatcaataaatactgagggactcagagaccggtgccggcgcgggtcctctgtatgctgagcaccggtcccctggacccacttttctttctctatactttgtctctgtatctcttcttttctcagtctctcgtcccacctgacgagaaacacccacagatgtggagaggcaggccaccccttcactgcacaaaccacacagatattcagaggctcaaatgcaaccaaggctgttgcgggaagtcagggaccccaaacggagggaccggctgaagccatggcagaaaaacatggattgtgaagattttatggacatttattagttccccaaattaatacttttgtaatttcttatgcctgtctttactgcaatctgtaaacataaatcgtaaagatttcatggacacttatcacttccccaatcaatatccttgtgatttcctatgcctgtctttgctttaatctcttaatcctgtcagccgagaaggatgtatatcgtctcaggaccctgtaataattgtgttaactacacaaattgtacagcatgtgtgtttgagcaatatgaaatgtgggcacc

SEQ ID NO: 1561516 - DNA, 4001 bp, Homo sapiens
ggaaacctctgtctctacaaaaaatacaaaaattagccaggtggagtgacgtgcacctgtggtcccaactactcaggaggcggaggtaagaggatcacttgaacccacgaggttgaggctgcagtaagccgtgatcatgccactgcattccactctgggcgagagagtgagaccctgtctcaaaaagaaaaacgagggccgggcgcggtggctcacgcctgtaatcccagcactttgggaggccgaggcgggtggatcacgaggtcaggagatcgaggccatcctggctaacagagtaaaaccctgtctctactaaaaatacaaaaaattagccgggcgtggtggcgggcggctgcagtcccagctacttgggaggctgaggcaggagaatggcgtgaacccgggaggcggagcttgcagtgaacggagatcgtgccactgcactccagcctgggcgacagagcaagactctgtctcaaaaaaaaagaaaagaaaagaaaaacgaacaaaaaaaccccccagacctttgaacaagccatcccctctgcccaccagaatgtccgctccatgaggcaggtatctttgcgctcccagcatttccagtcctgctcttgagcatataagccagcctgctgtcctgggaaaggggtgggtataacttagcaggatctgtttgattcttgactctcagaatctccccccagagaaacatgagaacatgtgtacctgaaaaccagggcagaacaaggatttccttgcggcactgcttgtgatacggaataaacgtcatcctcgtaaaagttaatacttagggaacccactacctgccaggcactcttctaagctctttgcctattttaactcaatcatcacatcaacatataaggcaggaagggaaaaactccatccacactgctccttctcaagactgagaatttacaaagacaggcctctctgccctccacctgccaagctaactaggggtttcctcttcatccgagtctccctgggctgagttgcttcacagaaataggtttaggggagtgcagtccaggttgtgaagggtcccccggatgtgttggatctagggttgtgggaatggggccatacggagtcccagatggggcaccagaacttcaagaagggcagggctgagtgccccagggtgtccagagtcccaggccaggtggggaactaagcgggggaggatgagaccggtgagggggcggggctgcccccccagggcctggttagttacaaggcctggaggtggggccagtcccaggattgggccgccagagttctagcgggcggggccaagcgctcagaaggcgggtcgaggggctgggtgcaccctaggattgggcagtcggaacgatgggaggcggggccacgagccaggcgcgtcccggccaggcagtacgagacccaggccgccggcccggctcctgggcggggtccgcaggtgccgggggctggccctagaagcggagggggcggggtaaagcccggcggggtctgggggcgtctcctccctccctccctcggggccaggccccctcacccgtggcggccgctccgctggccgcgctccagagagatgaggtaggcggcgagcttggcgtcgctccagccgctgcggcgccgcaggtccacccagggcccgtgcgcctcgcccaggtacacgcgccgcacgtcgtacttcttccgggactcgagccgtcgccgggcccggtccgactccgtgagtcgcggccggccccgcgcctttcggcccgctgcgccctcctcggctgctgcctccccgcccgcgcccgcctcagcctccgcctccgcctcgggctctagcgcccgctccgccatcccccccaccctggttaccagcctcccccgttgttaggagccagaccggaagtggcgcgcatcttcggcgccgccgagaaatttctcacggtctctcgctgccccagggcgccaaaaggagaccaagaatggaaactgcgcatgcgcacaaccaacagcgctcccgcccctttttatttgaattcggagaaccagaggcgcctgcagattctggaggggtctcgcctgcccatcgctggcagcccgagatcctggggaggggatgccatactgctagagatgagggaagagagccccaagcaggaaaacattgatttgctgtacactcaaagggcatctcatgccttcagtccaccgcctcctcgggccacagcccgtgccctcgcgccggctcagactagctctggccctgctgctgtcgctgcaggttgtcgtcttcttcctggtggtcctcgggcaggggcggctcctccagccctgcagaggatgtctggagctcccgggtggacccggcgaggcggaagaccacggggatctgggccagggttgggttggtctcctgcaggccctggatccacttagccatcgtcgcctggtcatgagcacccgccatgcacatggcgaagacagggccttcctccactgttggaagacatgcacccttaaggtttgcacagtgggggctgcagcggctaacccatgcctacacctttttgaggtattttacactcccttccacttcctttttttttttttttttttttttgagacggagtctcgctgtgtcacccaggctggagtgcagtggcgagatctcggctcactgcaacatccgcctcccaggttcaagtgattctcctgcctcggcctcccgaggagctgggattacaggtgcacagcaccacgccgggctaatttttaaatttttagtagagatggggtttcaccatgttggccaggctggtctcgaattcctgacctcaaatgatctacccgcctcagcctcccagagtgctgggattacaggcgtgagccactgtgcccggcttccttccactttcttgtgcctccaaacctttgcacaagctagccccgctgcctaggctgcccactccacacttcacccgggcgatgactcctggtttttctgtattctgccaggaaggcctcctgaccccccactcaaggcatgctcctctcctaagctccccaaagtgtaatttgcctgttcccttgctgactcgagggactaggtttgtcctggtgacacccagtagccagcacagagttgtaggagggagggaatgaacaagggccaacagggctgggtgacctcaggtctggagcccctggggcaaatgagtgtgtgcggccggaggacgagggtgtaagtggactgcgtctcagcctgggcctaccccttgaccccagaggccgcccctcatcctgggtggtgtttggaatgtttggaagtcctgcctgtccaggtttttgccttttttttttttttttttgacacagggtctatcatgtaggctggagtgcagtggctctataatagttcactgcaacctcaactcctgggctcaagtgatcctcccacctcagcctgtaggagggctgggattacgagcacacatgtgagccaccgcacctggcccagtttttaccttcattgatgtcaaactcgtagttgtcccagccactcctcacatactccaggtccagctgcatcgggtagtagaggttccactcctccggcgtctcttccacttcctactccaaggtggggagtgcaggcggggtcagaggccagggctctctcggtctccctcctccagcctctcccatgcaccctcagggtagtgccagcccactccccagccccaacacatgctttgctttaagccctcaccctctcctccgggggcagcaagtcagctctgaggatgtggtaatacacacacttgttgcggagccacagggagaaggggccctcaacaaagacaggccgggctggattgtggcgggccagggcggcctgctgatcgggactctggattcctggtgtggagacatacatgccctgtgccctgcaagggactcggcccagaggcccagggagcccagcctaggcc

SEQ ID NO: 1561517 - DNA, 4001 bp, Homo sapiens
aaggaaagagggtgacccataactgaatgagtcaagtcactgctctcttagaacagagattgcaaatagaagctaacctctgatgccaggaattataaaatgcacatgtcttatagacaaaacttttgtgattctcaccagcatctccataacagaaacaaaatatatacatataaaatttgttagattattaggggctgggcacagtggctcatgcctgtaatcccagcattttgggacgctgaggtgggtagatcacctgaggtcaggagttcgagaccagcctggtcaacatagtgaaaccccgtctctactaaaaatacaaaagttagccaggtgtggtggtgcatgcctgtaatcccagctactcgggaggctgaggcaagagaatcgcttgaacccaggaggcggagttacagtgagtcgagatcgtgccattgcacgccagtctgggaaatagagtgagattctgtcttaagaaaaaaaaaatttgttagattatggatacagaaatcaatatatcacgatgtaattatccatatccaatgaaaccaccatgcatctgggccatagtccccctctttcttccttcctgtgtgtttccctccctcattctgtacatctctctcattctcttcttctctctccttgtttcttttctgtgtttcagcctgggtctctgctcctcattttgagcccctctcttctcctgctgtttctccttccctctatccttctcttccacttgttctgttccattcttgcaacttgtttcacctcttattcctctttcacccgtcttttggttgtccccaatctccatctatttctgcctctttcttcccttatctctgctctccctgttaaatcccctcttccctgtttcacttccttgtccccactctttggcacccccagatcccaggtctccccctgctgtggttctccctctgctctccttgtcaccagctgccccttcttgctgtcccagcaccacgctgctctgtctatcctggctccaaataccccctcctctccctaactctccgtctgaggagctgcccctctccctaccttgctgtccttcatctctctagacagcgagcttttctctacatttctccagttgtttctccatcctgttactttctcagcgacttctttcacccttactgtctctttgtaaatcctgacccatcctctactttgccatgtttactggtttccctcattctttcctctgtctccgtttttctacttttctctcagcccccctctctgtctcctgatccccttggcccacacattcacagggagggtttggagtaagacacctggatcctggaggagcacattttccagcgggtggagctgggcaggcaagaacaccgggtatcacaggacaaggcccgggcacctccccaacgcgggctcaggggaaacggtgactgcgaaggggaggcctagggagcagcagggcccggcacgaggaggagggaggtggggggcgacggcgccttaggagaggggtggggtatgcaggatcccaggaccaggcagaggcgcggcctccccgggactggggctgcggcgctaacgctccagtagctgactagggcgaggttaggggacggtaaaatcctgcacccacttcgcagatgaggacttcacagggcgcaggtcagtaaagggttttaagcaggaaacggcgcaggaaaggaggtgtctgcatggtctgaaggccgaaagaccgcgggcaggaccagcctgtgtgattttaacccaaagcgatgcgacccccagagtctcgcggcaaagtctgaatttacatggaatggagggagccgtgcggggactttaagggctatacgaacccccggacatcgggtacggaggagcaggggactccgaaacgcaggtttaatctagatagagggaaactcacgcggcgactaacagccttcactccaagagatctgcttccgggtttgcaagaaactgcccgcgcagtaggcaaaggggcgggttgcggtggggaaaggccaggcgttgggagggactgagagcatagggtgggcggggccggggcggggcctgaaccctggaggcggaggttgcaatgagccgatatcgcgccattgcactccagcctgggtgacagagtgagacttcgtctctcccaaaaaaaaaaaaaaacaaaacttaggctatctaaaagtttaaccaatggccagtaatataagcaatcatgcatatgtaatgaaggcgccataacaacccaaaaggagaggattcagcggagcttctggataggtgaacactgggaggctcctgcagcgtggtgcacccagggagggcaccaaggctcaacgccccttctcccatgcctcacctcactgatcccttccatctggctgttcttctgtcaactttgtaatatcctttataatacgtaaatctatgtaaagtgtttccctgtattttgtgagccactctagcaaattcgttgaacctgaggagggggtcaagggactcctggatttatatctgatctgtaagcacaagtcacaacctctgcttgagactggcattgaaatgtgtgcactattgtgggactgagccctcaacgtgtgggatctgatgccatgtcccggcaaaatggaacggaatgagagaacacgcacctggtgtctgtggcaggattgcttgcttggtgtgtgtgggaaaacccagtacctctgggctaactgtagcattctgtgttgtgagagaacagtagaagaaactgaatcagtgtttcctatattcttaaatacgaatatgtgaggtttgttgttgtttttttttttttttttttttttttagacaagagtcttgctcttgtcgcccaggctggaatgcaatggcatgatctcggctcactgagccaccgccccagcgtgaaggcatttttgagcaagttatgtctccctaattctgttttattgtacttttccctaagtagttataatagcctctaaatctgtgtggagttttcagttttgtggacaatacaataaatagacaaataaaaacccaaacacaagctgatctctatagaagtgttagatattattttcaacacactaagtgatactccgtatctagataagctaaagcacgaatgatgtcttctgaggtgacaaggtccacagtggctttacagaaacactggccagaagtaaaaactgtgatgataatggcaatagcaatgactgacttttctgaacactatgtgcaaggcattattcggaatactttacctgtattaactcaaataacaacataatagcccatgagaaaaagatcttttcctatcttactaggaaacaactgtgtcggccgggcgctgtggctcacgcctgtaatcccagcactttgggaggccgagctgggcggatcacgaggtcaggaccggatcacgagccgggcggatcacgatggtcaccaggagaccatcctggctaacacggtgaaaccccgtctctaatgataatacaaaaaaattagccgggcgtggtggcgggcgcctgtagtcccagctactctactcgggaggctgaggcaggagaatggcgtgaacccgggaggcggagcttgcagtgagccgagatggcgcccctgcactccagcctgggcgagagcaagactccgtctcaaaaaaaagaaaaagaaagaaactgtcacagatacgctaagaaactggcctaaggtccaagagctagaaatgacagagcaagccccgaacccaggcatctaagaattacagttaggctgagagcagtggctcacacctgtaatcccagcactttgagagcctgaggcaggaggggtgcttgagcccaggagttcaagaccagcctgggcaatatagtgaaaccccatctcaacaaaataaagacaaaacaaaaacaaaaaacccctcaacaattacaattaaacctaaagaatcagttaagtaa

SEQ ID NO: 1561518 - DNA, 4001 bp, Homo sapiens
tactcttctccctgtcatcatgccttcggtctgtccatgcgcttgcatcacggtcctctcaatcagagtgattttgcccctgcaggggacatctgacagtgtctggagacatttttttttcgcttgtcacaacccagagggaggcgcggtgtgctactggcctggtaaatagagcccagggttgctgcacaacatcctataatacatagaatagcagcccctcccacctcccaacaaaaaactatctggccccaaatgtcacagtgccaaggctgtgaaacactggtctggacagaaacatttccagacccatgtgttatatggaaacatcccttagtccctgacacttcaaagttctgttcttgaccccatgggctccctagggacatctccatcaggaagatcctttgttcctgaccccacctcctctaccctaatgctgccctcccaggaccctgcctacacaattctgaacctaagccctgatctagacgtccaagttattttacctctggacctgcaacccttactctggggctcatccttttgcatttctacctatggattttattctccaggtgtgggacgcctgcggttattatgctaataataaaacgatgatcattgatgtggcacttccttgtgccaagttctacttatgctcaccataaacctgaggttggttctgttattactactgttttacaagtgaaccgaggagtggtggacttaagtaagctctctcagtcacacagccagccagtggtgaaaccaggagtcaacaccagacagcggggcgccacagtccatgctcttatttttccaagctaccttggtaggaaggggacacaaccatacttagcgtcagtggagggctctgtcctccactcaaatgtacacatgcagaaaactgacgacgcaggtggttggcgggggcagcgcaccactgctcaactggagatggtcagatgccctggtatgtggacaaagatagcccagtccgaagctcagagatgcaaagtcctccagtattcaccactacctctgcctctgtatagggtcaaagaaaaacgaccaccagcaccataaccaacacctaaacacggtgattagtatgtgacaagctctgtgcagggtgtttcagctacgtcatcccatttaatcttcccaataacacccaggcaggtgctattaatatgctattttaccaaggaggaaagtcatgcacaattaaacagttccacagatttccagggcagcccatcacatcttagagctgctaagaattcttcccctgtgggcctccatttccatggttacagtgagatatacaccagaaaggcacagtcacacactcataaccgcaaagccactgacgctaagtggcagacagacgcccaggcaagtcacacagtaacccaaggctacaataaacgcccacatcagcctgacactgacacacgcacacactccagaaacacaaatcttcacagtcagcgtcacacacccactcccggcttcccaatggctccattgtttccttcgcgtgggtcacgcagcgatacacatccgcggtcccgacatagctccctcacacacaggcacacacggctcgcctcacacgcggcgccaacttcacacttgggcgcacaagccccgagaaccacagcagcgaagggcgcaaaccccacgccgtggcgggccgagaacccacgcaggcgcgagcccaccgcccacgcaagcacccgcgcagacgcccacgccatcgtggatgcgcaaacccacgcgcgccttggcaggaacgtccacgcagtggcgggcgcgccgcccacgccctcagacacacccacactctcgccagcccccttacctcggtcttcccgggctcagaccccggcggcgaccaccgagacagccgagcagggactcagcgcctgcgcactcccctccgggaccccgggaccgcgcgctgcaccccccttcacacacgcaccacgcatgcgggcgcgtggccccgcccccaaacaaggccacgcggcgtgcgctcacccgcctctcggggacagtaccaccagccccggcctgaggccccgacccctcagcgccacacgcacaagcgcgttcgcacgattggtgcaggcggacgcgcgaggtcccgcgcctgcgcacacccccgaggctggcacgcacaccggtctcctaggggactggcgcctggccctgcttttcatcctctcaggagatcacgtgtggacactgaggcccttcctcgagctctttaaccaaacccaacctccccaattcgccgccttccccgctcccacaaccacacgttcccgtgtgagggcttattgcctccagccagccagcgtccttcgcccccacattcacgaggtttggagccggcctcacccgcggaggcggacaccgcccacccgcgcgtgcgcactacgcagtcatcctgcgacctccagaatccaccggggtgcagcgaggctgtggaaagtcccacccagaacgtgaggtgaagaaggcttgggctgcgctggttctgctctgtccgggtcggagatgaactgacccgggagagcagcggagggatgtttcttttggccaacagtggggactcacctgcacgttttgcgaagaggcccacagtcctttgcgtggcgctcggactacatttcccaacggcccctgcacgccctgggggctgttccatgcggtgttgcgcctgcgtagccggcgggctggcagtgagactgactgcgtcggggttgagactgggtggatgaggctcaccccggcggggagaagggacgaggaggggcggacagcggaaggtccgggagtgtccgccataaagtcgtttgaggtgaccgttgcgtaattgtgagtctgtgagagaagatgtgaagtatggcctcgtcccggtcatctgggcgtgcgggtcccgggttttgatcgcgcgtttgtgtaggtgagacccacattgtgttaccctgaacatgtgtgaggacgaacctttgtgttttcttatacgtgtgtctctgaggcgatttttgtggttttgtacgtggcggggggcactgattttgaatatgtgtgtatgttctggacatttgtttagcttctgcatccacttctgcggaagggcagagttgagtaggtgggaacaggtactgtgtggccccacaaagcctgaactatttactgttgactctagagcccagtttttgcggtgtgtacgtctctgtggggaaccacacattttgaatatgtatacttgtgtatatttacgtctattctatgactgcttttgcacaatggcagggttcagtacttgcagcagagatcttgtggcccataaagcctaaaatactatccgactaaggtttcgagccgtagccagtttttgtggatgagtgttgtgtgtgtgtgggaagccagtgattgattgattgattgattgatttgggacggagtctcgctctgtcgcccaggctggagtgcagtggcgcgatctcggctcactgcaacctccgcctccaggttcaagccattcttctgcctcatcctccctagtagctgggactacaggcgcccgccaccacgcccggctaagttttttgtatttttagtagattcggggtttcaccatgtgggctcttgacctcgtgatccgcccgcctcggcctcccaaagtgctgggattacaggcgtgagccaccgcgaccggccaaggaaagccagtgtttttgactctgtgtgtgtgtacccgcctgtgtgttgagacccagtttttgtagttgcataggtgggtatatgtgtgaggggaacccagggcctgtgatttctttcttcccaggtgactctgagcaagttttggggactaggtagtagggagaatgtgtgaggaactagttttggtttcccatttctgtgattaggtagtagcaataataaaaataaaagctaacagatactactattaggacttt

SEQ ID NO: 1561519 - DNA, 4001 bp, Homo sapiens
caaaaaaacaaaacaaaacaaaacctggccaaggcatggtggctcactcttgtaatcccagcactttgggaggccgaagggagtggatcaactgaggtcacgagtttgagaccagcctggccaacatggtgaaactctatctaataaaatacaaaaattagctgggcatggtgatgcatgcctgtaatcccagctactgggaaaactgaggcaggagaatcacttgaatctgggaggcagaagctgcagtgagccaagatcgcaccattgcactccagcctgggtgacagagcgagactcgtctccaaaaaaaaaataaataaataaaataaaaccaaagccaagtgcagtggctcacaactgtaatccaaacactttggaaggctggggccggtggatcagttgaggtcgggagttcaagaccacctgggccaacacggtgaacgtcccccccactcccccgcccccaccccacccctcccacctccccaccccaccccacccctcccacctccccacccccgtctctactataaatactaaaattagccaggggtggttgtgggcacctgtaatctcaactacttgggaggctgaggcgggagaatctcttgaacccgggaggtagaggttgcaataagccactgcatcccaccctgggcgacagagtgagacttcgtctcaaaaaaaataaaaaaaataaataaactaaaactaaaagaaaacacacaaaatgagggtgagataatcagatagtagcaatagcacaccacccatcgttgccatcccaggccaaactcctcataccctacagctctctcctcctgcaaacactgaaaagaaccctttcaaatggcaggacccttctcttctggggggagtctcaagaatgcccactccctcttccctgccctgcagtcccagccttctcatctcttaccccagagatatgaaataacatacttaagactgccccacttaaatctgacctcctggccttgacctactccagaccgctcccttcaccccaaagatattctaagcccagccccttccccacaacttcagaccttcctctctagttgcctaagtgaggaagcctccactctgagacatctcaaagtcaccattccaaaatccaaacgttcatggaaaaacaacaaaaacaccttgctctttcatgccttactttcagtcatagctgcatatgatggagcagaaaatcctgttggtttcaaatttaaaacctacccagaatatgatcacttctacccactcacctgccattactcttggtacatccaccaccaaagcattcctggaatccactgcagtagcctccttaccggtctcctcgtatccatcctcgcagtccccaccccaaactaatgttctcccctgagcaaatttcgagacacttaaaatcccagctaagatcacgtccttctattcaaaaccctcagttaatctcaacgccctcagaatgaagcgacaacttctcagcctgccattccagtcacagttcctcaaactctgctctgtgttgatgagaaccctgtctcccaaatgtttgggggtcagcagcacccccgagcctttacctgcgccgtcccctccgcccgtaactctcccacacccacccacaccgagataggaccccgccccaagagtgcgtcgctgtcctgggacacaggggctgcaggcactttacgattcggagtcggagaaagggtgactgagggcccggaggacgcagcacccacccgcgcggagtccgttagctccgccataggaccgtgggcgcggacagctgccgggagcggcaggcgtctcgatcggggacgcaggcacttccgtccctgcagagcatcagacgcgtctcgggacactggggacaacatctcctccgcgctttcccaacacctccacctgcggcccacacaagcgttacagaaccccggccagggacagcctgacagaaacaaaatgtccgctacaaggaggagccggaagtcccgcccacgcaccccccgcaggcactgaaacacccctctcctgggccctcattgggtatgcaacgtataggtttgtgggtagagtgtggttcccactgagctatccttcaaggcaggggattctcggcctgggctcttgggaaaactcgaagtaggagggccaagttgtttgggaaaagtaacccgagtttcaaagggctgacaggacttccgtcctcttttttttttttttttttttttttgagacagagtctcgctctgtctcccaggctgcagtgcagtggcgcgatctcggctgactgcaacctccgcctcccgggttcaagcgattctcctgcctcagcctcccaagtaattgggactacaggggcccgccaccacgccaggctaattttagtacttttagcagagtacgggatttcaccatgttggccaggctggtctcgaactcctgactttgtgatttgcctgcttcggcctcccaaagtgctgggattacaggagtgagccatggtgcccggctgacttctgtcctcttaaaaggcctggacctagattccctggagtgtagtatgcaccgatcgcagaaatgttgagacatttcagatgttccccaaagctgcaaaactaaatagatacaccacaccacaatgtctctttgcgtacactcacagctagaagctaataactattaccttgttgctttttaaatatgtgtgcactcaagctttacagtaacttttgtgagcttcagtttggtcagagacggaagagaaaatattccaaacaaggccttggagtggaagaaggaagagggatgatgtggagtctccctgaaaccagtggacagatttcttcagaaaactcttcctgcctgggtaatcagtgatgtctccatcacagcaaaacacagtgcaattaccatttaacctgtcattgtcattgtaagtatggtgtctgtgttaggaggtgagattatccccgggggaaaaatcctgacagctattaataatgattccgtagttatttgaagataatgaaagaaattgctctaaggaaatatctgtgatagatggacaaagttaagatctcagtaaagtttgagcctgaatactaaagtataagtgaaagaatgaagttaagcatatggttgtgttgtgatcttgaccacactttgtcaacaaaatgtgactcttttttcctgaaaatgctgagcaattgtaaagaagatatcagaatggtaaaaatcaacagtgaagttgtgctgtcttgataattcactgttaaaatacacatccaaggaacacatacgagctctcagtaggtgtttttcaaatgtgttagtagcatgaaagacatcactaataaaatttccaagattcctatacatacaggacatgtcctgcatataatgatttttgtcctgcatcaccttttgactttgtcacaataccctaaataaatattctaaagaaggcaacagtcttaaagaaaagaattttcaacccggaatttcatatccagccaaactaagcttcataagtgaaggagaaataaaatactttacagacaagcaaatgctgagagattttgtcaccaccaggcctgccctaaaagagctcctgaaggaagcactaaacatggaaaggaacaactggtaccagccactgcaaaaacatgccaaattgtaaagaccatcaaggctaggaagaaactgcatcaactaatgagcaaaataaccagctaacatcataatgacaggatcaaattcacacataacaatactaaccttaaatgtaaatgggctcaatgctccaattaaaaggcacagactggcaaattggataaacagtcaagacccatctgtgtgctgtattcaggaaacccatctcacatgcagagacacacataggctcaaaataaagggatggaggaagatctaccaagcaaatggaaaacaaaaaaaggcaggggttgcaatactac

SEQ ID NO: 1561520 - DNA, 4001 bp, Homo sapiens
agactcccaaagtgctgggattacaggtgtgcaccaccgtgcacgcaagggttagtttttcaaaggaagagcgcaggggagagtcctatcagtccaagggcattcatctgtttccattgagaggctacactccatacctcaggttgttttatgaaagaaaataacccagtagattatattcactagacactcgagcagacatagccatggtagatatattggtttattcacagaaactactgaagcccaggaccagaaaaaactgaaggtggctgaggccacatcacccataaagtttccaaagggaaaccttgacccaaaaatattctgatactatctctgtgcctagagaagatttttaaaaatgaggcgaaaagattttttacaatacagtatcagggaattgttcttctttttcttctcataaaaaatattttcaaacagaaaacgatttttttaagtgccattcaatgtcaaaaaatgcttagttaaaatacagtatctaaagtgtacaataaaagacaaatagttgataatgtgaattagaaaggggaagctggcatttgagaatgtgagaagaaactggaaatttagtattttactgcaagtcatagttagtctggaggaatgggatgaggggtaggcttgagacccagcttgagagaactgtgaaaaatgcaggggaaaatcagtctcctgtggagtgtgaaaataactaagtagcaggcaattagacggaggttactctagtccctgggttcctattttttaaaaactctaactcaaatgcatttttttgcaaattactgaattgagggaaacaaaaatttaggcttaaccaatcataaactgccaattaacctctgattacataaccaggaaatgtccaccttaattgtacaagtcaagtaactatgaactgtacctaaccaattatttaatttggttttcttcatcatgtacctttaaaagtctttccttcaagctgctctcataaagtcacaagctccaaaccacagctgaatgctccacaatttttgaatcactctttgattaaattctccaatatttttgtggtgatccccataatttatttatttatttaacttatttatttatatattttttaagacggagtttcggtcttgttaaccaggctggagtgcaatggcgtcatctcggctcactgcaaccgccacctcccgggttcaagcggttctcctgcctcagccttctgagtatctgggattacaggcatgtgccaccacgcccggctaattttgtatttttagtagaaacggggtttcaccatgttggtcaggctggtcttgaactcctgacctcaggtgatccacccacctcggtctcccaaagtgctggtattactgacctgagccaccgcgcccggccctcccataaaattttaataggagaaaacaggaactgggaaccccacggaccaaaactcttcccattaatgaacccgcaccctgagtcaggattctccggtgacggccctcctgtggtccctgcacaatctgagagaaatgcggcgctgcgggtacagagctgcccagagagggctacaggccagggcacagtcactaggcagagaagagacgggatgccccggggctggctgtcagcgcgccgccatcttatggctgcaggggactgagccgagctggggaaggagaactcggggtgcagattgtggagctgactgcggggaggcctgagtcccgccatagccatttcccacgggttccaaccagccccttccccctctcgggatgtcgcacccgtaactctcaccatttctaggcttccagggggtcctggagtcttagctgtggatctctcaatttctgcaggtcacaggcccacagaggctggacctctaggagcagaggacacagagcaatgaaagcgagacctggagctccggctgcagcgagagacaaaggcgccgccaaatcccggaagccatcttgtctgctccagctgcgtgcctgattggacggttcccagcccagcgtgcctgattggacaacgtttaaggtcctgacccttcaggccctgagtgacagaagatgtgatcagacactgggctgagtgaagactgatagcctgcgctgcagccttttcagccggggcttcctcttttagctgagccaggcccatcccatagggtatttgtatttaaccttgtgtataaggtcatatacatttataaatgatatatggctactcacaaagaaaaataatataataataattattttagaatttcagactttatgaccttcctggcttctggtcctttgagtaggcagcctgagaattttaaaaagaggcaatcctcaaataaaatgtgagccacatgtgaattttaaattttctagtagtcaaactttaaaaagaaaaaaacaagtggaattgattgtaacaatctaacccaatatatccaaagtactatcattttagtatgagagcaatatgaaattattgatgaaatacacatatatatgtatatatgtgtatacacacacacacacacacacacacacacacacacatatatggaactaaatctttgaaaataactctattttacctaacacattgcaattcagaccagccacattccaggcacccagtagccacacgtggccaatagctgccacattaaaatgcagctctgatgtcaggggggtgaagaagagcctgaacatcccttttttgccagaggtgaggggacagcctctctctaccaacatctctcttcaattccaaggaaaaaacagttagtgaccatagaaagaacagaggacagatagaataaaataaccacaggtcgacctgtggttacctctggttattttattaactactgctgcccacctgttgctcaccttaattccaaacatcagacagtgaacaaagaatgatgaagccacaaaacaagaaaactctgtatcttcagatctgtccacagtcttaacctccaatgtttagatatggagaaaatagattaaaggcaaacttattttgctatttggccttggccctaacggtcagcctgtggttatctgttttctcctgtggtgtggtgaactgtgtgagtataagcaccaatcacacgcagacatgtctacatgtatttttgcattattcaatattctcttacaagacataagactttaagtcaagaataaaggtaatgtgagtcttttttcttgcattggcgctacccacagggtgcatcatgacatattgctaagttctgcattcaggttatgtggctctcttcttttacccaggcccagaatattttgcacaatagaacatattactaggcccaacatatataaaatgggaggcccttgcctgagccttttttacagagggccttgtgacatatctctgcatcaatcacctaagagatgcaactgtccatttttccctgcactctgcccacaggaaaaattgtgacttatcattaagcctaggtagcaggtgatgtgtctctcctgcctgggccttgagccacagaaagcattgttacctattgctgggctcagcacccaggtgatgtgactctgctgcctgtgtcctgctgtcaggagaaggttgtaacatattcctatttaggtgatgtgacactcctgtctggtccctgccctcagaaaatattgtgacatattcctggcccaagtatgagagtcaacatgtccttcgggaacacttcaggacctttaaccttgggtacatcatctcacaattcagaagggcccttccaaactcaggaatgagcaagtggctgttggctgtctaggttctccatgagttcacatttattactgaatttatgtctgcttaaatatcaggtttgtttcttcaatttaggtgtataacactgataactgaggggtaatcataggtaatctgacttgaatcacaaagtttattcaaatggcatatctaaaaaattttagtac

SEQ ID NO: 1561521 - DNA, 4001 bp, Homo sapiens
cagcaggatacatgggactaattttaggcaaaagctgccttaacttgcaaggcatcactgtaatcccaggagtagttgactccaattataaaggagaaatccaagtagttttaatgtcacaagatctttgggtttttgaaccaggggaatatatagtgcaattattgcttatgccctgcaaattacacccttttccacaaaaggagaaatgaggaaataaagggtttgggagcacaactacatgagaaatctatccatcacaactcatagcctctaacagactcacctgtgtagtacaaactaaaggaaagaaattttatgggcttatggaaacaggagccgatgtgtcagtaatacccagtaaggattagcccccgtcttggcacattttgggtcgcatccctgggctatggatttctaataatctgtccaagccttgggctgccacccctgctttgcactttgtgaaacttcttctaactcaacttacttatcgtgtccgcagacccttaggcatgataatttttgctattgtttccttggtcacactaataacttctattgtgatgtcctctgtagctttgcatagttctattcaacagctcagtatgtggagaactggatgcagaggcatacagccaaccaagcatggctactaaagaataaaattaacactgagttataaacaagtggcaatgttgaaatccatggttctatggttaggagaacaattacaaaacttacaattgaaagagcaattgtgctatcatttaaatcacactcatatatgtgtaaccaacgtagaatataaccaaagcgagtatccatgggaccttgtgaaagcccatttgcggggagctttcacacccaacatcacctttgatactggtgaattacaaaacaaaattcttgatttaaataagcaaactcaagagtttcagccttctttagaagactggaccgaattccagcaaggcctggagagcctcaatccttggacctatctaaagcaccacacaaacatctcatatgtagtttttggagtaatgctgttctgtctctgttttctgttcatagtctgtaaaatccgacggaccaatcacaaaatgagagctgcccaacctggccttacgtttatttgattaatgcataaacaggaagggggaaatgttgggagctgaatgcctgagtgttgtgaccaactcagcattccactggaggctatatgatcaaacagcaaactgtttatcatgagtgcagaatgtgggcaaacttgcttctgctcctgccaccagaaggtatactgaggacagtcactccctggtgccatgctccttggagttatctactggaacatctggagagtactgttcaaagaatacagtcatgcaggcctgcattaagtcaagcagctgaccacaacctcccccttctccctatctcctttactcaataaatacaaagggctatagaagctcaggacccttgttcaccagaagcaaggagtccacgaccccttcttccaaatatactcttttgtctttgtctgtattctcgcattcatcctcctttgttcagtccaataaggtctgcagcaaaatgaaacctgtagtatatactaggaattgcgtattaaagttattctcacccaggaagaccaggtttctgtagttctctaacatcacattcctatataaattctgctgtgtagaatccaggcattgccactcctccagagagaattctatggccacatccctaaatgtcaatgctccctggaaaacacacacaaacacatatatttaccaattggtcatgggcagaacttttaatgtgactcaaggtaaaatggagagagtagagagagctggttctgacttatatgaatgactgaaattattcaataaaatagttttcaacacagaaatgttcactaatgtattctctaactctgagaaaagaaagtggtataagatccataacatctgtgtatatgtaatatttttctagataataaagtataaaattgagggcaaaaacactaacatgtacaattttgagtgctatatttacatcatacagaattgtgtgccaggcatggtggctcatgcctgtaatcccagcactttgggaggctgaggtgggcagatcacctgaggttgggagttcgagaccagcctgaccaacatggtgaaaccccgtctctactaaaaacacaaaattagccatgcatggtggcacatggctgtaatcctagctactcgggaggctgaggcaggagaattgcttgaacccaggaggcggaggctgcagtgagccaagattcattgcactctagcttgggcaacaagagtgaaactccatctcaaaaaaaaaaaaaaaaattcatcgtgtgtatttttcagatggaaaagacatagttttgcatattattcagatggaatagacatgttgagttagaaggtatgactcaaattttaatgtgtgcaataagctagagatcctgttaatgcaattttttttttttcagatctgggataaagtctgagttgctgaatttctaataagctcatcagtatgccaatgtttttggcccaaaaagactattttttaaaacatccagtaatagaatgagcctgtgtttttctgtttttctggtttgtaaacaaagataagagccttcattttccaaaaacagacaaatgcaaaggaaacctaagaaagaagggcagctgtcagattaaatgttttggtttattcacatcagctgcataaagatatttaatgatgaagaggaaaatgattaattccatagtaaaaaaatgtgtcagagagcttatcaaccaagtgatttattaacatcaattacactagaacacatttttttaatgtcctgatgtacccagaaggacacagtattactgctgagatattgccccccctctgaaaggtaaattatagtctgaatttaaccataaggaaacattagttttatggaaagttcaagatagagatatctcccatgttctgtaacttttagtagtgattttaaatagtatttcttcagcactgagagagcaggtatctcctaacaattttttttagaattttctgggtaataaataccacactgcttcaatgagtgttttcttaatcttgtactgcatagacataataaagaacacagatgaaaccacaacattacatgttctctgtcttcactaaaaaccccaggttttccccaatatgaattttgagtatctacactttcccatgttcaacagccacaaagggacatttttaatattgcagattataaattcatagtgagatttctgcatggcatataagaagccataatatagagaaagctctggtatatagaaaaaaatatatttttcagagactttgattattgtaagaattttttaaagcagttaagacaaactcattagggaggaaaaacacaggtacacagaagtacaggtttgcaagtactaaacgtatgtttcctggaggaagaatagtggacacagatcttgatctcagacatgtttaggtgaaaaagaaaaggccatttttttctctttctcctccttccctaggattctttctcagataaaattttctagacaaattacacctgcatcttgagaatatgcctttaaaagtgtcagcaccacaggtctacctgctgtcaccacatccacaggcagaagaaccaagacagaaaaactccatccatttctgtcctttatagcagaagagatgaagaaacaatgagtagctccacagagataaaaatatgcttttctttattttgtcctcaggagccatcccctgacacaggcaccagcaatttctgccacagtaatgtaaatatgggccacggtgtactgtccctaccaaatccaaacagaacaggttcttggaccaccctttaatgcaaagatggaacttaactctcatgaatgtattatgaattcctcatacttgattct

SEQ ID NO: 1561522 - DNA, 4001 bp, Homo sapiens
ctaatcgcaccccacctccagtcaaaaatccaggtataacttttgatttcccaaaaacttaactactgataacccattgttgaccagaagtctactgaaaacataaacagttgattaacacatattttgtatgttacatgtattatatactgtattcttataaaaaagtaagctagagaaaagataatgtgattaagaaaatcataaagaagggaaaatatatttaccattcattaagaagaagtggatcatcacagttcatcttcctcgcatcctccccgaggtcatattgtgtgggctgcagtggaaaaggaagagaagaggttcattttgctgtgtcaggagtggcaggggtagaagaaaatcccctgtatagttgtacctgcttagctcaaactggtgttgttcaaggtcaactgtattaaactaactggttaaaccagattttaagtggtaaaagattatcaacaccttagagtgaaacactgtgaaatcaagtaccagacataaaagaatagttccaatatatgataaaaagtagaaagcatttaggccaggcgcggtggctcacgcctgtaatcccagtgctttgagaggcggagacagatcacctgaggtcaggagttcgagaccagcctggctaacaaggtgaaaatcccgtctctgctaaaaatacaaattcaccgggcatggtggcgcatgcctttaatcccagccactcgggaggctaaggcaggagaatcgcttgaaccctggaggcggaggttgcagtgagccgagatcaagccactgcactccagcctgggtgacagagtgagactccgtctcaaaaaaataaataaataaataaaagaaagcaaaagaaagcatttaaacctcataagctgaacaatacatttaagagaaaatactttgaaaattttttttaaatccaataaattatggaattacatttaagacaagttgaatacacgtcaaatttagaaaatgacacaagccacacacaaaaaaggagggaataatattgttaatgtctgtttgcaaaagcagcatacggtgtcacagtttcttcccatttcttgactctcctcaagatcagagaaagggaagagggtgagctggaattaactgagctaagtcagttaaccctctggctgaataagggttgcttctgatgtaataattagaaaacgcagaagcctcacaccgtagttttgcaattttcatgctcttctgcacaaacaatgaagcaaattttaaattaattatagagccatacatcagtacttcacaacttaatgttccatattaaatcaatccacactcacatggatttgggtgcccccccctttctccaccattatgtgatttttttccccctctctataaatgtttctcttccaccttctgtttctttccttttctttttcccatttcggcgttttcctgtccctttctgctcatttggcttcccttcctctccttctctgacagagtgtttggccccatcctggtagcatcctttttttcagtccctgctattgtttctgatggctctctaatttcgcgcatttctccctctttatcctccatttctgcttcccctctgttctccctggagaagggcgaagggtgtgtatccaccccgagtgagggctttaccagggggagggaagagggagtcagagaagagttttaagcagagaaacgacgcggtgggcggtcggtgtccacactgacctaaagcaaaaaggtcggggccagtacccacttcagaacgattttaatccgaaatggacgcagatctctagaccctctcggagcgacgggactgggaacgtcttagggccacgccgcgagaggaatgagcaggttcggggttttaacctacagggcgaccccaaaacccgacagcggagcgtgggaacctgtggcccgcgaggcgcaggcttgaacccgaaagacggagactcacccgagagcgccagtagccccgcgagatccgcttccgggtcggcaggaacctgcgcgtacgcgagtgcactggggcggcgcaaggggcaagggcaggggcagggcgcggacaactgtggggatgggcgggcaaatggcggggatgggcggggacaatggcgggatgggcggggacaatggcgggatgggcggggcctaggggtcggactgccggacctctcctcggcgcgtcccagcgacttttttaggcctgtttgtcgcccagcagtactcgattcttcacttttggattcccttgaatctctatggtgtcctttggagcctagctaagtaaaaaattagagacctgtgggccccttatattggaatcggagcttaagatgggaaaggtttgcttgaaaacgtttctgcgagcgatggaggcgcgtcctgcgacgaggcgggaggagcgctgggacctggtggatgggagagggcgacggtataaggaagctcttggatccaggaacttctgaaatccggacgattaaaatttgtatttaattaagcgaaagctggagttgtctgcgtaggtgatggaaactggaatgagatgcatttttgtgcctgtgcggagtgtacaattttatattgactttcactggaacgtaatttttatttccgctccccagtcacccaggaggcagagatgcaccatgggctgagttccagagaatttatggggtcagaccctgggcggtggggggtggaaggctgaggcttggctttaaaagaacgcaaagttctgcttgtatcgatctaaatttattttcctttattatcctaatgcacatttcttgagataaattacaaatccaagtgctggatttattggagttggtatgttgtgttttgtctaagttattaattactaatatactatcgttattattatttttattattattttgagatggagtctctgtttcccaggctggattgtaatggcgcgatctcggctcacggcaacctacgcctcctgggtcaagcgattttcctgcctcagcctcccgagtacctgggactacaggcgtgtgccaccatgcctggctaatttttgcatttttagtagagacggggtttcaccacgttagccaggttggtctgggacccctgagctcatgtgatccgcccacctgggcctcatgaagtgctggggttataggcgtgagccaccgctcctggcctttagtctgtaaagtctttattctcagttatttggaagagtatttttaacataatatgtgcttggcaattctcctggccaactgaattgatttctcttgggcccagagaggaaacttattgactggaggctccccaagagaagatgagcccatatgggggtatctgagtaaaccaaggtctatccactgtctctttgggtctctgttttcgtaactgggaattacatctgataacaggtgaagggtgaaaaaaaaatgagagtgcattttagcataaaaatacatatatgttatttacatataaacatacacatataaaaattctatttattttacatataaaaatacatatatgtatttaaattttttttttttgagacggagtctcacccgtacagacggggtttcaccgtattagctacgatgtctcgatcttttgaccttgtgacccacccatcttggcctcccaaagtgctgggattacaggtgtgagccacagcgcccagcctctttctcttttcaatgtattaaatgcacaagattccatactttcaaattccattttgcagaattattatattttcataggtttcccaaatcaaatattaattcaagtttcagttagttgttttaaaataataaatatatagttacataatctttaaaatgattcgttttctagcctaaaatgctttatcaccttttatgtttcatgtctcatattttagtgcacactctacctaatgttgtacattaatttccgtgatgggtgccgtagtatttttagtctttgcagacagt

SEQ ID NO: 1561523 - DNA, 4001 bp, Homo sapiens
ttggagtctcgctctgtcacccaagctggagtgccatggcgtgatctcgggtcactgcaacctctgtctcgtgggttcacgcaattctccgacctcagcctccagagtagctgggattacagatgtccgccaccatgcctggctaatgtttgtatttttagtagagatgggctttcaccatgttggccaggctggtctctttgccaggctggtctcaaactcctcacctcgtgatccacttacctgagcctcccaaaatgctgggattacaggtgtgagccacctcacctggcttataaaagttatacaagctaaaagtgctgagatacaacaaaaagaaaaagaaaaaaaattatgttacagggcactgtgcctgggataacacattatgtaatttaatttttataacaccctgggagctggtactgtttaataattcccaggatttagatgaaaagcccggcatttttatttcttctgtttctctgtcattgattttttttaaaaagtatacacaataaaagctaaatatagacagagaggaatgcggaaagaatttaatgtattttagagaaatttatattgtgtctgtttacttgtttgtgacttgtagagcaactactagatctgtaagaatagaaaacaagttgctagatagaatgcaagcactagttttaataaaaaattataaccataaaatatatactttatttttttaatttatctgcttttgtgtttcaggaattgtaagcaccagccctagcagcagaattcaccagccaaaactccgatctccaaaaatcagttctatgaggcaagacttaagggtagggccagacctaaataaggcctccaaaaaggtgaacctgagcagaactggggcagggagtggactctatatagaattctgttctctatgccactggggtatttccagttctgtttttcctaaacttaccttaaaaaaaaaatccttaaatctcagagtttgtataattttaatctttcttagaccctgccctatcaattatatgacatatactaataagcaatttgaacacatttataaaggttttctagggtaattttattaaaagataaatatgtattaacaaggtaaaagaaatggaaatagaaataattcttctgtctataaatatcccttcaggtgatgacatcgcaagtcacaattatataaagtggcacaaatagagcccaaattttctgcacacatctatttattgtaccaattatatgatgcttaatttaaccatttatccagttgctagactaaaagctcctggattgtagggaccatgactgcttcatctatttttctaatggccatatgaaaagaaaacaatttagccgggcgtggtggcaaatgtctgtaattacacctactcgggaggctgtctcggcctcccaaagtgctggaattacacgcgcgagccaccgcgccaggccttttgactctcatacatttttaatgaaaggaaagagagactaggaacgccacggaccaaagctcttcccattcatgaacccggcacccgtcaggattcgcccctgacgaccctcccgtggtccctgcacaatctgggagagacccggcgctgcggatgcagagccacccagagagagctgcaggccaggacacagtcactgagcagggaggagaaaggacgcccggggggctggctgtcagcgcagccgccatcttatggtccaagtggactgaggccgcctgggcgaggagaactcagggcgcaaattgtggagctgactgcggcgaggtctgagtcccgccacagccccttcccctctctcgggatgtcggacccgacattctcaccatttctaggtttccgggggacctggcgtcttagctatggatcgccaatacctgcaggtcagagggccatagaggctgggcctctagaagaagaggacacagagcagtgaagacgagacccggagctcgggctgaagggagagacaaaggccccgccaatcccggaagccgccctgtctgctccagctgcatgcctgattggacagttcccagcccagcgtccctgactggataatgattaaaaccccacccctcaggtcctgagtgacagaagatgtgatcagatgctctgctgaatgaagactaacaacgtaagttgcagcgttttcagacagggctccctccctgagctaagccaggcccacccaacagggtatttgcctttaaccttctgtgtaaggtcacatgcatttcaaataatatactagatagctattcaaaaataaaaatatatataataacaattattttaatatttcatcttttatgaccgtcctggtttctggcagccatagtccctaccccgacagcccccagcccagatggcattcaaatcttcctggatgggcttgatgcccgtcactcacgcgctctttagcactgcgttgtgttggttactcaggcctgggagaggtggtggggattgtagatccagggtaggagccaccttacacccagagttcacctggccacatgccagcaaggaagcccatgaagcacagccctagacactgagcctcggcacctccagctgcactttctatttatatatcaggtttttttttttttttttttgagacggagtctcgctctgttgcccaggatggagtgcagtggcacaatctcagatcacaacaacctctgcctcctgggttcaagtgattctcttgcctcagcctcccgaggagctgggactacaggtgcgtgccaccatgcccggctaatttttgcatttttagtagagacggggtttcactatgttggccaggctggtcttgaactcctgacctcgtgattggcccgcctcagcctcccaaagtgctggggttacaggtgtgagccaccgcgcccggcctatatatcaggtttttaaaaccataaataaacagacacaaaagcagccactttgattgaggagaaagtgggagcctaaagcagctgaccctcaaacagctttgccaagcctcaggccaggccaggccatctcaacactccaaggctacatgatagttacagaggacgacagttcccataggtacttgtcaagcactgtgctagcttctcagtcacagagtctcagaatttctccttgccaataccctgtgaggggaggccctaactcactagagcacaggaggttcctaagctcttcccaggaaatggttaacaaagtgtggagctgggggaaaacccagtcagaacaaatgacttcccagggtctcccttgactccatccctatctccacatggggccaggaggtgaagcgagccccctaaccccctccattccactctctcctcaaagtggctgtttttgtgttttcttatttatgggatttcaaaagcctgatttttaattttgagtagtttcaggcttgtatgggtgtatttgtataggctttattagaaggaagagggcttaagacaataacatttttaaaatgtctcagtggggaatagacttccatgtcatgaacgatgatgttgacctccttctgctgtctttgtgcaaagtataaatagtgtgagaattggcatgtgctgggttgtggtttcagtgtgggagggcagttccttaagatggaaaccaaatctcaccgagctgtagcagccacactcaccttttatcacattccccaccatagtctttcacttttcttctgtgcttaaatttctttcaacatatatatatatatatatatatttttttttttttaagacagagtcttgctgtgttgcccaggctggagtgcaatggtgcagtctcggctcactgcaacctctgcctcccaggttcaagcaatcctcctgcctcagcctcctgaataattgggattacagatgcgtgccaccacactgggctaatttttgtatgtttagcagagttggggttttaccattttgggcaggctggtctcgaactcct

SEQ ID NO: 1561524 - DNA, 4001 bp, Homo sapiens
aagccatgggtgggacagtgcagggttacggaaggactggttcatgctatagattgtgtcccaggagaggctatgctctgacttcttcctgtgtccatgcaggcagatgagactataatcaggtggcacagaagcctgggttggtgaaaaaaccaggttgccagtacagactacctttcaagctctactgataatttacacttaattaaaaactgaagttaaaataagcaaagaaatctttccaaggtgacaaactcaggaagcggcaatactgattggaacacagacatatctgactcagatgtcaagtcaagccattctatcatttgggacattttcccgccccatcctgctcactgaagtggacaataaccattctaccaagagccactgtgctgtgccccactgtgtcccttagatgcattttgctttgcaggtttttgcactgcctcactgggttgggtgttccttgtccttggggatattttttttctctcttcaccaatctgagaaaattttctcctcaatactagcatccaaattgcctggccagcactgtatctctaagaaatggaaactgggagttggggaagaaaatcttaatgtcctaatggatttgctttcagaggaaaggtatacctgatttctcccaggcacaatgcaccaaccactccacagagaggccacattcccatacctggcagggttgcccctgagaggagatggcccaggggctgatattcactagacacctcaggagacacagccactgtgggcatctcatgtcatccccagacagttctgaaactcaaaaccaggaaaataacacagggtggctgaggatgcattgccctgtgaagtttccaaagtggaacctcaacccaaaaacattctgataaggtgtctgtgcctaggaaagattaaagggagattggcacaaaggtttttgttttttggtctttttttttttcatggtggagtgttgggattattctctgctttcatctcctgtaaaatgtttgcaaatgaaaaacaattctttttctaaaaagtgccatccgctgctctttgaaataatgatcaatcaaaatactgtgtctgaaatgtacaaaaaaggactaatagttgataatgttgtgaattagagaggggaagttggtgttgaagaatgtcaggaaagaactgaaaatttaaaattcaactgcaagtcagagttaggctggggcaacagagtggtagctttgagattctgtttgtcacacatttggaaaatccaagagaaaaccacttctgtggagtgttaaataaatagcaggcagttagactgaggtggctctagtaccctgagttcctacattaaaaaaaaaaaaaatcaaaggcaaatacatttcttgtaaattgctaccttagggggaaacaaaattcagatttttcagatttaagcaaccacaaaccttcaattaacttctgattacataaccaggcaatgacaacctgaatagtctaaataagatgactacataactggaacgagtcagttactgaattcggtttgcttcatcctgcactttataaaaaactttccttcaagctcttcggctggacccccaaccacaaaccgtggctgggtgctctctgagcataaatcactgttaacttcaataagttttcaacattttaaaggtgactcccatagtttttaaacaggagaaggaaaagactgaggacccccgggatcacagcacttcccacgcacaaaccacacacggggtctggactctgccctgaggacgcttccattgtccccgcagtcggggcagacgcaagaacgcgcgcggctcttcccagggtgggctccgggcgggaagcgggagaacggaacgggatgcccgcccagggtcccggctgctggcccacctcgcatcctgtgcccggaggtgatcgacggccgagctgtgcctgccggggactccagtccgcagactccggagctgacagctgggaggccccagtcccgtcactgccggttccggccggtttcaaccagccctgcccccacctcgggatgcgcggcctggcacactcaccatttttcggcttccgggatgtcgtggagtcttagctctggatctcacagcatctgcaagtcagagggcaacagaggctgcgacagtcaccgggaactactagagcagaggatactaagcaatgaagatggaccctgagctctggctggagcgagacaaaggccccgccagctccaggacaccgccccctctaccttggctgcgcacctgattggacagttcccactctagcgcccatgattggatacagttccatgccccgccccctcaggtcatgagtgacaggaggcgtgatctgagaatgtgttgaataaggcaagagttacaggtttttcctgaacccttttctggcgcgcttccttcctgaattggaaactggcccttcctggggaacatttgcatttaactttgtatataaagttatctttatttgtgaatagtatacatatgttattcacaaatggaaacaatataatgacaattattttaaaatctcagatttcatcattttcctagcctccagtcttttgagcaggcagcctaagatgtcgcaagggaggcaattctctaagaaataaactgtgaagcacatatgaattttacattttctagtagccacattttaaaaaagaaaccaggcgtggtagcctgtgcctgtagttctagcaactagggaggctgaggcgggagcatcacttgaggccaggagttttaagaccagcccgggcaacatagcgatgatcccatctctacaaaaaataattaaaaatttagccaagtctggtggtgcacgcctgcagtcctagctactcagaaggctgaggcgggaggatcacttgaccctgggagaccaagactgcagtgagccacgatcacaccattgcactacagccggggtgacagagtgaaaccaagtttaaaaaaaaaaagatctctgaagaaggcattttctctttctgcaatttagccaagcagctgagtatgtcttgaagtcatcttctaatttttaacagggcaaggatgttttctaaaaccccagtctccagagttgccatggggcaaatcccggcagcatacatgaaaatcactcacagctaatgcattcttcatcagatccagtgcttcttacccctggcaaataaaaatcacctgcggggttgggagcggtggttcacgcctataatctcagcattttgggaggccgagacgggcgtatcacctgaggtcaggagttcgagaccagcctggccaacatggtgaaacccccatctctactaaaaatacaaaaattagccgggcatggtggcacacgcctgtaatcccagctactcgggaggctgaggcaggagaatggcttgaacgtgggaggcggaggttgcagtgagtcgagatcgcgccattgcagagtgagacttcgtggggagggtggtggtggcggcggggggtgtggagaatgactggaggggcggggcaggatgtaaacttaaaatccctgaagcccaagttgcaacagaccaattaaattagaatccttggagttggatctgggcaacaatatggtttaaagctctcagggtgattacagtgtgtagccaagtacccaaactactgcttttcaccaacagctttttcttttttttttttgagatagagttttgctctttttgcccatcctggagttcaatggtgcggtctcggctcactgcaacctccgcctcccgggttcaagcgattctcctgcctcagcctcccaagtaggtgggattacaggcgcttgccaccacgcccgctaactttttgtatttttagtacagacagggtttcaccatgttggccaggatggtcacgatctctcgacctcgtgatccacccgcctcggcctcccaaagtgctggaattacaggtgtgacctac

SEQ ID NO: 1561525 - DNA, 4001 bp, Homo sapiens
tgaagttaaaataagcaaagaaatctttccaaggtgacaaactcaggaagcggcaatactgattggaacacagacatatctgactcagatgtcaagtcaagccattctatcatttgggacattttcccgccccatcctgctcactgaagtggacaataaccattctaccaagagccactgtgctgtgccccactgtgtcccttagatgcattttgctttgcaggtttttgcactgcctcactgggttgggtgttccttgtccttggggatattttttttctctcttcaccaatctgagaaaattttctcctcaatactagcatccaaattgcctggccagcactgtatctctaagaaatggaaactgggagttggggaagaaaatcttaatgtcctaatggatttgctttcagaggaaaggtatacctgatttctcccaggcacaatgcaccaaccactccacagagaggccacattcccatacctggcagggttgcccctgagaggagatggcccaggggctgatattcactagacacctcaggagacacagccactgtgggcatctcatgtcatccccagacagttctgaaactcaaaaccaggaaaataacacagggtggctgaggatgcattgccctgtgaagtttccaaagtggaacctcaacccaaaaacattctgataaggtgtctgtgcctaggaaagattaaagggagattggcacaaaggtttttgttttttggtctttttttttttcatggtggagtgttgggattattctctgctttcatctcctgtaaaatgtttgcaaatgaaaaacaattctttttctaaaaagtgccatccgctgctctttgaaataatgatcaatcaaaatactgtgtctgaaatgtacaaaaaaggactaatagttgataatgttgtgaattagagaggggaagttggtgttgaagaatgtcaggaaagaactgaaaatttaaaattcaactgcaagtcagagttaggctggggcaacagagtggtagctttgagattctgtttgtcacacatttggaaaatccaagagaaaaccacttctgtggagtgttaaataaatagcaggcagttagactgaggtggctctagtaccctgagttcctacattaaaaaaaaaaaaaatcaaaggcaaatacatttcttgtaaattgctaccttagggggaaacaaaattcagatttttcagatttaagcaaccacaaaccttcaattaacttctgattacataaccaggcaatgacaacctgaatagtctaaataagatgactacataactggaacgagtcagttactgaattcggtttgcttcatcctgcactttataaaaaactttccttcaagctcttcggctggacccccaaccacaaaccgtggctgggtgctctctgagcataaatcactgttaacttcaataagttttcaacattttaaaggtgactcccatagtttttaaacaggagaaggaaaagactgaggacccccgggatcacagcacttcccacgcacaaaccacacacggggtctggactctgccctgaggacgcttccattgtccccgcagtcggggcagacgcaagaacgcgcgcggctcttcccagggtgggctccgggcgggaagcgggagaacggaacgggatgcccgcccagggtcccggctgctggcccacctcgcatcctgtgcccggaggtgatcgacggccgagctgtgcctgccggggactccagtccgcagactccggagctgacagctgggaggccccagtcccgtcactgccggttccggccggtttcaaccagccctgcccccacctcgggatgcgcggcctggcacactcaccatttttcggcttccgggatgtcgtggagtcttagctctggatctcacagcatctgcaagtcagagggcaacagaggctgcgacagtcaccgggaactactagagcagaggatactaagcaatgaagatggaccctgagctctggctggagcgagacaaaggccccgccagctccaggacaccgccccctctaccttggctgcgcacctgattggacagttcccactctagcgcccatgattggatacagttccatgccccgccccctcaggtcatgagtgacaggaggcgtgatctgagaatgtgttgaataaggcaagagttacaggtttttcctgaacccttttctggcgcgcttccttcctgaattggaaactggcccttcctggggaacatttgcatttaactttgtatataaagttatctttatttgtgaatagtatacatatgttattcacaaatggaaacaatataatgacaattattttaaaatctcagatttcatcattttcctagcctccagtcttttgagcaggcagcctaagatgtcgcaagggaggcaattctctaagaaataaactgtgaagcacatatgaattttacattttctagtagccacattttaaaaaagaaaccaggcgtggtagcctgtgcctgtagttctagcaactagggaggctgaggcgggagcatcacttgaggccaggagttttaagaccagcccgggcaacatagcgatgatcccatctctacaaaaaataattaaaaatttagccaagtctggtggtgcacgcctgcagtcctagctactcagaaggctgaggcgggaggatcacttgaccctgggagaccaagactgcagtgagccacgatcacaccattgcactacagccggggtgacagagtgaaaccaagtttaaaaaaaaaaagatctctgaagaaggcattttctctttctgcaatttagccaagcagctgagtatgtcttgaagtcatcttctaatttttaacagggcaaggatgttttctaaaaccccagtctccagagttgccatggggcaaatcccggcagcatacatgaaaatcactcacagctaatgcattcttcatcagatccagtgcttcttacccctggcaaataaaaatcacctgcggggttgggagcggtggttcacgcctataatctcagcattttgggaggccgagacgggcgtatcacctgaggtcaggagttcgagaccagcctggccaacatggtgaaacccccatctctactaaaaatacaaaaattagccgggcatggtggcacacgcctgtaatcccagctactcgggaggctgaggcaggagaatggcttgaacgtgggaggcggaggttgcagtgagtcgagatcgcgccattgcagagtgagacttcgtggggagggtggtggtggcggcggggggtgtggagaatgactggaggggcggggcaggatgtaaacttaaaatccctgaagcccaagttgcaacagaccaattaaattagaatccttggagttggatctgggcaacaatatggtttaaagctctcagggtgattacagtgtgtagccaagtacccaaactactgcttttcaccaacagctttttcttttttttttttgagatagagttttgctctttttgcccatcctggagttcaatggtgcggtctcggctcactgcaacctccgcctcccgggttcaagcgattctcctgcctcagcctcccaagtaggtgggattacaggcgcttgccaccacgcccgctaactttttgtatttttagtacagacagggtttcaccatgttggccaggatggtcacgatctctcgacctcgtgatccacccgcctcggcctcccaaagtgctggaattacaggtgtgacctaccgcacctggccttcatcaacagttttgatgaattagttataaatggtttttcaaatgcatgtaaaaacgtttgctgctgagttgtgaccttacaatcttaactcatttcccacttactatactttgcagaaccaacctctgctactcgctttgttcctgattgaacctggttccatgtgtgctcagtgtatactatgcacagggcactgtgct

SEQ ID NO: 1561526 - DNA, 4001 bp, Homo sapiens
caccatcaccctgttgtcctgccacactcccctcgccaagatagtaaaaatagtgatcaataaatactgagggaactcagagaccagcgccggtgcaggtcctcgcatgttgagcgccggtcccctgggcccactgttctttccctatacttcgtctctgtgtcttatttctttactcagtctcttgtctctacctgacaagaaacacccacaggggtggaggggcaggcccccttcaggtgcgtgcctgtaatcccagctactcaggaggctgaggctagagaattgcttgaatccggaaggtggaggttgcagtgagccgagattgagccattgcactccagcctgagtgacagaaggagactctgttttaaataaaaacaaaaacaaagtaccttcccaggtaagtgaagtgaccggctcttggccaagggaacccccaaaaaaccctgaaaattgagtgcctctgtatgacaggatgggaggtgagacaggcctccttataccctctccctttaggagtttacatgcagcaactgacgcacattcatgtaaaaacagacattatctgactggaaaaacagactccttgtggcaagaagataccaaattacaaacaagacctaaggccacgcaagacaagggtaagtcacaccttagaattcataaaatctagagaaacaggtctgttttttggctgggatggaatcaagtggcagataacagacccccttccttcagcattccttcctacctcctccaaactttagacaaagcttcacactctcaaccagctgccacctacagaatccctcaaccacctgtgccttctaaccccccttccacaggtcccgccctttctgttttttgtttttgtttttgttttgagacagagtcgcactctgtgctgaggctggagtgcagtggcactgtgtgggctcactgcaacctgtctcctggattcaagtaattctcttgtctcagcctcccgagtagctgggattacaggcgtccaccatcacgcccggctagtttcttttttatatttttagtagagacggggtttcaccatgttggccaggctggtcttgaactcctgacctcaggtgatccgcccgccttggcctcccaaagtgctggaattacaagcgtgagccaccgtgcccggccaggtccctccctttctgcctaaggaaattacaccttccaggcactaattcatgattttccctgcaattcctgtctctctaaaatgaataaaaccaaactgtcttgagccgcctcgggaccacttactccaggcttcttggggttgtttttccctcggccaaggtctctcctattcggctccgaataaacttctttattttacatagtttggctttttccgttgacaaaccacaagccaggactgggtgtgtctcattcgtgaatcgctgtttgctcaaatgaactctttgttaacgttcctcagtttaatttttaacaggagaaaaagtggacactgggggccccacagaccgctgctcctcccaagcacgaaccccacacccgagtcgggatcacccacatgaccctcccgtggcccccgcacaatctgggtagacgcgtggctgcgggcgcggagctgcccatagagggctctggaaccgcagtcgccgcgcagagacgagacaggacgcctggtgtcccggctaccggcccagccacaccgagcagtcgaggggaccgagggccgagcggctccaggaggactcggtcccagatcccaaagtcgcccgcaggaaagccagggtctcgccacagtcggttccggtcggtccaggcagcccctcccccgtctcacgacacccggccccagacacgcaccatttcctggctttcagatgtcccggggtcctctctacacctcctgtgactacagcagggcatagcgtaggtgacagagtgacagaagcctgggcagaggaaccaggtccctctcggggctggaaagaccggatcccagccgcagcccgcgcagggacaaaggtgaggtaaggaatgcgaccccctcagtgtctggaggaacagtgggcagggacccgccacaatgcctctgattggatggaatgctaggccccgccccccatgtctgagtgacagcggaagccctgggtatcgggccctgcagagccagacagacggattctgaccacagcttttccaagggcgagctccttcctgcactctggttattggatatttgcatttcagccaaacttgctattgatagaggagaacactagcgtcttcctcactcaagggactgtccctgctccttcgttctgcatggggtcacaggagtgtgcagggaatttcagattcagtgtccacaggagccatctcctgcctcagagcagcaggggaaccgagaccaggccagacacgactgcgccaggaggagaggcatatgtcttggagcgggccgcaactggggatgaggcatggctaagacttgctctcacacccccatcccctcctcacagtgtgaaaatgcttcctccttccagatcttcattttcaccagcaggaaactctctccaggggttaagttaagcttttgacctaaataaactgccaacttcatgaaccctttatccaggtgacgctcccaaacatttctgtctctagcctgatcttcacacattttcttttcttttttttttgagacagagcctcgctctgtccccccaggctggagtgcagtggtgcaatctccactcactgcaacctccgcctcctgggttcaagtgattctcctgcctcagcctccccagcagctaggattacaggcacatgccaccgcgcctggctaattttttgtatttttagtagagacaaggtttcaccatgttgaccagactggtcttgaactcctgacctcaagtgatccacccgcctcggccacccaaagtgctgggattacaggcgtgagccaccgcgcctggcccacattttctttatatatatgaatatctctgtcggatataaaatgctttaggaataaattcttggtcccacgaagtaaaactagcacttaggggaaagtttcatttgtttagcaaggcaatttacttctgcagaagtgtgccacttgtgtcaatcaagatcacaagagcacagagaacaaaggtcaccgggggtttttttatccttaatgcggtccctatctctgtgtcactccttcatgggctggggttcgaccacacaatctgagctgacccgactggctacttgtacgtatttttctaaatatagaaggagaggggaacgtgaggtacagagatggagcgtgtgagacgtgcagtttcgggggaacaatgggtacaggtaaccaagggaacagatgtgagttattgattagagctgacgggaagggggtaggctgttttacagtaactaggggcaaggaggaacaggaaagttgagctggagaacaaaagacaaggaagttagcaggctaagtctttgaagagaaactcagagaggccaggcgcggtggctcacgcctgtaatcgcagcactttgggaggctgaggcgggtagatcacgaggtcaggagatcgagaccatcctggctaacatggtgaaaccccgtctctactaaaaaatacgaaaaattagccagtcgtggtggtgggcgcctgtagtcccagctactcgggaggctgaggcaggagaatggcatgaacccaggaggcagagcttgcagtgagccgagatcacgccactgcactccagcctgggtgacagagtgagactccgtctcaaaaaaaaaaaaaaaaagaaactcagagaaatttactgtatgttacaattcctcccttttaattttcttatgattttttctctttaaacttttttaacgtgttttggctttgctgtttgatttgatcttttaaaaggaaaagcttacttgaataaggtggaggagaactaagggaggtttcagtaaatgc

SEQ ID NO: 1561527 - DNA, 4001 bp, Homo sapiens
atactgtacagaacacttctgacaccagatgtgtgggggatattttccacaaacaccaagcaattccccagtggacaccagctgggtatcctacaacttgcttctgatactatctacctggagattccacaggttggagattccacaggaggtcccactaaactgcctcccacttcagatgccaatcccaagttaaaaggctgtcaattatacttctgactggctaaaatcagggctcctactaccctctccttgagtttgattaatttgctggaacaactcacagaactcagggaaacatgtttactggtttatcaccaaggtcattacgaagtacacagataaaatagccagatgaagagatggacaggccaaggtatgctgggaaggggtgcagagattccatgccctctcctggcatgccaccctccgggaaccaccacacgtccagctatccacgagctcctcaagccagtcctttgggtttttaaggaggctccatcacaggcatggctgatttaagtcccaatcctctgatcttgcctgggtctttctgaaccagcccccattctgagtctctctaggggcttccagacaccaaccatctcatgagcacacaaaagacgctcttattgctctagagattacaagggtttttaggaactctgtcctaggaaataggatgaaaaccaaattgttttcttttttttttttttgagatggggtctcgctctgtcgcccaggctggagtgcagtggcgcgatctcggctcattgcaacctccacctccctggttcaagcaattcccctgcctcagcctcccgagtagctgggattacaggcacgtgctaccatgcccagctacttttttttgtatttttagtagagacagcgtttcaccatgttggccagactggtctcgaactcctgacctcaggcagtctgcccaccttggcctcccaaagtgctgggattgcaggcgtgagccaccgtgcccagccccaaatatgtatttcacaatatcatagatggtgaccaatgccagtcttatgatggcctagaaaagtccagaacatattgaagaaatgagaaaaatgctctggaaatgaaataatttccacattgacatcatcgattccttattacagaaataacttcacctgttactttattcccaccatagcaatcactacaacattaaacacagggtcaaatctagatgggattttaatgaataaaaatacaccgagagaaaagcagcctttcatttttttccccctcacaaaactgagaggcccaggagactgcataagcacaattttgaagccaggcccacagctggtcatactttcttgtattctaggccagtggtcagcaaactatggcacatggactatatccaagctgccacttgaatgcataaatacagttttattggaacacaataaaatgtgtttatgtactgtctatggctgcttttgcaccaaaatggcagagctgaattgcaatagaaacactacggccggccgggcacggtggctcatgcctgtaatcccagcactttgggaggccaaggcggacagatcacgaggtcaggagattgagaccatcctggccaacatggtgaaaccccatctctattaaaaatacaaagttagccgagagtggtggtgcatgcctgtagtcccagccactcgggaggctgaggcaggagaatcggttgaaccagggagtcgaaggctacagtgagccaagatggtgccactgcactccagcctggcgacagagcaagactctgtctcaaaaaaaaaaaaaaaaaaactatagccttcagtgcctaaaatactatgtggtccaatacagaaagagattgctggcttgtgccctaaaacactgagggagacctggtacaatggaaatattcttttggacaattatcaccttttacttacctgtattctatttttctgtaactcagcagtttttctttcttcctccatgtcgccttcatgaagaaaagcaggatattgagaagttagaattaaaaaaggtgacatgagaatccagacctccccaaaattcccacactcatgagcctggatgttgcagcccatcaattataagtaacaactcccctcaaaacacatacacacacacacacacacacatgcacacacccaagacacccaagtaaatataccctgctcttgtgggaaagtggaacaaccttacgtccccctagagatacaaaacagtgctctggtccttgttgatcataaagaagaggttaagagtgctattttgtaagttaactgaagactagaaaagtctggctgtcaatctgcccatgataacaaaaagtataaaatgtatcagggagtatcttccaaaacatgaataaacactccccatctcaaattcaagaaagcactgatttatatgccaggcttctgggagttccactcccgatatttcttacttctgcaccccttggctggctaacaggctttgctgctcagccctagaccactgcccctgcccccatgagctgcagggttccccaaaacctgagaaagagcatcagcctattttttttttttgagatggagtcttgctctgtcacccaggctggagtgcagtggtgtgatctcagctcactgcaacctccacctcccgggttcatgccattctcctgcctcagcctccccagtagctgggattacaggtgcacaccaccatgcctggctaatttttctgtgtttttagtagggacggtgtttcaccgtgttagccaggatggtgtcaatctcctgacttcatgatccgcctgcctcggcctcccaaagtgctgggattacaggcgtgagccaccgcgcctggccaagcatcagcctattgaattccatatgctggaggcagagaaggccgctatgctgtgatacacatgctaaatctgcctgcacagtacagtagtagcagaataagaatacttggccaagcatggtggctcacgcctgtaatcccagcactttgggaggccgaggtggatggatcacgaggtcaggagttccaaaccagcctaaccaatatggtgaaacccctcctttactaaaaatacaaaaattagccaggcgtggtggcgcaagcctgtaatcccagctactcaggaggctgaggcaggagaatcgcttgaacccgggaggcggaggttgcagcaagccgagattgcgccactgtactccagcctgggagacagagcgagactccatctcaaaaaaaaaaaaacacttgacctgtgtcagccctgatgtggtatctgcagtgctgtttcacaaatttcaaacaacgacatgttaacagttacttccactgcagtggaacaagtagcattttaaaaagccaataaaaaactgtaacattctttgctgtattagtaacaatatatgccatctggacaaccctgatgtgagaatgactttgcaaagaaatggccacattttagaatatttctcacagaagctctgcaaatcaaatattattacaaccagtttagaattatcttagaatgagtcaattaaccacatcttcaatattacccaattagacagctgctgaggcagggtatgaatgcaggcctatttgtcttcaaaacccaaacacccagtgagtacatttttgaacacataccttaaattttaattgtttttaagccccttattccctagttttaccaggatttagcctagaaccctattgggcactacagagagtggacaaatgaagcattctaatcaaatatgctgtgcgtggtagctcatgcttgtaatcccagcactttgggagaccaaggtcgggggaatcacatgaggtcaggagttcaagaccagcctggccaaaatggcgaaaccctgtctctactaaaactacaaaaatcagccgggcatggtggcgcacagctgtagtcccagctactcaggaggctgaggcaggagaattgtgtg

SEQ ID NO: 1561528 - DNA, 4001 bp, Homo sapiens
agtagctttcaataaactctcttctcactgcactttgtgactcgtcttgaattccttcctgtgtgagattcaagaactctcctggggtctgatcaggacctcttttcctggtaatacaagcaagaacttaacttccagttttggagtactgagtctatttccctagagtctgtgtttttcccaaatgggccactgctatccttccgcttgaataaactcttccaactgaaatcttgacctttctattatttcggagtgacaagtccaaataaggcaactgcatctctgcaaccaatcaagcatttatctggtttgtctcctcacgtaacttataaaagcttacccctaaactggtaaactaaaaataaaaacatacctctggcccggcgagatggctcacatctgtaatcccagcactttgggaggctgaggtgggtggatcacttgaggtcaggagttcgagaccagcctggccaacatggtgaaaccccatctctactaaaaatacaaaaattaggagggcatagtggtgcatgcctgcaatcccagctactcaggaggctgaggcaggagaatcacttgaacccggaaggtggaggttgcagtgagccgagatcaggccattgcactccagtctgggcgacaggagactccgtctcaaataaaaacaaagtacctttccagctaagtgaagtgaccggctcttggccaacaggacccgcaaaaaaccctgaaaattgagtgcctctgtatgacaggatgggaggtgagacaggtctccttataccctctcccacacattcatgtaaaaatagatagaatggaaaaacagactgcttgtggcaagaagatactaacttacaaacaaaacctaaggccacgcaaggcaaaagtaaagtcacgcctcagaattcataaaatctagagaaacaggtctgttttctggctgggatggaatcaagtggcagataacagacccccttccttcctacctcctccaaactttagacaaacttcacactctcaaccagctgccacctacagaatccctcaaccacctgtgccttctaaccccccttccacaggtcccaccctttctgccaatggaacttacacctttcaggcactgattcatcattttccctgcaattcctgtctctctgaaatgaataaaaccaaactgtcttgagccgcctcgggaccacttactccaggctgcttggggttgtgtttccctcggccaaggtctctcctattcggctctgaataaacttctttattttacatagtttggctttttccgttgacaaaccacaacccaggacggggtgtttctcattcgtgaatcgctgtttgctcaaatgaactctttaattgttaacgtacctcagtttaatttttaacaggagaaagtggggactgggggccccacagaccactgctcctcccacgcacgaaccccacacccgagtcaggatgcctccatgaccctcccgttgcttccgcacaatctggggagacgcggggctgcgggagcggaactgcccagagagggctccggggcaggggccgcggccgcagtcgccgcgcagggacgggacaggacgcccgggtcctggctgctggcccagccccgtccagcggccaaggggaccgagggccgaactgctcaaggaggactcggtcccagaccccggagtcgcccacagggaggcccgggtcccgccacagccggttcccgcctgttccaggcagcccctcccccgtctcacgacatctggtcccgcacacgcaccatttcccggctttcagatgtaccggggtcctctctacagctcctgtgactacagcagggcatagcgcaggcgacagagcgacagaagcctgggtacaggcaccaggtccctctcgggctggtctgaccggttaccaaccgccgcccgcgcagcgaggaaggtgaggaaagcgaccccctccatttccggatgaactgtgggcagtgccacgccccagcacctctgattggatgaaatactaggtcccgccccccacatctgagtgacagctgaagccctgggtatcaggccccgcagagccagactgacggattctagccacagcttctctaagggcgagctgctttctgcactctggttattggatatttgcatttcagccaaacttgctattgatagaagagaacactagcgtcatcctcactcaagggacagtccccgctccttcgttctgcacggggtcacaggagtgtgcagggaatttcagactcagtgtccataggagccaactgctggcctcagagcagcaggggaaccgagaccaggccaggcacgactgcaccaggaggagaggcatatgtcctcgagcgggccggaattggggatgaggcgtggccaagccttgctcacacacccccatccccttgtgaaaatgcttcctcctttcagatcttcattttcaccagcaggaaactctcaccaggttttgtttctgacctaagtaaactgtcaacttcatgaaccctttatccaggtgacgccaccaaacaattctgtctctagctctagcctgatcttcacacattttcttttctttctttctttttttttttttttttttgagacggagtcttgctctgtagcccaggctggagtgcagtggtgcgatctcgactcactgcaagctccgcctcccgagttcacgccattctcttacctcggcctccggagtagctgggattaaaggcgcccgccaccacgcccggctaatattttgtattttcagtggagacggggtttcaccgtgttagccaggatggtctcgatcttctgacctcttgatccgcccgcctcggccccgcaaagtgctgggattacaggcgtgagccaccgcgcccggccacacattttctttatctatacaaataactctgaccccaacgaccccatgcatgtcaaaccccaaaccctgcccagaagacagctccagaggtacaacaccagaaaggacagagacgccacaaatgcgtctgcacatgggtcttctgctttccagggctctgcagcttctcggaatccacaccctttctggagctgctctgagcagctggaggccacttgtagaagggggtgggctgcccgcgaagcccccagggaaactctctttccctccctttgcaggctgcagagactgtcctcaacgtggaatcactggccttgggctctgctgccccctgcaggttattcagctacttctcaccccatcgattagtttcgcgagacaaacaccttcaatcccattgtgtaaataagacaccagcagagtccctgctctcctcctatgcttatgtataaagtgggggaggaaaaatctaagataacttaagggcatttgaaagacttccagatcgcggtggaggtggcagctgagggactcgcagtcaatgacactgcagcacctccaggccaggctggtgggagagagggtggagagctggagatggatgtggataggtggagggagctgccctgggaactgggctctgcagcagtgcggctctagggcccggagcccgggagagcagagatgggggctcccaggacaggaaactcagggaggagagagtcgggtggcttccatgggacggggtgctgttgcagcttgtgtgagccagtagctatcataactaagcccaatcgggacgtgaaaacttggattccgtgggaatttatgaagaggaaggctctgatgacaaagaagtcatcgatgaggagggggatgagggtcactggcaagcttgcttccttatggaaagaaaagtgaacacccaactactgctgcaaaatgggatcaaaggatgagactctcgctgtcagggaataaactgctgcagaactcttagagattgcaaagacctttcaacaacagcctgggaggccaggtgccatggctcatgcctgcaatcccaacattttgggaggcca

SEQ ID NO: 1561529 - DNA, 4001 bp, Homo sapiens
atttagctgtgacatcctcagaacggggacattttcaccgagtcacgctgagaaggtctgagatgagtgaaaagatgtaacggaattcttacatggtggcctggaagggataaaggaaagggttggccttatcaaaactatccttgaaaattagagaagcctctttcacatacctgggataaagaaacttcctttgcaagttctgatgccactgattcccaacatttaattcttcctcacaagaaaattacagtaacatttataaaatgcagatgtacaaagacacagctagttaccttcaaaacagggaggctgagtgcggtggctcacacctgtaatcccagcactttgggaggccgaggcaggcggatcacctgatgtcgggagttcgagaccatcctgaccaacatggagaaaccccatctctactaaaaatacaaaaattatctagatgttgtggcacttgcctgtaattccagctactcaggaaggccgaggcaggacaatcgcttaaaaccgggaggtaaaggtggtggtgagtaggccgggctcggtggctcatgcctataatcccagcactttgggaagccgaggtgggcagatcacctgaggtcaggagttcaagaccaacctgaccaatatggagaaaccccatctctactaaaaatacaaaattagcctggtgtggtggcacatgcctgtaatcccagctactagggaggctgaggcaggagactcgcttgaactcgggaggtggaggttgcagtgagccgagatcgcaccattgcactccagcacgggcaacaagagcgaaactccgtctcaaaaaaaaaaccaaaaagggttgcggtgacccaagatcacaccattgcactccagcctgggcaacaagagcgaaagtgcatctcaaaacaaacaagcaaacaaacaaacaaaaagcagggaaagagggtcagctgtagaactaagacataagcaaactttttcaatcaagaatgcttgggtggccaggtgcggtggctcacgcctgtaattccaacactttgggaggtcgaggcgggtggatcacctgaggtcaggagttcgagaccagcctggccaacatggtgaaaccccgtctctactaaaaatacaaaaattacctgggctccatcctcacgtcttatttaatctcttgttgctccttctccccaattcttcgatcgtcctcaatctccatatatttccgcctcttatcccatctctgcatctctgccgctctccctgttaaattctctcttctctgttttaccccccgtccccactctctagcaccccagatccccaggcgtcctccctgctgtggttctccctctgttctccttgccaccagcaccactctgctctgtctgccctggctccaaattcctcctctctctctctctctctctcactctgatgagcctccctctttgctgcccctctctaccttgctgtctgtccttcatctctctgtacatctagcttttctctacatttctccagttgcttttctcctcctgctttcttatcttttttttttcacttttgctgtctcttggcaaatccctcacccatcctctactttgccatctgttatgggtctttctcattcttcttttctctgtctcaggttttctactactctctgtctcctgatctctttagcccacacaatcacaggagggtttgaagtaagacgcctgcatcccagagaggctcatttttcaggggttggagctaggcaggcaagaacacaccgtgtcacaggactggcccctggcacctccccaacgctggctcaaggaaagtggtgactgctaaggggagacttggggtgcagcaaggcccagcatgaggcgggaggtggggtgcgacgacgccttcggtggggtccacaagatcccagcaccaggcagagaactcggcctccctgagactgggatcgcgacgtttgcgcttcaggcgcctaaaggttgagactgggaggcgcccaggcggaaatacacatctcgggtgaggactttgaaaagcgcggggagggaggagttaaaaaacggttttgagcacagaaactacgcgataggaagtgtatacagcgccctgtagcagaaagactggagacgggaacagcctcagggcgactttaaacacaaaaggaagcgacttccggattcccaggggaacgtctgcatttgctctggttgaaggaagatgggcgagaatttacaggtctgtggtgaccccacgtcccaggtacggaagtgccggggatatggggagtgcagacttaatacaacacagagcaaaactcaccgccgcggtgcgaccttcactccacgggatccgcttcctggtctgcgcggatgtgtgcgcacaggactaaagccaggcctgggtggagccaacgagaaggtgggcggggcctgatcgaggtagaggcggggccccaggcggagagaccttgccctttagaaccggcagagggcggggccggggcgggacctgtgcgtctctcagcctcgctcccagcgactctatttttcgggctttggaggcgagagcggtcaggaaggctgaagcacgattcgaaagccctggaattgtctggaacggggatgcaaacaagaatgtaaaatgcaaagccctgcctgggcggaacgtacaatttcatgctgacggcccacagaacagaacagaaatcctctccctttctattctccattcactcaggagggagagtccaccctgtgctcagcttcagagacttccctagggcctccgcctgggatgcgcgacggagtgttcaggccagggaggagtgaagtcaccacctactgcttaaacatagcaggaatgcggccaggtgggcgggagcctgagggccagaggcgggaggatcactgagcctgggggtccaggccagcctgggcgacaaagtaacacaccctcccgcagggctcccctcatcgtctcttttaatttttaaaataaaattttgattgtgtgagatagggatacaacattattcttttccatgtggatatccagttaattgtcccagcacatttgtggaagagatctattactttcttttttttcttttctttttttttttaagacggagtatttctctgtcgctcaggctggagtgcagtggtgacatctcggctcactgcagcctctgcctcctgggttgaagcgattctcctgcctcagcctccggaatagctggcattacaggcacaggccaccatgcccggctaatttttgtattttgggtagagacggggtttcaccatgttggccaggctggtctcgaactcctgacttcaagtgatccgcctgcctcggcctcctgaaatgctgggattacaggcgtgaaccactgtgcctggcccaagaaatactcttcacttcgctcttaaatgttgagaaaatacaattgaaaactaaaaaaatcttcccctaaatgagaaatcatcttcacgacgataacagagaaagaaataaaaactattttattaataaataggccttagaccagcatgtgatgggaaatagaggacagttgagaggttgaaaagagagaaagaaacttcactgttctatacaacccaaatacatgttttcaagataaacactgatcagtcctcagggaagaggacttgacaacacccttggtcacacataattcatcctggctctacttggtaatggaggtgaccatctgtgtcagctaactagcatcatcctgagggagggggagaaaccctaacccatgtatttttggcaagtgtgagttttacagcatggcggacaggtgccctctctggtgaggctcctacaatccaacagaaactgatgtcagcagtaaataatgaaatttagaatacattattaattatagagtttatttggacacaaagcatgagaatagccacctggaaacctcaactccaaatgaatggggtcagcgttcc

SEQ ID NO: 1561530 - DNA, 4001 bp, Homo sapiens
agaccatcctgaccaacatggagaaaccccatctctactaaaaatacaaaaattatctagatgttgtggcacttgcctgtaattccagctactcaggaaggccgaggcaggacaatcgcttaaaaccgggaggtaaaggtggtggtgagtaggccgggctcggtggctcatgcctataatcccagcactttgggaagccgaggtgggcagatcacctgaggtcaggagttcaagaccaacctgaccaatatggagaaaccccatctctactaaaaatacaaaattagcctggtgtggtggcacatgcctgtaatcccagctactagggaggctgaggcaggagactcgcttgaactcgggaggtggaggttgcagtgagccgagatcgcaccattgcactccagcacgggcaacaagagcgaaactccgtctcaaaaaaaaaaccaaaaagggttgcggtgacccaagatcacaccattgcactccagcctgggcaacaagagcgaaagtgcatctcaaaacaaacaagcaaacaaacaaacaaaaagcagggaaagagggtcagctgtagaactaagacataagcaaactttttcaatcaagaatgcttgggtggccaggtgcggtggctcacgcctgtaattccaacactttgggaggtcgaggcgggtggatcacctgaggtcaggagttcgagaccagcctggccaacatggtgaaaccccgtctctactaaaaatacaaaaattacctgggctccatcctcacgtcttatttaatctcttgttgctccttctccccaattcttcgatcgtcctcaatctccatatatttccgcctcttatcccatctctgcatctctgccgctctccctgttaaattctctcttctctgttttaccccccgtccccactctctagcaccccagatccccaggcgtcctccctgctgtggttctccctctgttctccttgccaccagcaccactctgctctgtctgccctggctccaaattcctcctctctctctctctctctctcactctgatgagcctccctctttgctgcccctctctaccttgctgtctgtccttcatctctctgtacatctagcttttctctacatttctccagttgcttttctcctcctgctttcttatcttttttttttcacttttgctgtctcttggcaaatccctcacccatcctctactttgccatctgttatgggtctttctcattcttcttttctctgtctcaggttttctactactctctgtctcctgatctctttagcccacacaatcacaggagggtttgaagtaagacgcctgcatcccagagaggctcatttttcaggggttggagctaggcaggcaagaacacaccgtgtcacaggactggcccctggcacctccccaacgctggctcaaggaaagtggtgactgctaaggggagacttggggtgcagcaaggcccagcatgaggcgggaggtggggtgcgacgacgccttcggtggggtccacaagatcccagcaccaggcagagaactcggcctccctgagactgggatcgcgacgtttgcgcttcaggcgcctaaaggttgagactgggaggcgcccaggcggaaatacacatctcgggtgaggactttgaaaagcgcggggagggaggagttaaaaaacggttttgagcacagaaactacgcgataggaagtgtatacagcgccctgtagcagaaagactggagacgggaacagcctcagggcgactttaaacacaaaaggaagcgacttccggattcccaggggaacgtctgcatttgctctggttgaaggaagatgggcgagaatttacaggtctgtggtgaccccacgtcccaggtacggaagtgccggggatatggggagtgcagacttaatacaacacagagcaaaactcaccgccgcggtgcgaccttcactccacgggatccgcttcctggtctgcgcggatgtgtgcgcacaggactaaagccaggcctgggtggagccaacgagaaggtgggcggggcctgatcgaggtagaggcggggccccaggcggagagaccttgccctttagaaccggcagagggcggggccggggcgggacctgtgcgtctctcagcctcgctcccagcgactctatttttcgggctttggaggcgagagcggtcaggaaggctgaagcacgattcgaaagccctggaattgtctggaacggggatgcaaacaagaatgtaaaatgcaaagccctgcctgggcggaacgtacaatttcatgctgacggcccacagaacagaacagaaatcctctccctttctattctccattcactcaggagggagagtccaccctgtgctcagcttcagagacttccctagggcctccgcctgggatgcgcgacggagtgttcaggccagggaggagtgaagtcaccacctactgcttaaacatagcaggaatgcggccaggtgggcgggagcctgagggccagaggcgggaggatcactgagcctgggggtccaggccagcctgggcgacaaagtaacacaccctcccgcagggctcccctcatcgtctcttttaatttttaaaataaaattttgattgtgtgagatagggatacaacattattcttttccatgtggatatccagttaattgtcccagcacatttgtggaagagatctattactttcttttttttcttttctttttttttttaagacggagtatttctctgtcgctcaggctggagtgcagtggtgacatctcggctcactgcagcctctgcctcctgggttgaagcgattctcctgcctcagcctccggaatagctggcattacaggcacaggccaccatgcccggctaatttttgtattttgggtagagacggggtttcaccatgttggccaggctggtctcgaactcctgacttcaagtgatccgcctgcctcggcctcctgaaatgctgggattacaggcgtgaaccactgtgcctggcccaagaaatactcttcacttcgctcttaaatgttgagaaaatacaattgaaaactaaaaaaatcttcccctaaatgagaaatcatcttcacgacgataacagagaaagaaataaaaactattttattaataaataggccttagaccagcatgtgatgggaaatagaggacagttgagaggttgaaaagagagaaagaaacttcactgttctatacaacccaaatacatgttttcaagataaacactgatcagtcctcagggaagaggacttgacaacacccttggtcacacataattcatcctggctctacttggtaatggaggtgaccatctgtgtcagctaactagcatcatcctgagggagggggagaaaccctaacccatgtatttttggcaagtgtgagttttacagcatggcggacaggtgccctctctggtgaggctcctacaatccaacagaaactgatgtcagcagtaaataatgaaatttagaatacattattaattatagagtttatttggacacaaagcatgagaatagccacctggaaacctcaactccaaatgaatggggtcagcgttcccaagtagagacattaacatttcacacacacaaggaaatacagagaagctttcccagaaccaccacattttccattcaagtccagtgcataggctgcggcagcttgactggtgatggagtgatacacttcaaggaaggttacattatcactccataagaagggacaatgatgccaggaggtcttatctctggggctgcttagttttcctaattatttacacgaaaactttttaaaattgatattaggaaactaaattgtatagcacattttgttttgttttgttttgttttgggaaggcgtcctgctctgtcgcccaggctggaatgcagtgatgtgatctcggctcactacgacctccacgtcctgggttcaagcagttctcctgcctcag

SEQ ID NO: 1561531 - DNA, 4001 bp, Homo sapiens
gagaatcgcttgaacctgggaggcggaggttgcggtgacccgagatcgtgccattgcactccagcctgggcaacaagagtgaaactccacctcaaaaaaaaaaaaaaagaaaagaaagaaaacagatgtgtctgactgatattcacccaccccattctgctcaccttaagtgctcaataaccaccctctcaggagacattacactatgccccaggtgcattttactttgtaagttcttgcaccatctcacttgggtcaggtttttctttgtcttttgggatacttttttttttccacaaaatttagagaattcagggggcagaaattatttctgtgttttcccctcaataccagcatctgattggctgaccagcactgtgtctccaagaaatggaagctgggttgggtgaagacaatcttaatgtctcaaggggttagcttttcaaaggaagagtatgccaggagatgcctctcagccccagggcatccacctgctcccttgagaagctacactccatacctcaggttgtcctcagggagaaaaatgacccaggagctgatattcactagacactctagcagaaaaagtcatgatgtgtatcttggtttactccagacagtactgaaacccaggaccaggaaaaaactgaagggtggctgaagacacatcactccgtaaagtttccaaagaaaaaccttcacctgaaaacaaacattctgataagatttctgtgcctgaggaagataaaaaaaaaaaagccatagaaatttcataaaatacagtgtcagggaattattttttgctttcttctcatgagaaatattttcaaccagaaaacaattttaagtgccatccaatgctttgtcaaaaaatgattaactaaaatacagtatcaaaaatgtacactaaaggaaaaacagttgagaatgtgaattaggaaaggcaagctggcatttggaaatgtcagaaggaactagaaatttagtattttagtttatttgcagtttaaatctaactgcaggccagagttaggctggaggaatggggctgggaggtacacttgagaccccgcttggaacgcatgtgaaaaatgcaggggaaaatcagtcccctgtggagtgtgagaataattaagtggcaggcaattacactgaggaggctctagtccccggctttctacttaacagcaacagctacgtaaatgtacctaaccgattattaaatatagttttcttcatcatgcaccttataaaaagtctttccttcaagctcctcccatgaaccacaaactacaaaacatacttttgtgctctacaattattgaatcactctttgattaaattctttaatattttttgcgatgactgccacagatttttaataggagaaaataggaaccgggaaccccacagaccaaagctcttcccattcatgaacccgaccccaagtcaggattctcccctgaccaccctcccatggtccctgcacaatctgggagaggcgcggcgctgccggtgcagagccgcccagagagggctgcaggccagggcacagtcactgcgcagggaagagacaggacgcccgggggcccggctgtcggcgcagccgccatcttatggctgaaggggactgaggccgagctaggcaaggagaactcggagcgcagattgtggagatgactgcggggagtcctgagtcccgccacagccacttcccacaggtttcaaccagcccttcccctctctcgggatgtcggacggcactctcaccatttctaggcttccagagggtcctggagtcttagctgtggatctcccaatacctgcaggtcacagagccacagagtctgggcctctaggagcagaggacaaacagcagtgaagacgagaccggagctccggctgcagcaagagacaaaggccgcgccaaacccggaagccgccctgtccggtccagctgcgtgtctgagtgaactgtccccagctcagagtccctgattggataatgttaaaacccgccccttcaggccctgagggacggaagatgtgatcagatgctgggctgaatgaagtgtgacagcctatgctgcagccttttcaggcaaggcttcctccctgagctgagccaggcccacccgagagggtgtttgcctttaatcttgtgtataaggtcatatgcccttataaataatatgctatatggctattcacaaatgaaaagaatataataacccaattgttctaaaaaaaattttttttttgagattgagtttcactcttgttgcccaggctggagtgcaatggcgcgatcttggctcatcgcaacctccacctcgcgggttcaagcgattctcctgcctcagcctcccgcgtagctgagattacaggcatgcgccaccatgcccggctaatttttttgtatttttagtagagacggggtttctccatgttggtcaggctggtctcaaactccagacctcaggtgatcctcccgcctcggcctcccaaaatgctgggattacaggcatgagccactgcgcccggcccaactgttctaaaattttatattttgtgaccttcctgacttctggtcctttgagcaggcagcctgagattttaaaaaggaggcaattctctgaaataaaatgtgagccacaagttgggcgctgtacctcacgcctgtaatcccagtacttcgggaggccgaagagggtggatcatctgaggttcagagttcgagatcagtctggccaacatggtgaaaccccgtctctaaaacaatacaaaaaaattagctgggcatggtggcaggcgcctgtaatcccagctacttgggaggctggggcaggagaatcgcttgatcctgggcggtggaggttgcagtgagacgagatcacgccactgcactccagtatggacaacaagagtgaaactctgtctcaaaaaaaataaataaataaaataaaatcataaaatgtgagccacatgtaaattttaaattttctagtagccaaactttattttatatttttatttttttagacggagtctcacattgttgcctgggctggagtgcaatggcgcgatttctgctcactgcaacctctgcctcccgggttcaagcgattctcctgcctcagcctcccaagtagctgagataaaaggcgctggccaccatgcccggctaatttgtagccaaactttaaaaagagtttagctctatttttaaaaagaaacaaagaacaggtgaaattgattgtaacaatttaacccaatatatcgaaaatattgtcattttaatatgtgagaaatatgtaattattaatgaagtgtgtctatatatatggaactaaacctttgaaactaactcgtattttacctttctagcacatcgcagttcagaccaggcgcattccaggcagccagtagcaacacagggccaatagctgctacattgaagtgcagctctgacatcaggagggtgaacgacctgaacatcccttttctgccggaggtgaggagagagcctctccctaccaacatctctcttcggttctgagggtagaacagacagtggtcatagacagagcagagggcaggccgggcggagtggctcacgcctgtaatcccagcactttgggaggccgaggcgggcggatcacgaggtcaggagatcgagaccatcccggctaaaacggtgaaaccccgtctctactaaaaatacaaaaaattagccgggcgtagtggcgggcgcctgtagtcccagctacttgggaggctgaggcaggagaatggcgtgaacccgggaggcggagcttgcagtgagccgagatcccgccactgcactccagcctgggcgacagagcgagactccgtctcaaaaaaaaaaaaaaaaaaaaaaaaaaaaaaaaaaaaattagctgggctggtggcgcatgcctgtaatcccagctactcgggaggcagaagaatcgcttgaacctggaaggcagaggttgcag

SEQ ID NO: 1561532 - DNA, 4001 bp, Homo sapiens
tcccagctactcgggtggctgaggcaggagaatcgcttgaacctgggaggcggaggttgcggtgacccgagatcgtgccattgcactccagcctgggcaacaagagtgaaactccacctcaaaaaaaaaaaaaaagaaaagaaagaaaacagatgtgtctgactgatattcacccaccccattctgctcaccttaagtgctcaataaccaccctctcaggagacattacactatgccccaggtgcattttactttgtaagttcttgcaccatctcacttgggtcaggtttttctttgtcttttgggatacttttttttttccacaaaatttagagaattcagggggcagaaattatttctgtgttttcccctcaataccagcatctgattggctgaccagcactgtgtctccaagaaatggaagctgggttgggtgaagacaatcttaatgtctcaaggggttagcttttcaaaggaagagtatgccaggagatgcctctcagccccagggcatccacctgctcccttgagaagctacactccatacctcaggttgtcctcagggagaaaaatgacccaggagctgatattcactagacactctagcagaaaaagtcatgatgtgtatcttggtttactccagacagtactgaaacccaggaccaggaaaaaactgaagggtggctgaagacacatcactccgtaaagtttccaaagaaaaaccttcacctgaaaacaaacattctgataagatttctgtgcctgaggaagataaaaaaaaaaaagccatagaaatttcataaaatacagtgtcagggaattattttttgctttcttctcatgagaaatattttcaaccagaaaacaattttaagtgccatccaatgctttgtcaaaaaatgattaactaaaatacagtatcaaaaatgtacactaaaggaaaaacagttgagaatgtgaattaggaaaggcaagctggcatttggaaatgtcagaaggaactagaaatttagtattttagtttatttgcagtttaaatctaactgcaggccagagttaggctggaggaatggggctgggaggtacacttgagaccccgcttggaacgcatgtgaaaaatgcaggggaaaatcagtcccctgtggagtgtgagaataattaagtggcaggcaattacactgaggaggctctagtccccggctttctacttaacagcaacagctacgtaaatgtacctaaccgattattaaatatagttttcttcatcatgcaccttataaaaagtctttccttcaagctcctcccatgaaccacaaactacaaaacatacttttgtgctctacaattattgaatcactctttgattaaattctttaatattttttgcgatgactgccacagatttttaataggagaaaataggaaccgggaaccccacagaccaaagctcttcccattcatgaacccgaccccaagtcaggattctcccctgaccaccctcccatggtccctgcacaatctgggagaggcgcggcgctgccggtgcagagccgcccagagagggctgcaggccagggcacagtcactgcgcagggaagagacaggacgcccgggggcccggctgtcggcgcagccgccatcttatggctgaaggggactgaggccgagctaggcaaggagaactcggagcgcagattgtggagatgactgcggggagtcctgagtcccgccacagccacttcccacaggtttcaaccagcccttcccctctctcgggatgtcggacggcactctcaccatttctaggcttccagagggtcctggagtcttagctgtggatctcccaatacctgcaggtcacagagccacagagtctgggcctctaggagcagaggacaaacagcagtgaagacgagaccggagctccggctgcagcaagagacaaaggccgcgccaaacccggaagccgccctgtccggtccagctgcgtgtctgagtgaactgtccccagctcagagtccctgattggataatgttaaaacccgccccttcaggccctgagggacggaagatgtgatcagatgctgggctgaatgaagtgtgacagcctatgctgcagccttttcaggcaaggcttcctccctgagctgagccaggcccacccgagagggtgtttgcctttaatcttgtgtataaggtcatatgcccttataaataatatgctatatggctattcacaaatgaaaagaatataataacccaattgttctaaaaaaaattttttttttgagattgagtttcactcttgttgcccaggctggagtgcaatggcgcgatcttggctcatcgcaacctccacctcgcgggttcaagcgattctcctgcctcagcctcccgcgtagctgagattacaggcatgcgccaccatgcccggctaatttttttgtatttttagtagagacggggtttctccatgttggtcaggctggtctcaaactccagacctcaggtgatcctcccgcctcggcctcccaaaatgctgggattacaggcatgagccactgcgcccggcccaactgttctaaaattttatattttgtgaccttcctgacttctggtcctttgagcaggcagcctgagattttaaaaaggaggcaattctctgaaataaaatgtgagccacaagttgggcgctgtacctcacgcctgtaatcccagtacttcgggaggccgaagagggtggatcatctgaggttcagagttcgagatcagtctggccaacatggtgaaaccccgtctctaaaacaatacaaaaaaattagctgggcatggtggcaggcgcctgtaatcccagctacttgggaggctggggcaggagaatcgcttgatcctgggcggtggaggttgcagtgagacgagatcacgccactgcactccagtatggacaacaagagtgaaactctgtctcaaaaaaaataaataaataaaataaaatcataaaatgtgagccacatgtaaattttaaattttctagtagccaaactttattttatatttttatttttttagacggagtctcacattgttgcctgggctggagtgcaatggcgcgatttctgctcactgcaacctctgcctcccgggttcaagcgattctcctgcctcagcctcccaagtagctgagataaaaggcgctggccaccatgcccggctaatttgtagccaaactttaaaaagagtttagctctatttttaaaaagaaacaaagaacaggtgaaattgattgtaacaatttaacccaatatatcgaaaatattgtcattttaatatgtgagaaatatgtaattattaatgaagtgtgtctatatatatggaactaaacctttgaaactaactcgtattttacctttctagcacatcgcagttcagaccaggcgcattccaggcagccagtagcaacacagggccaatagctgctacattgaagtgcagctctgacatcaggagggtgaacgacctgaacatcccttttctgccggaggtgaggagagagcctctccctaccaacatctctcttcggttctgagggtagaacagacagtggtcatagacagagcagagggcaggccgggcggagtggctcacgcctgtaatcccagcactttgggaggccgaggcgggcggatcacgaggtcaggagatcgagaccatcccggctaaaacggtgaaaccccgtctctactaaaaatacaaaaaattagccgggcgtagtggcgggcgcctgtagtcccagctacttgggaggctgaggcaggagaatggcgtgaacccgggaggcggagcttgcagtgagccgagatcccgccactgcactccagcctgggcgacagagcgagactccgtctcaaaaaaaaaaaaaaaaaaaaaaaaaaaaaaaaaaaaattagctgggctggtggcgcatgcctgtaatcccagctactcgggaggcagaagaatcg

SEQ ID NO: 1561533 - DNA, 4001 bp, Homo sapiens
aatcccagctactcgggtggctgaggcaggagaatcgcttgaacctgggaggcggaggttgcggtgacccgagatcgtgccattgcactccagcctgggcaacaagagtgaaactccacctcaaaaaaaaaaaaaaagaaaagaaagaaaacagatgtgtctgactgatattcacccaccccattctgctcaccttaagtgctcaataaccaccctctcaggagacattacactatgccccaggtgcattttactttgtaagttcttgcaccatctcacttgggtcaggtttttctttgtcttttgggatacttttttttttccacaaaatttagagaattcagggggcagaaattatttctgtgttttcccctcaataccagcatctgattggctgaccagcactgtgtctccaagaaatggaagctgggttgggtgaagacaatcttaatgtctcaaggggttagcttttcaaaggaagagtatgccaggagatgcctctcagccccagggcatccacctgctcccttgagaagctacactccatacctcaggttgtcctcagggagaaaaatgacccaggagctgatattcactagacactctagcagaaaaagtcatgatgtgtatcttggtttactccagacagtactgaaacccaggaccaggaaaaaactgaagggtggctgaagacacatcactccgtaaagtttccaaagaaaaaccttcacctgaaaacaaacattctgataagatttctgtgcctgaggaagataaaaaaaaaaaagccatagaaatttcataaaatacagtgtcagggaattattttttgctttcttctcatgagaaatattttcaaccagaaaacaattttaagtgccatccaatgctttgtcaaaaaatgattaactaaaatacagtatcaaaaatgtacactaaaggaaaaacagttgagaatgtgaattaggaaaggcaagctggcatttggaaatgtcagaaggaactagaaatttagtattttagtttatttgcagtttaaatctaactgcaggccagagttaggctggaggaatggggctgggaggtacacttgagaccccgcttggaacgcatgtgaaaaatgcaggggaaaatcagtcccctgtggagtgtgagaataattaagtggcaggcaattacactgaggaggctctagtccccggctttctacttaacagcaacagctacgtaaatgtacctaaccgattattaaatatagttttcttcatcatgcaccttataaaaagtctttccttcaagctcctcccatgaaccacaaactacaaaacatacttttgtgctctacaattattgaatcactctttgattaaattctttaatattttttgcgatgactgccacagatttttaataggagaaaataggaaccgggaaccccacagaccaaagctcttcccattcatgaacccgaccccaagtcaggattctcccctgaccaccctcccatggtccctgcacaatctgggagaggcgcggcgctgccggtgcagagccgcccagagagggctgcaggccagggcacagtcactgcgcagggaagagacaggacgcccgggggcccggctgtcggcgcagccgccatcttatggctgaaggggactgaggccgagctaggcaaggagaactcggagcgcagattgtggagatgactgcggggagtcctgagtcccgccacagccacttcccacaggtttcaaccagcccttcccctctctcgggatgtcggacggcactctcaccatttctaggcttccagagggtcctggagtcttagctgtggatctcccaatacctgcaggtcacagagccacagagtctgggcctctaggagcagaggacaaacagcagtgaagacgagaccggagctccggctgcagcaagagacaaaggccgcgccaaacccggaagccgccctgtccggtccagctgcgtgtctgagtgaactgtccccagctcagagtccctgattggataatgttaaaacccgccccttcaggccctgagggacggaagatgtgatcagatgctgggctgaatgaagtgtgacagcctatgctgcagccttttcaggcaaggcttcctccctgagctgagccaggcccacccgagagggtgtttgcctttaatcttgtgtataaggtcatatgcccttataaataatatgctatatggctattcacaaatgaaaagaatataataacccaattgttctaaaaaaaattttttttttgagattgagtttcactcttgttgcccaggctggagtgcaatggcgcgatcttggctcatcgcaacctccacctcgcgggttcaagcgattctcctgcctcagcctcccgcgtagctgagattacaggcatgcgccaccatgcccggctaatttttttgtatttttagtagagacggggtttctccatgttggtcaggctggtctcaaactccagacctcaggtgatcctcccgcctcggcctcccaaaatgctgggattacaggcatgagccactgcgcccggcccaactgttctaaaattttatattttgtgaccttcctgacttctggtcctttgagcaggcagcctgagattttaaaaaggaggcaattctctgaaataaaatgtgagccacaagttgggcgctgtacctcacgcctgtaatcccagtacttcgggaggccgaagagggtggatcatctgaggttcagagttcgagatcagtctggccaacatggtgaaaccccgtctctaaaacaatacaaaaaaattagctgggcatggtggcaggcgcctgtaatcccagctacttgggaggctggggcaggagaatcgcttgatcctgggcggtggaggttgcagtgagacgagatcacgccactgcactccagtatggacaacaagagtgaaactctgtctcaaaaaaaataaataaataaaataaaatcataaaatgtgagccacatgtaaattttaaattttctagtagccaaactttattttatatttttatttttttagacggagtctcacattgttgcctgggctggagtgcaatggcgcgatttctgctcactgcaacctctgcctcccgggttcaagcgattctcctgcctcagcctcccaagtagctgagataaaaggcgctggccaccatgcccggctaatttgtagccaaactttaaaaagagtttagctctatttttaaaaagaaacaaagaacaggtgaaattgattgtaacaatttaacccaatatatcgaaaatattgtcattttaatatgtgagaaatatgtaattattaatgaagtgtgtctatatatatggaactaaacctttgaaactaactcgtattttacctttctagcacatcgcagttcagaccaggcgcattccaggcagccagtagcaacacagggccaatagctgctacattgaagtgcagctctgacatcaggagggtgaacgacctgaacatcccttttctgccggaggtgaggagagagcctctccctaccaacatctctcttcggttctgagggtagaacagacagtggtcatagacagagcagagggcaggccgggcggagtggctcacgcctgtaatcccagcactttgggaggccgaggcgggcggatcacgaggtcaggagatcgagaccatcccggctaaaacggtgaaaccccgtctctactaaaaatacaaaaaattagccgggcgtagtggcgggcgcctgtagtcccagctacttgggaggctgaggcaggagaatggcgtgaacccgggaggcggagcttgcagtgagccgagatcccgccactgcactccagcctgggcgacagagcgagactccgtctcaaaaaaaaaaaaaaaaaaaaaaaaaaaaaaaaaaaaattagctgggctggtggcgcatgcctgtaatcccagctactcgggaggcagaagaat

SEQ ID NO: 1561534 - DNA, 4001 bp, Homo sapiens
gaagaaacaactgggccttcgattacatcccttgggagacccaagggttggtcttagagcttggagtcactgacctgagtcctctttgctctccagtcaagtgacctggaccactactgatatttacatgagacaaaccctgtgtttgaagaaatcaaaggggaggctgaggcaggtggataacctgagcccagaatggaattccatttgaaatcaccgaaaaggaaagaacagacctgaggaacttgctatacattctcagaagaaaaaaagagaaacaaaaatttttaataaatgcaatatcatactgggatatttcattattattattttctgtttttgagacaaggtgtgagaccttgctcagcctggagtgcagtggcatgatcaaggctcaaagcagcctcaacttcccaggctcaagcaatcctcccgcctcggcctcccaagtagctgggactacaagtgcaggccattacgcccagctaattttttttttttttttttttttttctagtagagatgaggtctctctatgtcacctaggctggtcttgaactcctgagctcaagcgatcctcctgactcagcctcccaaagtgctgagattacaggcgtgagccaacgctcctagcttgatattttattattttctgaaacccatctctttcttgcctctttggaaatattttacatccactctaaaggtttattttattttatttttttatttttttgagacagagtctcactctgtcgccgaggctgtagtgcagtggcgcaatctcatctcaactgcaacctctgcctcccgggttcaagtgattctcctgcctcagcctcctgagtagccgtgattacagatgtgcaccaccacgcccggctaattttttatatttttagtagagacggggtttcgccatgttggctgggctgtaggtctcctaattacgtatattttacattttttgagaatcaattaagtgagtaaatcttttcaaggtgataagcccagggaggggaagtgctgcgctggaaaggacagatctcccagaaaagtttccaaaaaggagactcaacccaaaggagttcccataggatgtcaggtcccaggagagatactggcaagagaggcacaagcattttacacgaggtagcttcaagtccttctcctctgttttcctctcatataaataccccaaagcatacgttaaatctttttaaaagaaccatccattcctctgtacaaaaaggataattaaaatactgcgtctggttgaaataacgacgttgtgaactggagagaagacattggcatttgaaagagatctagaaatttagggatttaatcccagctctgggaagagccaggctggaggacacggtcgtgggtttgagatctggcttcccatacacttggaaaccttgagaaacgagtcctcccttgggaagaaaagagggactgaggaccccacacaacactgctcctcccacgcacgaaccccacgaccgagacgggattccctccatgaccctcccgtgccccagcacaatctggggagacgcgaggctgcgggctcggagctgcccagagagggctccgggactggggccgcagtcgccgcgcagggacttgacaagacgtccggggtcccggctgccggcccagccccatcctgcggccaaagagaccgagggccgagctgcgccaggaggactcgggtccacagacccgggagacaacggcggggaggcctgggtcccaccacagccagatccggccggtttcaacccgcccctctctcccatctcaagacccccagccccgcacacttaccatttcccagactctgggatgtcctggtgttctgtttacctctcccgcggccagcacaggtcctacctccacctgaggcccttcctccacctgagggccttctggggtgaggagaccccagagcggagcgcagcggctggtagccacgccctcgccgtttgcgcagcgcccctccgcccgccttcccggcggcgcccctgattggacattgcactcttggacccgccttcgttgcctgagtgacagctagtagggaagtcgcgtctctaagcaacctgcattcgtccggggtcaggaatctgttcccctgccacggatatttgcgtctaagcagaatttgttaacgtacccggggtcgggcactggtgtcttcctgcagctccttctgagcgcggagacacaagcgtgcacagcgcaggaaattccaggctcagtttccagaaaaaggctctttgtccacagcgaaaaaggacgcccgggccatgccagactagaacggaagggtcagacgctcccagacttagcataaggctgcgaggccattcatggatttctgactcttgtttacaaatacagacacttagagtgacagagtgacctcatcatacctaacaaagagtgactacgttttaatctttgacaactgacagggtttaggccgtcacccatcccttccctccccccacactttgctctagtgggaagtttggaccccacagccctagtctgagagaaggagttcctttttttttttttttcggtagagatggcggtggtggggtggtctcactatgttgcacaggctagtctcgaactcctgggctcaggtgatgctccttggcttcccaaagtgttgggattacaggcatgaaccaccgtgcccagtgaggaattattcagttaaacccaaagccatgagatgtgttcagtaaaactgaacactggaaggatatttatttcggaccagtttttgactatgtccctagagaacttttgtggatcctttatgtttgtttggtttgtggtttttgtttttgagacagggcccttctttgtccctcaggctggaatgcagtggtgcaatcagagccccctgcagcctcgaccttctgggctcaagcaatcctcccacctcagccacctgagtagctggaacctcaggcacgtgccaccatgcttgactaatttctttctttctttttatttttattttgtagaaacagcatctcactatctcacccaggctgatcttgaactcctgggctcaagtgatctgctggcctcagcctcccaaagtgttaggattacaggcatgagccactgcacccagcccctagagaattttgaaatgtaaatggctatgatatcgataaggcaattaattccattttcactgagattatttaaaaaaccacaaaagattatgtaaatttggcatgtactaggaaactcaatatacttaagatattggatcaaacctactaatgggcagggcatgatggctcacacctgtagttccagcactttaggaaacttaggtgggagggctgcttgagcccaggagtttgagatcagcctgggcaacatagtgaggcccccccctcccccatctctaagaaaattttttaaaaattagcagggcatggtggtgcacacctgtagtcccagctactggggaggctgaggcccgaggattgtttgaacccaggaggtcaaggctacagtcaactgtgatcctgcattccagcctgggtgacagagtgagaccctgtcagaaggaaggaaggaaggaagggagggagggaaggaaggaaggagggaaggagggaaggagggaaggagggaaggagggaaggagggaaggaaggaaagaaggaaggaaggaaggaaaaaaaaaggaaacccctgtagcctttggctgtcactgtcctatcttcccatcttcctcctccaagcctctgtcctaagcaaccattaatttactttcagttgctatatagctttcccattgtagacttggaatggaatcatatactatgtgttctttgtgagattaacttcattcacttagcataactgtttcaagggacatttacattgaagtttgtatcaatacttcatttgttgtttacagtaaaacaatatttcattgtaccaatatagcc

SEQ ID NO: 1561535 - DNA, 4001 bp, Homo sapiens
gtggtctctttcacccctgtcctgtgaggtcaagaacactggcccattttgccagatcacagcagtgaccagagcccacttacccagtaggcacagagcatggggcccatgaaacctttaggggcccataggaaggtcttaatttcttttaaaatcataagaaaatatctaatccagcctagattacatttgtcttcctattaatgaaataacaaaatgtaatttttagtgctttaaaaaaacaatggagcaaggggcccatgaaggcaaagtacccttaaaaatcatgcagcggccctggaagtgacttgcccaagagtatggccagtggctgttgaacccagtttggccttagatctggattcttcttcctctgagctttttggcatttccttcctttcttccatttccattgtttccaagcggggattccctcggggaaaatcctgcaaccttgtgtcagctgagcggaaagggaaaaaagggatctcccatttgtctggtggttaattgtgggggctctggaacctggatgcctgaggtagccttgggtgagtcacttagtctgagactcagtttccccatctgtaagataaggatgatgatggtctctacctcagagttactgggacatctataaatggccagcactggctgcatacacattccctgaacaaatcaacctctccttggtcagaacagagtagggcacagagaccctttgggagtctgatcccactttaagaagatcctgtgggaggcagaagaaacagccttccttttcccctcctccacccggcccctgtcactcccaggcccctacgcctccagagccttctatgggcaggaaaaagccagggaactgtgggcaggcagactaggagaagcgtagggtgagaaggtagtggctctgctaggctcccttgtccaggcatatagtctttggaagaggcacacccagacgcacccacccctgcagagtcacacgcaaacatcaagaaatactctagacacaggtggacacacagagataggaaagatccagacaggactggcccctggaaagacacagccctacactcatgccaagagacatgcatggaaagagcagacatagtggacacccagagggcaccctcccacagagacactcatggacagagatcaaggctgacacacccacaacaccaaagacaaggacacaggcagtcactcagagatatcaccacacatgcataggcagagacctggagagacacagctccacagagagaccaagactctgaagaagtgggacacacacacacacacgctaccacacatgacccacacggacatacatggacacattcacattcattcacagacccagcctctggacgacacgcagtttctctctctgtctcatacacacacacacacacacacacacacacacacacaaacacacacacacaatcacaatatccagagacacagccataccctcaggacgacacaatctgtctcacacacacatacagacccacacagacacacacacagacacattcacaatatccacaaagacacagcctcatcctcaggatgatatgcactgcctgtctctcacacaggccaccttccccccaggatggccctcgtgttcatgcaactttcctacctccaacccactcacgcctctccctccctggccccggcctctcctcagcccctcagcctccagtcagcctctccttagcccctcagcttcccctcagcctctcctcggccgctcagcctctccaggcgcacctcggtcccggcctgcacgccctctcctgcgcccgcacgccctggaccagcacccagccctgcactccccgtacctgggcctgcacgccgtctccccgaggccgcgccctccccggggccaggttccggcccccggcacaggtagagggtgggcgcgaccccgcagccacactcaccggctcgccgctctgccaggacaatgaccgcgcccgctaggcccgcccgacggcagtgcgcctgcgcggactgcgccggactacgcttcccagaaacccgcgcgcgccacctccccccggcttttttcagccgagcccagccgagtggagccgagcggagccaactgagctcctccatctcacagaggactccgcggccaaggaggctggggcgagagggaggattgagggggaggaggcagggaaagggaaggagagagaagagacggagggaggaagggtggaaagaaagacggagggaaaggaggggcgaggaggagggacaggagggaaggggggaggagggagaaaagaagtaggagaggtgggaagaaggatggaaggggaggagggatggggaggagcggggagaagagagaggatggagagggacttggggaggagagctggggaggaagaagaagagatggagaaggaggaggggttggaagaaggatggaggggaaggaggaagggctggggagagactaagggaaaagaacaggtcagagaggagaggaaccaacagaaagaagagggagcgggtgggaggagggaggggcagggaggcaggaaaggaagagaatggagacggcaaggaggagaaggaagaaagggtggaaagggggatgagaaggtggaaaggactataaggaagaagaaaagggtgggaaaaggaggaaagaaagaggaagtcgagttggggagggcaggacaggctgaagagaggaaagaatgggtaaggagagggaggagggaggaaggaaaacagaaaaggacaagggatgggtggaggcagagaaatgagggggataaaagaggcgtgtcacatctgctgcagacatttctgcagtccagccaatggactggcctgagggaccatcccaggcaactttaaacctgataatcatgcttatctttaaagaacactttttaagcatacagatgtgcaaagaagaaaatgagcataggtgtagaataaaatgtataggagactatcggtttggactgagttcctgcactaggcccaacagatcaaatcgaaatggagctactcatgctgaagttccaggccaccaactccaactaagttgttacctgacctcctctcaggagagaaagagagagataatagccaagtcccaaacaggccagtttagcaggcatgataaaagaaatcccctttgctttaaccatgatagggaaagtaactttgaaatgacccatccactcttgttctctgtttctgctttcctcagcccgtttctgtgtatgaagccatattcctctgcttggatcaccagaacactagttctattttatagaaggaggtgtggctggattctagaattgcaaataaaaaacaactagatctttaaatgtcaattccctatatctttagatataagaaaaaaagcattaatccttgttgtgagtttcctttgttctgacccctggtctccacattttatgatttataaacaatcttcacagccaagctactttccagattagttgggtaatacagacaggggagcttacacaagaggaaaggtaggaaccagatgcctggctgagacccttttctatagtaaaccacaaagccaagtttaaaaacatttgctgaatgtccaagtggccacaaaaccatcaacagcagctagccttaggtggtgattaatgatgtatttaaatgaaatattttattctgagataaatgtggatttattcacgtcaggttgtaaaacataatatagaaatcatacagagagacctatgtctcttaggtaatttcacccaagggcaacatcttgcaatatcacaagtaggatactgacgtcggtccattcaagagacagaacatttccatcacaaggatctcttccgatatttccacaaggatccttcatcttgcccttttatagccacactcactttcctccagactcgatcattagtctatcctccatatatacaattgtgtcatttcaa

SEQ ID NO: 1561536 - DNA, 4001 bp, Homo sapiens
ttatatttctaccccttagacaatccaggaggcagatgttatttctgtgttttcccctcagtaccagcatctgattaccttttcaaagtaagagtacactagaagcttcctctctgccccagggatccacttgctcccttgagaggatacactccagacctcaggtcgccctatggaagaaaataaaccagaagctgatattcactaggcactttagctgacataaccatggtggatatcttggttgatccccagacagtactgaaacccacgaccagaaaaaaactaaagggtggctgaggacacatcacctcataaaggtttcaaaggaataccttgacccaaaaacattctgacaagatctttgtacctagagaagatacaaggagaagaggcacagagaaattttacaatacagtgtcaggggattattctttgctttcttctcatgggaaagttacaaacaggtaacaaaccttttaaaaagcgtcatttaaagctttgtcaaaaaataattaattaaaatatggtatacaaaagtacactaaaagacaaacaggtgataacgtgaattagggaggaaaagctggcattagggaatgccaggaggaactggaaatttaatatcttactgcaagccagagtgaggctggagatatgggggacgggaggttagatttaagacagtgcttgggacacagttgaaaaatgcaccagaaaatcagttccccatggagtgtgaaaataattaagcggcgggaaattagactgaggtgtctctagtccctggattcctacttttaaaaaaatctggctgggcgcggtggctcacgcctgtaatcccagcactttggggaggccgtggagggcagatcacctgaggtcgggagttcgagaccagcctgaccaacatgcagaaacccgtctctactaaaaccacaaaattagacgggcgtggtggcgcatgcctgtaatcccagctacctgggaggctgaagcattggatcgcttgaacccgggaggcagaggttacggtgagacaagatcgccccattgcactccagcctgggcaacaagagcgaaactccatcttaaaaaaaaaaaatctaactgaggtgcatttttagtaaattactacattgagagaaacaaaattcatccttaaccaactataaactgccaattaacatctaattacataaccaggaaattttcacctttattttacaaattaagaaactatgtatctgaacctaaccaattactgaatttggttttcttcatcatgctgtttataaaagtctttacttcaagccccgcccataaaccataaattacaaaccacagctgggtgctccacaatttttgaatcacgctttgattaaatgctttagtgttttaacggtgactcccatacattttcaacagaagaggaactggaaccccacggacccattcataaacccgcaccccgagtcaggattctacccctgggaccctccagtggtccctgcacaatccgggagagacgcgccgctgagggtccagagctgccctgagaggactccaggtcagggcccagtcactgcgcagggaaaagacaggacgcccgggatcccgcagtcagcgcagccgccatcttatggctgaaggggactgaggccgagctgagcaaggagaactccgggcgcagattgtagagttgactgcggggaggcctaagtcccaccacagccacttcccaccgcttacaacccgccccttcccctctctcgggatgtcggacccggcactctcaccatttctaggcttccggggtacctggcgtcttagctgtggatctctcaatacctgcaggtcacagggccacagaggctgggcctctgcgagcagaggacacagggcagtgaaggcgagacctgcagctccagctgcagcgagagacaaaggccccgccacatccccgaagccgtcctgtccgctccagctgcaggcctgattggacggttcccaacccagcgtcgctgattggataacttttaaaaccccaccttctcgtgccctgagtgacagaagatgtgatcagttgctgggctgagtgaagaaagggtgacagcctaggctgcagccttctcaggcagggcttcctcccagagctgagccaggcccaccccagagggaatttgcctttaaacttgtgtgtaaagtcatatgcatttataaataatatatggctcttcacaaaggaaaaaatataattttataataacaattattttaaaatttcagattttatgaccttcctggcttctttctggtctttgagcaggcaggctgagattttagaaaggaggtaatcctctgaaataaaatgtgagccatatgtgaattttaagttttctagtagccaaacttgaaaaagaaacaagaacaggttgaattgattgtaacaatttaattaacccaatatatcaaaaaaattttcattttaatgtgtgagaaatatgtaattattaataaagtatataaatatttggaactaaatctttgaaactaactctgtattttacctttctagcatcgcacttcagaccaggcgccacacatggccaataactgccacattgaagtgcagctctgatgtcagcggtgtgaagggcccaagcaaaccttttctgccagaggtgaaggaagagcctctccctaccaacatctctcttccgttccgggggtggaacagatagtggccaaagaaagaggagacggcagcaggaataaaataattacaagtaaagcactgctggatgagatcacaggcgcgcgccaccatgctcggctaattttttgtatttttagtagacacggggtttcaccatgttggccaggctggtcctgaactcctgacctcaggtgatctgcccgctttggcctcccaaagtgttgggattacaggcgtgagccaccgcacccagcctcaaaatgttttttctttctttttttttaattttaaaaaatgatgggaacatgtcaaagggagccagcctgaaagaactcccaatggtccatcctggaacaatgttagcatccaaatgaataattagagcactgacctataaaataaatcaagtcaaataaataaatacccatgcatttacactgatacacaaaaaactttaaataaataaaaaagaaaaaaggatagggaaatttttttttacagaattccaaatactaatcaacatagataaaatgctaaagaaaccatcacaaaaccaccagttattattgtatccaaggttaactgaggagtgtaaaaattgtaaataacacttaaaaaataagcattgtatttgcatagcaccaaagtatctgactaaattgtacccttcagttttaaagcaacctatcactattaaaagcaacaattatgactctttgttactggatttataatatgtagatgtaaaattgtaaaagcaccacaaaagatcaacgaataaaatagaatcgcccaggcacggtggctcacgcctgcaatcccagcactttgggagtccgaggtgggtggatcaagaggtcaggagtccgagaccatcctggctaacaaggtgaaaccctgtctctaccaaaaatacaaaaacttacctgggtgtgatgccgcacgcctgtattcccagctactcggggggccgaggcaggagaatcgtttgaacccgggaggcggaggttacagtgagccgagatcgcgccactgcactccagcctggcgacagagggagactctgtctcaaaaaaaaaaaaaaaaaaaaaaagagctgcctgggcaacataataagaccccatctctacaaaaaaaaaaaaaaaaaaaaaaaattaattagccactgtagtggtgtgtacgtgaagtcccatttaccaaggaggctgagagctaagaattttgaggtttgattgagctgcactctggccaagatgacagagctgtctacaaatacatacac

SEQ ID NO: 1561537 - DNA, 4001 bp, Homo sapiens
ggccattcaattagttgattgtctaaaactgaagtgtgactgaagatacgtcaccctatgaagtttccaaaaaaaaaaaaatcttgacccaaaaacattctaagatatctgtgactaggtaaaataaaagaaaaaaacacagatattttacaatagtgtcagattattctttgctttattctcgtaggaaatatttagaaaaaaaatcattgtaaatgtgccatcaaatgctttgtcaaaaaataattaattcaccaggcacggtagctcacatgtgtaatcccagctctttgggaggccgaggcaggaggatgacttgaaaccagaagttcaagaccagcctggccaacatagtgaaaccccgtctctactaaaactacaaaaattagccaggcgtggtgccaggcatctgtaattccagctacttgggagacagaaatgagaaccgtttgagcccaggaggcggaggctgcagtgagcctaagtcatgccactgcactccagccactgcactgcaacagagcaaggctctgtctcaaatacttttaaaaaaaaaaaaagattcattaaaataggtatcaatatgtacactaaaggacaaatagttgataaagtcaattagagaggagaaactggcatttggcaacgtcagacaaaactggaaatttagtattttactgcaagccagtcaggctggaggaataagggatgaggggcagacttgaggccctgcttgggacacttgtgaaaaattcagggaaaaaatcagtcccctgtggagtgtgaaaaccattaagtggcaggaaattagattgaggtggctctagtccctggatttctacttctaaaaaaaaagtctaaactcaagagcatttttttgtaaattactacattggcagaaacaaaattcaggcttaacgcttaaccaactataaactgccaattaagctctgattacataaccatgatatttccaccttgattgtaaaaattaagaactaggacgggggcagtggctcacgcctgtaatcccagaactttggaaggccgaggtgggtggatcacctgaggtcaggagatcgagacctgcctgaccaacacggtgaaacccccgtctccgctaaaaataaaaaaaattgccaaatgtggtggcaggcgcctgtagtcccaactactagggaggctgaggcagaaaaatcgcttgaacccgggaggtggaggttgcagtgagccgagatcacgaaactgcacttcagcctgggcaacagagactctgcctcaaaaaaaaaagaaaatgaaaacaaaacaacaacaacaaaataacaacaaaatctacataaccgtacctagccaattacggaatttggttttatgatgaaacttataaaaacctttccttccatggaatacaaattagaaaccacagcaaggtgctctaaaatttttgaatcacactttaaattatttaatgtttttgcagtgaggcccataaatttttaataggaaaaaatggcctgaaaaccccacggaccaaagctcttcccattcatgagcccgcacccggagtcaggattctgccctgacgttcctcccatggtccctgcacaatctgggagagacgcggggctactggtgcagagctgcccaaagagggctccaggccagggcacagtcactgcgcagtgaagagacagaacgcccgggagcccggctgtcagcgcagccgccatcttaaggctgaagggactgaggccgagctgggcaacaactcgggcgcagattgtaaaactgacagcgaggaggcctgagtcccgccactgccgcttcccaccggttccagccagccccgttccctctcttgggatgtcgcacccggcactctcaccatttctaggcttccagggggcaggtcacagggccacagaggctgcgcccctaaaagcagaagacacagagtagtgaggacgagacctggagctccggccgcagatagagacaaaggccccgccaaatcccggaagccgccctgttcgctccagctgcgtgcctgattggacagttcccaggacagcgtctctgattggataacgtttaagaaccccgctttctaaggccctgagtgacagaagatgtcatcagacgttgggctgaatgaagaaagattgacagcctaagcctcagccttttcaggcggggcttcctcccggagctgaacgaggcccatctcagaacacggaaaaattttctctcttctttgctgtctttttttcaacgtattaaatatgtgaataattttttttttagacaaagtttcgctcttgttgtccaggctggagtgcaatggcgcgatctcggctcactgcaaccttcgccttccgggatcaagcgattctcctgcctcagcctccatagtagctgggactacaggtgcacacagccacaccgggctaatttttgttttttggttttttttagtagagatggggtttcgccacgttagccaggctggtttcgaacttctgacctcaggagatccacccgcctcgacctcccaaaatgctaggattacagtcgtgagccaccatgcctggccgactcgatattatctttaaagcaaaattaggaatacctttattccccagatgttggaatatctggacactcctccgtctggttctgcttagtaaacattattaattcatttccttaaccataaatatctagaggctaggaatgcctaacttactgagaatgcagcccagcgagtctcagcgtcattttcctagctctctctcaaaacggagtcgctctggttcaaatgattctgacatatttttcgccttcctttacaagaggacccttaatcctaagagttgcagagagacaaagattcgtcttctgtaactttttcaggctgattaggggcgataatattcctgcctaaccattggtctcttgcattcagggtagagagaaattcagtcagacagtgttggtatggtgaaggtcgttcataacttctagttccaaaagaaggtgatgtctagaagattaataagcgtccaatttaagaaagcatttagtgagcttgtcttgcattcctacacaaagagtacaaccacaatatattccacaacagcaaagcaaaattagtaaaattattccacgtaaactaaacaggaaagcctttcaagaagtgggcagttgttagaaccaaactgatatatggttcactgatagcacataaatggcagagatgtgagtgcataaaacttttatgccctgggttatgttatgtaaatagtctggagcacacacaaaacatttggttttgatcaaagcataggtttccttttgagtctctgtttaaatgtctacatacacaacagtttgttcgattatgtagacaggatgaagtctgtgcccactcagtaaataagttactctctgcatgatttcaactaattcccaaaagtagaaagccaatctatatctttatgttacccatccctttcatttcttctgaacaggagtcaaaggtcactggctcatgggaataaacaggatcagtttcttctgttctgccgtcctgtaggacttcataagagacaggtttaattcgagttaagtggacccagctatttattcccagaattttaactgcagttggggtactaaagagaacttgatagggtcccttccactttggggaaagttgacctgctggggatccttttttccaagtttttaataggaccaaatttcctggctgggttataacaagattagcttccttagttggggaaaggagtctttgatttccatattcagagtgtgttttgcacttgtcacataattctgtaacttgaaagtatccgtgtctattaggcacagtaaagaaggcgtgtagctaaaaaaggccttgcatacattatttcaaaagagctgagctgcagatttcccttagaggccactggaatctgtaataaggctacagatag

SEQ ID NO: 1561538 - DNA, 4001 bp, Homo sapiens
gcaggggcaaaaattattttggtttccccttcaataccagcatctgattgtctgaacagcaatgtgtctccaagaaatggaagctgggttgggtaaagacaatattaatatctcaagggagtagctttccaaaaaaacagcacaccagaagatgactcagccacagtgcattcacctgctctcttgagaagctacgcttcatatctcaggttgtcttatgggagatcagaggctacactccatacctcaggttgtcttatgggagaaaaagacccaggagctgatattcactagacactctcacagacatagccatggcgggtatcttggtttttccccagacagtactgaatctcaagtccaagaaaaaactgaagggtggctgaggacacatctccctataaagtttccaaagggaaatcttgacccaaaaacattgtgatatctgtgtctacggaaaacagaagaaaaaatatttacaaacagaaaacaaatctttttaaatgtgccatcaaatgctttgtcaaaaaatgattaaaataggtatcaaaatgtacactaaactatttgttgataatatgaataagggaggggaaattggcatttgggaatgtcagaaggaagtgaaaatcaagtattttactgcaagccagagtcaggccggagaaataggggatgggggatggacttgaggccctacttgggacacatgtgaaaaatgcaaggaaacagcagttccctgtggggtgtgaaaataattaagtggctggcagttagactgaggaggctgtagttcctaatttctacttttaaaaaatctaattcggccaggcgcggtggcttacacttgtaatcccagcactttgggaggccgaggcaggtggatcacttgaaatcaggagttcaagaccagcctgaccaacatggtgaaaccccatcgctattaaaaatacaaagttaacggggcgtggtggcgcatgcctgcaatcccagctacctgagaggctaaggcaggagaatcgcttgaacctgggaggcggagattgcagtgagcccagacggcgccattgcactccagccagggcgacagagtgagactttgtctcaaaaaaactaattcaaatgcattttttgtaaattactatattgggggaaaaaattcaggcttaacaaactataaactgccaattaacctctgattacataaccaagaaatttccatcttgatagtacgaattaagaaactacgtaactgtacctaaccaattatcgaatttggttttcttcattaggcaccttataaaactcttccgtcaaacctcttcaatagaccataaactacaacccatagctgggtgctctacaattttggaatcactctttggttaaattatttaatatttgtgcggtgacttctgcaaatttttaataggagaaaacaggggctgggaacctcacggaccaaagctctttccattcttgaacccacacgccgagtcaggattctcctgtgacgaccctcccatgctccctgcacatctgagagagactccgcgctgcgggtgcagagcggccccaagagggctccaggccagggcacaatcacagcgcagggaaaagacaggacgcccggggaccgggtgtcagcgcagccgccatcttatgcctgaagcggactgaggtcgagctaggcaaggagaacacggggcacagattgtggagctgactgagaggaggcctgagtcccgccacagccacttcccaccggttccaaccagcggctgccactctctcgggatgtcggacccggctgactcaccatttctaggcttccgggggtcctggcgacttagttgtgaatctcccaatacctgcaggtcacagggccatagaagctgggcctttaggagcggacgacacacagcagtaaggacgacaccttgacctccgcgtgcagcgagagccaacggtcctaccacatcccggaagccgccctgtccgctccagctgcgtgcctgattggacggtcccagtccagcgtccctgattggataatgtttaaggccccgccccttcaggccctgagtgacggaagatgttatcagatgctgggctgactgaagaaagagtgccagcccagtctgccgcaaaggccgggcgtgatggcttacgcctttaatcccatcggtttgggaggcggaggcggggggatcacctgaggtcagaagttcaagactagcctggtcgacctggtgaaactccttctctactaaaaatacaaaaattagttgggcgtggtggtgggcgcctgcaatcccagctactcaggaggctgaagcaggagaatcatttgaacccaggaggtggaggttgcagtgagccgagatcgggccattgcactccagcctgggcaacaagagtgaaacgccatctcaaaaaacaaaacaaaaaaccctaattttagtaaaatcttataaataaatccatcaaatttgtcatttttgaacgctctagattttcatatatattttataatctcttttttttatttgtttatctttttgagacagtctccctctgccgcccaggctggagtgcagtggcaggatctcggctaactgaaagctccgcctcccgggtgcaagtaattctcctccctcagcctccccagaagctgggattacaggcgcccgccaccacgccctgctaatttttgtttttttagtagagacagggtttcaccacgttgaggccaggctggtctgaaactactgacaggcaatccgcccaccttggcttcccaaagtgctgggattacaggcttgagccacggcgcccggccttataaacgcttataattttttaactctttcgattttattagacttttttttttaacttgaaacaacctttattttattttatttgagagtcttgctctgctggccaggctacagtgcaatggcatgatctcagctcactgcaacctccccctcttgggttcaagcgattctcctgcctcagcctcccgagtagctggattacaggcgccctccaccacacccagctaatttagcatggtggcctgaacctgtagtagcagctattcaggggctgaagtaggaggattgcctgagcccaggaggttgtgtctgcagtgagccctgatcaagccactgcactccattctgggtgacagagtgagaccctttctaaaaaaaaaaaaaaaaaaaagccaaagcatataaacttaaacttatgagagtttgggggttttatttttgtcttaaattattatatttcaatagttttggggtacaggtagtatttggttacatggataagttcttttgtggtgatttctgagatttcggtgcaccaatctcccaagtagagtgcgctgtacccaatgtgtactctttcatccctcatcccctctcccacccttcccactgagtgcccagagtccattatgtaattctttttaatttttaatttttttttttttgagacagagtttcacttgcctcggcctcccaaagtgctgagattacaagcgtgagccaccgcgcctggccccattttgtaatttttatgcctttgcatcttcatagcttagctcccacttataagtgaggacatacaatatttggggttttatctctttttttcttttcttttcttttttttttgagacggagtttgctgtaattacaggcatgagccaccatgcctggcctagtttttgatgttttgattatggtcttttctgtttgtttgtttgtttgtttttgatggagtctcgctctgtcgatctcggctcactgcaacctccgcctcctgggttcaagcgattctccagcctcagcctcccgagtagcagggattacagacccatgccatcgtgccctgctaatttttgtatttttagtagaggcggggttttaccatgttggccaagctggtctggaactcctgacctcaggtgatccaccagtctc

SEQ ID NO: 1561539 - DNA, 4001 bp, Homo sapiens
tactgaaacccaggaccaggaaaaaaatctgaagaatggctgaaaacacatcactccataaagtttccaaaggaaaacatttacccccgaaacattctgataaaatctgtgggcctaggaggaaaaaaaaaaaaaaaaacagtacaaagactttttacaacgcagtgtcaggggataattttttgctttcttctcataggaaatatttacaaacagaaaacaaatattaggaaaagtgccatccaatgctttgttaaaaaataattaaaacatggtatcaaaaatgtacactaaaggacaaatagtaggctgggcacggtgactcacgcctgtaatcccagcactttgggaagctgaggcgagcagatcacaaggtcaggagttcgagaccagcctggccaacatagtgaaactctgtctctactaaaaatacaaaaagtagccaggcatggtggcacatgcctgtagtcccagctactcaggaggttgaggcaggagaattgcttgaacccggaaggcggaggttgtggtgagccaagatcaggacaccacactccaggttgggcaacagagcgagactccatctcaaaaaaaaaaaaaaaggacaaatagtaatgtgaatcagagaggaaaaaattgacatttgggaaggtaacaatgaactggaaattttatattttactgcaagccagagataggctgcaggaatgggggtttgggagtacacataatactctccttgggatacctgtaaaaaatgcaagggaaaaaaaaaaaaatcagtcctccgaggagtgtgaaaataattaagaataattaagtggcaggcaattagactgaggtggctctagtccctgatatctactttttaaaaaatctaattcggccgagcgcagcggctcacacctgtaaacccagcactttaggaggccgaggaggacggatcacctgaggtcgggagttcgagaccagcctgaccaaaatggagaaacccccgtctctactaaaaatacaaaattagcccggcgtggtggcacatgcctgtaatcccagctactcaggaagctgaggtaggagaatcgcttgaacccgggaggcggaggttgcaccgagaggagatcgcgctattgcactccagcctgggcaacaagagcaaaactccgtctcaaaaaaagaaaaaaaaaaatctaattcaagtgcatttttttttttgtaaattatacattgggggaaacaaaactcaggcttaaccaactataaactacaattaacctctgattatataaacgggaaatttccatcttgattgtacaaactgagaaactacgtaactgtacataaccaattactgaatttggttttcttcattgtgcaccttaaaaaaatctttccgtcaaatcccttccatagaccataaactacaaaccatagctgggtgctctacaatttttgaatcactttgattaaattatttattactttagtggtgaccgccataaatttttaacagaagaaaagagggactggaaacctcactggaccaaagctcttcccattcatgaacccgcatccggagtcaggattctcccctgacgcccctcccgtggtccctgcacaatctcggagagacgcggccatgcgggtgcagagcggcccagagagggctccaggccagggcacagtcacagcgcatggaggagacaggtcgcccagggtcccgcagtcagcgcattcgccatcttatggctgaaggagactgaggccgagatgggaaagaactccaggcgcagattgtggagctgactgcggggaggccggagtcccgccacagccacttcccaccggttccaatcagccccttccccttctcgggatgtcggacccggcactctcaccatttctaggctgccaggggcacctggcatgttagctgtggatcttccaatgccgcaggttacagggccacagaggctgaggacacacagcagtgaaggcgagaccgggaactgcggctgcaaccagaaacaacggccccgccacatctcggatgccgccttttccgctccagctgcatgcctgattggacggttcctagcccagagtccctgattggataattcttaaatccccgcctcctcagatcctgagtgacaaaagatgtgatcagatgctggacagaatgaagactgataggccgcgcggtggctcgcgcctgcaatcccagcactttgggagggaagcccaagcgggtggatcaccagaggtcaggagttggagaccagcctggacaacatggcaaaacctcgtctctactaaaaataaaaattagccaggcgtggtggcgggcgcctgtaatcccagctactccggaggctgaggcacgagaatcacttgaactcgggaggcagaggttgcagtgagccgagatcgcaccactgcactccagcctggttgacagagagacagtctgtcccccgcccccccccccaaaaaaaagtaaagagtgacagtctaggctgcagccttttcaggcagggcttcttccctgagctaagtaagccaggccaaccccagagggtatttgcatttaaccttttgtataaggtcatattctttcgtaaataatgtattatatggttatacacaaatgaaaagaatataataaaaattatctaaaaatttctgattttatgacctccctgacttctgttttttccatcagattgcctgagattttaaaaagaaggcaatcctctgaaataaaatgtgagctacatgtgaattttaaattttctagtagccaaactttaaaaagaaaaacaaacaaaaaatgcggtatttattgtagcaatttaattaaaccagtatatccaaaatattatcattttaatatgtaagcaaaatgtaaattataaatgaagtgtagatattttttggaacttcatctttgaaactaactctgtattttacctttccagcatatcacagtttagaccagccacattccaggcactcagtcgccacacatggccagtagctgccacattgaagtgcagctctgacctcgggagcgaagggcctgaaaaaacttttctgccaaagctgaaaaaagagcctttccctaccaacatttctcttcagctctgagggaggaacagatagtagccatagaaaaatcagaggacagcaagaaaaaaacaaccacaggtagaccactgctggccacccattttccacctttcttccagagatcagaaggtgaacaaaggatgataaggccacaggagaagaaatctctatgtcttcaaacctgtgcacagtcttgacctccaatgtttagatatgaagaaaacagattaaaggcaaacttacttttctatttgtccttggccctaatgtcaggccgtggttatctgttttctcctgtggtatgggggactgtgtgagtataggcaccaattacatgcatacatatccatatatatttctgcattactcagcattctcttacttggcatccaacttcaaatcagggggaaaaatcagtacctatagggtgcccactgttagaagagaactagtaatcaacttgtcaatgaatcctggcatcctgtctgcactgggtgcatgtattaattagctattgcagcataacaaatcattcaaaacttatttgcccataattgagatggtcagctatttaggctgggctcagtgaggctgttctttttgtctcagctgagctcctccagacatgtatcttcagctgtttgttgaataggcagctgtgcttctggggatgagcttctgcttctggggctgtcaacaggggcaccttgcttctcctccccatggtatcttatcctccagcttgctaacatcggccatttttcatggaaatggtagcattctgaaagaaaaacagaagcattcaagaccttttgagctgaaggggtgggttgcccctccacacctgtgggtgtttctcgtaaggtggaatg

SEQ ID NO: 1561540 - DNA, 4001 bp, Homo sapiens
tttctttttataaaatttagcattaaactcagaaattaagataacaggatagagaacagagatattcactgtcacaaatttaccctgcaaaaataacaaccgatgatttcataaatcttgtaactcacccattatctacaacatttggttgtagaatgctaccaaataaaagaataggtaaaatctgccatttggatactattttttccatgaatctcagagaatccgaggggcagaaatcacttctgtttttccctcaatacccgcataagattggctgacccgcaatgtgtctctaagaaagggaagctaggttgggtgaagacaatgttaatgtctgaagtggttagcttttcaaagacaccaggagattcctcttagccccagggcatccacctgctctcttgagagactacacttcatacctcttgttgtcctgtgagagaaaatgacccagaagctaataatcatcaaacactctagcagacatagccatggtgtgtaccctggtttattcacagccagtactgaaaaccaggaccaggaaaaaactaaagggtggctgagaatacatcatcccataaaaattaaaaaaacaaaaaaaaaaaacaaaaaacaaacttgaccccaaaacactttcacaagatctctgtgcctaggggagacaaaagaaaaagaggcacagagatttttttacaatacagtgtcagggaattagttttggtttattttcatgggcgatatttacaaacagaaaacaaatctttttaaatgtcccacccaatggtttgtaaaaaaataattaaaatacagtatcaaaaatgtaccctaaaggacaaacagataataatgtgaattagagagggaaagttggcatttgggataatcagaagaaactggaaatttagtattttactgcaagacagagttaggctggaggaatgggggttgaggggtagacttgagaccccgtttgagaaacatgaaaaaaaaatgcagaagatcagtctcctgtggagtgtgaaaatagttaagtgacaggcaattcgaggtacgtggctgcgatgcctggattcctactttaaaaaaaaatgtaactcaaatgtatttttttgtaaattactacattaaggaaaacaaaatttaggcgtaacaaactataaactgcctattaagctctgattacataaccagaaaatttgtacgctcaaggtgcaaatttagaaactatgtaactgtacctaaccgattactgaatttgggtttttgcatcatgcatcttatgaaagtctttccttcaagcccgtcccatggataacaagctacaccccataactgggtgctctacaattttagaatcattctttaattaaattctttaatattttggtgatgactcccataaatttttaacagaaggaaagaggaattgggaacgccacagaccaaagctcttcccattcatgaacccgcagcccgagtcaggattctcctctgacgatcctctctggttcctgcataatctgggagagacgcagcgctgcgggtgcagagctgcccagagagggctccagggcagggcacagtcacagtgcagggaagagacaggacgccggggccccggctgtcagcgcggccgccatcgtatggctgaaggggactgaggccgagctgggcaagaactctgggcgcagattgtgaagctgactgcggggaggcctgggtcccgccacagccgcttcccaccggttccaaccagccccgttccctctctcgggatgtcggaccggcactctcaccatttctaggcttccagggggccctggcgtcttagctgtggatctcccaatacccgcaggtcgcagggccacacaggctgggcttctacgtgcagaggacacaaagcagacagacgaaaattggagcttcggcggcagcgagaaacaaaggccgcgccaaatcccggaagccgccctgtctgctccagctgcgggcctgattggacggccccccgcccagtgtccccgattggataacgtttaaggccccgccccctcaggccctgagtgacagatgtgatcagatgctggactgaatgaagagtgacagcgtaggctgcagccttttcgggcaggacttcctccctgaactgagacaggcccaccccagagggtactgactttaaccttttgtgtaagatcatatgtatttataaataatacgctatatgaatattcacaaatcaaaagaacatagaccgggcgcggtggctcacgcctgtaatcccagcactttggggggccgaggcgggtggatcatctgaggtcaggagtttgagaccagcctggccaacaagtgaaaccccgtctctactaaaaatacaaaaaaaaaaaaaaaaaaaagtagctgggagtagtggcgcgcgcctgtaatcccagctactcgggaggctaaggcaggggaatcgcttgaacccaggaggtggaggttgcaatgagccgagatcgtaccactgaactccagcctggtgacagagtgagatgaaaggaaggaaggaaaggaggaagggaggaggagagaaagagagagagaaaaagaaagaaagaaaagagagaaagaaaagaaataaggaaagaaaggaaagaaagaaagaaaagaaaagaaaagaaaagaaaaagcagaataaccacaggtagatcactatctggtgaccacctttcttccagagatcagacactgaacaaaggatgatggggccacaggggaagaaaactctatgtcttcagatctgtccacagtctggacctccaatgttagatatgaagaaaacagattaaaggcaaaattattttgctatttggccttggccctaagtgtcaggatgtagttttacgttttctcctgtgcgtgcggggactaaggaccaatcacatgcatacatatctacatgtattgcagcgttactcaacattatcttacaacacatctaactttaaatcaggggaaaatattagtacctttatggagcccactgttagaaggtaactagtaatcaacctgtcattaaatcatggcacctatctgcactgggtgcatgtattagttagctattgcagcataaccaaccatccaaaacttattaggtaataattgagatggtcagccatttaggctgggctcactggggccattcttctggtcccagctgagctccttcagacatgtatcaacaactgcttcttgactaggaagctgtgcttctgggggtaagcttctgcttctgggggtgagcttctgcttctgtcaacagaggcactttgcttctcttccccacccaccatgttatgttatcctccagctggctaacatgtgctttgttcatggagagggcagcattctgaaagaaaagcagaagcattcaagaccatttgagcctaggccccaaactggcacacggtcatgttcacaggtttctactgacctgaggaaataaggtcagccgtatctagggtctggaaaacagattccatatctcaatgggaacggctgtaaaaaagcacgtggcaaaggatataggagggatgaaaaattgctgcaatttctgcaattagtatcattctgccttttttgcatatgtggtttatacaactctttcacatgaagaaacttgtccaaagacccaaagctactaattggctgggctgaacctcaggataaattctgactccaaagctcaggcacctccatagatcaaactatattactagagtaactgccacagacccttgaaattctggagagtgacacttctgcaaaagaagacagttttttttttttttagatttgtgcccacatagtactgtttattattggaaataatcctgtcaagaaattgcagaagcacatggtggttcacacctgtaatcttagcactttgtgaggctgagatgggagaataacttgagctcagcagttcaaacacagcgtgggcgacatagtaa

SEQ ID NO: 1561541 - DNA, 4001 bp, Homo sapiens
aaatatatctacttctttcagaaaatatatgtattattttattatttatcttaaaaataagtaggcctggtgcggcaaatcatgcttgtaatcccagcactttggagggccgaggcaggtagatcacgatgtcagaagatcacgaccattttggccaacatgttgaaaccccctctctacttaaaatacaaaagaattagctgggtgtggtggcacgtgcctgtaatcccagctactcaggaggctgaggcaggagaattgcttgaacccaggaggtggaggctgcagtaagccgagatcacgccactgcactccaacctgttgacagagcgagactctgtttcaaaaaaaaagtaaataaataaaataatgtagtaaaaaattagtcatatgggaacacttctagaaggtaccatgtttcatcacatataatttagcatttaactcagaactcaacaggatatagaactgagatattcactgtcacaaatttcccctgcaaaaagaggaactaatgtgttgacgaatctatgtaactcatcaattatctaccacattttcctgtggaaatatattcattgtctacagccaaaatggaagagagattttccctatttttttccttggtaactagcattcctggctaacatactgaaactccatctctactaaaaatacaaaaattagctgggcgtggtgtcgcgtgcccatagccccaactactccagaggctgaagcagaagaatgcttgaacctgagaggcggaggttgcagtgagccgagatctgacactgcactccagctctggcgacagagcgagactccgtctcaaaaaaaaaaaaataaaaataataaattgaggaacatggggtacacttgaggccttgcttgagacacatgtggaaaatgccagggaaaatcagtccgctgtggcgtgtgaaaataattaagtggcaggcaattagactgaagaagctctagtccctggatttctacctcaaaaaaaaaaaaatctaagctcatgtgcattttttgggaaattactacattaggggaaacaaaattcaggcttaagcaactataaactgccaattaaactgtaattacataaccaggaattttttttttttttttgagacggagtctcactgtcgcgcaggctggagtgcagtggcaagatctcagctcactgcaacatccacctccggagttcaagcgattctctcacttctgcctcccgagaagctgtgattacagacatctgtcatcacacccagctaatttttgcatttttagtagacatggggtttccccatttgggccaggcttatcttgaagtcctgacctcaagttatccgcctgcctcggcctcccaaagtgctgggattacaggcgtgaacgactgcgcccggccccataaattttgaatagcagaaaacagaaactgtgaactccacggaccaaagctcttcccattcatgaacctgcaccccgagtcaggattctcccctgacgaccctctggtggtccctgcacattctgggagagacgggaggctgcggttgcagagctgcccacggagcgctccaggccagagcagtcactacgcagggaagacacaggacgccagggggcccggctgtcagcgtagccgccaaattatggctgaacgggactgaggccgagctgggcaaggagaactcagggtgcagattgtggagctgactgcgcagaggcctgagtcccgccacagccacttcccaccggttccaaccagcctatccccctctctcgggatgtcggaccggcactctcaccatttctaggcttccaggggctcccgggcgtcttagctgtggatctcccaatacctgcaggacacagggccacagaggctgggcctctaggagcagaggacacacagcagtgaagacaagacctggagctccggctgcagagacaaaggccccgcaaaacccggaagccttccgcttcactctggctgcgtgcctgattggacggcttccagcccagcgtccctgattggataatgcttaaatccccgccccctcaggccctgagtgacagaagatatgatcagatgctgggttaagtgaacaaagagtgccagcctaagcagctggcttttcaaacagtgcttcctccctgagctgagccaggcccaccccagagcatgggaatattttatctcttgtttactctctttcttgttgaatgtattaaaaaggtgaacagaagtattttgctgtcattaataatacataaaatttttgttcaacagaaaatcaacttttactttggtaatggtaaaatctattaaagctaattttaataaaaccttataaataaatcaaatttgtcatttttgagcactccagatttacatatatattttgtaatatctcgtaattttaaaaaactatttatattttatttttgtccacattctttttattttttcaatttgaaacaatctttaatttccaacagctataggagatagaaatcatttagaggcaggcacggatagttcacgctggtaattccaacactttgggaggccaaggtgagcagatcacttgaggtcaggagttcaagacaagcctagccaacatggtgaaaccccatctctaataataactaataaataataataataactaataatataaaaagttacctgggtgtgggggtgcacatctgtagtcccagctacaccggaggctgaggcaggagaatcacttgaagccaggaggcggaggttgtgtaacagcccaaggggtttattttaccctttgcctagacagagccgattcatcaagacaggggaatttgtggaggaaaagtcacatattaaatctgaactcaattgaatgtggacacaaacaattgtcaccaagtcccagaacaggttgtgtgagcccctgaggtgttcatccagcgctgtattgaagaaatctctatttcaatctattcctatatattagttgttgaaaaacaatagacaatcacaaaaaaaggttgacctttttgtgttccttgaggcaagtcgtgaagggctctcatcactgggccttatgccaaacaactcgttacaaaagagctaaggtcccagaccgccctgaagcttcataagacctctccttgtctgtgtacgatggacgggtggctgactctagagctgtggctgttgcctccctctctggtggtgaatcccccatagtctggtgagggaaaatatatatatatatatatatatatatatatatatatcttttcccatttcctcgtcttattaagattggcttattacatcaatctgcttattatatttatttgcttattatatcatttgcttattatattattactttattatgtctgcattgccatttacgtgggataaaagttgtttacccttaatggtattgtgtgtgtgtctttgtttctcccctctcacatttgcctcacagaacatttttggcatcacaaataggatttgaaaacaaaagtgtacccctttttgactagaaggacagggctggagggctcagggacttcccatatcctgggatgggaactcccccagttctccctcttggtgattaaatggtcaaggggaactggtttttgtgggaattgggaatctaaattagtgcagtttaaacctttgactgtgcgggaagtgctgcgggggattccagtcagcaaaggagatgctgagggatctcccggagtggatggtgtttgcttactgcttataagttaatgtatcgtgataggggctggttgctacaagataaatgtaagcggaaaaggaaaatgctaatctgacttccagactggcccaatgccagtcaatgtcttgactgataaagctcaaagctatcagcctatcgctgaaaaaagcagctgtccaggtggcccagtcaggataaaactgaagaactagtcagccggggcttcgagcaggtaaaaac

SEQ ID NO: 1561542 - DNA, 4001 bp, Homo sapiens
tacatctatttccaattgcctatgtgtacatatttagaaggatattggctgaggaaaaaaaaaaatagcccagacctgtctgacctacacaaaatgtatcaggctcagagaggcaagaatatatgagatgtcagtcacatccctgaacctatgcctgaggacaactgttttaagacattctgttcctgactagctgtctcacctattatcttcatgtttctgtaatctataatataaataagaatgtatagccaataaaaacttatcttattttaacataagttattggtaaacaactcagaaactgcttcttttttccttaaaaaaaaagcaaacacttgtcactgtggtaattgaagtgtatattcaggacaacttgaatctatggtcccagatggctatcatcaacatgtgaacttgaataaactctctttaaactagattctgacttgcttggttatttaagattgatatagttccttactgtttaagtcaattacctgtttttacatccctaagttaatgagttgtaggatggggctgagcagtcaatcagttactggtccgttcagcaaacaggtcagcctgccatataatgcagtaaagggagcttgctggaggcccttaactgtggtggaggatgtgagaaagccctgcccagttttggacccagttgctgcatggccttatcttgttccctaaagagtggccctcagggccagctgagttagaagggtggagtgactacaattatctcatgcctcagtctctgtattccagggcaactccttatccatccaggcctctttttcaacagaaacagaccagactcttagcccatatctgctcccttctgcagggagtatcagagatgccctccctaccatggtctttcctccaaatctgagccctcccctacctcagcccatatgaaaaaacgatgtaggattcttccttctcaatctgatccacaggccaacttctcaagtgcacaacttctaactcatttaaagctccaggccagctaccttccctcacctttggaaattacgtccacctacccatgtgatgtcgcccaaaatccaacccaggatcttctgtctgaaacccgctccttaagctgatatctctaattccattctttcagatttttcaggccaaaacaaaacctatggaagacaccattcactaccgactttccctcacagctatgtttgatgcagcaggaaatcctgttgaccctatctctgagatccatccagagtctcatcacatctcccctctactgcaacccctctggcccagccctaccataactcaaggggtctcctcagcggtccccctgcccccgttcaacatcctgttttccccaactttaaacttctaactctgggcgtgaccctcccattcgtcctccctgcacagccctctatggctctctgcggctccactgcccttccaggggagactccgcctcaacctctgctccttggagacaaagacgctcgggctccccagtgccgcccgttctgcagtgcctccaagccccagagacgtgtcggtctccgacgggagctcccccgcctcatcgcaccgcagtcccagtcccgggcaccccacacaagaacgcccctctcttagagacacaagggcctaacctgcagggcggctccttgggacttcagcactgggaggaggggttgggcggggcggcctgggacgctgcacgcacctcggtcaggttcatcggcgcggcctcctccagtccacccagggaagagcggggcgggaacggcggtcacctggacgctgacggaggcaggggcgcctgcagccgactcagccgatccgcactctagcctctgtgtagaaggaacaccgcttctcgcgtttttccgctctttcacctcagtcccgacccagagctctgggaccctctaaatcagtgaacagatccctaggtagccatgctaacgcaaccatgagggcgccgccagaagtcccgcccacacaattgagacctcattagtcgtctctctgctagaccaatggctacactcgctgccctgcccccgcagtgtcttctgggtaatgtagttctcacgttgctgcctgtgtcgcccgcagtgtcttctgggtaatgtagttcccacgctgctgcctgcctcgcctcacaatgctgggcgcgcggaccttacggaaaaaagctggaggctcctggaggagcgttaagaaatgcagttccggggctcttaaggacgtggaggggctttgctgactcctaaactgcaagtaaccagattttcccggagagcagtctaggacaagtctgagaaatatttcagagacctgtcgtttcagattctctgaagcacagcaagtcccgaaaggaagaacatcagaagcgacatggctgaccataatgaactggtcctccattcatagcggtcagctcttttgtgcttgtcaagtacacacatactgaggctctggagacttttttttgatcgttagtgtgcttctgttgggacaagaaagaaaagacccacacaggatgtgatggagagttgaaggaggaatatctttctgtcgacgaaaagggtggaactttgtgaaatagttgaagagatttattctgagacaaatatgagtgactaatggcccatgacacggctccaagatatcctaagaacatatgcccagggtggcccatctacagcttggttttaacaatttaggaagacgtaagacatcaatcaatacatgtaaaatgtacattggattcctctggaaaggcgcaactggaagggaggggcggggcttccaggtcaggtgggttcaaagattttccgattggcaattggttgaaagagtttgtatctaaagacctggaatcagtagaaatggttgtctgggttaaggggttgtgggccgggcgtggtatctcacgcctgtaatcccagcactttgggaggccgaggtgggcggatcacctgaggttgggagttcgagaccagcctgaccaacatgtagaaaccccatctctactaaaaatacaaaattagacgggcatggtggcacatgcctgtaatgccagctactcgggaggctgaggcaggagaatcgcttgaacccgggaggcggaggttacggtgagccgagatctcgccattgtactccagcccgtgcaacaagagcgaaactccgtctcaaaaacaaaaaaagacaaggggttgtgaagaccaaggttatatcatgcagatgaagcctccaggtagtcttataaggccttatgataaggcctcagctcctgagctaaagctatcttcccacctcagcctctagagcagctgggactgtaggtacaggacaccgtccctggctttattcagctttttacaatgcactacaaaaagtcggcatttagagctatttttctctcactgcaattgagtagcagtgagagaaaaattgagtagcaatagtattgccatcaggtggtggcaatactacctgaaaaccatgcccccaacaaatgaagatttggataatgccttatggtctcttctgcaggattagtgaaggaagaacaaagaaaagaccaaaaattaaaacccattctctttatattcagaaaaggaaagggctattttttggccaaagcgttacaatttagtttgccaaccagtttaaaaaaaaaaaaaaaaggaaaaattaactctgcccaactgaaggtctggcaaaaacaaacctttgaaagggttgtgggaaattaatgaatattaaactaattttcaacataaccagttaaaaataagaaatcccactaacgtggatagttccttatttaggtgtgagaaatttgctatacaaatggacaacggctacaccaaatataaaaattgactctgacccataatctacaccaacccattcagaaatctaatgtggtatctacagtaaccactcccaagtcagaatactatgtctagcaacaaggc

SEQ ID NO: 1561543 - DNA, 4001 bp, Homo sapiens
taatctaactaattgctgcctagaaatcaatgacaataggaaggctattaaagaaataactgtaagaatgaaaaaattagcccacgttccagtccggacttagacaaaatagactcttgagtccgtctttagaggctggttttcctccttcagtagattcaaaaccttaataggagtagttctagccatactaagaattggtttgatactcccttacctcttacctctccgtgttaagagcattcaatcaactatagaagcaattgcgaccaggcagactaccactcagctaatagcccgatataaatatcagccagtgctctttcatgaagaatccagtaatagtgatgtcttctagtaaaatcttgttcataaaaggcatctaagggagaaaactgaggcagaaagttaaaaaacaaacatgcattcattcactccaagaaaagtaacaggcaaggcaagggttaaaaagaaaagaagaacaagttttcctctgcctagcaagctcgacttggcgaagtcgaagccaaagaaatgggctccagacagccccccaccttcccagaacaagagtgaagaaaaaaaaaaaaaggacaaatgtgtgtatttagctgttcttgtttttctttcaactcagctacgaggccaccagctatggaaggacacaagttatgctatgctatagattacatgacctatcattatatgattaactgcttttattctgcttctgaaagcaaaaaaccccactccgtctttgttgaaatgctcagctttttagatgtaaatccactgagccggtgcgtatcttaaataaacatccttttgtctcccccatatcagtctgtctagtcctcagtttcccgcaacaccatctctgcgcctcctttgctctccccgttaaattctctcttccctgttatacccccctgtccccactctctagcaccccagatccccaggtgtcctccctgctgtgcttctccctctgttctccttgccaccagcaccactctgctctgtctgccctggctccaaatccctcctcctctccctcaccctgatgagcctccctctttgctgtccctctccctaccttgctgtccttcatctctctgtacatccagcttttctctacatttctgcacttgcttttctcctcctgctttcttatcgttttcttttcacttttgctgtctcttggcaaatccctcacccatcctctactttgccatctgttataggtctttctcattcttcttttctgtctcaggttttccactgctctctgtccgtctcctgatccctttggcccacacagtcacaggagggtttggagtaagacgcctgcatcccgggggagcgcattttccaggggctggagctgggcaggcagtaacaccccgcgtcacaggacaggccccgggcacctccccaacgcgggctcaggggaagcggtgattgtggaggcgaaacccgtggagcagcagggcccggcacaaggagggaggtgaaggggcgacagcaccttaaggcaagggtggggtctgcaggatcctaggaccaggcagaggacgcggcctttccgggactggggcagcggcgctgggctccaggggccgacaaaggcgagaatccacctctcaggtgaggactttaaaaagcgcggggcgggaggagtcagaaaaaggtttacagcaggaaaactacaggttagaaagtgtatacattgccctgtagcagaaacacccgggacgggaccagcctcagggggaccttaaacccaaaaggaaccgacccacggcctctcacgaggtcgtctcaatttgctctgagtgaaggaagacggctgagaatttccaggtttgtggggatcccaagtcccaggtacagaagcgccaggaacctggaagagcagacttaatacaagacagggcgaaactcacgcgccgcggtggcaccgtcactccacgctatccgcttcctggtctgcacgaatctgcgcgcgcagagcagaagccaggcctgggcgggacccgcaaggaggtgggcggggcctggacgaggcaggggcggggcgcgaggcggagagaccttgcgctttagagccggcagagggcggggccggggcgtgaccggtgctcctctcagcttctctcctagcacctgttttcgggtggtgaaggtgagaccgcccaggaaggctgacgcatggactcaaaagccctggaattgtctggaacgggatacaaactagaatgtaaaatgcaaggccctgcctgggcggaacgtacgatttcatgctgacggcccacagaacagaacagaaatcctctccctttctattctccactcactcaggagggagagtccaccccgtgctcagctgcagagacttccctagggcctccccctgggatgcgggacggaatgctcaggccagccaggggcgacctgctggataaacacagcaaggattcaggcgcgggggcgggagcctgagttcccagctactcaggaagcagcggcgagaggatcgctgagcctgggggtccaggccagcctgggcgacaaagtaacacccctccctcaggactccctccctcgtctctctctctttttttctccattttttaacgttaaaataaaattttgattgtgtgagatagggatacattattcttttccatgtggatatccagttagttgtcccagcacatttgtagaagagatctattactttcttttatttatttacttatttcttttcttttattttgagacagagcatttctctgtcgcccaggctggagtgcagtggcaggaactgggctcactgcagcctctgcctcctgggttcaagcgattcccctgcctcagcctccggagtacctgccattacaggcgcgtgccaccatgcccggctaatttttgtatttttgtaggtgggttccccatgttggccagctggtctcaacctcctgacttcaagtgatccacctgcctcggcctcccaaagtactgggattacaggcgtgagccactgtgcctggcccccccaaaatactttttacttcactgtctaattgttgagaaaatataattgaaaacaaacaaaaagtctttctccaaatgagaaatcatctccacgatgatcatagagaaagaaattaaaaccatttcattaataaataagccttagaccagattgtgatgcgaaatacaggcaaacagctaagaggttgaaaaaagagaaagaaactttactgttctatacaacccattaaggacatgttttcaagataaacgctaatcagtcctcagggaagaggacttgacaacactcttggtcacacatagttcatcctgactctacttggtaatggaggtgaccatctgtgtcagctaattagcttcattctgagggacggggagtaacactaacccatgtctttctgacaagtgtgagttttacaacatagcgacaggtgccctctctggtgaggctcctacagtctgacagaaactgatatcagcagtaaataataaaatttagaatatatgattaagcacagagtttatttgaacacaaagcatgaggatagccacctggaaacatcaactccaaatgaatgggatcagcgttcccttaggtttcacacacacggaaagacagagaagctttagaagaatcaccacattttccattcaagaccagtacatagggtgcagcaaggtgattggttatggattgatatacttcaaggaaggttactttatcactcaatataaagggacaatgatcccaggaggtcttatctctggggctgcttagtctttttaattatttacaggaaaattctctctctctttttttttttttttggacgtagtcttgctctctcacccaggctggagtgcagaggcatgatgtcagctcactgcaacctacacctctcagattcaagcagttctcctgcctcagcctcccaagtagctgg

SEQ ID NO: 1561544 - DNA, 4001 bp, Homo sapiens
gggagctgggctggaatgggctccccttcctgacccagccctgggtccctagacccagccctgaccaaaccccatgcagatgctgggtctggtgcctcatgcctgtcatcccagcactctgggaggctgaggcagatagatctcttgagctcaggagtttggtgaaacatggtgaaaccccatctctaccaaaaatacaaaaacttagccaggcatggttgtccaagctacttaggagtctgaggtgtgaagatcacttgggctcaggagtttgagaccagcctggccaacactgtgaaaccctgtctctacgaaaaataaaaaaactgagccaggcttggtggcttatgtctgtaataccagcactctggaaggctgaggagggtggattacttgaggtcagaagtttgagaccagccttgccaacacagtgaaaccccatctctactaaaaatacaaaaagtaactgggcttggtggttgtttgtaatcccagctactcaggaagtggaggcaggagaatcgcttgaacccaggaggtggcagttgcactgagccaagatcatgccattgcacttcagtctggggtgacagtgtgagactcaaaaataaaaaaatatataaaaataaaaatacaataattagccaggtgtggtagcacatacctgtaatctcagctacgtgggatgctgaggcacaagaatcacttgaacccaggaaacagaggttgcagtgacccaagatcatgagactgcactcacagcccgggcaatactctgtctccaaaaaaaagaaaaaaaaattctgatgtgattgatgtagagataataaaacctgagtaacatgatagagactgatgggcagagggaacttcagatggggttgggagggcatgggagacatctctgagcctagacctgaagaagaaaggcacagggccgtgatcatttagggacatagggtaagagcagggacagcaacctgagacaggaagggttttgatatctgggaaaacagaaaagcaaatgtgactggggcagagggagtcatgagatgagggcaagctcccaggaggaggctggacactggcaggggccctggtcacagggctgtggagccacagtgaggagttgggcttttgttctggggaacacgggaagctggtggagggttccctgccagggactgacgtgacctgctttagattttgctgtgatgtcctcatacagagaaaggcctcgaagatggtctctgtgtctgagtctacacctctatttcttccattctttcacgtttttttaaaaaattttttttaattttatttttggggtactgcatcccatttaaaattctaattacagctgggcactcccctctgccagaagaaaggccacgccaagacatgcactattttgccgatcatttcaggggactgggtcactcgggttgagcttttctggtctagcccctcatctccaagttgcagggaggctcactggggctcagagcagggaaattttcaccaagttaccctgagaaggtctgagatgagtgagaaggtgtgcctgaattcttacatgggggcctggaagggctaatgggaaggcttggtctttatcacccctatccttgaaaattacagaagcatctttcacaggcctgggctaaagaaacttcttttgcaaggttctgatgccactgattcctgacatttaatttttccttagaagaaaatcacagtaacatttataaaatgcagaagtgtgaacacacagctattgaccttgaaaatagcgaaagagggtcagctgtagaactaagacataagcaaattttttcaatcaggaatacatgggtggctgggagcaatggatcatgcctgtaatctcagctactcgagaggctgaggcaggagaatcgcttgaacccgggaggcggaggttgcagtgagccgagatcacaccattgcactccagcctgagcaacaagagcgaaactccatctgaaaaaaaaaaaaaagaaaaaaaagaaaaaaaagaatcatgggtgcttttagaacagcgttccatgttggggaaaagctgaggcagggcttgctagtctgacataatataaagagtcttggaacatgccggggtccagggcctaaaaccccttgtggtctttggaacacccagctctgtgccaaagggtggaaggctgccctgccaaattacaacctaagcccaaggcataaaaccctgaaggggggccagtccctccacacctgtggctatttctcatcagctgggataagagactgagaaaagaaataagacacagagacaaagtatagagaaagaacactgggcccagaggaccggcgctcagcatacggaggacccgcatcggcactggtctctgagttccctcagtatttattgatcactctctctaccatctcagtgaggggaatgtggcaggactacaggctaatggtggggagagggtcagcaggaaaacgtaagcaaaggtctctgtgtcataaataagtttaaggaaaggtgctgtgcctcaatgtgcatgtaggccaggtttatgtttgactttacacaaacatctcagtgcagtaaagagcagtattgccgccagcatgtctcacctccagccataaggcggttttctcctatctcagtaaatagaatgtacaatcaggttttacagcgagacgttccattgccaggacgagcaggagacagatgccttcctcttatctcaactgcaaagaggtcttcctctttcactaatcctcctcagcacagactctttacgggtgttgggctgggggacagtcaggtctttcccttcccatgaggccatatctcaggctgtctcagcaggcagaaaccttggacaatacccaggctttctggggcagaggtccctgtggccttctgcagtgcattgtgtcccttggtatttgagactggagaatggtgatgacttttaccaagcatactgcctgcaaacacattttaaacaaagcacatcctgcacagccctaaatccattaaaccttgaatcaacacagtacgtttctgtgagcacagggttggggctagggttacagattaacagcatctcaaggcagaagaatttttcttagtacagaacaaaatggagtttcttatgtcttcttctttccacataggcacagtaacagtctgatctctctttctttccccaacaaaccccttgtggcttggatggaatccaggtttcagggcataaaacccctcgtggcctctggaatgtgcctagacttgatggttctttgcttctagcactcccagactcataaaatgattgtatcttaaactagaagaatatgttccccatgatctcaagtagcagaacatgttccatataaatgttaacctgacacacctatagatcatgtgcttgatgcactgcttcctttcaaaccccacatcctcaccacctgctgctttgtttgatcactaatagtgtgggcttccagagctcaggtctattgcagcctccatactagcgttggccccctggacccaccttatgcattcttaacttgtcttttctcattcctttgactccactggacttcttagcccccacagcccggtgttgggtctgatcaccccaacagttccatgccaatccatcccatctttcaacattagtccagaatggaccagagggccttgagggaaacatgcacttaatagctcacagctcaagatgttcacagatgacataaggaaagaaaactgaaaaatacattaactggttaaactacattttgatgttaaggtaaaaggtcactgattctttaccaggtacacactgaaacaatcaaacttttgtattaggtaccgaagttttccaataaataataaagactagaaagcatgcagaccttgatctgaactggacgcaactagtttcaaacagaaactatttagaaattgtttttttaaaaatcta

SEQ ID NO: 1561545 - DNA, 4001 bp, Homo sapiens
agttcgagaccagcctggccaacatggtgatacccgtcgctaataaaaatacaacaaaattagctgggcgtggtgacgcacgcctataatcccagctacttgggaggctgaggcaggagaatcacttgaacccggaaggtggaggttcccgtgagccaagatcatgccactgcacttcagcctgggtgacagagcaagactctgcatatttaaaatataatattatcataacataataataaaaattataaaaacgtttaatgaaaacacctgtttcacaagcctctccacggtaacaccacagtctccatgagcgtaatgtgctaagaatggtttaatgaatctcctgctattgttcaggttgatttcctattcttaaaataatgacagaataaaacatcttctatctttcatgtctgtgtatgaactttccattctaattactaagatttttggagtcagaaacacagtaactcactcaaaaaactaaaaatgtattataaaatcaggcagaaaacatttctcgatcttggtcaccttttctagaatttaccacatactttgtgcacatgaatacatgacttccattggcagctgctctaatactggtccacagagagctgacagtacgtccagatgtggcccctgaacaatccctgctgtccaacagcactgacaccatgggaccctcaccccgtctccatccatgtctgggtgtgagcccttcccaagaccatgcccagtgcagcctcttcccaagttcatctcactggatcacgagagatggaatctaagcgagataagagggactgagggaaggcatgggtgaatgtgagcaaacctgtcaggcaggatgcttcagactcagagaagattcccaactccaaggcccagcatttctgaaaggaaggagacagaacaatccactgaaaatatcatctcacctgagaaaaagccatccctgactcctttgctctcctcttcctcttccgggtttcttcctcacgtaccaagagtctttagaagtcaatcctgaatgttagaaatatgttgtttattgctcagaatcaacacgccacctccgtggaacacaaccacacatacaaaggcgacctcaccctgggaaatatggtcccgtctgctgcccactgcaccagggatgataaactgccacaggaaaactcgcacttctttcctagaggagcccacacacacgctgcaacagtgggagctgggctggaatgggctccccttcctgacccagccctgggtccctagacccagccctgaccaaaccccatgcagatgctgggtctggtgcctcatgcctgtcatcccagcactctgggaggctgaggcagatagatctcttgagctcaggagtttggtgaaacatggtgaaaccccatctctaccaaaaatacaaaaacttagccaggcatggttgtccaagctacttaggagtctgaggtgtgaagatcacttgggctcaggagtttgagaccagcctggccaacactgtgaaaccctgtctctacgaaaaataaaaaaactgagccaggcttggtggcttatgtctgtaataccagcactctggaaggctgaggagggtggattacttgaggtcagaagtttgagaccagccttgccaacacagtgaaaccccatctctactaaaaatacaaaaagtaactgggcttggtggttgtttgtaatcccagctactcaggaagtggaggcaggagaatcgcttgaacccaggaggtggcagttgcactgagccaagatcatgccattgcacttcagtctggggtgacagtgtgagactcaaaaataaaaaaatatataaaaataaaaatacaataattagccaggtgtggtagcacatacctgtaatctcagctacgtgggatgctgaggcacaagaatcacttgaacccaggaaacagaggttgcagtgacccaagatcatgagactgcactcacagcccgggcaatactctgtctccaaaaaaaagaaaaaaaaattctgatgtgattgatgtagagataataaaacctgagtaacatgatagagactgatgggcagagggaacttcagatggggttgggagggcatgggagacatctctgagcctagacctgaagaagaaaggcacagggccgtgatcatttagggacatagggtaagagcagggacagcaacctgagacaggaagggttttgatatctgggaaaacagaaaagcaaatgtgactggggcagagggagtcatgagatgagggcaagctcccaggaggaggctggacactggcaggggccctggtcacagggctgtggagccacagtgaggagttgggcttttgttctggggaacacgggaagctggtggagggttccctgccagggactgacgtgacctgctttagattttgctgtgatgtcctcatacagagaaaggcctcgaagatggtctctgtgtctgagtctacacctctatttcttccattctttcacgtttttttaaaaaattttttttaattttatttttggggtactgcatcccatttaaaattctaattacagctgggcactcccctctgccagaagaaaggccacgccaagacatgcactattttgccgatcatttcaggggactgggtcactcgggttgagcttttctggtctagcccctcatctccaagttgcagggaggctcactggggctcagagcagggaaattttcaccaagttaccctgagaaggtctgagatgagtgagaaggtgtgcctgaattcttacatgggggcctggaagggctaatgggaaggcttggtctttatcacccctatccttgaaaattacagaagcatctttcacaggcctgggctaaagaaacttcttttgcaaggttctgatgccactgattcctgacatttaatttttccttagaagaaaatcacagtaacatttataaaatgcagaagtgtgaacacacagctattgaccttgaaaatagcgaaagagggtcagctgtagaactaagacataagcaaattttttcaatcaggaatacatgggtggctgggagcaatggatcatgcctgtaatctcagctactcgagaggctgaggcaggagaatcgcttgaacccgggaggcggaggttgcagtgagccgagatcacaccattgcactccagcctgagcaacaagagcgaaactccatctgaaaaaaaaaaaaaagaaaaaaaagaaaaaaaagaatcatgggtgcttttagaacagcgttccatgttggggaaaagctgaggcagggcttgctagtctgacataatataaagagtcttggaacatgccggggtccagggcctaaaaccccttgtggtctttggaacacccagctctgtgccaaagggtggaaggctgccctgccaaattacaacctaagcccaaggcataaaaccctgaaggggggccagtccctccacacctgtggctatttctcatcagctgggataagagactgagaaaagaaataagacacagagacaaagtatagagaaagaacactgggcccagaggaccggcgctcagcatacggaggacccgcatcggcactggtctctgagttccctcagtatttattgatcactctctctaccatctcagtgaggggaatgtggcaggactacaggctaatggtggggagagggtcagcaggaaaacgtaagcaaaggtctctgtgtcataaataagtttaaggaaaggtgctgtgcctcaatgtgcatgtaggccaggtttatgtttgactttacacaaacatctcagtgcagtaaagagcagtattgccgccagcatgtctcacctccagccataaggcggttttctcctatctcagtaaatagaatgtacaatcaggttttacagcgagacgttccattgccaggacgagcaggagacagatgccttcctcttatctcaactgcaaagaggtcttcct

SEQ ID NO: 1561546 - DNA, 4001 bp, Homo sapiens
ccagagtagctttcaataaactctctacacactgtacattgcgacttgtcttgaattccttcctgtgtgagatccaagaaccctcttggggtctgatgaggacctcttttcctggtaatataaagccagaacttaacttccaattttggaggactgagtccttttctctagagtctgtgtttttcctgtttgggccattgctatctttctgcttgaataaactcttccagctgaaatctgaacctttcgattatttcggagtgacaagtccaaataaggcaactgcatctctgcaaccaatcaagcatttatctcatttgtctcctcatgtaccttataaaagcccagtcttcaacctgcaaacttaaaaacataccttgcggccaggcgaggtggctcacatctgtaatccccgcacactgggaggccgaggcaggtggatcacttgaggtcaggagtttgagaatagcctggccaacatggtgaagcccaatctttactaaaaatacaaaaattagccaggcatggtggtgcatgtctgtaatcccagctactcaggaagctgaggcaggagaattgcttgaacccagaaggcaaaggctgctgtgagccgagatccagccattgcactccagcctgggcgacagaaggagattctgtctcaaacaaaaacaaaaacaaacaaagtaccttcccagttaagtgaagtgactggctcttggccaagggaacccccaaaaaaccctgaaaattgagtgcctctgtatgacaggatggcaggtgagacaggtctccttataccctctccctttaggagtttacatgcagcaactgacgcacattcatgtaaaaacagacattatctgactggaaaaacagactccttgtggcaagaagataccaaattacaaacaagacctaaggccacgcaaggtaagggtaagtcatgccttggaattcataaaatctcgagaaacaggtctgttttttggctgggatggaatcaagtggcagataacagacccccttccttcagcattccttcctacctcctccaaactttagacaaacttcacactctcaatcaactgccacctacagaatccctcaaccacctgtgccttctaaccccccttccacaggtcccgccctttctgccaatggaacttacaccttccaggcactgattcatgattttccctgcaattcctgtctctctgaaatgaataaaaccaaattgtcttgagccgcctcgggaccactcactataggcttcttggggttgtgtttcccttgccaaggtctctcctatttggctacgaataaactttattttacattgtttggctttttcagttgacaaaccacaagccaggactgggtggttctcattactgaattgctgtttgctcaaatgaactctttaattgttaatgtacttcagtttaatttttaacaggagaaagtgggaactgggggccccacagaccactgctcctcccacgcacgaaccctacacacgagtcaggatttcccccatgaccctctcgtggcttccgcataatctggggagacgcggggctgcgggcgcggaactgcccagagagggctccggggcggggccgcagtcaccgcgcagggacaggacaggacacccggggtcccggctgccagcccagccccatccagcggccgaggggaccgagggccgagcagctccaggaggactcggtcccagaccctggagtcgcccgcagggaggcccgggtcccgccgcagccggttccggccggttccaggcagcctctaccccgtctcgggacaaccggctatgcacacgcaccatttcctggctttcagatgtcctggggtcctctctacagctcctgtgactacagaagggcacagcgcaggagacagagcgatagaaacctgggtagaggtaccaggtccctctcggggatggatacagcggatatcaaccaccggctgcgcaaggacaaaggtgaggacaggaatgcgacccactctgtgcctggataaacaatgggcagggccctgccccggcacctctgattggatggaatgctaggccccgcccctcacttctgagtgacagcggaagccttgggtatcaggcccggcagagccagactgacttgacggattctagccacagcttctctaagggcgaggtgcttcctgtactctgattattggatatttgcatttcagccagacttgctacagatataagagaacactagcgtcttcctcactcaagggattttccccgctccttcgttctgcacggggtcacaggagtgtgcagggaatttcagactcagtgtccataggagccatctgctggcctcagagcagcaggggaaccgagaccaggccaggcacgactgcatcaggagaggcacatgtccttgagcgggccggaattgggaatgaggcatggccaagccttgctcacacacccccatcccctcctcacagtgtgaaaatgctccctgcttccagatcttcattttcaccagcaggaaactctcacctggggttaatttaaccttctgacctaaataaactgtcaacttcatgaaccctttatccaggtgtcgcccccaaacaattctgtctctagcctgatattcacacattctctttatatatacaaacaactctgcctccagcgaccccatgcgtgtcaaaccccaaaccctgcccagaagacagccccaggctccagaggtacaacaccagaaaggacagaaccccacaaaggcgtctgcacgtctcttctgctttccagggctctgcagcttctcggaatccacactccttctggagctgctctgagcggctggaggccacttgtaggggagggcgggctgcccgggaagaccccagggaatctctctttctcttcctttgcaggatccacactggcctcggcgtggagtcactggcctggggctctgctgccccctgcaggttattcagctacttctcacccgactgatcagttccatgagacaaacaccctcaaacccctgctctcctcctatgtttatgtataaaatgggcgaggaaaattctaagataacttaagtgcatttaaaagactttcagatcgcggtggaggtggcagctgagggtcccctgatcagtgacactgcagcaactccaggcctggagagagggtggagagctggagctggatgtggacaggtggagggagctactctgggaactgggctctacagcagcgcggatctagggcccggagcccgggagagcagagatgggggctcccgggacaggacgcttggggagaagagagtcgggcggtttccatgggacgggggtgctgtggcagctggtgtgggcctgtggctatcataactaagcccgattgggacgtgaaaacttggattccgtgggaatttatgaagaggaaggctctgatgacaaagaagtcattgatgaggagggggaagagagtcaccggcaagctcacccccttatggaaagaaaagtgaacgctcaaccactgctgcaaaatggggtcaaaggatgagagtatcactgtgagggaataaactgctgcataactctgagagattgcaaaaacctttcaacaacagcctgggaggccggataccatggctcacgcctgtaatcccaacattttgggaggccaaagtgggaggagcacttgaagacagaagttggagatcaccctgagcagtgaagtgagaccctcccaactccatacatctttgtttagaattagcctggagaggtggtgtgtacctatagtctcagctagtcaggaggctgaggcaggaggatcacttgagcctcaaagtttgaggctgctgtgagctatgatcaggctactgcacttcagcaagacactgtctcaaaacacacacacacacacacacacacacacactctctctctctctcaccaaactacctggggaaacc

SEQ ID NO: 1561547 - DNA, 4001 bp, Homo sapiens
aagaataaaaaaattatcccatgttccagtccagacttagacaaagtagactcccgagtccctctttagaggctggttttcctccttcagtcgattcaaaaccttaacaggagtggttctagaaatactaagaattggtttaatactcccttacctcacctctccttgttaagaacgttcaatcaactatagaagcaattgtgactaggcagactaccactcagctaatagctccatataaatatcagcctgtgcctaaagaagaaaacctgctctttcatgaagaatccagtaatagtggtgctttctattaaaaccttatttataaaaagcagcaaagggagaaaactgaggcagaaatttaaaaaatcaatatgcattcattcactccaaaaaactaacaggcaaggcaagggttaaaaagaaaagaagaacaagttttcctctgcctagcaagctcacttcaaggacagttataagataacgctttttgtgcagctgaagccaaaggaatgagctccagaaaaccccactttagaacaagagtgaagaaaaaaaaagtctgtatttagctgttcttgtttttctttcaatgcagctacaagaccaccagctatgcaaggccacaagttatgctatgctatagattatgtgaccaatcattacatgattaactgcttttattttgcttctgtaagcctgcttataaaaaccccactctgtctttgttgaaatgctcagctttttagatgtaaatccactgagccggtgcgtaccttaaataaacatcgttctgtctcccgcataccggtctctctagtacttagtttcccgcaacaccatctctgcgcctcctctgctctccctgttacattctctcttccctgttataccctcatccccactctctagcaccccagatccccaggtgtcctccctgctgtgcttctccctctgttctccttgccaccagcaccactctgctctgtctgccctggctccaaatccctcctcctctccctcactctgatgagcctccctctttgctgtccctctccctaccttgctctctgtccttcatctctctgtacatctaccttttctctacatttctccagttgcttttctcctcctttttttttttttcccccacatttgctgtgtctggcaaatccctcacccatcctctactttgccatctgttatgagtcttttttattcttcttttctgtctcaggttttctactgctctacgtctgtctcctgatccctttagcctacacaagcaccggaggctttggataagacacaggagggtttggagcaaaacgcctgcatcccgggggagcgcattttccaggggctggagctgggcaggcaagaacaccccgtgtcacaggacaggccccgggcacctccctaactcgggctcagggaaagcagtgactgtggaggcgaacctggggagcagtagggcccgcaaaaggagggaggcggcggcgccacggcgccttaagacaagggtggggtctgcaggatcccaggaccagacagaggacgcggcctccttggggctggggccgccgcgctgcgtccagctgccaacgagggcgagactgggaggcgctcagggagggaattcacctctcgggtgaggactttaaaaagcgcgggacgggaggagtcagaaaaagtttcagagcaggaaaactacgtgatagaaagtgtatacattgccctatagcagaaacacccgggacgggaccagcctcagggggaccttaaacccaaaaggaagcgacccccggactctcacggggtcgtctcaacttgctctgggtgaaggaagacggctgagaatttccaggttagtggagaccccacgccccaggtacagaagcgccagggacctgggaagcacagacttaatacaaaacagagcgaaactcacccgcggcggtgggatagtcactccacgccgtccgcttccgggtctgcgcgaagctgcgcgcgcaggaaagaagccaggcctgggcgggacccgcgaggaggtgggcgggcttgggcgaggtaggggcggggcagagagactttaccctttagaaccgacagagggcggggctgtggcgggacctgtgagtctctcagcctggctcccagggcctcagttttcgggttttggaggcgagaccggccaggaaggctgaggcatgattcaaaagccctggaattgtctggaacggggatgcaaactggaatgtaaaatgcaaagccctgcctggatggaacgtacgatttcatgctgacagcccacaaaacagaatagaaatcctctccctttccagtctccattcacttgggagggagagtccaccctgtgctcagctgcagagacttccctagggccaccgcctgggatgtgggacggaatgctcaggccagcgaggagtgaggtcaccaccttctggataaacacagcagggatgtgggcgcgggcgcgggagactgaggtcccagctactcaggaagcagcggcgggaggattgctgagcctgggggtccaggccagcctgggcgacaatgtaacaccccctcccgcagggctcccttcctcgtcactctctcttttttttcctttttttttaaacgttttaaaataagagtttgattgtgtgagatagggatctaacagtattcttttccatgtggatatccagttagttgcctcagcacatttttggaagagatttattcctttatttatttacttatttcttttgttttgagacagagtatttctctgtcgcccaggctagagtgccgtgatgggatctcggctcactgcagcctctgcctcctgggtttcagcgattcccctgcctcagcctccagagtatctgcaattacaggcgcgtgccaccatgcccggctaatttttgtatttttgtagacgagtttcaccatgttggccagtgtggtctcaaactcttgactttaagggatccacctgcctgggcctcctcaaagtgctgggatcacaggcgggagccaccgcgcctggccaaatactttttacttcactttctaattgttaagaaaatacaattgaaaacgaaacaaaaaaatcttcccccaaatgacaaaacatctccatgacgataatagagaaagaaataaacaccattttattaataagtaagccttagaccagaatgtgatgggaaatagaggcaaagagctaagaggttgaaaaaagagaaagacacttcacagttctatacaacccattaagtacatgttttcaagataaacactaatcagtcctcagggaaaaggacttgacaacacccttggtcacacatagttcatcctggctctagttggtaatggaggtgaccatctgtgtcagctaattagcttcatgcagagggagggggagaaacactaacccatgtctttttgacaagtgtgagttttacaacatggctacaggtgccctctctggtgaggctcctacaatgtgacagaaactgatgtcagcagtaaataataacatttagaatttatgattaagtatagagtttatctgaacacaaagcatgaggatagccaccggcaaacatcaactcctaatgaatgggatcaacgttcccaagtagagacgttaaggtttcacacacagggaaagacagagaagttttaggagaatcaacacattttccattcaagaccagtgcataggttgcagcaagttgattggtgacggagtcatacacttcaaggaaggttatgttatcactccataaaaagggacaatgatcccaggaggccttatctctggggctgcttagtcttcctagttatttacaggagaactcttttcctgtaaataagggcaagactcgcccaggctggagtgcagtggggcgatctcggctcactgcaacctccacctcttggattcaagcagttctcctgcctcagcctcccaagtagctggg

SEQ ID NO: 1561548 - DNA, 4001 bp, Homo sapiens
gtcctgagactgtgagtagggctggcacctggtgcacaatcgcagggtcagcaacagccagggggagggacagaccattcccagttactactgagtagagatcacaggccctgagacaggtgggtgggccggttggagatctcttccctttactggttgagatggaaatgtgcacgtgtttttccgcatactgaccagttctctggcacactcccagctggatgacccacaatttaactcaattttgatagtatctacctggagatagaatcagatcccagttaaggactcagtcccacaagactgcccctcacctcagatatggataaaattaacggtttccaaaacacactcctctattttgatttgctaggatggctcttccacctgtatcctttgtaataacctttataactgatagtaaacctaagtaaaattttctctgagttctgggaaccattccagcaaattaataaaatgtgaggaggccgggcaaggtggctcaagcctgttatcccagcactatgggaggccgaggtgggcagatcacctgaggtctcaggagttcacgacccgtcaggccaacacggtgaaaccctgtctctactaaaaatacaaaattggccaggcgagctggcgggcgcctgtagtcccagctactcgggtggctgaggcaggagaatcgcttgaactcaggaggctaaggttgcagtgagccgagattttgagcccctctcctctcccgcagtttctccccttcttccctctattccttcttttccacttcatctgctccatcttgcaatttttttcctcttgttgctctttctctccaatcttttgattgtctccaatctccatatatttctgcctctttcttctcccatctgtgctcctcctgttaaattccctcttctctgtcacgcccccttgtccctactgtctggcaaccccagatctctggggtggttctccctttgccctccttgtcaccggctgccccctcttgctgtgccagcaccacgctgctcggtctgccctggctccaaatccctcctcctctccccaactttgtctgaggagcctcccgctttgctgcccctctccctaccttgctgtccttcatctgtctagaaatagaacttttctctacatttctcgagttgcttttctctccctgctacttcctggggtgcttctttcactttgcaaatctctcaccctccctctgcgttgccgtcttgttatggatcttcctcattattttctctctaaatttttctgtttcctctacctcgctctccatctctctttcacttcacattcacagggaggggactggaataaaatacccacctcctcaagagcacagtttccaatgggaggaatttgggacggaagaacactgggtgccctgagataggtcccggccacctcccccaacacaggatccggagaagccgtgactgcgaaaaggcctggggacagaagggaacggcccaaggaggactacggcggcaggcagatcaggggtggggtctgcagaatccccagaccaggcagaggacgcggcccctcccgaatggcggctgcggcgctgcgccccaggggccgacaaggacgaggcttgggacccggagggcgtggatccgcctcgcaggcggggactttacgtggcgcggggctggcggaggggtcactgaagggttttaagcaggaaaacggcgcgaaagcagctgcctacgcagccctacggcagaacgaccggagacagaaccagccctagggcgattttaacactctgacgggacgcatgaatttactcggggtggagagagcggtgcggggatttcaaggtctgtaccgccccccacatcccgggtacagaagcgtgagggcaccgctaagcgaacacttaatctaaacaaaggaaaactcacgcgccgcagttgcgccatatctccacgccatccacttccgggtctgcaggcggctgcgcgcgaacggagaggccgggccggggcgtggccagcgacgtggcgggcggggcctgaatacttattggacggggcctgcacttccctcctcctatctctgggcgtgtctcggttttccgcgttttgcaagccacacttgccagtcaggctggagccgctccacggtttgtgacctgggatctcactaggagggtcaacgtctgttgtttggatccaggaaagttcccacaattaaaattaaggaattcaattaaaatttagaaatttaattgaaaatcccttaaattgtctgtgaaaggaatgcaaactaaaatacaatatgcaaactcaacctgtgcagaatgtgtaatttcacgctgacgccccacagaatagcatagaaatcctctccatttctattccccattcactctggagtagagagttccaaagagtttcctgggccacatctggggcgtggagtgctaaggccggtgagaagtcaggtcaccagctattgcttttaaaaaagcaatagaggccgggcacggttgctcacgcctgtaatcccagcactttgggaggccgaggcggtcgtatcactggaggtcaggagttcgacaccagcctgaccaaaatggagaaaccccgtctctactaaaaatacaaaaattagccgggcgtgatggcacacgcctataatcccagctacttgggaggctgaggcttaggtcaatattttctaaaaatactgtaatttcagattcactttaggtgcattctgaaagtaataagtaaacatactttttattttaaaaattataatctcttaaatcttgtttgttttctcttcttcaatgtactggcccctgtagataacaaagcccttaaaatagtcttcagaagacaattgtatttattgatctaaagaataactctgcagtaattctaagtgtatttggtaggccgattattcttttatagaaccctgatagaagtaaaactagattatcaaattttaaatagccttacgtctgccggcaataattttatggcaatatttttgaattaacaggtactaataagtatgcttttctctgatatctcacccccccaactttttttttcttaagacagagtctaactctgtcatccaagctggagtgcaatggcacgatctcagctcactgcaacctccacctcctgggttcaagcaattctcctgcctcaggctctcgagtagctgggattacaggcgcgtgccaccacgcctggctaatttttggatttttagtagagatggggttttgccatgttggccagggtggtctcaaactcctgacctcaggtgatcatctgcccaccttggcctgcagagtgctgggattacaggcgtgagccaccgcacccggccttatatccctatttttggatcccttcatccatcttgaagtatgatcatgtttagatatgaaaatgaacatatttaaaatattagcaggttaaaatgaggatatagtgatatgtcacaaagatggatacgagatgacatatcagcattttttatttttatttttttcagttggagtctcgctctgttgcccaggctggtgtgctgtggcatggcctccactcactgcaacctctgcctcccgggttcaagcaattctcctgcctcagcctcccgagtagctgagattacaggcgcctgccaccatgcccagctaattttttgtatttttagtagagacggggtttcaccatgttggccaggctggtctcgaactcccgacttcgtgatccgcccaccttggcctcccaaagcactgggattacaggcgcgagccaccgcacccggcccatatcagcatattttacttcgattattattattattttttagagacagggtctaactgtgttttccaggctgcatatgtactcctgggctcaagacatcctcttgcctcagccacttaagtagctaggactccaggcacactccatggtggcctaggtcagcat

SEQ ID NO: 1561549 - DNA, 4001 bp, Homo sapiens
ggatttcaccatgttggccaggctggtcttgaactcctgacctcaggtgatccacctgcctcagcctcccaaagtgctgggagtacaggcatgagccaccgcgccaggcctagccaactcttcagatgcctgcatacttgacggtcacagagctctccccctgcagctgtctccctgtggctacagcattagtcccgcagctcaatcatcaactgtccccatgcccctgttgcttatacccccaccccactgcaatagaacctcaagcctctggcattactctcctgcctctaatccaactaacccttctccctattgcaacagccccttctccccctcccccaatacctcgcaataatcctttttcataaaagtttccttactacgtttgggtttacacaagcttgaccacatgttcgcagcctcccgtttcttccccaaactttactcagccttctgtcctctccgcaggcccctgaactttggcccccccgagtctgagcaagcagtaagtgtggagtcccctgtcacctcccctgagctagctgaccacgaggaggtacatttactgtcaacctcctttctgcttgtcccctaaaacgttcctccaaaccttttcttgtgtatgaaagtaaagccttttcctggttgattttgagacctggcaggtttcggaggctggggcttatccctatttttctctctccttctctagccaggatttttttttttttttttttttttggtttttgtttttgagacggagtctttctctgtcgccaggctggagtgcagcggcgccatgtcggctcactgcaagctccacctcccaggttcacgccattctcctgtctcagcctccctggtagctgggattgcaggcgcccgccaccacgccgggctaatttttgtatttttagtagagacgggatttcgccatgttgtccaggctggtctggaactcctgacctcaggtgatccgcccgcctcggcctcccaaagtgctgggattacaggcgtgagccaccgcgcccggcccaggattttattatttgacaggctccaggacagggcaccacctcctccttggcagaccttcccaaactgaccaccaagcccctgacggctcctgccctctcctcccactctccccgatcccctgactgcctctactgtcccccaacacatccctcgagcccgactccctttactgtccccccaaacttccctcaagcccctgatcgcctctactgccccccttaaagtgcccctgagcccctgactgcttctgctgtcccctcgagctgcccccaaactcccgactgcagctactgtccccctaaactgccttcgagcccctgatcacctgtcccccaaaactgccccttcaaacccatgaccgcctctacggccccctcaaactgtccccgagttcctgaccgctgctattggccccctaatctgcccttgagcctgactcccttccactgaacccccaaactgccgccgagcccctgaccgtgtctgttcccgcaaactgcccctgtgccccttaaacctctactgtccacttaaattgcctcaagcccctgaccacctctgctgtccccacaagctctccccaaactcctgacctgtactgtccccagaaactacccctcgagcccctgaccgcttttgctgtcaccccagactgcccccagccctacccctcggccgctgtgaccacgtccccggggcccaggcgctcgtcgtgcgccgccccgcgcgtccctcagctttctccggctgcgaactcgggcggaagccggttcctgccgccccacctcgccctgggcccgggctcggctcccgcccggcactcaccatgtcccgcccgctcctgggctctccagggttagcgccccgcggtccagcgaccggcgcaggtgagcacgacaggacacctgagccgctcggggtaggcggggaagcgcgcaaggcagaggggaactcggcttaccgtcctcggggtctgattggacagatctcgggaagtggagactctgattggacagtgctgtcgactccgcacccctgattggagaattctccagtccgtccccctagcgcccttgattgggcagggctccgcttcggattaacgtctctgattggacagttccctaggccccgcccctgcctgtcctgattggataattctctcctcagtgacgggctcgtcgagaacacgcgtggctgaccctctagccgggcagccgcggatctgggagaactcactccagtccagggagggcgcggcgtcctcctccctgactgcacggcaactccagactcagtttcccctcggagcggcccctcgtgcggggaggagaggaagggcacggagtcccatggggcggagtcctgcgtgggggcgggacccgcgtgcgtgacgtcaccgtgctgtcccgcgtgggcgcggacgcctggggtccagagacctggagatctggagaccagacgacgaggccccaggaggccggaccccaccaggcgctccctgtgttcttaaaactctcggccgggcgcggtggttcacgccggtaatcccagcaccgtgagaggcggagaccggcggatcatcagaggtcaggagttcaagtccagcctgaccaaaatggcgaaaaccacttctctcctaaaaatacaaaaattagctgggcacggtggcgggcgcctgtaatcccagctactccggaggctgaggcaggagaatcgcttgaacccaggaggcggagattgcagtgagccaagatcaggacactgcactccagcctgggcaacaagagcgaaactgagtctcaaaaaaaaaaaaagcagccctcccacaaacagaaccacgtaaggtcatgaagagagaggtctcacatttatatgcttaataacgaaaaagactctacaaaaaccacaggcttaaacaaaaaatacttttacagggacactcagactggtgtgacccttgttactgatctttgtagacaaggataattatttctgaaaaatgatgtaatcctcatttaaaattttttttttcctttataaacctttgtcccagtctgggcaacatggcaaaaccccatatatacaaaaaatacaaaaattagctgggaataaaggagtgtgcgcctatggtcccaacgacttgataggctgaagcaggaggatcgctcgagcccgtggggattgaggctgcagtgagctgtgatctcaccattgtactccagcctgggcaacagagacccccgtctcaaaaaaatgaaaaccaaaaacaacctttgtcttcctttacctccctgaataagcacatagtttgctatgccgcgcatattcccactgcaatgaactgttaccaccgtttttagacagcctgttatttaggtcgacacagtaaaaacatgaattacgacaattatgtttgtatgtaaaatggcaagcgatatagagtttatacttctactctgtctcaagctggaaagtcttttcggagatgagcagtcgcgttccaggctttaggaattgcggctcaactgaataaaagtattcagaattttcacgtcgagttcaaatttatttaaacttctatgattattttctcaaatgagttaaaataagaattcaattaccataggaacagtacagccttttactttaagaaattctctagggccgggcgcagtggctcacgcctataatcccagcactttgggaggctgaggcaggtggatcacctgaggtcaagagttcgagaccagcctggccaacatggcaaaacccttgtctctactaaaaatataaaaattagccgggcgtggtggcacatgcctgtaatcccaactacttgggaggctgaggcaggagaatcactagagcccgggaggcggggattgcagacccaagatcgcaccactgcactccgcctgggtgacagagcgagactccatctcaaaacaaaaacaaac

SEQ ID NO: 1561550 - DNA, 4001 bp, Homo sapiens
ctctgatgtaggaaggacaaagatgccctgaaaaaaaggggaagggcaggacccagtccaagtcactggggtggatgtgacggccttacccagagaggccataagtgcaaagttctccagcatcacatcacggtacaggagcctctgagcctcatcaaggagcacccactcctcctgggagaagtacacgaacacgtcctcaaagttcacctgcccctgccacaatcaggagagccaagtccatgagcagcatctctcccaagaacccccatccgtgcccccacacatctccctcctgtacaccctcctacctaactcctcaactcaggaaatatcaggaccagatgtcattggtgtcttctctcgcctcatggtcccaatggatcactgtgtctacccatagcaaccacaggcaggtgaagaagttgtcaccctctaagctctgtgcttagcatacagggcctcacccttctgtaagcaaattcctctggggtcactaacatcatgcttaccagacaaccaaagatgggcttgcctttctcctttaagcccagacgtcatcagtctacacttctttccatatgtacatcactctttggatcacagttatctcacaactctggctctccaccatcactttcctggctcactaaatgcactaccactgtgaaatgaatattctcttttaactcccaatctacataatcatctttaagccatttcaggatgattcccgcccccttgctcttggttcccaccagacatgacagagacctgcaatttcttgaaaactcccttctcagtctcacctctaagtattttgcacaggctggttcctgtgcctggaacaaccttccaaccttattccaatggttggcagaaatggaaacccctccataaaacccctggcccggagtcaggaccctgggcttggggcttctccagagtcctcagacccaagagatcggagagtagcaggagagtgttctatataacaccacaatgctggagagcgtattgggtgggggtgggatcggtgagagcatggacattctcccctcacctgtatagggtccacaattacttctgagttcatgggaacctgtggggaagagggagactatgcgagtcaagcaatcttgaaggaaccccaaaggctcaaccccatcccatattcctacccagttacaatgtgcctgggagctgaatgtctaccctctgtgcttccatcttcaaggatacctcttaactgtgttagctcggaacagtgctcattatccgcccccatggccaacaagagtctgccctccatgagcagtctatggaatactttttaaaccctcggattctggctctcctctgttcagaaccttccatggctcccatcaccctcagaatagagacccagctgctcaggatgatattccaggtgcaatcacttataaagcgctctgatcctttcagacactaaaggcccagttttcccaaatgctccagctgtgaaccatctctgagcctttgcatacactggtctctctgcctggaacgtccttcaactcgtgctgtcaaaatgggtcccaaacacgagcgcccccactgttctagatacaggggcctgagctgcagtaacccgaggaatcgttcattcgaagctttgggattcagagatgggggtcagcgcgcagactcgcagacgcagcacccacctgtgccgggcccatcggctcagccgccgccatcaggcctgtggactacggaagggtggcgacaagtgcaggaacctgggatcagctgtccagggcccagcccagcggctaggtcactcaggcagcgccactgtcaagcctcaggcccacctctcttcagggaagaagacactctctcacgttttcccttttctgtcacctcaggtctgacattgcgttctggaaactaaaccagtggattaatggaaaagcaaacaaaatgtccacccgaggatggtagaggaagtcccgccctgacgttggtgaggaccaacggaaacgcctatttcctgggttttcattggcccagagccgccaagtttcctgggtaatgtagttcccacggcaccaacactagtaagcggcgtctcgcttcacctccaggttaaaagcccagagaagaccgccaggggcgcgtggaaatggtgtccctcgtctccaaggcccagacggagcttagcttcctcttgaaggagccatatctgtatttctggtgaacgtcgtgtttgacatcaaaggaatgtttagagacatgatttcagccttccttacgcagagaatgctcatcaaaaaataaaatggacacaccatacactgacgtcactcagatttctatggctggaagttaacaaatattgttttcaaatgcgtgtagcctgatgctccagagttagtttggcgagcctcagcattttctgtcaggcacaagaaagaaaagactccagacaccatgatgtggaacgtggagtggggatgtttggtggccttgaagtaagtgaataacccttctgtctgttacctcagaaaatatttatcctgcttatacagcagtgattgtgtcaaacccaacaagtaatactcttgttcaagatagtatttcatactccatatacagagatgtattcaatattttaagtgttttacaagtgtctgaaaagacagaattcatcaaatgtcatatggcaatgaaaagggcaacatgaacactttctgtaaagaagaaataaccaccaaactagatgtctatacacaacaaaatgtcttttatggaagtgtgatataaaactatttgaaaccaaaaatgataaatgtaatggaaatacatttacacaaaaaataatgtttaaaataatactcaaggccaaagaaagttgatctcaggtgaaaagtctgcaatgagagaagaaatgaagatgaaaagaagtgcatcttttgattaaaataacagcatattacagtgtaaaacataagtagatatacttattgagttagaatgatggaattcccgtgcgtaacctcaactacatataaattgaaaggaggctagttgctcaaagttttaaattttttatatttccaagtggaaagcaaatgtattacaatcctgtatggcacgctaatgtgttaaacgtttgtaatttttagcctaaatataataaatacagtcagcgtatatacttttcaaactagaagaggaaatgtttggaatataaataaataatcaatagaaaggtaaaataatagtaaaataagtggaagaagtgaggcaaagaaaagcacaatgtaggatatatttaaactgtcaacctaaataacagagattcttcaaagatgttgagttcattcaggaatgcacaggggatttgcaaatccaggacatgcaggctatagggactataggcatatccagagagcttgaaacaaggagaagctttcaaaggcaaaagggaaaagtatatataatttgttttgagataaaaagaacattggtcacagatgtttatggcagaggttaacaccagttcattagtggagacaatctgtcaggcaagtgttctactacatctagagctgtccttgtaactcctgtagcaagctgcggtttgagaagttcttgtcaaaacttcttttaacgggaatatgtgcattaagagccctcagagacagtaatagctcttatcttaagcatgtgtgtttgagtgccctcttttctcagcctcctggctttatttatttatttacttatttatttattttacacaagttactcattttggttttgacaacttttgcaaaacctaaatgactatgcaataaatactcaaataagcagttagtaatttttgatggaccaaaacacgcttcacgaggtattctcttttcttcagtgaatttccacagaatttgaattgtgattgaaagcacaactaacattcccagactccctactctgtcagtaagaaaagaatcatgttg

SEQ ID NO: 1561551 - DNA, 4001 bp, Homo sapiens
aataatatgtagtctggactcaggaccctgactgtatgaccattttgcagggaactcaaatggaaggggagggagaatagccagcaaggagtcccaagacaccataattctgaagaccatgtaggtaggagttgaggagggtgagggcctgagacatcctccacttaccttctcatggtctataactaactctgaagtcacaagaacctatggaaaatcaagaccatgagaaccagacagtgatgttaccaaaggatcatccaagccccctcgtctagcctggagtcaggtgtgcctgactatctgcaatctgggctttggttcttagtgatgcctcttacctgttgtgtgcccttggaaaaatgctcaacttccctgtgccttggtattgccatctgcaacatggcaataatggtattcactcaataggactattgtttgtatcaaactcattcttatgtgtctaggactaaatatcaactcttactgtacacataattaatgcttctgtcaacattttcagtgcaaataaactggtaggttttcaaaatgtgggtttctgcctgggtgcagtggctcaagcctgtaatcccaacactttgggaggccgaggtgggcagatcacaagagcagaattctgtctcaaaaaaaaaaaaaaaagaaagaaaaagaaagacaatgtgggtttccttttggcaatctggctgcctgctatatactcccctgaagaccatcctgctgagagccctcccttctactggagcagttgatcatcccacctgtgctgatagctagggaaacttaggcaccaaaggtgctgctccaccagcctggctgacctttccttttctccatatggactggacatgaggaactactaagcctggagtggcaaacctatatactacccaacactgcggtctccatccagtcctgggtgttcatactctataaccctccattcctgcaggcaccagacaaaatcacttcggaccacgaaactccaggctgtagaggctgccccatcctacaggcccatctctcccttccctcacctcagggaccatctgaaagaaaactttaagattctccctcctaaatacgagccccaggccttccagctgctcatgtggacatgacacctccactctgggacatctcaggatcaccatgcccaaaacctattccctgcacagccttacccatctccatccttcctgatattcaggaacaaacaaaaatacaaataaaaatccagaatggctcttcattccctactttctttcacagtcacatctgatgcaacaggaattcccgtctgttcagtttttgaaatccatccaagatctgatcacttcccctcctctgtggcccagtcccagtagactctccactagtctactgaatttacctactcacaggtctgtcttcacccgcctcacccccaccccagtctgttttgacttgaagggcctttggcaaactttgagaaacagatcttgtcactcttctgtctccagccctccgcggccactgtggccccctcaggatgaaagcgcagctgctcgggctgtcgctcgacacgcgcctcgtcccttcccaagctgcccactacagacaccaggaggcctcaggttcgggactcgctgaatgcgcctcacatctttgcgagccgggccccttgccctccattgccaccccatcacactgcgtgtcagaaacgggacgccgcccacgaacgccccacagttctgcacccggggacctgagcaggcggccctcacagggctttaggattcgggggaggccgggaggacgcggcgctcacctgagcggggtccctcagcgtggccgccgccatcggagcctgtggcggtgagacaacgaccgaggaaagggcccgggccaccctgggcgccgccaccgagcctcagacccgcctctgagctgcgagaacacagcgcgtccccaccgcgctttccggagctggtcgccgcagcgaacaaccagcttccggcaagctgagttctcttgagggcagcgaaagcaaccgccgaggggagacgccggaagtcccgcccattgcgcgtcgcactctcgggtagacctcttttcattggccaagcatcgcggctcacggcgcggcgccttctgggcagtgtagttcgcgtggctccaaacttcgaggaagtgggcataacttcggagatggagattggagacggtagatgatggagatggagatggagatggagatgatggagatgatggagatggagatgatggagatagagatgatgatggagatggagatgatggaaatggagatgatgaagatggagatgatggagaagatggagatgatggagaagatggagatgatggagaagatggagatggagatgatggagtaggagatggagatggagatgatggagatgatggagatggagatgatggagatagagatgatgatggagatagagatgatgatggagatggagatgatggagatggagatgatggagatagagatgatgatggacatggagatgatggagatggagatgatgatgaagatggagatgatggagaagatggagatggagatgatggagtaggagatggaggagaaatgagtgtcgagaactctcggactcatctggaacctgttgtaattggagatgggcctggatttcagtttcctgcagctgatactccaatctttccttcttttgaaggacttgaagaggatcttcagggccaccataaagaggtttcactgggcaaagccacgtataccttcctaaatttcctttggcaaggggacacccaatattaatgcctgatgtatgataataagaaaaggctctgaattctggatgtaggtgatgagagagtaggggagcccaaggatttacgttcctctttcaccccattctcatttgtgttctttccttcctcaaggacccaacattggtgtaaaggcacaacaacaggcagcaaacccataagccaactccccctcaatttctccccttcatccatttctgctccatattcctgtcacagttactatgggactgaacgaaggggaacgaatgcagaaatgaaaacaaaggcaaaataaatctgttttaaagaaggggtcagggggcttcttgcttctagtgaggaagggccctgagcttccacagaccttcatatttattgggtagaaagagtagggaggtggtggcttacgcctgtaatcccagcactttgggaggccaaggcgggtggatcacaaggtcaggagatcgagactatcctggctaacacggtgaaaccccgtctgtactaaaaaatacaaaaaattagccgggtgtggtagcaggtgcctgtagtcccagctactcgggaggctgagacgggagaatggcatgaacccgggaggtggagcttgcagtgagtggagttcatgccactgcactccagcctgggcgacagggagagaatccgtctcaaaaacaaaaaaaaagaaaagaaaatatcgctctggttttgtaatgataaaatagaacctacatatattttgtgttatgcattcttggcatacctatttcaatgaattctggttttttgaaattgtctcaaatattcaaaaattttttccagtatatttattgaaaaacattcacatataattggacctgtgcatttcaaacctgtgttatttaagggtcagctgtactgtcatgaaaccaccaacacagtcatgatagagaaaattaccattgcctgataacgttttcctgtactctttcagtcagaaccttccccctcagaccgcaggctcaataaccagtgatctgcattcttttactctagttttgcagcttcttcatttcatataaatggaatcatactgtatgtcaacttttgtgtctggcttcttccacttggctcagggattttcagatttatctatgatatttttacttgtattcatagtttattct

SEQ ID NO: 1561552 - DNA, 4001 bp, Homo sapiens
ttccctcaatttgactacacttctgcatatatctatttcatgtctattctctccttgaaagtctatgtcccctgtcaaattatgctgacaggtataccctaccatcatggtcacttacctacctctccagtgtttaggaagcccagtaacattacccagggacccaagcaacagatgcagtcctcatcattcaaccactgctttctggtcccctaaaagatttaccaccagaatctgaagtgtgttctccttaatgtgacccatggctcactcaccatagcatacacattagctaccatatattagatgtctccagtgtcaatccctttccagataccccaacctgcatgtccatagccatttgatgcctacacttattcgtctctgactcttcatatggccataacagtcatcctgatatttgcataatattctaattatgtttattaccaacatgctcatctcagctgatgcagcttccatagctacagctactaagaccaaaaacctcgggatcctgattgctctcttcatgcccttactttgtgtattaggaaacctagatgctgtaacaaaatatcaactttgaatccagccacatctccttagccatgaatcttagtctgttaaccctcacttggattacggcaaaagcctcaactctcatcttatttcctcctctctcaaccccacagtctgttctccactgtacagccagaggagactacagccagatgaaactgtggcaacatcacctcctccctctggtcagtttcacctctaagcatttcacatcctggtactaactcctgggttaaccttccaagtatgtttatactggttgacagaaatgggaatacctccatatatcctgtgtcacagactttggatcctgggtttaaggttcctccagggttcccatatcaaaaaacttaaaaaaaaaaaaaaaaaggtacctaagaatcccaggacatcccaatctaaagagcatgtggataggagttagggccagtgagggaataacaccctccgcttccctgcggaggttctgcaagtgcttctgcagccaggagttcctgagaggagaggcacaagctacaagaatgtatccctgatgagatttgataagctcaggcctccctgaactctttcttggccctgtaactaggtaaacgcgagttggttgtctgaactgagcgcctcagtacaaaatgtcatctcttagcacctatctgatctgtagaggttgaacaagaattcaacctcccagggcccaaaagtcatcccctgtgttctttttcgactggactttgggaaacctttaaagcctggacattgatcttttccttcctttgttggaagctgtccatggcttccagcgttctcagggtgaatacacggtcctcagcctgctcttccaggaggagctctgcctcacactttgctcccgacaggtgcctgtggaccctaggttacgatcctctcggctcagttcatctccaggcctttgcctgcaccgctccctgtgcctgtagctctcctgagcgcatcccgcgggtgtcaaaaacgggggcccatagagagcgcctcagtgtcccgacgccgggttcagggtgtaaaaccttgagcaggcgccgcttcctctctgcttttggacttaggtaaagatgaggtgacctgagggcacggaagacgccacaattacctgagccgggggcctcagcgcggccgccgccatccgactgggtggggaaagcggggtcgaaaggagggggcgagcagtgcaggtacccgggcacggtggtcccgatcccggccttggtgcgggtcacgcctagcgcctttaaggagctgcagagcagcctctgtgcagtcgggacaacgtctcgtctccaccttctgggttcagtcacttctacacgacccaacactccgcggtctctcactggaaaatacacccaacaccaatcaaaatggccactagtagaggacgccggaagtcccacctttatactgtttccgcggaaacgcctttattttgagccctcattggctctgacgcgctgtcattcgacgcagagatttctgggttatgtagtttcctcaggttccaagacagttccaaggcggtaaagaaggccttctcagaggcgcttgattgcacagagtggtgaataaacactactctggcctaagtgtcatcttccctcaatttgactatacttctgcatgtatctatttcatgtctattttctccttgaaagtctatatcccctgtcaaactatgctgtcaggtataccctaccatcacgttcacttacttgcaggaaaggcccagctccatctcagcggcctgtccttaaagtgcatgtccttctagggtagaggatagtctcacctagccttagaacccgtattgagatttttggagattagtgtctgtaactgatcactcaagtatttgaaaaaatattattttagattttggggaactcgagctctccgatgctaaacttattatttaggatgcccccaaagactaaaaatccaaattatcataacgttttgaacagtctttcagtcgcaaaatcccggtactggcagcagaggctgataaacattattgtgttataaattcacatgaatgcactctgaggcattagagtcagtttctcagtctgtcagggacaagagagaactaatccagataggacaagacaaggaagatagaggagaaatgttgtgttccctaaagcaggaatacatgctgaatctctgtctgtgattcccacagaagacaactctcctgcctataaaatcaatcatagtgtccagtacattgagcaacacttttatccacttagtatccctcgcttgagattccaacttatattcaattaattctggattaatttatctaagatttatcaatcttacaggaagaccaatgaaagaaatgctattttggtagtgataaatggctgcagttttcaaaggtggggcacgtatgcagaagatgctctccacctgttgatattggttgtgtcttaaatccaggagttcatgttattgctgggaagtggctatttttttttttttgtattagataaaacagactttatttatttcttttctttttttttttttgtgactattctttatttctgtttccatggcaaggagtgttttgcctaataaattaatgttatggatgggattacaggcatgagccaccatacctggctaattttgtatttttagtagagacggggtttctccatgttggtcaggctggtctcgaactctcaacctcaggtgatccacctgtctcggcctcccaaagtgctgggattaaaggcatgagccactgtacccagccgctcagttcttaaaaaacctatgtcttctatgttcagggagaagaggcatttagagcaagagcttactcattctccatttctgctcagaaataaaacttgcttgcctttttttttttttttcccaaattgggtgttcttttttttgtgaccaatacaaagtagggaaagaactcagtttattggtagtacaacttaaaaaaaaaaaagcatgtttaacattccaactttcatagtcctgtcaacttttactttatgttgtagtcccaggactcttctctccagaccattttaccctttcttgtgcagatgtcttcaggtttccacccagggttcaggccaggagactttggccttttttccaagtgctaccttgattaaccagtctaaccatcaccctaggcattccaggtggggtttctcattatatctttaccttctggcttttaaaatttatccaaacttcaggaactacagcaacttagcttaaggccctttaatgttgggggatcaacaggaacttcctttggtccacccaaccttcaatagtgttatattcagaattttgttttaatccgatcagtttttattttattcatctaatttccatctaatagccatcta

SEQ ID NO: 1561553 - DNA, 4001 bp, Homo sapiens
ccaagcacagaaagacatatgatctcactcttcagccaaatctaaaaaagttgatatcatagaagtggagagtagaatcgtatttacagatctggggtaatgtgggtgagggaggaaggagggcagtgttgactggggaaatgttggtcaaaggatacaaaatttcaggaagataagagaaataagttcaggagatctattacacaacagggtatctccaattaataacaatattctgtagtcttgaaaaatgctaggagggtggatattaagtgttctcaccacaaaaatgataactatgtgaggtaatgcattgttaattagctagatttagtcattccacaatgtatacataccataaaacttcatgttgcacatgataaatacatacaattatatctgtcgatttaaaaagaaagaatttctgtcctagatcatttgagcccctcactcattttcttaatatacaaccagcagtcgcaatgaatcacatattcccaatgctcctgttctgtagagagtcaaggggaatgacttaaaatgactacacaaaaaacaacagttaaaacatattaaacattattatatgcctagcactgctctaaggggctttacgatattaattcattctaatgacagaaccaatattccaacccagatactctggatccactcccctattcttaaccacaacagtgtactgcctctcacagtacacacacacacacacacacacacactcacacacacacgcctaaaacacaactggagctgccaaacctcagagagatctggcaagtattacaaatatcatctcatggactccctggaaaaatcctggctcttgttgataccaatttctgtgcggtcacttttccactaccgaatgcctcacaggcaatggagatcatccaaccatctccattcttccctgttttgaaaaggaggtctgtaaagaccaactgatgtctagtgtgtgattccacctaaacactaatctcctccttcccaaatatgggtctaaaatggagctttaatattaactactggaggtgtatttctataccagcttcgaaaaagagagcgcacaggaaggtgtgaacgatttgccaaattgttttgtgactattaagtggaaaggtgaaggagggggcacgaatcaatttgcatatccccctagtttcactgaaaatttaaggggaaatctcaatattctaaaatcaaaaacgcatgtcttgaacaaatacaaagcacaaactcacccttgactttaggtgtgcagcagtaacgctctcatcctcctccaggtccttcttttggataaaaatacgactggagaaggatacggcaagcgtgagactccaggcatttcttggagcgcagactaagtttgaaaacaccctccctccatagccacaatttccctcacttcacacgaaataggaaggaagtaaaaggaagaggaatcgattcaaccagtacaaccagtttggagctggtttctggggacagagctctgaggacgctgtggttctcaacatgtagctgcccccctggggaacactcgggggcacttctgcgctttcttgtgtaaagcttcattctcggctcaatatctgacctccctactggggccattcctctgctgcagtccccgcagctgtgaagcggaaagagggaggaagcagcaggagcctaggggcaccggcacagtgtcactcagcaaagtgcgctgcgtccacacgccctcccgggcctgtgcatagaacctcacgcacacactcacagtcccctccgtcactcatgatctcacaatccccctcctctgatacccgcgcacacacacgcctggggatccggcagatcccgtctgcacccccgggttcctactctgagcgcctccccctaggccacccgcactgtcgggtcagtcaggctggagccccaatccgcagagatctcccgcagccacagatctcttcctcagacgtgaagaccttaccccgctatgtcgtcgaccccggagaccggaagtggactggcgcggtggccgctgggaaatacagtcccgaacagaaaaagcctcagaagccttgagctgtgatccgttcaggttgatcccagcatactatgggggctgacccctaagggagccgagcctagtggattcgtgggagttccagcccgcggggtgcacaggttgttgccatgagcaaggatccccatgtgagaagagcgtttccctctcggagcgtcagtataatttactttttctctccatggagaatgcaaatgagcagaacttttaaagaagaaagaagaatttaaagtaaaattatgtcaacatgtaggtgctttaactcctttgtctcagaccccagcgataggcttccacttctctgtgctatttgaaggggacttaggataaatttgaaaagcttgaactaaagaattggttggttatatactaggagaggaagtgtggttcacattggagatttcagaatcaaatgtcctggattcttcgagacaatgttcctgttatctggagagaaaaacgtgattcaggacgacatggaaacggataaaaatacacagataattacttgccttatcttgaaggatgaataattaacactttgttaaaatagtataaacaaatgcaaaaaagggcttgcttttcctaggaagagcctgatttcactgttgtagtctaacaatatttaactttcaaaatcatttttctagtttcctatgctacataaggaggaaacatgtaataataaagagcaaaacgtcttttcattccagaattgtgacagaaaacaaataagatgattaactcaaccatatcaataatcacattaaatgtaaatggtctaaacaccttaatttaaaaagattgtcagattggattttttaaaaagtcagacccaaatgtgcatcaatgatagactggattaagaaaatgtggcacatatacaccatggaatactatgcagccataaaaaggatgagttcatgtcgtttgtagggacatggatgaagctggaaaccatcattctgagcaaactatcgcaaggacagaaaaccaaacaccaaatgttctcagtcataggtgagaattgaacaatgagaacacttggacacagggtggagaacatcacacaccggggcctatagtggggtcgggggagggggaagggatagcattagaagatatacctaatgtaaatgacgagttaatgggtgcagcacaccaacatggcacatgtatacatatgtaacaaacctgcactttgtgcacatgtaccctagaacttaaagtataataaaaaaagataattaaataaataaataaacaaaaagtcagacccaaatgggtgctacctacaggtaatatgttaaatgaaaagcactaaaaggttaagagtaaaaggatggaaaaatatacaccatcctaacactagtcaaaagaaagctggagtggctttattaaaaacaaagtagactccggacatagactattaccagagataaagaagggcataataatgataaaggagatagctcatcgagtagaaaaaaacaaacataaattttgctcctaaaagcaaagcttctaagtatgggaagaaaaatctattagatcgaaaaggagacagatccacaattatagtcagatatttcaatatatctctcttggtaattgatagaacaaacacagaaaagcaacagggtatagcagatttgagctacatatcaacttacttgatctcatttatatttgagaacactctcctcaatgacagtaaaattcatctatgtggacaggggatacttaccagtataggccatattctgggccataaaacaagtctcaataaatgtaagaggattcgagtcatacaaagcatattctttgacaaaaatggaattaaattagaactcaataatagctgaatatataatatattgtccaaagtagtacaaattcgaaa

SEQ ID NO: 1561554 - DNA, 4001 bp, Homo sapiens
ccaaatctaaaaaagttgatatcatagaagtggagagtagaatcgtatttacagatctggggtaatgtgggtgagggaggaaggagggcagtgttgactggggaaatgttggtcaaaggatacaaaatttcaggaagataagagaaataagttcaggagatctattacacaacagggtatctccaattaataacaatattctgtagtcttgaaaaatgctaggagggtggatattaagtgttctcaccacaaaaatgataactatgtgaggtaatgcattgttaattagctagatttagtcattccacaatgtatacataccataaaacttcatgttgcacatgataaatacatacaattatatctgtcgatttaaaaagaaagaatttctgtcctagatcatttgagcccctcactcattttcttaatatacaaccagcagtcgcaatgaatcacatattcccaatgctcctgttctgtagagagtcaaggggaatgacttaaaatgactacacaaaaaacaacagttaaaacatattaaacattattatatgcctagcactgctctaaggggctttacgatattaattcattctaatgacagaaccaatattccaacccagatactctggatccactcccctattcttaaccacaacagtgtactgcctctcacagtacacacacacacacacacacacacactcacacacacacgcctaaaacacaactggagctgccaaacctcagagagatctggcaagtattacaaatatcatctcatggactccctggaaaaatcctggctcttgttgataccaatttctgtgcggtcacttttccactaccgaatgcctcacaggcaatggagatcatccaaccatctccattcttccctgttttgaaaaggaggtctgtaaagaccaactgatgtctagtgtgtgattccacctaaacactaatctcctccttcccaaatatgggtctaaaatggagctttaatattaactactggaggtgtatttctataccagcttcgaaaaagagagcgcacaggaaggtgtgaacgatttgccaaattgttttgtgactattaagtggaaaggtgaaggagggggcacgaatcaatttgcatatccccctagtttcactgaaaatttaaggggaaatctcaatattctaaaatcaaaaacgcatgtcttgaacaaatacaaagcacaaactcacccttgactttaggtgtgcagcagtaacgctctcatcctcctccaggtccttcttttggataaaaatacgactggagaaggatacggcaagcgtgagactccaggcatttcttggagcgcagactaagtttgaaaacaccctccctccatagccacaatttccctcacttcacacgaaataggaaggaagtaaaaggaagaggaatcgattcaaccagtacaaccagtttggagctggtttctggggacagagctctgaggacgctgtggttctcaacatgtagctgcccccctggggaacactcgggggcacttctgcgctttcttgtgtaaagcttcattctcggctcaatatctgacctccctactggggccattcctctgctgcagtccccgcagctgtgaagcggaaagagggaggaagcagcaggagcctaggggcaccggcacagtgtcactcagcaaagtgcgctgcgtccacacgccctcccgggcctgtgcatagaacctcacgcacacactcacagtcccctccgtcactcatgatctcacaatccccctcctctgatacccgcgcacacacacgcctggggatccggcagatcccgtctgcacccccgggttcctactctgagcgcctccccctaggccacccgcactgtcgggtcagtcaggctggagccccaatccgcagagatctcccgcagccacagatctcttcctcagacgtgaagaccttaccccgctatgtcgtcgaccccggagaccggaagtggactggcgcggtggccgctgggaaatacagtcccgaacagaaaaagcctcagaagccttgagctgtgatccgttcaggttgatcccagcatactatgggggctgacccctaagggagccgagcctagtggattcgtgggagttccagcccgcggggtgcacaggttgttgccatgagcaaggatccccatgtgagaagagcgtttccctctcggagcgtcagtataatttactttttctctccatggagaatgcaaatgagcagaacttttaaagaagaaagaagaatttaaagtaaaattatgtcaacatgtaggtgctttaactcctttgtctcagaccccagcgataggcttccacttctctgtgctatttgaaggggacttaggataaatttgaaaagcttgaactaaagaattggttggttatatactaggagaggaagtgtggttcacattggagatttcagaatcaaatgtcctggattcttcgagacaatgttcctgttatctggagagaaaaacgtgattcaggacgacatggaaacggataaaaatacacagataattacttgccttatcttgaaggatgaataattaacactttgttaaaatagtataaacaaatgcaaaaaagggcttgcttttcctaggaagagcctgatttcactgttgtagtctaacaatatttaactttcaaaatcatttttctagtttcctatgctacataaggaggaaacatgtaataataaagagcaaaacgtcttttcattccagaattgtgacagaaaacaaataagatgattaactcaaccatatcaataatcacattaaatgtaaatggtctaaacaccttaatttaaaaagattgtcagattggattttttaaaaagtcagacccaaatgtgcatcaatgatagactggattaagaaaatgtggcacatatacaccatggaatactatgcagccataaaaaggatgagttcatgtcgtttgtagggacatggatgaagctggaaaccatcattctgagcaaactatcgcaaggacagaaaaccaaacaccaaatgttctcagtcataggtgagaattgaacaatgagaacacttggacacagggtggagaacatcacacaccggggcctatagtggggtcgggggagggggaagggatagcattagaagatatacctaatgtaaatgacgagttaatgggtgcagcacaccaacatggcacatgtatacatatgtaacaaacctgcactttgtgcacatgtaccctagaacttaaagtataataaaaaaagataattaaataaataaataaacaaaaagtcagacccaaatgggtgctacctacaggtaatatgttaaatgaaaagcactaaaaggttaagagtaaaaggatggaaaaatatacaccatcctaacactagtcaaaagaaagctggagtggctttattaaaaacaaagtagactccggacatagactattaccagagataaagaagggcataataatgataaaggagatagctcatcgagtagaaaaaaacaaacataaattttgctcctaaaagcaaagcttctaagtatgggaagaaaaatctattagatcgaaaaggagacagatccacaattatagtcagatatttcaatatatctctcttggtaattgatagaacaaacacagaaaagcaacagggtatagcagatttgagctacatatcaacttacttgatctcatttatatttgagaacactctcctcaatgacagtaaaattcatctatgtggacaggggatacttaccagtataggccatattctgggccataaaacaagtctcaataaatgtaagaggattcgagtcatacaaagcatattctttgacaaaaatggaattaaattagaactcaataatagctgaatatataatatattgtccaaagtagtacaaattcgaaaaggtatgaatactaaggtaattgaaattatgtaat

SEQ ID NO: 1561555 - DNA, 4001 bp, Homo sapiens
gtcgggggtaatgtgggtgagggagggaagatggtgttggctggggaaatgttggtcaaaggatataaaatttcaggaagataagagaaataagctcaagaaatctattacacaacaacgtatctactattaataactactattaataactattctgtagtgctaagagagtggatattaagtgttctcaccacaaaaatgataactatgtgaggtaatgcattgctaattagctagatttagtcattccacaatgtacatatactataaaacatcatgttgcacacgataaatacatacaattttatctgtcaatttaaaaagaacttctgtcctagatcatttgagcaactcactcattttcttactatgcaagcagcaatcacaatgaatcacatattcccaatgctcctgtcctatagaaagtcaagggaaatgacctaaaatgaccacacgaaaacaaaagctaaaacattaaacatttattattatatgcctagcactgctctaagaggttttagagtattaattcattctaatgttcattacaagcctgagaagaccagaaacggacagaacaaacattccaacccagatactctggatccactcccctattcttaaccgcaacagcgtactgcctctcacagttcacacaaatagcccaaaatgcaaccggaactgccgaatctcacagagatctggcaagtattacaattatcatctcatggactctcccgaaaaatcctgactctggttgataccaatttctgtgcaatcactttccgattcctgaaagcctcacagacgaatggaaatcacccaaccatctccattcttccctacttggaaaaggaggcctgtaaagagtcagaaacctggcgtgtgattccacaaactaatcttcttttcaaagcagagtctaaaataaagctttaatataaacctctggaggactatttttataccagcttagaagaagagagcgtacaggaaggtgtgaacgatttgccaaatggctctgtgaatattaaatggcaaggtggggagcgggcggggtggggaacggctcgctgggaggcggcacaatgggagggggcaagaatcaatttgcatattctcctgaaattcactaaaaatttacaggaacctctatattctaaaatcaaaaacgcatttcttgaacaaatacaaagcacaaactcacccttgacttaagtgtgcaacaataacgctctcatcctcctctcggtccttcttttggataataatacgactggagaaggatacggcaagcgtgagactccaggcttttcttggagcgcagactaagtttgaaagcaccctccatggccacaacttccctcacttcgtacgaaatgagaaggaaataaaaggaggaggaatcggtctgagttcgaagctggttcctggggacagatctctgagggacgctgggttctcaacatgtagctgccctcctgggggaccctcaagaggcacttccagctctcatattcccaccccgagtccagatctgcgccttcttgtgcaaagcttcattctcggttcaatatctaacctccctactggggacattttcattcctctgctgcagcctctgcagctttgaaggggaaagacggaggaagcagcaggagcctagtaccaccggcacagtgacactcacacagccccagcaaaacgcactgcgtccacacgccgtcccggtcctgtgcacagggcctcacgcacacactcacacagtcccctccgtcactcaagatcgcgcaatccccatcctttgatgcccgcgcacacgcacgcctaaggatctggcagattccgtctgcgccccgggttcctcctctgagcgcctcgctctcgcccacccgcactgccgggtcggtcaggttcgagtcccagtccacgaagacctcccgcagccaccgatttcttcctaggacgtgaagaccttacccagctaggtcgtcaaccccaggagacaggaagtggaaccgctaattccggtgcggtggcctctgggaaatacagtcctgagcagaaagaacctcagaagtcttggtctatggtctgttcaggttgatcccagcatacattgggggctcctaagggacccgagcctaatggatttgtgggagttccagaccgtggggtgcagaggttgcggccacgggcgagaatccccatctgagaggagcgttgctgttttcggtgcgtcagggtaaattaccttttctctctatgcaaaagaatgcaaatgagcagaacttttaaagaagaatttaaagtaaaattacgtcaaaatgtagctgctttgacctcttcgtctcagatccgagcataggcttcccctttgtgctatttgaagggacttaggataaatttgaaaagcctgaactaaagaaatggttggagagactccgtctcaaaaaaaaaaaaaaaaagaaagaaagaaagaaaaggaatcgttggttttatactagaagaggaagtgtggtttacatgagagatttcagaatcaaatatacttgattcttcaagacaatcttcctgttatctggagagaaaaacgtgattcaggacggcatggaaacagataaaagtacacagagaattacttgccttatcttgaaggatgaataattaacacattttcttaaaacagtctaaataaatgccaaagggggtttgtttttcgtaggaaaagcttgatttcactgttgtaatctagcaacattgaactttcaaaatgatttttgtagtttcctatgctatataaagcggaaacgtggaataatgaagagcaaaatgtcttttcattcccgactgtgacagaaaacagatagcaagataacaaacttaattggatcaatgatcacattaagtgtaactggtctaacaccttaacttaagaaggttgtcaggttggattttttttttaaaagtcagacccaaatacgtgctacctacaggtaatacttaaaatataaaagcactaataggttaaaagtaaaaggatggaaaaatatataaaatcctaacactagtcaaaagaaagctggagtggctatattaaaaacaaagtgacttcaccaaaaagactatatcagggataaagaaagttacatcatcataatgatgaaggatacagttcatccagtggaaagaacaaacctaaattatgctcttaatacagcttctaagtatgtgagtaaaaacctgttagatcaataaagtaacagacaaatccacaattataatcagatatttcaacatatctctcttggtaattgatagaactaatgcagaaaagcaacagggtatagattatctaaacaacatatcaacctgcttgatctcatttacacttctggaacactcttctcaaagacagtaaaattcatcttaggtggacaggagacactttccagcgtataccatattctgggccataaagcaagtctccataaatgagtaaatggactcaagtcatacaaagaatgtttttgacaaaaatggaattaaattagaaatcaataacagctcactatatattgtccaaagtagtaaaaatttgaaaatgtatgaatactatgataattgaaattatataatgtttgaaaatttcctttatgagtcataattttctgttatatcctaaagggtaaacaataacatatttgcattaaaacaaaataatgtttttgtagtaaggaaaaaattttaagctatctatattgactatgcattaaagagcagaataattatttttggtatatattccaatgctttaatcaatttcttagccagtatcaccatatttttaaggattttttttgacacagtctattatttttaaattttgataaaattgtatgtaatcctcaatgctggactttatggttaataaacttgaaattatagctaccttcaaatggcgcttctctgaacaccataccttttaaattgagatatat

SEQ ID NO: 1561556 - DNA, 4001 bp, Homo sapiens
aaaattacgtgggcgtggtggcgagcgcctataatctcagcttctcagaagactgtggcaggagaatctattaaacctgggaggtggaggctgtagtgagctgagatcgtgccactgtactccagcttgggcaacagagcgagactctgtctcaaataaaataaaataaaataaaataaaatttcactgctttagtgtctgtttatctttgaatcatataaacagaatcatatactatgtagtattttgcatctagcttctttcacttagaatttttaaggttcatccatgttgtaacatgcacaattgctaagtaatattctttattaatatttttaatgtttttagagacagggtctcactctgtcacccaagttggagtgcagtgagctgggactacatatgcatgccactgcacatggctaaaaattttttttttttaattattttctatagagacaggctctcaccatgttgcccaggctggtctcaaactcctgggctcaagcgatcctcccacctcggcctcccaaagtgctaggattacatgcgtgagccaccgcatccgtccaaatattttctttcattacatcttttagttggctttaaaaaatatataaataaagactacaaatttccagatcctaattttgtactcaatttctttataattttatcattgggccaggtgagatggctcatgcctgtaatcccagcactttgggaagctgaggcagacggatcacgaggtcaggagttcgagaccagcctggccagtatggtgaaaccccgtctctactaaaaatacaaaaaattagccgggtgtggtggcacgcacctgtagtcccagctattcaggaggctgaggcagaagaatcgcttgaacccacgaggctgcagtgaaccgacctcatgccactgcactccagcctgggcaacagagggagactccgcctcaaaaaaaattaataataaatttatcatttaaatttacgtgcagtcaatgttttgaaatacttggaggatctttgagagaagcataggcttctttacatcccaaagacattgtggcctggggaaactggaacaaattagccgaatgaatctggtactaggctcactgaggaatggtgaagccttaaaaggctccaggacttctctgaacgaaggtttgcttttcagaaagtggagttatagcgccttacctggaatcttgaaccccaaattatgatctctccacggtagtcaacggagcttcataaattattccttaatccgaggcttctcaaatctgttgtgttccctaaacaacagaataaatgcctactctgagggtctgacacaaaagcaggagtcccacaaaataagttcctttaaaatatttcttcttgtatttaaaagtcacactgatttggtattctatacaataataaatttatcttttacacagaaatcctgttttatagtatttatcagatcaattatttagccttttccaaattttcgagtaaactgacgtcctggaagaagcacccttattttcaccattttacagtcgaagaagggaagataagaggcggtgaatccgagactttcattcaggtgacgatccctcgcgggcactcactctcgctcacactacaatcagatcctccatgcggctttcatatactctgtcacactcgcagccagaatcccctcggatggactcttgcaaacctccagccccatcccgggatccgtgcgtcttctacagccaccacttgggccagcgtccaggacgcccaagcgtaacctccccactctaaaccgttaggaatcagtggctggactcaccgcgtcataaaagcataaactgtgacccgatgagtccgcgcactcggaaaacaagagaacgctcccacgtctccgggcgcagcttgtgccagcgactactaggtcagggggcgcagctgagagaattcaagcaacctccccgcaaccggttccgccgcgtttgtgggctggtagcccggaatacatttcccagaggccttcgcggccgacgtgcttcgcgcaggaacgcagccgcctcccgactggaggacgcggtagcggagctgctcaaagcgaggtgctcagccctgggaggctcagggctgcccgaggggcttagtcccagagccagtgctgtcaggggctgagcatgtgaatagggcagtcggaagaccatgtgtgtctgtggcttttaaatacaccccgaacgtctatctcttttaactggagtatttaatttatttacatttaatatagccactgatagatttaaagctgccattttattatattttcttttttttttttagtgctaaatacacaggcttttattttcttcatattcaatctttttgtgaatttaaagatgaggaggccgggggcaatggctcacgcctgtaatcctagcactttgggaggccgaggcaggcggattgcccgagctcaggagttcgagaccagcctgggcaacatggtgaaaccccgtctttactaaaatacaaaaaattagctgggcatggcggcgtgcgcctgtagtcccagctactcgggaggctgaggcaggagaatcgcttgaacccgggaggcggaggttgtggtgagccgagatcgcaccactgcactcgccggggcgacagagtgagactctgtctcaaaaccacaacaacaacaacaacaacaaaaactatattaatactttaataccctaaagataatgagacaaacgtgcatttgtggaactgcatgtcaatcaggccagttccctgcagagggaactcccagcatgacctcagtcatctgtgaggacacagagcagtccttgtttagacacacactttcatctactgctgcagcatggtcagcactccacttcttgatggtttccttctgctatgaatatgcatgtccagttgcttcttagagcagacaccttcctcatccaccagccattggaggaggactggggccacccagatgattgattggacccattcttccaggagggtttcccggtggccctcttccatcgtcatcgtatctgaaatcagatgagtttccatagcttcttctttttttcaaatcttgccgaagcagagttttgaaaaacaaaaccacaaactcagctattccccagaagaaatctgttatcaaagataatctccatggagactgactccagttgtccaacacttgtgcgtttgagatgtaaaccatcttgcccccattccctgcttcggagccttatttattactttttaaaaacagggtctccctatgttgcccaggctggccttgaactcctgggttcaaacgatcctcccgcctctgcctcccaaagtgctgggattacaggcattagctcctggcattttaatttgttttctttttgttgcatgtttcctttttctctcctttctttatgttggattgatgtattactattccaattttctctttaatagtttgtaggttctttaagtcattactccaggaattttaataagtccaaatttatcaatactctgactctcctctcacagaatgcattcaatttcatatgccctcttaaatttaaaatacaagatatcagttacatattcgttttgtttaaaaaaacctctctaggctgggcgtggtggctcacgtctgtaatctcagtactttgggaggccgaggtgggccgatcacaaggtcaggagatcaagacaatcctggccaacatggtgaaactaaaatacaaaaattagctgggtgtggtggcgcgtgcctccacacccagctaataccagtagaataccagctacacaggaggctgaggcaggagaattgcttgaaccagggagtcagaggttgtggtgagctgagattgtgccactgcgttccagcctggtgacagagcgagactccgtctcaacaaacaaacaaaaatctctctgatgttatactattattttgtcagtattcat

SEQ ID NO: 1561557 - DNA, 4001 bp, Homo sapiens
cttcaccacctggatctcgatgaggtcactcgggggtgtgccaggccggcagtcatcaggcaccaggacctgggcaagaggagaagaaagaggagcctgtggaacctgcctcaggaccgccccagcacgccccaattattaaagcttgggctcctctgttattttcagacagggcctcactctgttgccctggcgcgatcgtggctcattgcaaccttgacctcctgggctcaagcgatcctcccacttcatctccctgagtagctgggattacaggcatgcaccaccacatccagctagttaaaaaaaaattatttctggctgggcacggtggctcaggcctgtaataccagcacattgggaggctgaggtaggcagatcacctgaggtcaggagttcgaaaccagcctggccaacatggcaaataccgtttctactaaaaatgcaaaaattagccaggtgttgtggctgctgcctgtaatcccagctactcgggagactaagacacgagaatcgcttgaacccaggaggtggaggttgcagtgagatgtgatcatgccactgccctccagctcaggcgacagaacaagactccatcttagacagcaaaacaaacaaaaattattattattatttttaatgtagagggagtcccactatgttgcccaggctggtctccaactactgggctcaagagatccttctggctctgcctcctaaagtgctgggattgcaggcgtgagccgccgcgcccggcccatcctccaggattctgttgtatcctcatcaacatttcctctcctgtccaaaatatatcatggatcccaccttttgtcctccaccctagttaaagccccatcacttggcgcctccaaaattgaaaaacccaagggcatctctgttcctatttctgctggcttgtaacccacctcccaggaatagcctgaaggtcttttgaaaatgtaaatcagatcaagtcatttttcgcactcaaaaccctccagtggctccaaatgacttatcccaaatcgtcactataatatctgtggcgatgtagctccacttatctctctgaccccagcttaaacataagccggcacccagctgacttctctcgtctaaatttagctgccccacccctactcttggctcaatttatagaaattggctcaatttttatttcctttatagaacatatcacagtaactctcctttattgtctctctcctctcaagagactgcaggctccaaaagaacacaacccttgtctgtcttggtcacttctctatttacagagccgaagtaggagctcagtaaatgtttgttgaatgaatgaatgtcctcaattagtctaattctgagtggggtaacgtggaggaagttccaaagtcacctagaccacccacttctacccccaaattctcccttgggcattcgagaagcatcactaagacccttgaagaattatcccctaccccgacataggtgctccaatcataatcccccacgtttttcagggtcaccttcccaaccttctaccctagaattagccctagaatttatgaggccccgccccttacaaggctccacccaaattatgcaaattatccctggtaagcccccttccctggacccaaacccgtcccacaagacaacaccgtcctcagactccgcccccatccaggccccgcccaccacccataggtccctcccccaccccgcccaccatgacatagtctcctcccctgccccgcccctcgcgaaaccacaagaagccccacccccagggccatagcactaaatacctccctcgcccaccccctcataggccacgccccggacccgccccccacactacgacctcctcccacctcgagccccacgcccaggccccttccttgcccgcaccaggtccagtggctcctgggatcgcgactccggagtcggtgagctccgactctgggcctctgggcgcgcagcggccatcttgtgcccaagccccgcccccaaggccaatgttcgctctgaaagggggtggggctcgaactggcgtaagagctactgcgcaggcgcagtgcggggctgcgagggggcgtggtgcagcagggggcgtggcggggcggggcgtggcggctgagcccgggagaatgtgagttgttccctctctaattacctgtctgtccctccgagggtacgctctgtgtggcgctaggatgcctgtaacaccctgggaacaaatccgaacgttccttctaaaccaacgcaggccgactcgaggctctggctgtcaggggaacctcagcagaactgaagaagctttgctttgtttccacggtaaacgtttttgtgattacctctgcactgctcatgacaacgtaatgacgccaagtttataaacgtcggtgtaggccgggtgcggtggctcatgcctgtattctcagctactcgggaggctgaggtgggaggatcgcttgaggccgggaggtcgaggctgcagtgagccatgatctcgccactgcatgcagcctgagtgacagagactctgtcaaaaaaaaaaaaaaaaaaggcagtgtggagaaaaatattcagtaaacagcaacacaggtggtcctgggaggacgcaaaaacccgcaagctgatgttatgtttgggaggaaagagctcaaaaacgcggggttttcagcagcatcaaggacggggctcttcttagctgccccgtttagtcattctggtggtatcaccttggataagtcactacacttctctggaccatttctctttcttttgtgtagcactgtagaagcattgtgacaaaccactgagaagagacatggaagagtttggaaacatctttaaatagttttcttgaaagggcaggataggagatacttaaacatgatcctaagcatgatcatttcattcataaatatatatgaaattatattttgtgatatgttggtataaaataaagataaacaccacttaggctgaattatctcctcctcctcctttcttcttcttttatagagatggggatcttgctgtcttgccttgcccaggctggtcttgaactcctagccttaagcgatccttctgccttggtcttccaaagctatatttcccttcttttcttttgattttaaaataatttttttttttttgagatggagtctcactctgtcgcccaggctggagtgcagtggcatgatcatggctcactgcaacctctgcctcccgggctcaagcgattctcctgcctcagcctcttgagtagctgggattacaggtgcccgccaccatgcccggctaatttttgtatttttagtatatacagggtctcaccatgttggccaggctggtctcgaactcctgacctcaggtgatccgcccacctcggcctcccaaagtgctgggattacaggtgtgagccactgcgcccggcctaaaataaatttttaaatgttgtgggtccctaagagtatcatgggccctaggcactgtatctactactgtgtctaatgcttaagtcagctctttctgtccaggtttcctaatttgcaaaatgagggtgataataaaacctactttacacagttgctatgatgattaaagaagtcattatatataaagtattttggacaatgtatggcacacagcaggtgctatgagttagctataataattactaccatttggcactcccactagcaataaatagggacctttgttgcttaacattcctatcaatatctgatactcaaactttaaaatgttcgctaatctcttgggtgtgaaataatttcatttcttttcttttttttgagaaacagcccaggctggagtgcagtggcgtgatctcagctcactgcaacctccacctccttggttcaaacaaatttcctgcctcagcttcccaagtagctgggactacaggtgtgacacgtcattacgttatcgcaagtggtgcagaggtaaccacaaaaacctttactgtggaaaca

SEQ ID NO: 1561558 - DNA, 4001 bp, Homo sapiens
tccaaggtcacagaagtggaagagacagtgccaaggccaaggcccaggaaagggcctggctccagagccctttccatttactttacacccatctgttgaggtctgctctggctctaaaatgaaagcattaagagccttcccgctgaggtcaatactattattaccactcccactctgtcctggtggaaagtaaggcactgaagttactcgtctaaggccacgaaggtgagtggtggggctgggacttgaacccaggcctgcccagtcccagagctcttggggaatacaacccagtgcctgcacacactctggcagtgcaccagggaggggccaggccgggtgcccggatggatggataagacatgagataagcaagcaggaatctgatctggatgttctctgaggccgtgcgtggccggaggaccacagggactgcgcagaggcaggcaggtgaatgtcagcagcgtttagccaaagaggcttacggtcttcagaggagctaagccaggatcaacgcaactgtgcttcccggcgctggggtcaatcggatccccagatgggttctaagcactgcgcaacatgggacctgggagcaggacaccgcaaagagcagaccaagccattccttccctaaagccctgaccatcccccggactgggctgggtcaaaatgccttccctggctcccacagcccccagacctctccatcaggggtctggtcaccttggatggcgactctgtcgcccgggtctcagtctctgccttccacccagactccaagcccttgttcatctccctgctccctgtctctagtgcccggcacagggcctggcactggaaaaacttctgcctccactcactcctgccttctgtgtctgtgggtcacttttctgtgcgactctgcaggtcccagagcactcatccacatgaattggggtcagctccctggactgggggtcggggtggggtgtcaggagggcggggctccactctgatccactcggcacaggggagggaggcctcaggagtcgccacccgatccagtccccgccttcgccctgccccgtgggccacgcggtggctgaccttggcccagtcacttcccccgctggggacgcgcttcctccccgcctgccgagcaaggacgaatgaatgggcctcctgccggccagaatccccgtaattacccgcctgatcaaaggccacgcgcagcccgcccggggcagcaacgggacccgggctgactcgaaaaggggaaggaagggctgggggggccgagggctgagaccgtgccctcggggccgcggtatccggccaggccagcccaaccgcgcggccccttcccccacctgggcctcaacttccccccgaagtcgccaccacttccggccacgaccggcggagttggaacttcggggggacggacagcggccccacccccgacggcccgcagcagagggacccccaccgaggcccccgctcctgcccccgccacgcgcacgcgcgcgccctggacccggacccgcgcacgcgcaccccccctccagccccgctcgccgcccgcgggccgcccgggcgcgcgtcccctcccacagctcttcggcgcgcacgcgcactccccccgcccgcgtcaccccggccgcgcgcccactcacgcccccccagcagcgcgcacgcgcgcccgccgcccagtcgcgctcgccctccagtctccccacccacccccagcccaagcccagcttcccgaagcgcgcgcccacctggcccccagcgcacggcccccgcccccacccctcacctccttggtcccggggccgccgcgccgcactcctcctcctctctcctgcctcgcggatggtggcagcggcggcagcggcgactcagaccctggggtcagggggacgggcgcccaggccggaagtgaccttcccggccgcttccgcccgcgccgctcccccccttctccctactccctgccccccgggccgccaccctgtcctcgccgctctaggaaggcgagcccgctatcccggccaccgcccccagctctgtggtgcccggcgggcgcctgagggagccacttccggaagtgtctaggacgcaggtcctccgtccatgctctatggcgccccgcgccgaggggcttcggccccgcccccttcccggacaggaggtgcgggctgggcccgttaggcggagacttccgggtgtctagggcggtgcccccccgacaacccgggctcctcgcgcctgcgcggccgggtccccgggcccgccgtgaggagagtgaagtggtggagagggacgctcgtgccaccccgggtcctcctaccgtctctatcatggtaaccccttctctgccgctgcacctcccagtggcccgagtccaggtgccttagttactggacagagaccccgggttccttagttactggacagagagtgctgcgcttcaggtgccatggcctcagtttcctcctttctgaagtgatgaaaatacattgtgcgcctccaagtgcttcacacgcactaggtcctagtcctaactagggcctcatggtaggtcctatccctatgttgcaggtgaggagtcaaatcacctaccaaaagtcacacacccggaatgccagagcctcggcccgaacccatggagtttggctctaaattcgtgtatttaacccttgactgtacacactgcctcgtgtcatagccctgagaatccactacttcccccgcgttaggtaggcacctagtaaggacgcactgggtgttagctgttactgttggtattcttgcaaaaaacacatattttaaaataattgtccaaaccatagtgtccttgtaggctggtccttctggtccttcctctgttctgtacttggctgactctcacctaagtggcagatgacttatcgcttataattgttatcatcctcactggtagtcagaaaagataagaagctataattcactggtggaataacacctttctcagcctcaatttctcatctgtggaatgggaaaaaataagataacctgcaaggtaatatgtgtaagagctgcttagttcaatacctggcccatagtaagttcacaaaaatgatggtggttattattacctattagcagtgttacatataagtctattgttgtggccactgtataccctcaaagctcagtgagcatcaatcataagatgtatattattgatttaataacatctttccatggggtggggtgaacagtgctgtgttaactgtgtgtgtcaataggaggatatctgtgtccctccttcagaaatatcacaaaggtaaatttttaaatatatcttagaacagaaggaagtgtggccgggtgcagtggctgacacctgtaaatctcaacactttgggaggcagaggcagacgtcaggaggtcaggaattcgagactaccctggccaacatagtgaaaccccatatctattaaaaatacaaaaattagctgggcgtggtggcggacacctgtaatcccagctactcgggaggctgaggcaggagaatggcttgaacctgggaggcagaggttgcagtgagctgagatcgcaccactgcactcttgcctgggcgatggaatgggactccgtctcaaaaaaaaaaaaaaaaaaaagagagtgaagtgctatcataacagcaatagaaacaaattattagggtacaaactctacacgaggaaacctgtttataagaaaagtcatgtgcttgtgctcctctgaatcagatcattcagtgggtgtcctgcagtgacctggttgttgggagggacagcctcctccctctccagcccattccccttcttcgctggtcaaattgacaacggcaagatcgagaacagctcattggcacaccagatggaagccaacactgaggatggaggagaaacaagacacagggagccagctagacactggatggcttcgtgaaagaggctccgtgccagctgagattttatgtgagagaaatc

SEQ ID NO: 1561559 - DNA, 4001 bp, Homo sapiens
ccccttgttttttgggggttttttgagacggagtctcactctgtcatccaggctggagtgcagtggtgcgatctcagttcactgcaacctctgtctgccgggttcaagccattctcctgcgtcagcctccaaagtagctgggattacaggtgcacaccaccacgcccagctaattttgtatttttagtagagacggggtttcaccatattggccaggctggtcttgaactcctgggctcaagtgatccacccacttcagtctcccaaagtgctgggattacaggcgtgagccaccgcactcatgcttggtttttttgttttgttttgtttgtagagagtatgctgttcaggctggtctcaaactcctgagctcaagtgatcctcctgcctcagccttccaaagtgctgagatcacaggcatgaaccaccatgcccggcccttcctgccattgttaaaagcttcaggattatattttacatcagcatttcctgttgtcatacacttcctgccatcatatttcggcaacctctaccacctcccaaagtttctagcttaaaaaattattgatttcctcctagctcccctttctgtcagttttttaattttatatttgttttcaaatgagtcctcacattgattttaaaaatttaacaagagtatagtgaaaaggaagttcccctttcactatttatcttccccatatgcatctattatgacgggtttcttttttaaactacttggagtactcataactgattttgtactctagttcagaagaaatgtctgaatgttaaatgtttacataaaaaatgctattttattatatcagtaatggagcttcccccctttaaaactgctgcaccaggaagatacaaccttgttatcacaatttaaagagaaaatgagacttggaggttcagattcctccacagtcatagtatcagctacccacgcagtgacccacattcaggtgattacacacactcatacacagatccatacacgatcttgccccccccacctccacacactcaatatgacctccccacgcccaaagctgcacacatcttgacctcacttctctcacacacacaccaatctgacccgcacgcggtttctttcactcaactacccagacacccctcatcccaccagcacaagcaggcccaccgcggtctcacacacactcgagccttcctttgcccagtctcacatgcatgactgggatcgcggatttgtccccttccgactccccatgctggttcggtcccagacgctcaggtgccacattggggtgcgctctcccggctcctccacacgctacgcagctgcccgcctcaagagcgtctgcgtgcttccagcgttaagtggaattccaagcagcctccggggcacagttagtctggtcactgcggccagactgccgcctcaggacccagagaacgcagcacactttagttgggcccatctatccccggcgaggcttggactacgtttcccaggagaccctgcggtccagtatgtctcccgaggaggggcggaagcccgggagccgccctctgaggctgggcggggtgaaagaaagcttgccccagaggacttaaacaggcaagaaggacttggttaaagactattgcaatagtcaacttccaatacaacagcagctggagatttatagctaacgggctgggtgaaggagttaaaggatgctaaattactaagaggaagttaagtatcaagagtggggggattgttactaaactggcttagctggattcttgctgaagtgctgttcgcaggctatggaggaggcctggccaagcaaaaagggctcagaggagcctgactaaagcttggtctagggactccttgtcaggtgagactcccggaaggctccgatgggcagctcacctcaaagagatagttttgttggtgccagagtccgcgccaggggaatcgggatggctgggctgtagctttcggcaacctgtcgctttctggactacacttcccagaagcctctaggcccagggcactctcccgcgataactagattgtctcttgaggagtgggcgggatcttcccgcggatttgggcaagcggccttggggctttgtgagatagctagggtcgacttgtgtggattctagtagaacggagctgaccctatccgaacaggcgtaagtgaggcggctcggagcctggcgcgacaggaactcccgacctgtgtgggctgcgtggggaacaggctaaggagcgattgtgaggagtgtgtacggttgtgactgggggcgtgtgtctgtgcgaccgtgtatggaactgtgagggcggggaggaggactttttgtttatgtttgtgcgggtgtgagtagagtttaattgtgaccgggttgggcactgtgtttgcgagtgtgaggttcctggaccgcggttgtgactgtatgtccccttggggtgtgtgtgtgtgtgtttactaccatttgccgaactgtgtgtagtatgccttaattttgaggtttgtggctgcttccgtgtgtgtgtgtgcgcgcgcgttggtgatattgttgatggagggtgcgtgtgaatttgttgtcattgtgaccccaaggtgtatgtcactgggaatttgagagatgcccacggactctgtggttgtgtccgtgtctacccccgtggtgtgtatgagtgtgtgattgtgtgttgtgtttaggtttggggtgcctgtgacgtttatgtccctgcggtgtgagtgagtttgtgtgactatgtgtccgtatagccaatgtaggtatggggagtctttgtctttgtgacttcagccattggagacccctgtgagctcagggacaggttctgcccagaacggcattgaccctaccgttgtctgtgatgcccggattaagcaggatgccctagacttctctgaccttcctctgtaggtgatgggcagtaggggctgagcaaagataacttctgacatagtcaaaccaactccctctcagaagaacctgatgtttcctgactgctttctccttcctcagccctgccctgcttggatagaggcctccgaacaggagtaaagaatggctgttgaacatccacaaggcacctgcaaggtagcttgtcctgtcctcttgtttaagaaaaatccctttttctttgtcaggacatagttgctttccttctcttgaaaattcttgcctatgagatgacctgatccctggagtttccattttgagaaaatgtggtgtcttcaaaccccacctcccacacctgattttcccttactgatttgtcagatggttttaatttttctttttcttttttttttctttctttctttttttttttttttttttgagacagaattacaggcgtgagctgctgtgcccggccttatccttctactcttgatggacatttgtcttgtaatttttggctactacaggcagtgtgactatgatcattttgtgcgcatattttggtacacatttgcttgcatttctttagaatatatacctagtgattaaattgctgatagtggctggatgcagtggctcatgcctgtaatcccagcactttggggggccaaggcgggcggatcacgaggtcaagagatcaagatcatcctggccaacatgaggaaaccccgtctctactaaaaacacaaaaattagctgggcgtggtggcacgcgcctgtagtcccagctacttgggaggctgaggagaatcgcttgaacccgggaggcagaggttgcagtgagccaagattgtgccactgccctccagcctggtgacagagtgagactccatctcaaaaaaaaaaaaaaaaagtgctaataggtagggtttgtacatcttcagttttaccaaacattgccaaactgttctctaaagatactgtacttatgccagcagtttacaagagttttcttagctccacatccatgctagacatcataaaactcttaaatttttgccaatctggtgggtgtctaa

SEQ ID NO: 1561560 - DNA, 4001 bp, Homo sapiens
gccctaccccatgacttctgggaaaaggaaaagggctgaaggttgaactcatcaccaatcgctgctgatttaattaatcatgcctacataatgaagccttcatagaaacacaaagggctgagttcaaacagcttatttcccggactaccccacaggcgttttcttttttctgttttttaggagacattggtggggtaaacatacaaaaatgtgattgcctcactcaaccaagagccttagccataattaaaagatgttcagatggagctgtacaggaatgtgatgctggagaactagagcaacagagccacattaggtatagatcgcttgcctgtatagtccaaattttgttgtttttgttttttgggtctttttgtttgtttgtttgttgtattttgttttgttttaaggagcggagagtttaataggcaagaaggaagggagaagacagaaggaagaagttcccccatacagagatgggggttgggggggtggtggctccaaagccgaaagaggaggtccccttgttttttgggggttttttgagacggagtctcactctgtcatccaggctggagtgcagtggtgcgatctcagttcactgcaacctctgtctgccgggttcaagccattctcctgcgtcagcctccaaagtagctgggattacaggtgcacaccaccacgcccagctaattttgtatttttagtagagacggggtttcaccatattggccaggctggtcttgaactcctgggctcaagtgatccacccacttcagtctcccaaagtgctgggattacaggcgtgagccaccgcactcatgcttggtttttttgttttgttttgtttgtagagagtatgctgttcaggctggtctcaaactcctgagctcaagtgatcctcctgcctcagccttccaaagtgctgagatcacaggcatgaaccaccatgcccggcccttcctgccattgttaaaagcttcaggattatattttacatcagcatttcctgttgtcatacacttcctgccatcatatttcggcaacctctaccacctcccaaagtttctagcttaaaaaattattgatttcctcctagctcccctttctgtcagttttttaattttatatttgttttcaaatgagtcctcacattgattttaaaaatttaacaagagtatagtgaaaaggaagttcccctttcactatttatcttccccatatgcatctattatgacgggtttcttttttaaactacttggagtactcataactgattttgtactctagttcagaagaaatgtctgaatgttaaatgtttacataaaaaatgctattttattatatcagtaatggagcttcccccctttaaaactgctgcaccaggaagatacaaccttgttatcacaatttaaagagaaaatgagacttggaggttcagattcctccacagtcatagtatcagctacccacgcagtgacccacattcaggtgattacacacactcatacacagatccatacacgatcttgccccccccacctccacacactcaatatgacctccccacgcccaaagctgcacacatcttgacctcacttctctcacacacacaccaatctgacccgcacgcggtttctttcactcaactacccagacacccctcatcccaccagcacaagcaggcccaccgcggtctcacacacactcgagccttcctttgcccagtctcacatgcatgactgggatcgcggatttgtccccttccgactccccatgctggttcggtcccagacgctcaggtgccacattggggtgcgctctcccggctcctccacacgctacgcagctgcccgcctcaagagcgtctgcgtgcttccagcgttaagtggaattccaagcagcctccggggcacagttagtctggtcactgcggccagactgccgcctcaggacccagagaacgcagcacactttagttgggcccatctatccccggcgaggcttggactacgtttcccaggagaccctgcggtccagtatgtctcccgaggaggggcggaagcccgggagccgccctctgaggctgggcggggtgaaagaaagcttgccccagaggacttaaacaggcaagaaggacttggttaaagactattgcaatagtcaacttccaatacaacagcagctggagatttatagctaacgggctgggtgaaggagttaaaggatgctaaattactaagaggaagttaagtatcaagagtggggggattgttactaaactggcttagctggattcttgctgaagtgctgttcgcaggctatggaggaggcctggccaagcaaaaagggctcagaggagcctgactaaagcttggtctagggactccttgtcaggtgagactcccggaaggctccgatgggcagctcacctcaaagagatagttttgttggtgccagagtccgcgccaggggaatcgggatggctgggctgtagctttcggcaacctgtcgctttctggactacacttcccagaagcctctaggcccagggcactctcccgcgataactagattgtctcttgaggagtgggcgggatcttcccgcggatttgggcaagcggccttggggctttgtgagatagctagggtcgacttgtgtggattctagtagaacggagctgaccctatccgaacaggcgtaagtgaggcggctcggagcctggcgcgacaggaactcccgacctgtgtgggctgcgtggggaacaggctaaggagcgattgtgaggagtgtgtacggttgtgactgggggcgtgtgtctgtgcgaccgtgtatggaactgtgagggcggggaggaggactttttgtttatgtttgtgcgggtgtgagtagagtttaattgtgaccgggttgggcactgtgtttgcgagtgtgaggttcctggaccgcggttgtgactgtatgtccccttggggtgtgtgtgtgtgtgtttactaccatttgccgaactgtgtgtagtatgccttaattttgaggtttgtggctgcttccgtgtgtgtgtgtgcgcgcgcgttggtgatattgttgatggagggtgcgtgtgaatttgttgtcattgtgaccccaaggtgtatgtcactgggaatttgagagatgcccacggactctgtggttgtgtccgtgtctacccccgtggtgtgtatgagtgtgtgattgtgtgttgtgtttaggtttggggtgcctgtgacgtttatgtccctgcggtgtgagtgagtttgtgtgactatgtgtccgtatagccaatgtaggtatggggagtctttgtctttgtgacttcagccattggagacccctgtgagctcagggacaggttctgcccagaacggcattgaccctaccgttgtctgtgatgcccggattaagcaggatgccctagacttctctgaccttcctctgtaggtgatgggcagtaggggctgagcaaagataacttctgacatagtcaaaccaactccctctcagaagaacctgatgtttcctgactgctttctccttcctcagccctgccctgcttggatagaggcctccgaacaggagtaaagaatggctgttgaacatccacaaggcacctgcaaggtagcttgtcctgtcctcttgtttaagaaaaatccctttttctttgtcaggacatagttgctttccttctcttgaaaattcttgcctatgagatgacctgatccctggagtttccattttgagaaaatgtggtgtcttcaaaccccacctcccacacctgattttcccttactgatttgtcagatggttttaatttttctttttcttttttttttctttctttctttttttttttttttttttgagacagaattacaggcgtgagctgctgtgcccggccttatccttctactcttgatggacatttgtcttgtaatttttggctactacaggcagtgtgactatgatcattttgtgcgcatat

SEQ ID NO: 1561561 - DNA, 4001 bp, Homo sapiens
cattggttgcagggccatcattctgcctaccttgaccccccttctatcttaagcttccttctttctgagagatactcagtgaaggaaataatgtatacagtggtccatttccaagacaaaatgccttgaattggcttaggtaagcaaactacagaagaaacaggatatactaggcccctgcttggatagatgatgcctgcttgtcagcctcccgctttctccctttcccccacttagttgccttcacccaaaccaaagaagtttagtctaagatgaaagtttgctagcctgcaaaatagctcattttgtctgcttttatcagcctgcccagctgcttaggtcataagtcaactattgaagagaccttgagctaactaggattgcagtgcattgtgggccgcaaccaaatgcagcaagacaagcctaaaaaaaaaacacacacacacaccggctgggcgcggtggctcacgcctgtaatcccagcagtttggaaggccgaggcgggcggatcacaaagtcaagagatcgagaccatcctggccgacacggtgaaaccccatctctactaaaaatagaaaagttagctgggcgtggtggcacgcacctgtagtcccagctactcgggaggctgaggcaggagaatccacttgaacctgggaggcggaggttgcagtgagccgtgattgcaccactgcactccagcctggtgacagaacaagactctgtctcacaaaaatcaaaaaacaaaacacctgaagcccctacccaacaatcaataggcaacatccgggaagattgtgaccccatagttatcagcctatgaggaaccaggggaggaacctgtgcactaggggataaattgcttgttgaaactgttgggtgtgcctatcagacactgatcttgcaagaccatcattaaaagtctcacttttgctgttctccgggtctctgagtccattctttgggacgggtaagtttgtttctcacactcaagaaatcatctttcactatcccacgctatctctccaaaactgacttgaatccaaccagaataaatgtcaatccaaccttgtatttatatttatctactataagaagtcccagaatttctagtcaactgtcttttcggacattgtataccatcaagtctcatttgtccccttttctcattcttcccaactttcaacacttttcctgtatgccttcataatggaattcataattcattaacaaccaactcctcttttatcttcaaccacttccttgaacacgccctaacattctgagtctaacagaaactaggctgtatctggaggactctgcagccctctcaacatttccccagctacagcctcttaccagtgggtctgaaaatggaacagatggccggcctccttgttgttcactaccttcagacctttcttcctccctccacaaactctagttttgaatttcctgccatgagattgtatataactcaccacatctcacttttgttgacctctaccaaacacagggtattttccccctatatctgaaatcttcagctcatggtttactctctgcagcgcgattacccttttctattttttttaattcttgcatttttaactacacccacacagatgagccttgtttacttacccttgcctggacttttcccccctctcgtggctcatttccaacaacatgttgatgggtggttgttccccagccgtcttccccagccctctaccccaacctgctgctccatttctctgctctaatttacggagaaactcttgaactatgttgtctacactgtgtcccattcttctcccctccttctaggttgcccccactccaatccagctacgggccagcacaaaaactgctccccacacattcacgaaggactatgcctgtcactcaacgcaaagctcaattctttgtttttggccccatagcggctgctatcaccacctttacgaacgtggtcacgcacaacgcgacgcagtcataatcacgtacatacagtcacatttaaatagtccattagggtcacacacagcgcctgtcaacgtcgtgtgcgcgtgcgcgcacacacacacacacacacacatacacacacacacacacaagctcccgtcgcggccccagctcctgcatcaatttcactctcgcatccactgctcccatcgcgatcgctcgcccccacgctccctcgccggcaaagccaccaactccaaagacattagcacctcactcccctcagccccggcctcgggccctccggagtcattcggcttctgtgtctcggaatcactcacccggccctgcggtcccttgatggtggaaggttccgcgatctttctattaaccctaaagggacagagggctgacaggaagttgcccggggaacggtgcactctgggaaatgtagtccggagcctgggccgtctttaactgccccggacaccgcggtcaccattaacggaccctgcatttgagccccatcccctcgctgggcaaagaccatcgcccacacaccgctcacatctgctgccgagagcttccagaattccaggccgcgtttaggaagcttcagcggaggcatgcaggctgccctacctctgcaaaaggctcccagccctgggaacaggacagtaagcccaggccatcttaggctggaagtaaccttggtcccgacggccctgggaaatgtagtccagagcctggaacactgcagaaatgccccggggggatggtgcgatggttttcagtaggagctcgctgcgtgggcctctgacctatgtggcatggcgggaaagtcctacaagactgtgccaagcgagtggcgagtctgtcccgtctctgcccgagcctcggcccggctgggtggacacctcttgtcccacaagtaccagcctgggatagaacgaaggggaaacgatccatgggacacagctacatgcccagccctataggggtaccctgtctgggaatccatgagaactcttcctaataccttattcccatcctccaatcgcccttaaagtgtttggtttcaattaatgtttatagtaacattagtactgttttgtaaattccattcatgccattctttttgctgaagtacacacttgccagttttcatttgcttctcttttagatgtacatcatttcaatctacatctaaactttctgacagaggagtaatttttttcagtactttcaaacttatcaggtaactaaaatagttgtttctttttttattgtgaaacagaaaatacttgaagtgcataaaatgtgtaagttcagtataactccacacaagtgttggtatctcaagaacaaatgcccattctatgtgatcatttctctttttgtttgtttgtttgttgttttttttgagacagggtctggctttgtcacccaggctggagtacagtggcacgatctaggctctctgcaacctctgcctccctggctcaagtgatcctcccacctcagcctccagaatagctgggactacaggtgtgtgccatcacactcagctaatttttatagagacagggtctcgccatgttggccaggctggtctcgaactcctgggctcaagtgatcctcccaagtaggcctcacaaagtactggcattacaggcatgagtcactgcacataacctgtgtgatcatttctgatacccagctccagctccagctgatctttagggtattaataatatcttggctctttaatagttttaatctctcagctggacgcggtggctcacgcctgtaatcccagcactttgggaggctgaggagggtggatcacctgaggtcaggagttcgagaccagcttggctaacatggtaaaaccctgtctctactaataatacaaaaattagctaggtgtggtggtgcatgcctgtaatcccagctactctggaggctgaggcaggagaatcgcttgaacccaggaggcagaggttgcagtgaaccaagatcacaccactgca

SEQ ID NO: 1561562 - DNA, 4001 bp, Homo sapiens
aagagaccttgagctaactaggattgcagtgcattgtgggccgcaaccaaatgcagcaagacaagcctaaaaaaaaaacacacacacacaccggctgggcgcggtggctcacgcctgtaatcccagcagtttggaaggccgaggcgggcggatcacaaagtcaagagatcgagaccatcctggccgacacggtgaaaccccatctctactaaaaatagaaaagttagctgggcgtggtggcacgcacctgtagtcccagctactcgggaggctgaggcaggagaatccacttgaacctgggaggcggaggttgcagtgagccgtgattgcaccactgcactccagcctggtgacagaacaagactctgtctcacaaaaatcaaaaaacaaaacacctgaagcccctacccaacaatcaataggcaacatccgggaagattgtgaccccatagttatcagcctatgaggaaccaggggaggaacctgtgcactaggggataaattgcttgttgaaactgttgggtgtgcctatcagacactgatcttgcaagaccatcattaaaagtctcacttttgctgttctccgggtctctgagtccattctttgggacgggtaagtttgtttctcacactcaagaaatcatctttcactatcccacgctatctctccaaaactgacttgaatccaaccagaataaatgtcaatccaaccttgtatttatatttatctactataagaagtcccagaatttctagtcaactgtcttttcggacattgtataccatcaagtctcatttgtccccttttctcattcttcccaactttcaacacttttcctgtatgccttcataatggaattcataattcattaacaaccaactcctcttttatcttcaaccacttccttgaacacgccctaacattctgagtctaacagaaactaggctgtatctggaggactctgcagccctctcaacatttccccagctacagcctcttaccagtgggtctgaaaatggaacagatggccggcctccttgttgttcactaccttcagacctttcttcctccctccacaaactctagttttgaatttcctgccatgagattgtatataactcaccacatctcacttttgttgacctctaccaaacacagggtattttccccctatatctgaaatcttcagctcatggtttactctctgcagcgcgattacccttttctattttttttaattcttgcatttttaactacacccacacagatgagccttgtttacttacccttgcctggacttttcccccctctcgtggctcatttccaacaacatgttgatgggtggttgttccccagccgtcttccccagccctctaccccaacctgctgctccatttctctgctctaatttacggagaaactcttgaactatgttgtctacactgtgtcccattcttctcccctccttctaggttgcccccactccaatccagctacgggccagcacaaaaactgctccccacacattcacgaaggactatgcctgtcactcaacgcaaagctcaattctttgtttttggccccatagcggctgctatcaccacctttacgaacgtggtcacgcacaacgcgacgcagtcataatcacgtacatacagtcacatttaaatagtccattagggtcacacacagcgcctgtcaacgtcgtgtgcgcgtgcgcgcacacacacacacacacacacatacacacacacacacacaagctcccgtcgcggccccagctcctgcatcaatttcactctcgcatccactgctcccatcgcgatcgctcgcccccacgctccctcgccggcaaagccaccaactccaaagacattagcacctcactcccctcagccccggcctcgggccctccggagtcattcggcttctgtgtctcggaatcactcacccggccctgcggtcccttgatggtggaaggttccgcgatctttctattaaccctaaagggacagagggctgacaggaagttgcccggggaacggtgcactctgggaaatgtagtccggagcctgggccgtctttaactgccccggacaccgcggtcaccattaacggaccctgcatttgagccccatcccctcgctgggcaaagaccatcgcccacacaccgctcacatctgctgccgagagcttccagaattccaggccgcgtttaggaagcttcagcggaggcatgcaggctgccctacctctgcaaaaggctcccagccctgggaacaggacagtaagcccaggccatcttaggctggaagtaaccttggtcccgacggccctgggaaatgtagtccagagcctggaacactgcagaaatgccccggggggatggtgcgatggttttcagtaggagctcgctgcgtgggcctctgacctatgtggcatggcgggaaagtcctacaagactgtgccaagcgagtggcgagtctgtcccgtctctgcccgagcctcggcccggctgggtggacacctcttgtcccacaagtaccagcctgggatagaacgaaggggaaacgatccatgggacacagctacatgcccagccctataggggtaccctgtctgggaatccatgagaactcttcctaataccttattcccatcctccaatcgcccttaaagtgtttggtttcaattaatgtttatagtaacattagtactgttttgtaaattccattcatgccattctttttgctgaagtacacacttgccagttttcatttgcttctcttttagatgtacatcatttcaatctacatctaaactttctgacagaggagtaatttttttcagtactttcaaacttatcaggtaactaaaatagttgtttctttttttattgtgaaacagaaaatacttgaagtgcataaaatgtgtaagttcagtataactccacacaagtgttggtatctcaagaacaaatgcccattctatgtgatcatttctctttttgtttgtttgtttgttgttttttttgagacagggtctggctttgtcacccaggctggagtacagtggcacgatctaggctctctgcaacctctgcctccctggctcaagtgatcctcccacctcagcctccagaatagctgggactacaggtgtgtgccatcacactcagctaatttttatagagacagggtctcgccatgttggccaggctggtctcgaactcctgggctcaagtgatcctcccaagtaggcctcacaaagtactggcattacaggcatgagtcactgcacataacctgtgtgatcatttctgatacccagctccagctccagctgatctttagggtattaataatatcttggctctttaatagttttaatctctcagctggacgcggtggctcacgcctgtaatcccagcactttgggaggctgaggagggtggatcacctgaggtcaggagttcgagaccagcttggctaacatggtaaaaccctgtctctactaataatacaaaaattagctaggtgtggtggtgcatgcctgtaatcccagctactctggaggctgaggcaggagaatcgcttgaacccaggaggcagaggttgcagtgaaccaagatcacaccactgcactccagtctgggcgacaagagcgaaactccatctcaaaaaaagaaaaaaaagttttaatcttgctgtgaaatgtatataaatgcaatcaaattgtacaaattttctgtcttgattagttgttaaactcctaactggattaaccgaaaaccccatagtaaaggccttacagaaggaaaggtatgcccatccagccatcaacatcattttcctggtactactggcaggggaccccaagaccaaccactacacgcccaagctctgatgattcactgggaggctcacagtgaagtgatacaaaagaaaatcagtaaagaaaaaagcgcatggggcaaagtccaggggaaaccaggtgcaca

SEQ ID NO: 1561563 - DNA, 4001 bp, Homo sapiens
gctcctcagcttccaagtgcggaggttgcagtaagccaaaattgtgccactgcactccagcctgggcaaaagagcaagacttggtctttaaaaaaaaaaaaaaaaaaaaaaatccagcagaattacttaaacacagtgtttacgtataaaggaagcaaaaggcctggcgtggtggctcatgcctgtaatcccagcattttgggaggccaaggcgggaggatcatgaggtcaggagatcaggagattgagaccatcctgggaaacatagtgaaacactctctactaaaaaaaaaaaaaaaaaatacaaaaattagctgggcgtggtagcttgtgcctgtaatcccagctacttgggaggttgaggcaggagaatcgcttgaacccgagaggcagaggttgcagtgagctgagatcgtgtcactgcactccagcctggcgagaaagctagactccgtctcaaaaaaaaaagtaaataaataataaataaataaataaataaataaataaaggaaggaagcaagaaaattttaagccatttaacaagaaaacccactattgctttcagaaaatgagaatgttgggccggtaatagtagctcatgcctggaatcctagcactttgggatgctgagggtggaggatcgcttgagcccaggagttcaagatcagcctgagcaacacagccagaccccatctgttaaaaaaaaaaaaaagaaaataataatgtcagttaattatttccatggcaataaatagtttacaaaagtattacttctatctgaatgcttctagatgttgcaagtttaagtcctggaataccatctgaaacatcaaactaaaagaacagacctgagaaacatattccatgtgctcagggaaagaacaaagaatttttaacaaatgtaatattgggatgttttttgttttctgagattcatttcttttttgccctttggaaatattttgtactgtctctcaagttcttctgataacatatattttatatttattggaaaaatgacattcgagtgaataaatcttttcaaggtcataaacccaaggcgggacagtgccaatctgaaactgtgctgaaaagatagattacccaggaaagtttacaaaaaggaacctcaacgcaaaggagttcccataggatgtctgtgccctggaaaggtaccaggatgagggccacagcattttatgcagattagttccaagtgaataatttttctgatttttctctgatgtaaaatatccacaaacaagaaataaatcgtttaaaagaggcatctattggaaaaaagattattaaaatactgcgtgtgtttgaaatgcaccacacaggacaaagagttggtgacgatgttttccactggcgagcggaagtaggcgtttgggaattcggggagggatccggaaatctagggattaatggcccgccgtgggaggagctaggctggggggacagggtagtggatttgagactctgcttccaacatctttggaagactcagggggaaacagcctttgggaagaaagaagggactgggaaccccagactgtagctcctcccacacaaaccaaacacacaaggcgggattctccccaggaccctcccgtggtccctgcacgatctgggaaagacgcggggctgcgggcgcggagttgtccagagagggctccggggctgggaccgcagtcgccgcgcagggacgggacaggacgcttggagttccagctgccagcccagccccacactgcggccggaggtgaccgtggggaggcccgggtcccgcgatcacggccggttccaactagtccggccctgcacactcaccattttccggcctcgcgggtgtcccggtgttgtccctaaggttcacggagccagcgcagggtacagcgcatccgatgcaggggtacagcaacctgacgcgtcaaggggccaggagaccccaagctaagcacaacccgatcgcacagtgacgtagcacgcatttgcgcagcgtagccgtaccctcctttccggcgccgcccctgattggacaattatacagccccgcccctttttgtccgaatgacagctaggcagcaggtctagtagctaggcagatctcgcttccgccggtgggacggaactggtgccctccgtggacaattgtgttgaagcagaaattgttccggatctcgggtcggacacggaagtcttcctgcagtgtttctggatgcggggacagggatgcgcaggaattccagtctcagtttccagatggagcgacccctcgaggagcaagtccagagcaagtggtcgtctagtcaaggccgcacaggaacaggagggtctgatgtcctccaggtaccaggggcttggcataatgttgtaaggcctctcgtggaatagtgacccttgtttataaacagacggttaccccatcatgtgtaataaaaagtgtggttgcattttaatctttgaccataacagcgttgaggcgtccacctttcttttccccacctccacacatttggcactttagaaaaggaaccccaaggcagggcttggtggcgcacacccgtagtcccagctactgcgtggtgggggcggtgggggaggtcggggggtgggtgggctgaggcgggtggatcgcttgactccaggagtttgagttcagtctgggcaacatggccagaacccatcccaagaaaaaaaaaaaaaggaaagaaagaaaaaacaatccgtaggacacccgagcacttggctcgggtggtaaattgcaaccctaacctgggcacagggactcttcagaccaatcacgatctatgagacgtgctcagtaaactgcgttttactctggaaggaaatggtttgttttcgttgtttttttgtttgtttgtttttagtttaagcatgtttttattgcttttcatttttatttttatttttgtagatttatggttacaaatgcacttgtgttacgtggatatatttcatagtggcgaagtctggcttttagtgcacccatcacccaaagagtgtatattgtacccaataggtaatatttcatccctcatcccccctctctgtccaacctattggcatctccagtgtctattattccattctgtatgtccatgtttacccattgtttagctcccacttatatgtaagaagatgcagtttttgactttctgtttttgcatcatcgcacttaggataatggcctccagttccatccgtgttgctgtaaagtggaaggaaatttatctcaaataagttttctaaagtgtccctacagaacttggaaagaccaagagcccaaaaccagcctgggcaacatagcgagaccccatttctcaaaaaatttttaaaaattagctgggtatggtgttcacctgtagtcctagctccttcggaggctgaggcagaaggatctcaaggctaagagtttgaggttacagtgagccaagattgtgccactgcattccagcctgggagagagagagactgtctctaaattttttttttaaagtagaaacatatttcatttttcccattatagaggagacagtgtaatcttgaaaactcccatgatccacccttctggtagctctgtgtgtacaggtagatgcagggggaacaatgcttccaaggctgtcaaaggtcatgtttagttctaaattgctgaaactcacaaaatgcatcctcttgtttctaattagatgcagaacagtgaacaccatggacaaagcatcaagactcaaactgtaagtgagatcgctacctgtcagcgtggctaccttccttgtttataatgaccatttgggtctgtccttctatgacctctttgtgggggggtctttcgggtctttgtgaaggcactcccatagtcaaggccaataaccaggctctcaggtatgtcctgttcattgccctcaccctgtacttccattgtcccttaccttcattggccatcccaacacagccacctgcatcctttggaatat

SEQ ID NO: 1561564 - DNA, 4001 bp, Homo sapiens
tctttatgatgccaaacaagccacagtccccaagcaagaaccctgctctcagttttccagccccaccttcctcttttttttaacatcattgtcaccatgacctgaagtttcacctcctaaatctcacacacagctacactcccgtccacacaccagatgtcacattttggatgtttctaactgttgaaataaacaaagaccaatgaaatgagaaaagccaaggctacttactcaaagctcactatagcaagagagactcaatgcaagccgggagtgggagagttttatagcaaaagaaaaggaaggcttcaggcgtgccctggttggaggctcctgttcgtaggtgggtgaactagaagtgggcatcctatgtgattggttagggtgcgtatctgcctttctctggttgttcttaaatcagaagcaggagcaaaaatgaggaaagctgtctgttattaatcaaaccctggccatttgggactgctcattacagaagttattgtttttacttcctggattgtcagtccagatagcaatctggcttcctgtgggtctgacagacagcaggctggcttcctgctgtatgggttgtttattgtagataagggggttggtttcctgggcaggttctggggcagagttctatttgtatacatgatctggccattgttcgaatgaatatccagtctctcattaccttaacaactccctcagaacacccgaactgtgtgttcagcggcccactcttcaactccatttgggggtctctgggacatcacaggctcaacttggccaaaacctaacttctactgcttccatggaaaattcctcctaaaaccaacttctcagttcataaagctggattcatcaaaccaaaaaccatggattcttccctcctctttctcaccctccacatcggaaaatttggtcagcttgacttaaaagacatcaagttcccaatcacttcctctacctccagtcctcactctggtccggccagccgcagcactggcctgggctattccattaggctactccttggcatccctgcttgcggctcactccatattcagttctccactgtgcatccacagggagcctgttaagacctgagtcacagcatcttcctcctctgccctaaaccttccatggctcccaacaccctcagaacagaggcccagctctgccgttctgagctgtcttcagcccacctgctctctggttccagcagacataatattaataacactgacctgggtggggttccttgaacactcccaactcagtctccacaccgtgccccaccccacccccaagcttttgcgcacgctggttcctgtgcctacaaagccctttctccctccatcccattacatttcagcaacggaagccactttatataaaccctgccctgattcaggatcctagctgggagcaactcccttccagggtcccctgactcaaaagcaaggaaatgggaaaggcgaaaagtcctagaacaaagccatcttttgcgtctcaacaccgagaacagaagcgtggggggccgacagcgaagggcctaacgtccaagcactcacctgcgcggggtcccgcagcgccgccgctgccatcggagtctgtggtcagagcagggccccacggtgcgggaaaccacggggcgggggtagggggtctcgcaggctgaggctaccacccacctggccgtgccccagacgaggtgtgaccccgggctgagggtcgcactcctagcctcagtctcccccgtgcaaaatgcgcaaggggcccggggcgcaggctccgggggcgccgagagcgcgcagctccgctgggtacccccgttgcaaggggtcacggctggtgcaaaggcgcggagggggtcccggcctcactgtccccctcgcggtccgggaaagccggcggggcagcttcacgggcgtagccccagccgccccgcccccaactcggggtccccagctcctggggactcagcctccccgccgggaaatgacctgcgaggctgcagtgcaggaagttccggcccccaccgtggcggccgggagagttgccctctcccgtactgtcattggcctggcgccagccgctggtgcacaggcagggcctggggatcgcgagtttctgcccagcctctcgtcaggctgagggtccagggcgggaaggagagcggatctcgtcgggtctccaccgccgccgcctgcagccctcgggccttccccttaaaggggccgctcccgagcctgcagccgcccgcgctaaaccccgcccaccctccgaggtccaggaggagagccccagtgctcttcctgcgcgtgtgggcatcggccagccgcttcacccctaagggacctaaattcacactggaaaatggggatagtacccaatgggcggggtctttgcgttgtaatattaaatgtcgctctgattcagggcttctcaaaccagcaacatcagcatcacctggggactggctgaaaatgcaggttctggggcaacaacttaaatctaaggactcagaaattctggggatgggattcagccttctctactttttgcggggggggcgggggggatgggtctcgttctgttgtccaggctggagtgcagtggcctgatcatagctcactgcagcctccatctcgggctcaagctatcctcctgcctcagcctaccaggtagatgggatacaggcgtgcaccatcatacacagctaattttaaaattttttgtagagactggatctccctgtgatgcctaggctggtctcaaactcctgagctcaagtgatcctctcacctcggcctcccaaagtgttgggaattgcaggagtgagccatggtgccaggcctccttctctgttttaacaagccctctggggactccaatgctggctccaactttacagcagggactctcattgaaatccagtaaataaaatgggaaaaataacactacattgttgcaggaagtcagggaccccgaacggagggacctgctgaagccgtgacagaagaacattaattgtgaagatttcatggacatttattagttccccaaattaatacttttataatttcttatgcctgtctttactgcaatctctgaacataaattgtgaagatttcatggacatgtatcgcttccccaatcaatactcttgtgatttcctatgcctgactttactttaatctcttaatcctgtcatcttcgtaagctgaggatgtatgtcatctcaggaccctgtgatgattgcgttaactgcacagattgtttgtagggcatgtgtgtttgaacaatatgaaatctgggcaccttaagaacaggataacagcgattttcagggaacaagggagataaccttaaagtctggctgcctgtgggacgggcaggacagagccatatttctcctattaccaaaaacgggtaagagaaatatcgctgaattctttccccagtaaggaatattaataattaacagccctgggaaaataatgcattcccagggcagtgcctctaaaatggctgccctgggagtgtctgccttatgcacatgtagatagggatgaaacacaccctagtctcctgcagcgcccccaggcttgctaggattaggaaattccagcctggcgaactctagtcagaccagttctctgctcttgaaccctgttaagatgtttataaatgacaatgcgtgcacagcaggacatggaagctcatgagtgattctagttttgccctgaccttgtgatctcgccctgaccttctgccttgtgatcttttgttgcccttaaagcatgtgatctctgtgacccacaccctattcgtacactccctcccctttgaaaattgccaataaaaacttgctggttttatggctcgggggcatcacggaacctgctgacatgtgatgtctcccccagacacccagctttaaaatttatctcttttgtactctttccctttatttctcagaccagccgaca

SEQ ID NO: 1561565 - DNA, 4001 bp, Homo sapiens
actttataaggaattgattagtggaggttaaaaatggctatgcctaaaatatataggacaaggcaaaaagtttctcagaatacaataaattccaaatctagtttctcttcctttgataatttaagttgagcctagataaaagtattttctaaacactctgtttgctctttcagccaaatcttttacattatcattttattttattttgtttatttatatttatttatttatcttgagacagagtctcattctgtcacccgggctggagtgcagtggtacaatctcgtttcactgcaatctccacctcttgggttcaaacgattctcctgcctcagcctccagagtagctgggacctcaggcgcccgccaccacgcccggctaatttttgtgtttttagtagaggcagggtttcaccatgttgaccaggctagtaattcctgacttcaaatgatccacccacctcagcctcccaaagtgctgggattacaggcatgaaccactgcacacagcctacattatcattttagatacttactcagtaaatttgttttctaaccacgggcaaggtcacatccatccccgctgtcacagagtcagaatggatttccagaaaccagcctcactcttgggatgctggcacagatgcgtatgtcattacctttgccagaaagagccttaaaggaaacattaggaaaaaatatgcattagatccctaacaagaatagaagccacgtctttagtaacatgttactttagataagtttagcacgcgatcctttcaaattattttcattattgtagagaacaataaaaagggtgtgggttcaaaaaagagttttcagatgggccttggtggagaggaactggctgctattcagctagggagtgtcacctgagtgaaatgtgttcccgctatgcaggcttgcagcctcaaatctgtgattttcccatccccaatctccacatttcaggaccctcaacaccaacccctataagtctcctaatcagacacgcatagtgcccccaatcactggcctccaatctccaaccctcagaggttttcatagtcactgatattcccctatgttcaaatctgaccaggagagactacaggtcagtaactacaaagaacaccgatccgatctgattgccagtgaaattacacagcccccaatcatgaatccacactgattgccaatgatatcccaacgactgaggatcaattgttgattctcacagtcccactcccacccacaagtgacagtccgaatcactgagcctcattgaggcgtacctttaagataagcacacttgactctattctccattccctgatctacaaaagtccaatcgttaatactctccgatcctccaccgatgatatgaagtaagtctcaatcaccgatggcccaaaacatttctccaaacattcatcaccactgacctccctcatttgaaccccaaagtttccacaatcaccaattccagtacccaaactattactgcccacagaacttagaacctccgatcactgatcctctcgggctccgatcattaaccttaaagatctctaaaccagtgtctgaaaaatcccaactgaccccagacccatgaagaccactattactgaccccatgcaccctgaaaatcaagacatttcacagaactcgcatttattgattcccacacactcccaatccatcttcttcagagaccgtgccactgactcccgcaaacctctgtccgccaccactgaggccccgcgaggctcagacgccgaatctcttaacccttcagttcccttgtcattgaccctcacgggcacccatagctgacccagtcggccaccgtagtcggcagctcactatcctccactagtcccaggtttgaccgtttctcaaaccgtgccttcccatttatgctgcatccgcgccctgaatctgaaattggtcgtcctgccacgccgcctcaccgcggtataaggtcgtcccatcctgaatggccggtgcgcagactcaattgcgactttgaggctgtcagccgccacccggcaaccttccagtgaacaggattctgggtttctcaaagctgtaattggaggtatgatggcgacgcccacttgactcctacctggggcggccatgtttaaaactgtgccgtaaaacggatgattaagccctttgctagaccaaaagataaggctattttaggacaaggagaaggaagtgtccctggatccctaaacagagatgtcgtctctgctcttaactcagcatctcagatgccaaaacctcctgtggccaacatggtggcgcccagacatcaaagctgagctttctttgtctccggcagcctggtaagatggccgcgtacatttttaccgcttcttacgtgcaatgggtgcagcctctcctaggagctcccctatggcaatgtgaaactctttctgagccagctctaggagttagagagcagcgaagagactcgctcttagggagacagagacagcctaaggacgggcgtgacttcacggaaagggcggagccgcaaggaaagggcggggctgccgcagcgggaagagatcagagttcttagcgcataatggaaaggaaatgttgaaagcaaggtttttacctaaggaggcttgcccgagaagccgacctgaggaaagaatgagtgcaagcagtttatttggtaggtgggggatggagaagtgagacgggagcgatgggaacgaatatacagtgcataggtgagcagattagctctggatcaatgagggctcagtcagcttgggacctctgggggattgtgtagaaaccacttccaagttttcacaaccaccaggccgatgaagcttacatatgtctacaccatctctcttcctaattgttttagggccactccagaggtgttaaagctccagcacttcgagcctgcctcgtgggaaagtcttaggctgagtctgtaggtgtctgcagttaagaagccagcggtctgcatatgattgctcaggggtggtggctgggtccaacagcattcactacaggcctgccttgaataccacctagcgcagtgctccgcatatcacaggtattggaacatctctagaaaagattgccttgtcttatgaaaatggctttttaaaaaaatcctaattccaactggtcatcctagcaactgatacaataactgacctcaaaatgtttcccaatgattcctacctcctactattcacactcttatgtagttccctcccacattgtaccagggttggactgtgagactaatagaatgcagtagcagtgatagatgtcactgctgagattaaatataataaatggcaccttgagttctgtcttaaaggctgctgcccccactttgagagaagttagttgccatgtcatgaggataccgagacagcctatggagaggcccaggtagcaaggaactaagccctccacccaatagcctgggagtagctggggccttcctataaccaagtgtatcacccttggaagcacatctcccagccccagtcaaaccttgagatgacagcagcccctgccaatagtttgactgcaactgcgtgagagacacagtcacaagcactcagctatagcagctcctatattcctcaccctcagaaagtgtgtaagatactacatgtttgttgttttaagcttctgagtttagggtaatttgctatgcatcagtagataacttcaatgctgtgttaaaatgctacaattgacatttcttctttttttttttttttgagacggagtttcgctcttgttgcctaggctggagtgcattggtgcaatttcagctcaccgcaacctctgcctcccgggttcaagcgattctcctgcctcagcctcctgagtagctgggattacaggcatgcaccaccacgccaggctaattttgtatttttagtagagacggggtttctccatgttggtcaggctggtctcgaactcccgacctcaggtga

SEQ ID NO: 1561566 - DNA, 4001 bp, Homo sapiens
ttcaggatcttgcactacctcaacgggcaggttctccagtccttagatataactttctaccttttaagtctgagagagtccagaaggcaaaaatcatttctgtttttttttcctatggaatatgaccatgaaattggctgttcagtcatgtgtctccaaggaatggaaactagggttgggaagaaaaggtgagtgtcccaggagttagctttttacaggaattatataccagaagattcctcccatcccagtggatccagttgctccccagggggccacaccccccatctcaggctgtcccctgggaggagtgacccaggggatgatattcactagaccctccaagagacttggcagctgtggacacccttttttttttttttttttgagacagggtcggcctctgttgcctaggctgggatgcagaggcacgatcatagctcactgcaacttcaaactcctgggctccagccatcatcccacctcagcctcaggagtagctgcgactacaggtgccagctaccaagcccagctaattttattattatcatttatactagagacaaggtcttgccatgttgcccaggctggtctggaactactaagattaagcaatacctctgccttagcctcccaaggtgctggaattacaggaatgacccaccgtgttcaggaacccaaaataattctttcaagaaaaagccatacattgctagctgaaaacaagatgacaaactagtgaaatatcgcctgggggccaaacagttcataccgttgctgtgaattaaggacagaaggttagcctggggaagtctctggaaaccaagagatttgctgccagccctaggaggagtcaggatgagagaacacagtggtggatttgagaccctgctaaccacatctttggaagactcagaggggaaacggtcgcccttggaaagaaagaagggactgaggaccacggagaccacagctcctcccacacacaaaccccacacacgagtctggattccacctggtgactcgtcgtcaccgtgcagcctcctcaccgggttcacaggaactgcgagccaggctggaggcgagattgcagttagatattaaccaggtgccctcagccccgctgcctcaaggggccgcctccctgagagtcaggtcacagcagacgctgaccgccggcttccccattgtgcctggggataagatctctgagaactgctcaagagtcgccggagttctcagatcctgaatcccagcaaaggctggcgccaatcaggttgaagtcccaacgagggagcccattcagcagaatgcggtttcttcacctcctgtcccaggattcacccctcacttccccaccaaccaacgaccctacacccagccgcccccgtccagaccccaaatccctcagggaggcggatctggggtgtcctcccctctctggctattaaactgtttctgctgcagccctcagcgtctcggtgcagtgagtcgggccgcgaacctgtgttgcttacagccgcacaatctcgggagacgcgaggctgcgggcgcggagctgcccagagagggcgccggggccgcagtcgccgcgcaggaacgggacaggacgcccggggtcccggctgcatgcccagccccaccctgcggccgagggccgacctacgccaggggaacccgggtccgtagatcccggagtagcccttggggaggcccgggtccagccacagccgattactgcaggttccacccagcccctcccccgcctcgggacgccggcccagcacacgcaccatttcccgacttccgcggtgtcccaggtcctccggacggctcccgctgccaatgcgggttcccgcgggacacaggctgccacggaacttccaggtcgtctcttagctacagagccgagcaccgagcgcccagcgcaggtgggtggagaagacgccgcgggctttttcaaccacacactcctctgggaagcgcgcctgattgacagttcccacgaacccgccccacggcccttactggatacggcgtcaggtgccgcccctcgtggactgattgacagaagaagcgatcttgcacagctgagtggagccagatgagcaagttcctgacacagcccttggcagggcgggcttcctccctgctctttgatctgaatcctcccgagggatatttgcacttaagcggaatttcctgcctgtactcaataggacctcctgcttcttcctcctgtacactgactgacaaaacaattatacttttttttttttttttttttttttttccgagagagagagagagagagagagagagagagggagtcttgctccgtggctcaggctagagtgcaatggtgcgaggctcactgcgacctccgcctcctaggtgggttcaaacaattctgcctcagcctcccgagtagctgggattacaggtgcgcgccaccacacccggctaatttttgtatgttttagtagaggccgggtttcaccatgttggccaggctggtctcgaactcctgacctcgtgatccgcccaccttggcctcccaaagttctgggattagagacgtgagccatcgcgcctggctccaattatactctttttcaatgaaatttttcaaaatatttcaatgtacaattaaattattttttactatagtcactctgttgtgctagcaaatactaggtcttattcattctttgtaactattttttatacctattaaccatccccacttcccccataactactcctcgctactacttttcccagcctgtggtaaccatccttctacacgtttttggttgtttgagatggggtcttgctctgttgcctaggctggagtgcagtggggccatcatggctcactgcaacctctacctcccaagctcaagcaatcctcccacctcagcctctcaagtagcttcagattgttcactgttggcatataaaaatgttactgatttttgtatgttaatattgtatcctgcaactttactgaatttatttctcagttctaatacttttttggtggagtctttaggtatttccagatataagatcatattatatgcaaaccaggataatttgacttcttcctttccttcccaatatagatgccctttatttctttttttttttttttttggacttattgctctagctgggacttcgagtactgtgctgaacaacagtggtaaaagtgggcattcttattgtgttccagatcttacaggaaaggctttcagtttttcctcattcattatcatgctagctgtgggtctgccatatatggcttttattatgttaaggtagctgcttctatacccagtttttttttagggtttttatcatgaagggatgttaaatattatcaaaagctttttcagtgcacattgaaatgattatatggtgtttgccctttattctgttgaaatgatacatcacattgattgatttgcatatattgaaccatccttgcatcccagggataaagcccacttggtcatgatgaatgatctttttggtgtattgttaaattcagtttgctagtattgagttgaggatttttgcatcaatattcatcagtgacactggcctatagttttctttttctgacatgtctttgtctggttttggtgtcaaagtaatattggctttgtaaaataagtttggaagtattgccttctcctctgttttggaatagtttgagtaggattggtattagttcttttttaaatgttagtagaattcagcagtgaagccactgggttctggggttttctttgctagcagactttttattatggctttgatctcattatttgttattggtctgttcaggttttttatttcttcatggttcaatgttgctatgttctatctgcctaggaatttatcaatttcttctaggttttccaatttattggcatatagttgttcttagttgcattaatgatcctttgaatttctgcagtatcaactgtaat

SEQ ID NO: 1561567 - DNA, 4001 bp, Homo sapiens
atcacaagtgtctttataagaggtagacaaagggagctatgactatagaagacataaggcaatatgatcactgaagcaacatgctacaatgcaggctttgaagacaggcaaagggccatgaggcaaggaatagaaggtctgtacctctcacagctggaaaagacgaggaaacattctaccctagaaccttggtagggagggtagctctgctcataccttgattccagaccagaaaaccgatttcagacttctgacctccagaacctaagaacaaatgttttaagccacaaaatttgtagtgaattgttacagcagacacagataaccagataaaacactggaccttgaagctctccattctggtccttgtctcctgtgatggacagtctccaagatgctcccccaccacctctgccaatgacctccagccctggtgtggtcccctccaacactcaacaaggttgactttgtaaccagtaagacaccgtggaagtgacaagagtgtgaattctgaatccaggtcatggaaggtgttacagtttctaccttgccctctcctggatcacttgttctgtgggaagccagatgccatgttgcaaggatccctagcagttccaaagagaggcctacatggagaacaactgaggtctcctatcaacagacatgtgagtgagccatcctggaggtggatcctccagactcaggtctcaggtgacaacagctatgctgacatcttcactgtaacttcatgggcctgaaccagaaccaccagctaggacattccattactcctgtcagaactcgtgagatatttattgttgttccaggtcacgaagttttgagttacacagcaacaggtaactaatacactttctctcaagcctttcttacgactcattccttgtcccccatccacagcaagaacaaaataaaacgtggtagcatttcatgcaaatttggagcaacacacatctgaaaacctgcaacctaagattatcaagtctcactttgtgtaccaaatctgaaataatgcaaatccccatgaacaaaccaacgacaaaaaataaaaaaaagtataatttcaaagttgcagagcttgaggaaggataattattgttgtttcctgccacgcgaggcagctttatggagaacacaggccgcaaccactttgtctagaaagtggagctctgatggccagatggccctgcaaacactgaccgccctgcactgcagttctcccacagtctcgcaggggacgaccctggtggtcactctcatcacactcagtgcgtggtgacccatcattgcccccaagaggttgtgcccaagccccagggcaggggctccgcggtgctggggtcccggtgggtgtccgctgactccacgcgttaaagcatctctattcgatgattcttgccatctgggcacccggccaacgctacaattactgttatcagtcaacacgaggacagaccttcctggaatgggcaagggtgtcggcggggcggagcagaacgcaggagatgggcctgctcgattctctcgggaatgaccgaccccagccctggggaggacagagccgcgtggagcatgcgcattcgggggccaggcgcctggttggaatcccggccccctctctgaccagccaggacggtcaccacgccccgacccgcgtctgagtttccccacgtgtcaagggcattaacagcggtgccgctctcatcgcgccgcgaggtgaaagggtcagtctgcgcgggagacgcttgcccggagcccgccgccgtcgttattgttgttattgttacctgaagccgggccgccggcggccccacagacatcactcccgctaccccttcgtcctcggggtccatgctggatcgcccagtgaaggacagcgcctgaggtgatccccagaccagagaggcactccagccaaagggaccacccgactcgccgaacgccggacaatggcggccgcaccggcgacgcggcgactacaactcccagtaggccgtgcggcgaaccacagccctcggccaatgggagtctccgctggtctggccttcgaccaatggaagcattatggccgatggccaatgggagcccccacccgctggcctctggccaatgggagcactcagctaaggctggtgggggcggtgttgctcggggctgcgatgccccttaggttgcgggcaaccagaggcctcactcgtgggcaggaagcaagggcggaccccgagagatgactgattgtgggggtggggaccgtctgctcctcctaatggctggggaccgtgcacgtctgcgcgggccggacctgctcttctcgggaacttgcgcgggaggaggcccggagctgcgccgctttaccctctgctccccggtgcctaaaacgcacacgcatcaaagtcacaggacgagttagaggtttgttcatataaaagactttgggcttagcggctggaagcggggaggctgggagcggtggttgtgttacaggaaaggggtccgattcagaccccaagggagggttcttggatctcgcgcaagaaaaaattcagggcgagtccgcagtgcaaagtaaaagcaagtttgttgagaaagtaaagttgtgaaacagctaccccatagacagtaggacgttcctgaaagtaagaggaacgtatgcaccctaggtacaatgcttgtgtatatttgggctaaaaatagattttggggagatgtgctctgctacaagggtttgtgaaaaaggattaattttcttactgtatttttcaagaatcgatattatttttaaagcaaaattaggaatgcctttgttctctagataccgggatatctggacactcccaagtctgggtctgttttagtacccattattaatttgttcccttaaccgtaaacatctagaggttaggaatacctacttttctgggaatgcagcccagcctcattttcctagccctcactcaaaatggagtcgctctgggtcgaatgcctctgacagccctattgcttctccctgtgggtgttcactttgtgatgtgtctttttctgtgggtctgttgtagtccattaaaatgtttattaaaggtcgggcgcggtggctaacgcctataatcccagcactttgggaagtcgaggcgggtggatcacgatgtcaggagctcgagaccaacctggccaatatggtgaaaccccgtctctactaaaaatacaaaaattagcccggcgtggtggcgggcacctgtagtcccagcttctcgggaggctgaggcaggagaatcgcttgaacctgggaggcggaggttgccgtgagccgaggtcaggccactgcactccagcctgggtgacagagcaagactccgtctcaaaaaaaaaataaaaagttattaaaaaagaaaaatggggaagcagatttccattcaaaaatgttgcattcaaaccacaacaatttttaacttttttaaattttaccaagagccagacacatagcagggaacagtatagttacttgttatttgctcacccccatggggctgatggtgtagtctgagggactgaagatcaaccatgacatggcccttcacaccgtgttgaaggggtgaagacgttaccagtggggacggaggagctgactcccgaggggctcaagctggccacactctctcagatccttctggccgactcctgagggctcaagctggccacactctctcagatccttctggccctgtaccgtctctgctttttgctgggcctcgttcctgagaaggagcaggtgttaggcaagttacacaaaattatgagaggacatggttttggactgagctcctgctctaggcctcatgagaccagaccaaaccaagacagagtcacttaggctaaatgccacataatcagactgatactttaagcaggtagatccctaaacaaaccagatttccagtctacctgagcagcataataaggaagtcccctctgctttaatccttaca

SEQ ID NO: 1561568 - DNA, 4001 bp, Homo sapiens
gtgcctggaccagctcatcctctcccctggaccccagggagattgcataatgaaccattagccttttccttccctgagtcctgccagcaggtatccctaaggccagtgtgcttcaggaccagaaaactcaagtggctgaagataatgcaggctgtggtcatgagaacccaggcttatgactggccaaaatgccctataggctgaaggcaggacgaacatccaacaaaagaccacaggattttgcccttccaggccatgtctcagcaggtggggatggggggaaccatggtaacctcataagtcctcttggacctccttaaacaaccaacacactttgcctttgtctacacagtcctctctagtggaatgtctgcctttcgcttccaatggccactgtgacttgctggaaagactgcaaagttcacctcagggcttctcagccaactgtctgtaaaaacaaaggctctggtggtccacacgctaaatatgagtttgttacttaagtgctatgtgactttcagcaggtaactaaacaggtcggagtcttgacctcctcttgtgtacagcagtgtttataatagaatgtcactttaaggagatcaggattaaatgagatgataaataatgcccatttctcagttcacatcaaggactcaatgaaggccaaccgttacagttcttgtgttattatttatgctctttgtccccacaaaatcctttaagacctcaactcagtaggtgtctaaaactttgccagattctctatacaaaaacgctagaccaagggcaggtgagaaggggactactttagtctgaactgccatgaaaggccgctttaaagaagtgacatttgagcagagccaacaagatgtgaaagggtcttgcagagatctgaggatagtgtctgaggctgaatgaactgtaaaggtgaaggctgaggggtaggaaagaactctgcgtgatcagattgatatgtctgaagggctgagccagggaggaaaggaaggaaacaaggacagaggtggtcagccatagtggacctgtgtctgaagcgctgagccagggaggaaaggaaggaaacaaggacagaggtggtcagccatagtggaccgggtagggacttgcaggccaaggctgagttcggatgatgtgtgtgacgggagtccctggagtggaacttcatccatccttcaagcaattattaagcagctttcagaggcctgacactttagcagtggaaagctgcagaagggctaactagaagtggggcatcgtatgtgattggttaggctgagcacgtatggctttctctgcttggtcctcttttggaggcggaggcaaaaattagaacagtcagttacaaatcaagtcctatttggggcctactgttccaggagttaccgtttagcctcctgaaatgtcaccagagagtaatctagctccttgcaagactaacttaaggcagactggcttccagagtagtttattgcagaacaggaggctggtttcctgggcaggttgctacaaaaaaattgtacgtcacagccctataatcgatgtatagtctgcctactgtccgcttcaatattcagtctctcaggtactaccacgacaggagataaactaagtgacgagcctgctccacgtttcgtaaacaaacaaaactacaaagaggaatcctgtggctgtcttggcttccggcctgcccaggaggcttccccgaactagcagaaaagcagcaaggccgaaaccttgtccactcacctgcgccgggtccgtcaaagccatcgccataccgggaccctgtggccctagcggggcgggggctgcggcgagcagggcgggtctcgcgggctcagccgagccccaccccttccctgcgccgggcccggtgaccttggctgacagtcaaactctctcgttacggggaggctcacggttcgctccgagacgcggaggtcgctgtcggcctcctacctgctcatttccccagcgccgccagggaggcggccacggaacaccgccccctccctagagccggcgtggacggaaccgtcgctcccaaattacgtcccatccaaatgccggaagtcccgccccaagcttcgcaacccacaggaaacgcccctgtcctggaccatcattggccccagggcccgccgtcgcacctggcaatgccttgtagttaatgtagtttttctctacaaaccacctgcaaaggggacagatcctgagccggcaggcctcggtgtaaaagtcgcagcgggcctacagcccggctcagacctgcctctgtcctgggggcacaactcggaggccagggaccaagcgcgagaccgtccattcttggccggaggaaatcgagccccaggagtcagggacatttgccagggtcagggccagtgcagagaccctggaccaggctccggactctgacttccaccttgcattatttcccctccggatcctcttatacagatcagcgggcagtcagagtaaccaaagggggacgtcgggcggcgcgatgcctcaggcctgggatcccagcgcattgggaggccaaggggggcggatcgcttgagcccaggagctcaagaccagcttgagcaacatagggagactaccaaaaaaaaaaaaaatttttttaaaataagctgagtgtgctggcgcacacctgtggtcccagaagtctgtggcaggaggatcgcttgaggacaggagtttgagaacagtctgggcgacagagcgagacctcattggtaccaaaaaaaaaaaaaaaagaaaaagaaaagaaaaaaaatagagcgcggtggctcacgcctgtaatcccagcactttgggaggccgaggcgggtagatcacgagatcaggagatcgagaccatcctggctaacacgatgaaaccccgtctttactaaaaatgcaaaaaattagccgggcgtggtggctggcgcctgtagtcccagctactcgggaggctgaggcaggagaatgatgtgaacccgggaggcggaacttgcagtgagccgagatcgcgccactgcactccagcctgggcgacagagtgagactccgtctctctctctctctctctctctacttatatatacatatatttatatatacatatatacatatatacgtatatatacatatgtatatatacgtatatatatgcacatatatatttatatatatatttatatatatattttttgagacagggtctcgctctgttgctcaggccatagtgcagtggcgcgatcacagctcactgcagcctcaaactccagggttcaagtgatcctcccacctcagccacccaagtagctgggactgcaggcacgcaccaccacgcccagcaaattgagggtttttttgttttgttttgtagtttttgtagtcagtttcaccatgctgcccaggctggtcttgaactcctgtgctcaagtgatccactcaccttggcctcccaaagtgctgggattacaggcatgagccacagcatccagcctactcaaaaaaaatttttaattagctgagcattgtggcacacccctgtaattccagttactcaggaggctgagatgggaggatctcttgagcccaggaggtcgaggctgcaatgacctgtaattgcaccactgcactccagtctgggcaatagagcaagaccctgtccagctgggacatgttgcaaatgcattgtctctcttgggccttctttggccaagcttggtcttcacatggtccagcaacttttgctttaggtattggctgagagccctggtagagtagatttgacattccttaacgtggggagtcttggactgggtgagctcatgactccaactttaagcatgatcagtttgaaatgtctgtatgaccacagagtgtctgtgtcacagcagttcaatctctgactgaatattgggagagaagttgtgcctggacataaaaatctggaagtttttggcaaacactgttatttcaagttatga

SEQ ID NO: 1561569 - DNA, 4001 bp, Homo sapiens
ccaatcctaggaaaagggaagacagtgattcacaactgaataagtcacttccctctggttgaatagggattccaagtggaacataacctctgatgccaagatttatagaatgtacatgttttatagacaccaattttaaaattctcaatctgtataatttaaacaagtttttagttattagattatatacagggaagtcaacatgtcacaactaatcatatccaatgaactcatccactgatctaaacccagtctctcgccccattttttcttttgagacaagatctcgctctgttgaccaggctgcagtgtagtggcatgatctcagttcactgcagcctggacctcctgagctcaagtcatcctcctacctccacctccagagcagctgggagtacaggtgcacacgattatgccccgttatttccttttttttttttttggcagagataggggtctcactatgttgcccaggctggtctcgaactcctagactcaagcaattctcttgcttcagtctcctaaagtgtggagactacaggcgtgagccactgtgcctagcccccctttcttcattactgcgcttccctccctaattctgtacatatctctcattctcccccttctctctctagctcttgttttcttttctttctccctgggattctgctcttcattttgtacccctcttctcttctgctgtttatcccccttcttccctctattccttctcttccatctcttctgctccatcctcgcaacttatttaacctcttattgctccttctccccaatctttcaatcgtcctcaatctccatctatttctgcctcttcacccatctctgcgcctcctctgctctccctgttaaattctctcttccctgatatactcccctgtccccactctgtgtcaccccagatccccaggtgtcctccctgctgtgtttctccctcggttctccttgacaccagcaccactctgctctgtctgccctggctccaaatccctccctctctccctcactctgatgagcctccctctttgctgccactctccctaccttgccgtccttcatctctgtgtacatctagcttttctctacatttctccagttgcttttctccacctgcttttctaggtattttgttgctttctttttccactttcaccatatcttggcatatccctcaccaatcctctattttgccatctgttatgggcctttcttattctttctctgtctcaggttttctactgctgtctgtctcctgatcccttcggcccacacaatcgcaggagggtttggagtaagacgcctgcatcccggaggagcgcgttttccaagggctggagctcggcaggcaagaagaccccatgtcacaggacagggccctgcgtccttcccagtgtgggttcaatggaagcggtgactgcggaggagagacctggggagccgcaggctctggcacgagtagggaggtgggaggaggggggacggcgccttgggagaaggatggggtctgcaagatcccaggaccaggcagaggacgcggcctccctgggactggggctgcggcgcgacgctccaggggccgacgaggggtggctgggaggtgcgccccgggcaagaatccacctcgtgggtgaagactttaaatagcgcgaggagggaagagtcagaagaaggttttgagcagaaaaactacgcaatagaaagtgtatacattgccctatagcagacagacccgggacgggaccagcctccagacgactttaaacccgaaaggaagcgacacccggcctctcactgggctgtctcaatttgctctgggcgaaggaagacgggcgagaatttccaggtctgtggggaccccacgtcccagggacagaagcggcggggacctgggaagcggagacttaatgcaacacagagcaaaactcaccatggcgacgtgaccttcactccacccgatccgcttccgggtttgcgttaatctccgcgcgcaggacggaagccaggcctgggcgggaggtgggaggaggtgggcggggcctgggcgaggtagcggcggggcgcgaggcgctgagaccttgccctttagaaccggcagagggcggggccggggcggggccggggcgggacttgcgcgtctttcagcctctctcctagcgtctctgtttttaggttgtggaggcgagagcgccagaaagtctgaggcatgattccaaagccctggaattgtctggaaccgggatgcaaactagaatgtgaaatgcaaagccctgcctgggcggcatgtacgatgtcatggtgacggcccacggaacagaatagatgtcctctccctttctatctccattcactagggagggagagtccaccctgagctcagcttcagagacttccttaaagccaccgccaggggtgcgggacggagtgcttaggccaggaaggagtgaggtcaccacctgctgcttaaacacagcagaggcgcgggggcgggagcctcaggtcccagctactcaggaagcaacggagagaattgctgagcctggggtcccaagccagcctgggcgacaaagtaacacccactgcggcaggtctcccttcctagtctctctctctctctttccctttttttttttttggagacagagtctcactccgtcgcccaggctggagtgccgtggagtgatcccagctcactagaacttccgcctcctggtttcaagcgatactccggcctcagcctcccgagtagctgggactacaggcatgcgccaccatgcccagttaattttgtatatttagtagagacagggtttcaccatgttagccaggctgaactcccgacctcaggtgatccgcccacgtcggcctcccaaagtgctgggattacaggcgtgagccaccgcgcccgggccttttccctttttaaaaaaaaaaaaaaaacttttttaaataaaatttttgatggtgtgacatagggatccaacattactcttttccatgtggatatccagttagttgtcccagcacatttgtggaagagatctattactttattattattattattattattactattattgagacacagtatttctgttgcccaggctggagtgcagtggcgagatctcaactcaatgcagcctctgcctcctgggttcaagcgattctcctgcctcagcctcgggagcagctggcattacaggcgcgtgccacgatgcccggttaatttttgtatttttcatagagacggggtatcactacggtgacctggccggtatcgaactcctcactttaagttatttgcctgtgtcagcctcccaaaatgctgggattacatgcgtcagccaacatgcctggcccaagaaatattctttactttgctttttaaatgttgacaaaatataattgaaaactaaaaaatattatcccaaatgagaaatcatctccacgacgataacagagaaagaaataaaaaccattttgttaataaataaaccttaggaccgggcatgggggctcacgcttgtaatcccagcactttgggaggctgaagcaggcggatcacgaggtcaggagatcgaggtcatcctggctaacatggtgaaaccccgtctctactaaaaatacaaaaaaattagccaggtgtggtggcgtgcacctgtgtcccagctgctggggaggctgaggcaggagaatggcgtgaacccaggaggcggagctggcagtgagccaagatagcaccactgcactccagcctgggtgacagagcaagactcggtctcaaaaaaaacaaaaaaaaaaaatcagccgggcgtggtgcccagcgcctgtagtcccagctactcggagaggctgaggcagaagaatggcgtgaacccagaaggcggagcttgcaatgagccgagatcgcaccattgcactctagcctgggcgacagaagagattccgtctctaaataaataaatcaataagccttgaccaga

SEQ ID NO: 1561570 - DNA, 4001 bp, Homo sapiens
tgctcacatatttccctgctgaccttctccccacctgttgccctgctacacttccctcgctaagatagtaaaaataataatcaataaatactgagggaactcagagtctggcgccggtgcatgtcctccttatgctgagcaccaatcccctgggcccactgttctttctctatactttgtctctgtgtgttatttcttttctcagtctctcgtcccacctgatgagaaatacccacgggtgtggaggggctggcccccttcaccactaggtctaattttttgtatttttagtagagacaaggtttcaccaggttgcccaggctggtctcaaacccctgggctcaaacaatcctcctgccttgacctcccaaagtgctgggataataagcatgagccaccgcgcctggctcattacctctatttaatactgaaaaaatcctacattcaaataaccctaataattagtctgatatttgtccttagagcctgatctcctgtggatgctgttaccccctaatatgaccaggaggcagtccagacctgcacagaacacttaagtagtcaccagccacgtgtgttattgctaacttcactatgtacctaagatgactgaagaacagaatttaaaatattcaaaagatggccaggcgcggtggctcacacctgtaatccctgcactttgggaggctgaggcaggcagatcacctgaggtcaggagctcgagaccagccttggcaaacatggcaaaatgccatctctatggcaaaacgccatctctatggcaaaaccctgtttcaccatgttggcgaggctggtctcaaactcctgacctcaggtgatccacctgccttggcctcccaaagtgttgggattacagatgtgagccagggtgtctggcatgcccttcttaagtagaaaggcttgtagctggtaacaactagaaaacaaataacgtccaagaaaataaaaatttaaaaaaacgaaaggcctacagtctacacgtgttcttatttacatacagaaatagacacaccctaaacaactatgttttttccatccaaatgtaatgtgtcaaaaataagcaaaggacaccaaggcaatgccagattctcagatgagacattttttagcaaatatatggaagtcagagccctcttgaaaccaatttaacaccggtgctcaccaagaacactccggaatcgccaggttcctgacgcgggaggatgcggggccagagccaaccttaccagaatggcagaaatccttttcctttcggaaagaaaaaaattcaccaaggttgctttagaagcttttgaagaggggagcacagcggatgaaagcactccagaaaacatcccatggacgcgggataaacacacttcctgacgcggctcctgacgtggaccgactgaacctgcagctgggaactggccacgctgggaggaccaacaacccctggagaagctagtgaaatgagcaggatcagagaggctcctgggcgagcgcacccaatccttcctttggcatcccccgcctgtctccaggacccccaagcaggggcggaactcaccacagccggggtcgactccaccaagataaaggtgaaacagcactgaccgtgggcagccagcgcgggaaaagatagtggcggcgggctgatgtcacttccgctacgagcttcgggaaggacggggcttctgggatccagtttcagccacgtaggaccaggttgttagaaatgcttgttccccggtgcataaagaaatagcacttgaacataaatttaatttcctcagtaagcccattttacttttggcagaacaggtacactagccagcagttttgccactagagtacactaaacaaaggaaacagggtcatttataacctgacgtgtccaccctactgcagcgtccggtttccattggctggaatggaacatcacattctgtatttgacccggttggctaccaagtcagaactttttaaaagaagcaaaggcagaggagaacaaaggaaggaggaaataacttgtggaatgctgagaaagctaaaaacaccttcaaataaggaagaggaacaggctatgacctaatgcttgcttggaccagtataagcatgccagggcaaatatttaggctaaattgtgagagctaagaacataaagtacattgatttctttattacacctcacagatacttaagaatgttagcacaggtctttgaatgcatttcgctcctaagaagagttactatttatttctaattagatggagagtaaagtctctttgaagaggaacctctacttttcagggtcgaacacagaaattctagtttcctcctgggtgggtgcagacagggcctgggttggctcagagagtgggatgcagaaacaggttcagagaaaaggtgaggttacaaccacgcctctggatggaactgtgggtagagggttggggcccgtacttggaggtggcttagaggttggacccggcctagcccctgctacaggtggacagatgggctggaaaggctgggataggggatgggacacaccccagggaatgctcctccaaagcttttccccagtgggcgcagtttcgttcttgttgcccaggccggcacctggctcgaccccgtctctattaaaatatatatatacatatatatacacacatatatatacatatatgtgtatatatacgtatatacgcatatatacacatacgtgtatatatacgtatatacgcatatatacacatacgtgtatatatacgtatatacgtatatatacacatacgtgtatatatacgtatatacgtatatatacacatatatacgtgtatatatacacgtatatacgtgtacgtatatatacacgtatatacgtgtatatatacgtatatatacacgtatatacgtgtatatatacacgtatatatgtatatatacacatatatatacgtgtatatatatgtgtatatatatatagccgggcgtggtggctcatgcctgtaaaaaataaaataaaatatatatatgtgtgtgtgtatctacataaaacttttttgtttgcctctcctcatgttcctagagcctttccatgattcttccacattgacaaagatgccagtgaatggcatggtctatctcttccattcagtcaggctttctgtaggcctttgtttcttcattctttatttcttagaacctgctgattccattgcattttcctttttttttttttttgagacagagtctcactctgtcacttagagaagagagacagaccctctcatattgttttatattgttttatactcagaaaaagaaagaaaagcaaaactaaaggcaggtagcccagcacctaggaaccagatctgaaaccaggcctgggcctgcctgacctaagcctggtaattaaagatccacccctgacctaaccggttatgttatctatagattccacacattgtatggaaaggcattgtaaaacttcccggtctgttctgtttcactctgaccacaggtgcatacaacccctatcacatacctgctccttgctcaatcaatcatgaccctctcacgtggacccccttagagttgtgagcccttaaaagacacaggaattgctcactcagggagcttgactcttgagacaggagtcctgccaatgctcccggttgaataaacctcttccttctttaactcggtgtctgaggagttttgtctgcgccttgtcctgctacatttcttggttccctgactgggaagtgaggtgattggtggatggttgaggcagctccttaggtggcttaagcctgccctgtggaacatccctgagggggaccacgaccagcccgagcaatgcagatcctgagagtactcccaggtaggcatttgccctggtgggacaccttgccagagcagtgtgtggcaggcccccatggaggatcaatgcagtggctgagcacctggaaggaacgggcacctagagtctt

SEQ ID NO: 1561571 - DNA, 4001 bp, Homo sapiens
ccaccagcaccactctgctctgtctgccctggctccaaatccctcctcctctccctcaccctgatgagcctccctctttgctgcccctctccctaccttgctgtccttcatctctctgtacatctagcttttctctgcatgtctccagttgcttttctcctcctgctttcttatatatatttttttcactttcgttgtctcttggcaaatccctcacccattctctactttgccatctgttatgagtctttctcattcttttctttctcaggttttctactgcgtgtgtctcctgatccctttagcccacagaatcacatgacggtttggagtaagatggctacataccaggggagcgcattttcaaggggctggagctgggcagggaagaacaccccatgtcacaggatatggggaaaagaaagagaaatcagactgttactttgtggatgcagaaaaggaagacataagaaacttcattttgatctgtactaagaaaaattgtttctgctttgagatgctgttaatccgtaactttagccccaaccctgtgctcacagaaacatgtgctgtattgaatcaaggtttaatggatttagggctgtgcagggtgtgccttgttaacaatatgtttgcaggcagtatgcttggtaaaagtcatcgccattctccattctcagttaaccagggacacaatgcactgcggaaagccgcagggacctctgccctagaaagcctgggtattgtccaagtttccccccactgagacagcctgagatatggcctcgtgggaaaggaaagaccttacatcccccagccggacacccgtaaagagtctgtgctgaggaggagtagtgaaagaggaaggcctctttgcagttgagataagaggaagacttctgtctcctgctggtccctgggaatggaatgtctaggtgtaaagctgaccatttccattcgttctattctgagataggagaaaaccgccctgtggctggaggcgagatatgctggcagcaatactgctctgtgactctttgctacactgagatgtttgggtgaagagaaacataaatctagcctacgtgcacatctgggcacagtacctttccttgaacttattcatgatatagattcctttgctcacatgttttcttgctgacctctccccacctgttgccctgctacactcccctcactaggacagtaaaaataatgatcaataaatactgagggaactcagaggctggcactggtgccggtcctccgtatgctgagcgccggtcccctgggcccactgtcctttctctatactttgtctttgtgtcttatttcttttctcagtctctcttcccacctgacgagaaatacccacaggtgtggaagggctggcctccttcaacaggacaagccccgggcacctccccaacgtgggctcaggggaagccgtgactgcggaggggagacctaggaagcagcagggcccggcaggaggagggaggtgggggggggggggcgcgagggcgccttaagacaagggtggggtctgcaggatcccgggaccagacagaggacgcggccttcccgggactggggccgcggttctgcgctccaccggccgaagtgggcgagaatccaccccttgggtgaggacttcaaaaagcgcggggtgggaggagtcagagaaaggtttagagcaggaaaaatgcgcgatagaaagtgtatacattgccctatagcagaaagacccgggacgggaccagcctcagggcgaccttaaacacaaaaggaagcgacccccggactctcacggggtcgtctcaatttgctctgggtgaaggaagacggctgagaatttccaggtttgtggggaccccacgccccaggtacagaagcgccagggacctgggaagtgcagacctaatacaacacagagccaaactcacgcgctgccgtgggaccgtcactccacgcgatccgcttccgggttttcgcgaatctgcgcgcaggacagaagccaggcctgggcgggacctgggaggtgggcggggcctgacgaagcaggggcggggcgagaggcggagagactttgccctttggaaggcgcagagggcggggccggggtgggacctgtgagtccgtcaccctcgctccagcgcctgttttagggttttggagtcgagaccggccagtaaggttgaggcactattcaaaagccctggaattgtctggaacggggatgcaaactagaatgtgaaatgcaaagccctgcctgggcggaaggtacgatttcatgctgacggcccacaaaacaaaatagaaatcctccccctttctattctccattcactcaggagggcaagtccaccccgtgctcaacttcagagatttccctaaagccaccgccatggatgcgggacggagtgctcaggccagggaggagtgaggtgaccacctgctggatggggcgccggggtgggagggatgcgcgcgcgggggcaggagcctgaggtcccagctactcaggaagcagcggcgggaggatcgctgagcctgggggtccaggccagcctgagcgacaaagtaacaccccctcccgcagcgcttccttcctcgtctctttttttccttttttttttttaatgttttaaaatacaattttgattgtgtgagatagggatccaacagtattcttttccatctggatattcagttagttgtctcagcacgtttgtggaagagatttattactttatttatttacttatttcttttgagacagagtatttctctgtcgcccaggctagagggcagtaacgggatctcggttcactgcagcctcttccctcttgggttcaagcgattcccctgcctcagcctccggagtacctgccattacattcgcgtgccaccatgcctggctaatttttgtatttttgtagacgggtttcaccatgttggccaggctggtctcaaactcttgacttcaagtgatccgcctgcctcggcctcccaaagtgctggcattacaggcgtgagccactgcacctggcccaacaaatactttttacttcactttccaattgttgagaaaacataattgaaaacaaacaaaaagtcttccccccaatgagaaatcatctccacgacgacaatagagaaagaaattaaaaccatttcattaataaataagccttaggccagattatgatgcgaaatagacaaacagctaagaggttgaaaagagagaaagaaacttcactgttctatacaacccattaagtacatgttttcaagataaacactaatcagtcctcagggaagaggacttgacaacacccttggtcacacatagttcatcctggctctacttggtaatggaggtaaccatctgtgtcagctaagtagcttcatgccgaggaggggaagaaaccctaacccatgtttttttgacaagtgtgagttttacaacatggcgacaggtgccctctgtagtgaggctcctaaaatccgacagaaactgatgtcagcagtaaataataaaatttagaatttatgattaaatatagagtttatctgaacacaaagcatgaggatagccactggcaaacatcaactccaaatgaatgggatcagcgttccatagtagagacgtttaggtttcacacacagggaaagacagaagctttaggacaatcacattttccattcaagaccagtgcataggttgcagcaagttgattggtgacagagtgatacacttcaaggaaggttactttatcactccataaaaagggacaatgatctcaggaggtcttatctctggggttgcttagtctttctaattatttacatgaaaacttttcctgtaaataagaggaagacttgcataggctggagtgcagtggggcgacctcggctcactgcaacctctacctctcagattcaagcagttctcttgcctcagcctcccaagtagctgggattacaggtgcatgcca

SEQ ID NO: 1561572 - DNA, 4001 bp, Homo sapiens
gctactgggaggctgaggcaggagaatcgcttgaacccgggaggcagagattgcagtgagccgagatcacaccattgtactcctgcctgggcaacaagagcgaaactccgtctcaagaaaacaaaacaaaataaaaaataaagactacatctaaccaggtaaggtcacaaacaaggaaactcttccactatcagttctcaccagagtattctgtaactgtaaaagattaggccttcagcagctcaaaactcagcatctgctgcctaaggctctgccacctcaaagactcttccttgtaagactgcaggccaattgcccaccaactggcccagaccaagatgccttttgtcttccttgctccctctaaactggttccataacgtttgctcctatatctttttcctcttgatgctaagcattattttgttccttgtgttgtaatgcccaaccttgttttcactaatcctgtttttagactctcccttttgctctcttaatcacctagcctcgtttccacatgaatagactctcgcttagctgagaaagccagacgagctccacctggcccccttgatttacaagacattaaggactccttacccacccccctttcctcaaggagttaacttgtgtaagcagattctcaacatatcaaaggagtccaattaactgataagggactgggaacaaaccatgtatgaagttcccaggattttgctcaaaagataacaccataaagccttgagtttgtgtctggcgtagtgcccatatctaactcttatgaaggatttagagcgccacacctggtaccttgcctttttgtaaccatttgtcttttaaattgtttgtttctctgtaaccatttatccttttaattttttgcatgtttttacttctgaagagttgttgcatttaagctcccctccccttcctaaaccaaagtataaaagttaatcaagccccttcctcggggccgagagaattttgagcgttagccgtctctttggccgccagctgaataaaggactcttaattcgtctcaaagtgtggcgtttttctaactcgcccgggtacaacagtgttatgtttaacctttaacatttacatgttaagtatactattgtgtattgtttgctatattgactgacttggggagtgtcttcagcctctgtgcccatggccaactaccaagtgaactggaatcacaagagaattgcctccttcgaactccatttagctcatggcttttgttgactcaaatatcacctgacactgtgcaaagacacaaacatgcatggacctgattatctctacccttacaatgctcatgacatccctcctttcttcgaaaatctccatgccttctagggtcctcacgtgagttcatagcccccagcctgcttgctcttccaggaggagctccgcctcataatttgctcccaacaggcacctgtggaccccagattccatccttctggctcagttcacttccaggcctttgcccgcgccagtccctgtacctgccggtctccccaccgcatcccacgggtgtcagaaatggggcccctcccgcaagcgcctcagtgtcccaacgccggcgtccgggctgcagagccgtgaacaggcgctgctacctcgctgcttttgggtgacgatgaggtgacctgaggacacagaaggccccacaattacctgagcggagagcctcagcgtagccgcggcagccatcgaaccacgtggttttaagcagagtcgggaggatagggcgaccagccaggagatatgggcacgacggtccgtatcctggcccaggagtgggtcacgctgggcgccgtcacagagctccagagtagcctctgtgcagcggaggacaactgctccccgacttctgggttcagtcaccacagtgcggacctagcgctcaggagcctctcctacaaataaatccaacaccaatcaaaatggccgccaccagagggcgccggaagtccggacccattgtcacgtgcacacaggaaacgcctttattctgagccctcagaggtcttctacgctatcattcgaggctgagttttctgggtaatgtagttccctaggcaacaaggagggtaaagggcgcaattcccagaggcgcttctgcaggaaaagcccagcttcacctcgggagtatccttaagatgtgcgtcctgactggtatggtggctcccgcctgtaattccaccagtttgggaggccaagtcacaaggatcatttgaggtcaggagttagaaattagcctgagcaacaaagcaaaatcctgtctctacaaaaaataaaaaatattagcggagtgtggtcgggcgggcctgtggtcccagctgccctaaggttggggttagggttagggagcctgaggagggagaatcgcttgagctcaggagttcgaagctgctgtaagccgagatcgtaccactgcattccagcctgggcaacagaacgagacctcttatctaaaaaataaaaataagggccaggtgcgggcggctcacgcccgtaatcccagcactttgggaggccgaggcaggtggaacacctgaggtcaggagttcaagactggcctggccaacatggtgaaaccccgcctctactaaaaatacaaaaattaacccacatggtgacatgcgcctgtaatcccagctactggggaggccgaggcaggagaatctcttgtacatgggagtcagaggttgcggtgagtgagatcctgccactgcactccagcctgggtgacacagcaagactccatgttggaaaaaaaaataaaaataaaaataaaaaaataaataaaagattgcagatctttctcctaggcagaggatcatcctgcctctccttagaactcacattgagatttcttggggttattggctgtaactgattaccctagtgtatggaaaaatattatttcagagttagtgtagatgttcccaaaggctacagatccaaattcacctatcatttcagatggtccttcagatgcaaaattcttccactggaagcaaagattaatgcaaagattaataaccattattgtattgttaaaatgaacgtgtaaacacccagagggttcatttttcctactgcccagataaagccaatttatcaggacagggaaattgcaaaagaaaaagagttttattcacacagagttggatgaacagcatactggagtcttactagtattactcaaatcagtctccctgaaaattgcgagactggggttttttgttgttgttgttgtttatttgtttgtttgttttctgagacagaattttgctcctgttgcccaggctgaagtgcaatgtcacgatctcagctcactgcaacctccgcctcctgagactggggttttttaaggataatttggtagatagggggccatgaattggggaatgctgattggttgggttggagatgaaatcatagggagtcaaagttgttctcttgtgctgagtgggttctgggggagagggaggcacaagaccagataagccagtttacccatctgagtggtgccatcagatccatcaagttcagggtctgaaaaatatctccagcaccaatcttagcttttgcaatggtgataccatccctaggaacaactggggatgtttacagtcttgtggcccctggctgcatgactcctaaatgataatttctaatctatggggccctaataaatcagtaagttaacaggaattgggaaggagccaagctggcagaacaagaacctaaccccatctgcaacctctttgtgggaagaaaccacagctgtcagaagtgtttaacagagcaactccgtcttgaataggggttggataaaatgaggctgagctgcattcccagacagtgaagacattctaagtcacaggatgagataggaggtcagcacaagatacaggccataaagacgttgctgataaaacagtttgcagtaaagaagccggctaaaacccaccaaa

SEQ ID NO: 1561573 - DNA, 4001 bp, Homo sapiens
cctacgcacagtggaagcatgaggaagctcatcgtgggactcattcttcttaaattttagacttgtacagtaaaggcttcaactgaccttcctcaaactaaggactgttcccagtgtattcatcaggtcactgagataggacagcaaattaaaacaatctttctgttctatagttattatgaatgtacaggcacgttaaaaggatcttatttgtataattccactcaatacaaggtacgtagcccaggaaatgacaaacctactatgggttataacccatctaagcctcctgcaaccaccgtttttcaaataagattaagaactggtcctttcctaggtgacacaagtaaaataataactagaacagaagaaaaaagaatccccaaacaagaaactttaaatttgatgcttgtgcagccattaatagtaacaagctcagattaagatgtggctctcttaactaagaaaggagctgcacagtagaaaataaatgtttgtcatgaggcagaggtctgtgaaaatttgcctgttgcccatgtgttatttaggctacttagaaaaatgacaaaaaagacccggttcactttcaaaaaaaagaagccaacccctcctgtgctagcagtcactgtaacccactagaactaataatcactaattccctagacccccgttagagaaaaagagaaggtgtaatcctgacggtcaataggacaagggtaaccccccaagttgccattttagtccgaggggaggtccccaggccctttcccaaaccagtgtttcaagccttttataatgagctaaatctgccagcaccagagcttccaaaaaagacaaggaacttgtttctccagttaacggaaaatgtagctcattccctcaatgttgcttcttgttatgtacgcggaggaactactgttggagaccgatggcctcaggaagcccgagagttggtgcccactgatccagttcctcacacaattccagctcagaaggcccaaactagcaacttctaggtcctaaaaacctcagttattagacaatactatgtagctaaggaaagaaaaaacttcagcaaccccgtaagaaagctcaattgtctaggacagaagttgtatacaacagcacaacaaggacagtcacttggtgaggcttaaaccacactgaaaagaactcattacgtaaattttctaaattacagactgcctaggctcatccagaatttcattgagactggacggcccccgctggactatactagtccaggcacagagactatactatactatactagtccaggcacaggctatactagtctgtaggcacagagacccatctccaacaacaaagaagaaaagtgaaaatctgggtcctggctctgggaatctaaggccaattaatgtgaactttgcaaaactagaccaaaaggaataaccccatctccccacccgtagtaacaaaggatcaaagggtactctccctgtagccctcccacttccaccacgtctcagatggaaagggaaagagcccaggagtggccacaaagcaccggccaccctggggctgcggggctgcaacgctgcgctccaggggccgactagagcgaggctgggaagcgctcttgcccagggcaagaatccagctccgggtgaggacttgaaacagcgcgaggcgggaggacgcgtcagaaagggttttgctaaggaaagtttcgcgacaggaggtgtctgcacggccccactgcagaaagaccggggacgggaccagcctcagggcaactttaaactcaaaaggaagcgactcacggactctcacccggacgtttcaatttgctctgggttgagaaaagaggggccggaacctgcaggtctgtggggaccccacgtcccctatatagcagcaccagacaactaggaaacgcacacgccgccgtgcaactttcagtccacgccatccgcttccgggtctgtgccaatcggcgcaggacagaagcgggacctgggccagatccccgagaggtgggcggggcctgggcgaggccggggcggggtgcaaaggacaaggggcccggcgcggaagagaagagtcttgggctgggaggagtccgcgggggcgggaaaggggcggggcctgagcttttctccatctcgctctccgcgcctctgttttcaaggttttagaggtgaaacccgccagtgaggctggagcagctcagcagtcagggaaatagtacctccctgagaagtcgccgtgtggcggtaattggatccgggaaagttccttgctattgaaatttattttagcaatttaattccaaagcctggaagttgtctacggcaggaatgcaaactagaatgcgaaatgcaaagccttgcctgagcgaaaggtacaatttcatgctgacggtccacagaacagaatagaaatcctctccctttcaattctccattcactggagtgggagagtccacactgtgctcagctcctgagacttccctagggccaccgtctggggtgcggagcagaggagtgtgcttaaacacagcagggatgcgggcggggtggcaggagtctggggtccccgctactcaggaagcaggggcgagaggatcgctgagcctggagttccaggccagcctgggcgacaaagtaagaccctctatcccagagctccctcctccgtctcaataaacaaaaaagtgatttaaaaaaagcactgacattgtaacagtgcatataagttgcccagttgtttcttacgtttattatttcatgctgcacttaaaatgagttatttttgtcgtggaaaagaatcaaactgtaaaatatcttaagagatttattctaagctaaatatgaatgaccctcaggaggtcctgagaacatgtgtccaaggtgatggggaacagcttgttcttagacattttagggaggcattagacatcaatcaaatacatttaagaaatacgctgctttggttcagaaaggaggggcaactcaaagcggggacttctgggctacaggtaaattgaaacattttctgattgacaattggttgagtttgtctaaatacctgggatcaacggagaggaaatgttcacgttaaggtaaaagattgtggagaccaatgttgttttcaagtcttctattggctgcccttagagataatagatgataagtgttttctattcagacctttaaacagtgcgagattcttacttaatctcttcaggattggtagggcctagaagaaaaagatctagctatgttaacagagattctttacaaatgcacatgtacccctcacaaagaacagctttgcaggaccatttcaaaatatggcacagaaacatgttttggggtaaaatattttgactttcttctttgtcacgttattccagagtcagactggaaagtaagacaggatatataggactaaataaaacccatctgatgagtatttatggtttgtagggcatgactccccagaccctttagataggaatttgggcaagagaaaaaaattagaccttggtcctcattctcaaattctttttttaaaaaataattcctaagtgtattgtaatatcaaattcactttacgtgccttctgaaaataagtagaaaatgtactttttatcttcaagttgtaatttttttttccctagaaacaggacctagttctgacacccaggatggaatgcagtggtgggaacactgcccactgcaacctcaacctctggggctcaagcaatcctcccgtctcacctcccaactagctggggccacaggccctcaccaccaggcctggctaattttttaatattttgtagagtcgggggtccactatgatgcttaggctggccttgaactcctgtactcaaacaatcctcccaccttagcttcccaaagtgttgggattaaaggcgagctaccacacccatccaattgtaatctattttgggtgttttctttgttgttctctcctaagtgttctatca

SEQ ID NO: 1561574 - DNA, 4001 bp, Homo sapiens; identical to SEQ ID NO: 1561573

SEQ ID NO: 1561575 - DNA, 4001 bp, Homo sapiens
cccaccccccacctctggctgtcctctgggaggagtgactcaaagctgatattcactagacactacaaaagacttagcagctatgagcatcttggagcagccccaaacagttctgtaacccaggaccaggacaccatagagggtgggctgacagatcaccctgtgccatttgcaaagaggaacctcgactgaaaatattcgggtatctctgtgtagacaagataaaggacagccacacatgcactattttttttttctttttcttttttctgagacggagtttcactcttgttgcccaggctggagtgcaatggcgtgatcttggctcaccgcaacctccgcctaccgggttcaagcaattctcctccctcagcctcccaagtagctgggattacaggcatgagccaccaccccggctaattttgtatttttagtagagacggagttcctccatgttggtcaggctggtctcgaactcccgacctcaggtgatccgccagccttagcctcccaaagtgctgggattacaggcgtgagccaccgcgcccggctttttttttttttttttttttttcacactggagtcaagtggttattctttgcttcctcacatgtgaaatgttcacaaacacaaaaacacatcttttaaaaagagccatacattgctatgtgaaaagaaagtgacaattaaaataatgcctctgtttgaaatattgcctgagggacaaagagttcataaagttgctgggaattgatgagagacagttagcctggggaaggctctgaaaaccaagagatttgctgccagccctaggaggagttaggatgaggggatagggtggtggatttgagaccctgctgcccacatctttggaagactcggagggaaaccggtcacctttgggaagaaagaagggactggggaacccacagatcacagcttctcttccaaagcacaaagcccacacacacgagtctggattctgcctggtgaccctccgttgtcaccgtgcagcgtcctcaccgggttcacaggaactgcgagccaggctggaggcgagattgcagttagatattaaccaggtgccctcagccccgctgcctcacggggccgcctccctgagagtcaggtcacagcagacgctgaccgccggcttcctcatcgtgcccggggataagatctcttgagagttgctcacgggtcgcctcagttctttctcggatcctgaattgcagcggaaaggctggcgccaaccaggctgaagaccccacaagggaacccactcagcagaatgcggtttcttcacctccagtcccaggagtcacctctcacttctccaccaaccagcgaccccacactccagccgtccctgtccacacctctaaacaccccatccccaaacctctcagggaggcggatctggggtgtcctcccctctcccccattaaactgtttctgctgcagccttcggcgtctcggtgcagtgactcgggccgtgaacctgtgccggttacaactgcacaatctggggagacgcggagctgcgggcgcggagctgcccagagagggcgccggggccggggccgcagcggccgagcagggacgggacaggacgcccggggtcccggctgccgccccagccccatcttgcggcccaggggaccaagggcagagctgcgccaggggcactgggatttgcagaccccggagtcgcccagggcgaggcccgggtcccctcacggtcggttccggccggttccaacctgccccttctttgcctcgggacgccgggccccgcacactcaccatttcccagcttccaggtgtccgggtgtcctccttaaaagccagtgtgggtcccagcgcgacagacgctgatacagaccttccagggcgtctctctctcagcgccagagccaggactcagagcgcaggggcgtggagaagactccgcgggctctttgaacgtcgcaccctcctccctgcagcgtgcctgattgacagttctcacaatccccgccccctcatccctgattggatagtgctccaggtcccgccccttggtggctgattgacagaagaagcgatctcacagtgctgagtggagccggatgaacaggttccaggcacgacccttggcaaggcgggcttcctcccaacggagtgacctgacccctcccgaagtgacgtttgcattttagaatttcctgattgtattcagtgggttcttcctgctttttcctcctggacagggactcacaagtgtgtgcagggaattccaggctccctgtccagtggagccattcccggacctcggagcaggaggggagcccggggcacacaggccaccctgcagcaggagggagggcctgatgtcctccagggatcaggaatttgggatgaggctgttggcgacgttgccaagcctttccctcaccttatctctcaatctactcattttcagcccagaagataaaaacaggacaacaaaataaaatagttgagtatgtggaaaaactggaattatatggcagcaatatttcataaagaatcaaaagagaagaaaagcaaaaacttgaacaagctcagagaagcagcctactgcactcacagttcacaagcagaccccctttcaggaggtcaaacatatccccaagctgggaagccaggcaatgattcctaaaatggagctccggggtggatcagaagctggtgataagggagggacaattaagaattttactctgaggtctcaaaatacctgtcccctctgcacagcgtggaaatgctccctccttatgccattaaatgttaatgaattaaacgctccaatcaaaagccaagacatcacactttgaatttgaaaacattagcctttctccatatgtttatgaagtaaaaatactagacttaaaagcgttatggccgggcgcggtggctcacgcctgtaatcccagcactttgggaggctgaggcgggtggatcacctgaggtcgggagtttgagaccagcctgacaaacatgatgaaaccccgtttctactaaaaacgcaaaattagccgggtgtggtggcacgctcctgtaatcccggctcctcaggaagctgaggcaggagtatcgcttgaacccggcaggcagaggttgcagtgagccgacatcacaccactgcactccagcctgggcaacagagcgaggaaaaaaaaaaactccatctcaaaaaaaaaaaaaaaaaagcgttatgaactagaagctggtagccatggctaaatagaaaggagctgaacatgagatgtcaatagatgaaatgaaatcttcaatcaacttctagaaactatagcattttctgccaggacaaatgggcacgtttagaaaatgaatgaaaaaaatgacgtctgagtataacctaatgcataaatgatactgtttccttaaaaaaaaataataagcacacacacagacacacacacacacactcccacagtctattatgctagaaactgctctctgaaggataaactactattttatgaaatgctccacccctcactcctcacattaactgctcctggaacaatgttctatttatttgtttccacacatattaaaagagggcacaatgtatcaaactaactgattgtcaggggtttatatacagattctgtatatttttacaaatggcaacaagtaagtagttgatttctgcaatgatttaaatacatataaaagcttccagacaaaaatagctgttcgcattaccatgatgaaggaaaaatcaacaatggtgagacccacaccccctcccccagagaaagtataaaagaaatcctaagagaagctagaaagcccaaaatttgtatgtgcaagtttaaacacaatatagaaagtattgctgttagtttcctcacagtcagttctatggcaacaccatgcttttctgagttaggatgtttatttctgagtttgtcttttttttttttctgagatggagttttgctcctgt

SEQ ID NO: 1561576 - DNA, 4001 bp, Homo sapiens
aatagtccaaatagtaggaaaacaatcaataaaggactgagatccagattacataaataactcatacgaatcaataagagctattccaagagaaaaatgagtaaagatttgaactgacatgtcacaaaagatgactaaaaaccaataaacatatggaatatgttcaattttattattaatcacggaaacccaaattcaaacctgtgggggtgggcgggtataagtacagatatatattcaaatgaggatttaaaagtctggcatgtctgatttgtatatcatagtttttgcaaacatcaaaaatgtatttcccaagaccatttgatgacatgggagaatatttctgacacttctttttgcaaaaatgtagaacatcaaatggtaaatgaaataaaatttggtttttgacaaataatgaaaatacattaaaatattaaccctagttatctgagtggctaaattttattttttcttggtaatgctgtgtttttgagatctctaaattaatcatccttttatttttaaatcagaataaatatttgagaagaaaattcagcaagcataagtggagcaaccatccttttctgtgatgggaaaattatagggacctataattaaatgacattcctttaagcaagaattttcagaagaaaaagaggaaaccccaacacaccttggatactgcttgtagaagttcatcatgcattctttcctcctcttctgggtgacacctggagaaaggtaaaattgggagagggaagagtaactgtgagacaccaggtttttcttggtacccagattagtcaagtaagagttcttccccagccccattacccaccacacatgaggaatggagatcagaggagaatggggcattctgtccaattccagtggctcaggggaaaggttgtgttcactgctgtccagggttggaatctgaccagacctcagagaggtttcctagagacagagttctggagtcacaatcgcatagttgacaggaccccatactcatacacagaatgccacatacatttagggacagtcacacttaaggcgacatgcacgtctcacctgcccacaaggagccacacacggcaacacagttacaatcacatacacaccataggaaacacacaattacagctgcacaatcgtaggcaccccacactgtcgcagagtcacaatcacacatcaccacgggaacacacagccacaacccccacagtgacaggtatcccatatccgcacataagccgcagtgttattatctcccagacaatttcacaacctcccctctttttttgggggggtggggtggggtggggacagagtcttgccctgtcgccaggctggagtgcagtggtgcgatctcggctcactgcaacctccgcctcccgggttcaagtgattctcctgcctcagcctgcgagtagctgggattacaggcgcgcgccaccatgcctagctaatttttgtatttttagtagagatggggtttcaccatgttggccaggatggtctcgatctcttgacctcgtgatcctcctgcctcggcctcccaaacacaacctccacctttcaggccgctccgcccgcaggggcccaaggcgccagctccccatcggtcttcggtatcctcacctaagccctttccagtcatcccggatgggaacttgcagacctgagccagttctcctggggaccaaaatatctcacctcccagatctaagggtcccgccaggagtgacgaaacgttcgaattcctgcgagaaaagtggcaggccaccaggccctctgggaaatgtagtccagagcgggacccacgccgattcctgtcagctcctcgcctgggcccacccgaaacggctgctccctcaactctcaacatccagccgagcctcggagttgcgggtcgccgtagcgctgcgcaatggagatgagcctcccggggaacccggcccaagcctcaccctcacacaggaaagcagatgtgttctggccggaagttgagtggggccgcggggcctgctgggaggtgttgtcctcggaaacgtcgctggcgcggagggatggttcggcgctttaggcgtctgtcacagacctatctgcgggtcgccttcacccagcatctcagaaactgcgcgcgggatgaacattcgggtgtttccggcaggtgacgctgccgagtccccgcagcagggggcgagcaagggactcgcggttgacgggacacggatcctctaaggcccagagtgtcccgagtagcggcagtggggagtgctcagggtacgctaatggtgagtggttgcagttgatgggacaaaaaactgtgatgggagttagtgtgggtgtgtggttgtgtgtgtgagtgtgacggcacgaataatctgatggggtgattgtgatatttggttgcgcgggattatgatgaaatgtgtgatatgtgtgtgattatgattaaggctgtagcgagtgtgaacgtggcgaagtgtgcgtgattgtaatatgtctagtagttcttgtcttgagctggcttttctgtagcatttggcacagttggtaacggcttgaaaaacacttatttgttttctactgatcctccctccttgttggccactcctctgtagtcttctttgctgtcttttttaccctagtagcccttggccctttgtaattttccactattccttggcgaacttttcaggttcattattatcttatgacttgctgcttttatgtatgttagttagctattgccatgataataattatgtctaaaaaccacccctgaactcaatgccatacaacagcaagtccttactctcctgttcacaggcttgcgcattgactgtgttcagctgatctaggtggggcttggctgagtggataggctgcgtgacgagttaagatctgcgccgcatgtgttctttcagggtctcaggccaaaaggacatttgttgccagggcatgctctgctcctgatgggtcaccagagcgcaagagagattgcctcaaccagagcaagtcacatggctaagcctaaaatcaattatgcccacagttggagagcaaagttacctcgcaaagagtatgaataataatctattagagggtgtgaggaattggactaaaattccagtctaccaccttaagaaacatacctctttatcctggtgaatgccttttagtccgggttctcttttgtctgataatattgcttttcaagttttattgtatttcttaagaatttcattttctaacccccttgtgtctttatgtttcagatctgtgtcttgtaaagagcatattgctgggcttacatccgtttatcttgtttgactgttattttaataggtgagtatagttcagtggcatttatcatgattgctcataaaaaatgttttattttctattacgccttaaacatttttgattgacatataatagttgcacatatatctttttttattgtgcaaattcaccttatccctttttctcccctaggttggtttctgctattatccttttttaatatgcatgcttaacaaaactcaaccttaagactttaaaatacttgaactccaaaatatccaccaatttctgtgttattcttgtctcatatattattttcttctagtttttgttgttgttgttgttttgttttgtttttttgagacggagtctcgctctgtcacccaggctggagtgcagtggcacggtctcggctcactgcaaactccgcctcccgagttcaagcgattctcctgcctcagcctcccgagtagctgggactacagacgcgccaccacgcccggctgattttttgtatttttagcagagacagggtttcaccatgttagccaccatggtagatctcctgacctcgtgatttgccgacctcagcctcccaaagtgctgggattacaggcgtaagccaccatgcccagcctattctcttctagttttaaatccccaaattagtagtagtagctcattta

SEQ ID NO: 1561577 - DNA, 4001 bp, Homo sapiens
gataaactgggtattaataaggaggggggaatctgactcttacctcataacatatacaaaaaccagttgcaactatataaaatatctaaacatgaaagtgaaacttatggctttaagcataaatataggagagtatctgcatgaccttgggacagggaaggatttatttaaaaagatacaaaaagcactaaccataaagaaaaaatattgataaactcagctttttaaaaattagaacttatcataaaatcatcttacaggaaatgatgaaatagtccaaatagtaggaaaacaatcaataaaggactgagatccagattacataaataactcatacgaatcaataagagctattccaagagaaaaatgagtaaagatttgaactgacatgtcacaaaagatgactaaaaaccaataaacatatggaatatgttcaattttattattaatcacggaaacccaaattcaaacctgtgggggtgggcgggtataagtacagatatatattcaaatgaggatttaaaagtctggcatgtctgatttgtatatcatagtttttgcaaacatcaaaaatgtatttcccaagaccatttgatgacatgggagaatatttctgacacttctttttgcaaaaatgtagaacatcaaatggtaaatgaaataaaatttggtttttgacaaataatgaaaatacattaaaatattaaccctagttatctgagtggctaaattttattttttcttggtaatgctgtgtttttgagatctctaaattaatcatccttttatttttaaatcagaataaatatttgagaagaaaattcagcaagcataagtggagcaaccatccttttctgtgatgggaaaattatagggacctataattaaatgacattcctttaagcaagaattttcagaagaaaaagaggaaaccccaacacaccttggatactgcttgtagaagttcatcatgcattctttcctcctcttctgggtgacacctggagaaaggtaaaattgggagagggaagagtaactgtgagacaccaggtttttcttggtacccagattagtcaagtaagagttcttccccagccccattacccaccacacatgaggaatggagatcagaggagaatggggcattctgtccaattccagtggctcaggggaaaggttgtgttcactgctgtccagggttggaatctgaccagacctcagagaggtttcctagagacagagttctggagtcacaatcgcatagttgacaggaccccatactcatacacagaatgccacatacatttagggacagtcacacttaaggcgacatgcacgtctcacctgcccacaaggagccacacacggcaacacagttacaatcacatacacaccataggaaacacacaattacagctgcacaatcgtaggcaccccacactgtcgcagagtcacaatcacacatcaccacgggaacacacagccacaacccccacagtgacaggtatcccatatccgcacataagccgcagtgttattatctcccagacaatttcacaacctcccctctttttttgggggggtggggtggggtggggacagagtcttgccctgtcgccaggctggagtgcagtggtgcgatctcggctcactgcaacctccgcctcccgggttcaagtgattctcctgcctcagcctgcgagtagctgggattacaggcgcgcgccaccatgcctagctaatttttgtatttttagtagagatggggtttcaccatgttggccaggatggtctcgatctcttgacctcgtgatcctcctgcctcggcctcccaaacacaacctccacctttcaggccgctccgcccgcaggggcccaaggcgccagctccccatcggtcttcggtatcctcacctaagccctttccagtcatcccggatgggaacttgcagacctgagccagttctcctggggaccaaaatatctcacctcccagatctaagggtcccgccaggagtgacgaaacgttcgaattcctgcgagaaaagtggcaggccaccaggccctctgggaaatgtagtccagagcgggacccacgccgattcctgtcagctcctcgcctgggcccacccgaaacggctgctccctcaactctcaacatccagccgagcctcggagttgcgggtcgccgtagcgctgcgcaatggagatgagcctcccggggaacccggcccaagcctcaccctcacacaggaaagcagatgtgttctggccggaagttgagtggggccgcggggcctgctgggaggtgttgtcctcggaaacgtcgctggcgcggagggatggttcggcgctttaggcgtctgtcacagacctatctgcgggtcgccttcacccagcatctcagaaactgcgcgcgggatgaacattcgggtgtttccggcaggtgacgctgccgagtccccgcagcagggggcgagcaagggactcgcggttgacgggacacggatcctctaaggcccagagtgtcccgagtagcggcagtggggagtgctcagggtacgctaatggtgagtggttgcagttgatgggacaaaaaactgtgatgggagttagtgtgggtgtgtggttgtgtgtgtgagtgtgacggcacgaataatctgatggggtgattgtgatatttggttgcgcgggattatgatgaaatgtgtgatatgtgtgtgattatgattaaggctgtagcgagtgtgaacgtggcgaagtgtgcgtgattgtaatatgtctagtagttcttgtcttgagctggcttttctgtagcatttggcacagttggtaacggcttgaaaaacacttatttgttttctactgatcctccctccttgttggccactcctctgtagtcttctttgctgtcttttttaccctagtagcccttggccctttgtaattttccactattccttggcgaacttttcaggttcattattatcttatgacttgctgcttttatgtatgttagttagctattgccatgataataattatgtctaaaaaccacccctgaactcaatgccatacaacagcaagtccttactctcctgttcacaggcttgcgcattgactgtgttcagctgatctaggtggggcttggctgagtggataggctgcgtgacgagttaagatctgcgccgcatgtgttctttcagggtctcaggccaaaaggacatttgttgccagggcatgctctgctcctgatgggtcaccagagcgcaagagagattgcctcaaccagagcaagtcacatggctaagcctaaaatcaattatgcccacagttggagagcaaagttacctcgcaaagagtatgaataataatctattagagggtgtgaggaattggactaaaattccagtctaccaccttaagaaacatacctctttatcctggtgaatgccttttagtccgggttctcttttgtctgataatattgcttttcaagttttattgtatttcttaagaatttcattttctaacccccttgtgtctttatgtttcagatctgtgtcttgtaaagagcatattgctgggcttacatccgtttatcttgtttgactgttattttaataggtgagtatagttcagtggcatttatcatgattgctcataaaaaatgttttattttctattacgccttaaacatttttgattgacatataatagttgcacatatatctttttttattgtgcaaattcaccttatccctttttctcccctaggttggtttctgctattatccttttttaatatgcatgcttaacaaaactcaaccttaagactttaaaatacttgaactccaaaatatccaccaatttctgtgttattcttgtctcatatattattttcttctagtttttgttgttgttgttgttttgttttgtttttttgagacggagtctcgctctgtcacccaggctggagtgcagtggcacggtctcggctc

SEQ ID NO: 1561578 - DNA, 4001 bp, Homo sapiens
accccactctgggaaaagggaacagagtgactcacaagtgaataagtcactccactgtagctgaatagggattccaagtggaagctaacctctgaggccaacattcatagaatgtacatgtcttatagataggattcttaaaattctcaatctcatctgtataatttaagcagttttaagttactagattatatacaaagaagtcaaatgtcacaactaatcgtatccaatgaactcacccactcatctaaacccaaagtcctccgcccctttttttcttttgagacagggtcttgctctgttgaccaggctggagtgcagtgacatgatctcggctcactgcagcctggacctcctgggttcaagtgatccttctgcctcggccttcagagtagctgggattacaggtgcacactatcatgcccggttgtttttttttttttttggtagagatgggggtctcactatgttgcccaagctagactcgaactcctgtactcaagcaatcttcttgcctcagtctcctaaagtgctgggattacaggcgtaagccactgcgcccagcccatctttcttcattactgtgcttccctccctaattgtgtacatatctctcattctccccttctctctctagctcttgttttcttttctttttacctggcattctgctcctcattttgtacccctctcctctcctgctgtttatccccttcttccctctattccttctcttccacctcttctgctccatcctcgcaacttacctaacttcttgctgttccttctccccaatcgttctatcgtcctcaatcttgatatatttccgcctcttctcccatctctgtgcatcctctgctctccctgttaaattccgtcttccctgttataccccctgtccccaatatgtggaaccacagatccccaggtgtcctccctgctgtggttctccctctgttctccttgccaccagcaccactctgctctgtctgccctggctccaaatccctcctcctctccctcactctgatgagattccctctttgctgcccctctccctaccttgctgtccttcatctctctgtacatctaggtttctctacgtttctccagttacttttctcctcctgctttctttttttttcttttcacttttgctgtctcttgacaaatccatcacccaccctctactttgccctctgttatgggtctttctcattcttttctctgtctcagcttttctactgctctgtctcccaatgcctttggccgacacaatcacaggagggtttggataagacgcctgcatcccggaggagctcgttttccgggggctggagctgggcaggcaagaacaccccgtgtcacaggacaggccccgggtacctccccaacgcgggttcaggggaagaggtgactgtggaggagagacctgtggagcagcagggcccgccacgaggagggaggtgggggggagacggcgccttaagacaaggttggggtctgcaggattccaggaccaggcaaagtacgcggcctccctgggactggggccctggcgctgcgctccagtggcctacgaaggcgagggtgggaggcgcccagggcgggaatccagctctcgggtgaggactttaaaaagcgaggggcgggaggagtcagaaaacagttttgagcaggaaaactacgcgacaggaagtgtatacatcgccctacagcagaaagaccggggacagcccagcctcagggcgactttaaacccaaaaggaagcgatatccggactctcatggggacgtctcaatttgtcctgggtgaaggaagaagggagagaatttccaggtctgtggggaccccacgtctcaggtacagcagcgccggggacctggtaagcgcagacttaatagaagagcgaaactcaccgccacggtgtaactttcactccacataatccgcttccgggtttgcgcgcatgtgcgcgcgcagtacagaagccaggtctgggcggggcccgcgaggtgggcggggcctggatgaggtaggggcggggtgggaagccgagagactttcccctttagaaccagcagtgggcggggccagggcgggacctgtgagtctctcagcatcgttcccagcgcagaggcatttttcgggttttggaggcgagaccggccaggaaggctgaggcatgattcaaaagccctggaattatctggaacggggatgcaaactagaatgtgaaatgcaaagccctgcctgggcggaaggtacaatttcatgctgatagcccacagaaccgaatagaaatcctctccctttctattctccattcacttgggagagagtccacgctgtgctcagctttagagactcaggccactgcctgagatgcaggatggagtgctcaggccaaggatgggtgaggtcaccacctgcggcttaaacacagctgggatatgggcgcgggagtgggagcctgaggtcccagctattcaggaagcagcggcgggaggatcgccgagcctgggagttcaggccagcctgggcgacaaagtaacaccccctcccgcagggctcccttcctcgtctctctctctcttttcttttttataataaaatttttgatgatgttacatagggatccaacattattcttttccacgtggatatccagttagttgtcccagcgtatttgtgtaagagatctatcagtttctttttttgtttcttgagatggagttttgctctagttgaccaggctggagtgcaatggcgcgatctctgtctcccaggttcaatcgattctcatgcctctatctcccaagtagctgggatcacagggatgtgccaccatgccctgctaattttgtatttttagtagagatgggatttctccatgttggtcaggttggtctcaaatttccgacctcaagtaatccgcccgcctcggcctcccaaagtgctgggattacaggtgtgagccaccgcgcccggcttattttcttttatatatttagttttttctatttttttttttttttttttttgaggcagagttttcttttttggccaggctggaatgcggtggcgagatctgggctcactgcagcctctgcctcctgggttgaaccgattttcctgtctcagcctccggagtagttgacattacagacgcgcacaaccatgcccggctaatttttgtattttcgatacaaacgaggtttcactatattggctaggctggtctcgaacttctgacttcaagtgatctgactgcctcagcctctgaaagtgctgggattatagtcataagccacacttcctggcccaaaaaatattcatttctttactctttaaattttgagaaaatataatggaaaacaaaaaaaatcttccccccaatgagaaatcatcttcacgatgataatagtgaaagaaataaaaaccacattattaataagtaagccttaaaccagaatgtgatgggaaattgaggcaaacagctaagaggttgaaaagagacaaggaaacttcactgttctatacaacccattgagtacatgttttcaagataaacactaatcagtcctcagggaagaggacttgacaacactcttggtcacacatagttcatcctggctctatttggtaatggaggtgaccatctgtgtcagctaattagcttcatccagagggagggggaaaaccctaacccatgtctttttgacgagtgtgagttttacaacatagcgacgcgtgccctctctggtcaggcgcctacaatccgacagaaactgacgtcagcagtaaataataaaatttagaatgtaagattaagtactgagtttatgtgaacacaaagcttgaagaaagccacctggaaacaccaactccaaataaatgagatcggcgttccaaagtagagacgttaaggtttcacacacagggaaagacagagaatctttagcagaatcatgacagctttcattcaagcccagtgcat

SEQ ID NO: 1561579 - DNA, 4001 bp, Homo sapiens
tttgtacctctctcctctcctgctgtttatccccttcttcactctattccttctcttccacctcttctgctccatccttgtaacttatctaacatcttgctgctcttctccccaatcttttgatcatcctctatctctatatggacagaaatttaaaaataataagtactgcatttattcactccaagaaaagtaaaagctaaggcccacaatgtggcaaggcaaggtttaaaaataaaaagaaaagaacaagttttcctctgcctgtcaagctcacatcaagaacggttacaggataacgctgtccgaatagccaagtctaaatgaatgggctccagacacccccaccttccagagcaaggttgaaggaaaaaaaaaaaaaaaaaaaaaagagagagattattttactgttactctttttccaggcttcttaagcattattatgttttacaaatgtctgtatttagtcagttcttgtttttcctttgatgcagctacaaggccaccggcaacccaaggtcacaagatatgttatgctatagattacacaacctgtcactgtataattaactgcttttgttttgcttttgtaaggccacttataaaaaccctgctctgtctttgttcagtgctcagctttttggatatgaatccactgagccagtgcgtacctaaaataaacaattctgtttctctcatattggtctctccattcttcagtttcccctaacacaaatatttccgcctcttctcccatctcagcgcctcctctgctctccctgttacattctctcttccctgttataccctcatccccactctctagcactccagatccccaggtgtcctccctgctgtgcttctccctctgttctccttgccaccagcaccactctgctctgtctgccctggctccaaatccctcctcctctccctcaccctgatgagcctccctctttgctgcccctctccctaccttgctgtccttcatgtctctgtacatccagcttttctctacatttctgcacttgcttttctcctcctgctttcttatcgttttcttttcacttttgctgtctcttggcaaatccctcacccatcctctactttgccatctcttatggctctttctcattcttcttttctctgtctcaggttttccactgctctctgtccgtctcctgatccctttggcccacacaatcacaggagggtttggagtaagacgcctgcatcccggaggagcttattttccaggggctggaactgggcaggcaagaacaccccgtgtcacaggacaggccccgggcacctccccaacgcgggctcaggagaagcggtgactgcggaggagagacctggggagcagcagggcccggcacgaggagggaggtggggggcgacggcgcctgaggacaagggtggggtctgcaggatcccaggactaggcagaggacacggcctccccgggacaggggccgcggcgctgcgcttcagaggccgacaagggcaaggctgggaggtgcccacggcgggaatccacttcgcgggtgaggacgttaaaaagcgcggggcgggaggagtctgaaaatgattttgagaaaaaaaaaaaaaaaacaacaacaactacgcgataggaagtgtatacattgccctagagcagaaagacaggggatgggaccaacctcagggcgactttagacccaaaaggaagcgacttccagactctcacggggatgtctctatttgctctgggtgaagacgggagagaagttccagatctgtggggaccctaggtccgagggacagaaacgctgaggacctgggaaatgcagacttaatacaaaacagcgaaactcaccgccgcggtgtgaccgtcactccacgcgatccgcttccagatttgcgagaatctgcgcgcgcaggacagaagccaggcctcggcgggccccgcgaggtggtgggcggggcctgggccgggtggcggcggggcgcgaagcagagagactttgcggtttagaaccggcagagggcggggccggggcgggacctgtgtgtctcacatcctggctcccagcgcctctgtttttcgggtttgggaggcgacagcggccaggaagtatgaggcatgattcaaaagccctggaattttctggaacggggatgcaaactagaatgtgaaatgcaaagccctgccagggcggaacataggatttcatgctgacggcccacagaacagaacagaactcctctccctttctattctccattcacaagggagggagggtccgccctgtgctcagcttcagagacttccctaaagccactgcctggggtgcgggacggagtgctcaggccagggaggagtgaggtcaccacctgctgcttaaacacagcaggggtgcaggcgcgaaggcgggagcctgaggtcccagctactcaggaagtaggagcaggaagatcgctgagccctggggtccaggccagcctgggcgacaaagtaacaccccctcccgcaaggccaccttccttgtctccctctctctccgtctctctctctctctctctctctcgctttttaaacctttttaaataaaatttttgatggtgtgacatagggatccaacattattctgttccgtgtggatatccagttagttgttccagcacatttgtggaagaaatctattacttttttttcacgtttttcttttctttttctttgagggagtctccctctgtcgcccaggctggcgtgaaggggcgtgatctctgctcactgcgacctctgcctcctgggttgaagcgattctcctgcctcagcctccggagtattacagtattactggtattagaggcacgagcgaccatgcccggctaatttttgtatttttgatagaggcgggctttcaccatgttggccaggctggtctcaaactccgaacttcaagtaatctacctgcctcggcctcctaaagtgctgggactacaggcgtgggctaccttgcatagcctaaggaatgctctttactgtttaaacgttgagaaaatataattgaaaacaaagaaaatcttcccccaaatgggtaattatctccacgacaacagagaaataaataaaaaccattttaataaagaaccttagactcaaatgtgatgggaaatagaggcaaacagctatgaggttgaaaagagagaaagaaatgtcactgttctatacaacccattaagcacatgttttcaagataaacactaatcagtcctcagggaaggggatttgacaaccccttgggtcacacatacttcatcctggctttacttggtaatggaggtgaccatctgtgtcagctaattagcttcatcccgagggagggggaaaaaccctaacccatgtctttttgacaagtgtgagtttcacaacatggggacaggtgccctctctggtgagactcctacaatacgacagacactgatgtcagaggtaaataataaaatttagaatatatgattaagtgcagagtttgtttgaacacaaagcttggaaatagccacctggaaacatcaacttcaaatgaataggatcagcgttctcaggtggagacgttaagattttacacacataggaaaagacagagaagctttaccagaatcacattttccattcaagaccagtgcctagggtgcagcaacttgactggtgatggattgatacacttcaaggaaggttactttatcactccataagaagggacaatgatgccaaaaggtcttaactctggggctgcttagtcttcctaattatttacagaataacctttttttttttagttgtttgtttgttgttgctgtcattttttcagacagcgtctagctctgtcacccaggctggagtgtactggcactatctcggctcactgcaacctccacctcccgggttcaagcagttctcctgccccagtcagccaggtagctgcgattacaggccagtgcgaccacgcctg

SEQ ID NO: 1561580 - DNA, 4001 bp, Homo sapiens
tccattagcataaatgtacttgggggcctatcaggagtcctccattagcataaatgtacttgggggcctatcaggagtcctccattagcataaatgtacttgggggcctaccaggagtcctccattagcataaatgtacttgggggcctatcaggagtcctccattagcataaatgtacttgggggcctatcaggagtcctccattagcataaatgtacttgggggcctatcaggagtcctccattagcataaatgtacttgggggcctaccaggagtcctccattagcataaatgtacttgggggcctatcaggagtcctccattagcataaatgtacttgggggcctatcaggagtcctccattagcataaatgtacttgggggcctatcaggagtcctccattagcataaacacaggtgtggttgcagggggcttattaagagttgcagaagacactccttctacccctgtcactcaggaaattccaagggttttaggggctctggtaccaggagctggggataaagattaaacatatatttcttattatatcacaagatcacaggaagacacatgcattacatcacactctgacacacacagggtcatacacaatcatacctgcccagacacacacagacatgcagagacacccaaacccatatccagggacacacagtcgccctcctaacccccatgcaaggaggcaggtgggaagccatcacctgcagccacactcacacatgcacacagggtcccgggcacacgtagctacacacacacccagccccacacgtagctccctgtgtgaagaggtgcacagagacgcacaaggtcacacatgccacctgctccacacaggccggccattactgggacacacccacaggggatggctggacacatgtgcagtcacactcggtggatagagctccagcatagccaaagcccacatgtgcagcgtctccatcatgtgcagatgcacacacttcagacagcacggcactctacaggctcgcacagccaggtcacccatcattgtgctggcaggcacacgggccgagccagcctacacggcggcacacccagacatgcacacgtggggtcacacacctcacatccaggagaactttcagacttgcccaaaggcagccacacgtgtatgtgacatgctgtgatatgcagacaccgcttcacatgaacgagcacataacacaccgataaagtgttacatgcctttacctgcagtcacctgcctgggctggcaccactgagtgagcaggtgcagacacagtgacactcggggacgggctcacaggcagtcacacacctgcaaggcctggcaccgccgagtgagcaggtacagacacagtgatgggctggcaccgccaagtgagcaggggcagacgctgtgacactcagggacgggctcacaggcagtcacacacctgcacctgctggtaccgtcgagtgagcaggtgcagacgctgtgacactcagggacaggctcacagccagtcacacacctgcacggcctggcaccgccaagtgagcaggtacagacacagtgacgggctggcaccgccgagtaagcaggtgcagatgcagtgacaggctcacaggcagtcacacacctgcacctgctggtaccgtcgagtgaccaggtgcagacgctgtgttactcagggacgggctcacaggcagtcacacacctatacgggctgacaccgctaagtgaacaggtgcagacacaatggcactcggggacgggctcacacgcggtcacacacctgcaggaacacgcgcacactacacaccgttgctctcgcctcccggtatcaccttcgaacgcgctggccggccccctcctagcctggtgcagtcggctccgcttctactcagtctcgggtcctcctgggccaacgcagaccctggtgcctccttccttagacgagctaaggtcaagacttctgctgctgcggaggagcccgcgcaccaggccggggtggactgcgcctgcgcatcgggcccgcctggttcttaggaactacgactcccagggggcgctgcgcgctcgccggcaccgcgactaaagcttgcaaagcctgggtcatcgaaactacaactcccagaaggctaagcgtctgcacacgctaggtccgcagggcgctgacccctgggggcccgaggagcgccgggctgctgccccgagccccgcccactacagcctcagtgcatggcggtgggcgcttccagtaactcaggggtgggacttttttcttgctcaggggatgaggccgagcccacaggcttagaaagaaggaacttgagtccgggcacctgtcatcccagcgcttagggaggccgaggcgggtggatcacctgaggtcaggagttcgagaccagcctggccaatatggcgaaacccccgtctctactaaaaatacaaaaattagccgagcatggtggcatgcacttccagctacttggaaggctgaggcgggagaatggcttgaacctgggaggcgagggttgcagtgagctgagatcgcaccactgcactccagcctgggtgacagagcgagacttcgtctcaaaaaaaaagaagaagaaagaaggaagctgaggttcagacaggctaagtccctactgcaggctgcggaatctaaaaaggtaggtgccagggtttgcaacccacacttttattttggtctcaggtagctgatgtcattccagtctatggcaaagaaggtggcaaatccattaacatagatgaagaatttcattttactttttagttttatttatttatttatttttattatgtatcatgcttttaatacaaactttaaaaaatctggaacaatagaaactgtacagatttgatcaatctttttgttttgtttttaaactaaaatctctaaacacaccaatgtcctattccaaaatattgcacaacattctgaatacaaaacccttgattgtattcctccttcactgaagaaaaaacttcatgaccctgctccccgggctcctctccaggcttgcgtcaatgcccccttcccatccctagggagaaaactagagaatctataactcactgcattgagaaaaagacatcattctggactaacagtttccattcttcagaagataatccaccttttgatttgttcctgggaaacagggatagatagaggatggggaaaggggagaaaaggttttatttctcctcttttttttttaaagtttgtttttcctgaaaaaatatgtttctctcatctttttaagaaaaaatcttgaaaagaaaaaaattgtttttacgttagaaatatacatatattatatatacctcttacattttacaaatgtagcaaattattcaatacaaacggacaccaaaaaatgtaaaaaataaaaaaaagttttcctaagaaccaggtaaattagtgcagatttctgtttttgttttcttaaaaaaaataaaattgaagcaaaagtgcctagatttgagacaagacagactgaactgggcccaagagcccagcactggagtcatgctcctgaacacacatttttcttcgtatttcaaaagacacaaaggggttggtctccccccctctccctacatgtgagaaacaagcagacctggtgtgggtgggtgcctgtgtgtgtggatgggaggagggatagaaggggatgtaaggcagcatccaacctttcccagagagaagctatctgctgggcctgtcacctgtgtgggagccgaggatgagggaaagggtggcccagactgggctggcccctgagaagtctaggggaacagatggtgctgggctgagaagccaggacattgcctgccgggggaggtagagctggtgcctactgcagggagaggaggctggcagtgccggcctgggctggacccactgccatagcagttgcctacttggggtccctgggtaggatggagtgggtggggtgccaggggctttggt

SEQ ID NO: 1561581 - DNA, 4001 bp, Homo sapiens
atacctcgtaggcctggcgtggtggctcccgtctgtaatcccagcactctgaggcagaaagactgcttgagcccaggaggttgaggctgcagtgagcggagatcatggcactgtactctagtctgacagagcaagaccctgtctcaaaaaagaaaaaaaaaaaaaaaagacataccttgtagtgacagtgacagtcatttatcgccccatttctcagttactctatcctctaccccatcccagggaagaaaagagttaccacgaatgacttaatttaaatgctctctggctaaacagaaattccaaatatcttttgatacaaataaatacaaaatgcacaagccttacagaaaagagtggtaattttcatcctcacgagtacaatttaaagaaatgaattttaaattagagtataaagtcacaaattagaatattacaaccaccatccatatccaatcaactcatcgctcatctggatggggtcctctcccactttcttcactattgtgtgtgtccctctctcattctgcacctttcctccccttttctgtttttctcctctttatgtctgttctgcccgatgctctgcaacttacttcacctctcgtagctctttctccccaatctttctgattgtccccaatctccacgtatttccgcctctttttccccatctgagctccctctctgctctccttgttaaaattccctcttacctgttacacctcctttgttcccactctctagcacccccaactccctaggcttcctccctgctgtggttctccctctactctgcttgtcacccactgccctctctccctctctttcagtcccagcaccacgtagctctgtcggctgcggctccaactctttcaccttctccccactgtctgtctgcagtgcctcctcctttgccgccccactctattttgctgcctttcatctctctgaaggtccccctttttttctaaatttctctgtgtgctttcctccccctgcttctttctccattcgttctctttcactcttgctgtctctttgcaaatccctaaattatcatccattttgccgtgtatttatgggtctccctcattctcttctattcggtctttccttttgctccgtcgctccccttcttttcctctcctgatccctctcacccacacattcagtaagaaaggggaggaataggatgcccacctcccggaaaagcatattttccagtggagtaaaatttgggaaggaagaacactgggtgtcacaagactcaggtgacctcccccaagggggggatcgagaaaagcagtggctgtgaaggggaagcctggggagcgaaaggacccggcgtgaggaggacacaaggtggcagggggtacggtgtctcaggacagggagggtctgcagaatcccaggacctgggaggagaagcgactccttcaggagccggacggcgggcgctcccctccaggggctgacgacggagaagctccggggtcgcaacgggcgggaatccacctcccgagtgaggactcgacttggcgcagggccgaagcagaggtcagtaagggttttaagcaggaacacgacctgagtggggttgtctacatggtcctaaggcagaaaggcagggagcaaggaacagcctcagagagatttttaaaccgaaagggaagcaattatcagacttacttggggcgaaggggctgttgctggtattttaaggtccgtagcgatccccaggaaacgggtatggacaagggaagactgccaagtgcacgttcgattcaggcagacggggcgaagcaaatgtttagtccaggtagacggaaactgacgcgcagcgctgtgatcttttccccgcgcgatctgcttccgggtgtgcaggaagctacacgccctgagaaaaaagactgagagacctggggcgggagaggggcctgggcggggtgcgacccgcaagggaaagggcagaaagactggccagatttgggaaccctgaaagggtggggcaaggctgatgcggtagtgggcggggccaggtgggctaagcgggacgggcggtgtgggcgggacctgtttggtgggcggggcctgttattcgctctgccttccacccagcaagtctttgttctcccgatttaggagtatttgtgactatttcttgtcctgtgaagcagcgttgcttcctgcctattttaagttaatgttttagactttaaggtcaaagcttaaagttgtggtccacttctgttggaaactaagatgttttcttcttgtcaagttgaactgatttaagtcaaaatcgatttttgcgagcctggtggactccatcgggtcttgccagtgaggctgaagccagttaaggctgaagttactcagtagtcagggaactaggatctccgtgaagatctgatgtgcagccgtggctggatccaggaaccctgaagacattatgctaagcgaaatgtgctagacacagaaagacaaatcctgcatgtgcttacttacatgtgcaatctacaaacatcaaaattacagtaacagagtagaagggtggtttccagggctgacggtctatcctgtgcctgtcccaccattgtattttggaagcaaatagcttctttggcttcacagtttcacagctggacagaaattttgcctcaggatgaaccacactttgagtctcacccatatgtgattcagataatatttgggtaatatttgggccttagagtttgatactgaaatggattaagacttttgaaatgggccaggagcagtggctctggcctgtaatcccagctctttgggaggccaaggtggaaggattgcttgagctcaagaattcaagaccaacctggggcaacatagtaagacccttgtctctacaaaaaatacaaaaattagccaggcatggtggctcacgcctatagtcacagctatttgggaggctgaggtgggaggatctcttgagcccaggggatcaaggctgcaatgagttgtctttgcaccactgaactgctgccagggcaacagagtgagactctgtctcaaaaaataataataataagacttttgagatgttaggatgggggtgaagggatcttgcatgtgagaaggacatgaattttgggagtccagagtacagaatgttatgagctgaatcacgtccctaaaaaatcattgttggccaagcgcggtggctcatgcctataatcccagcactttgggaggccgcggcgggcggatcacaaggtcatgagatcgagaccatcctggttaacacggtgaaaccctgtctctactaaaaatgcaaaaaattagccgggcgtggtggcgggtgcgtgtggtcccagctgctccggaggcagaggcaggagaatggcgtgaacccaggaggcggagcttgcagtgagccgagatccagccactgcactccagcctgggcggcaaagcgagactctgtctcaaaaaataaataaataaataaaataaaataaatcattgtctttaagttctaacacccagtacctcagaatatgactgtattttgaaatagggcatttagaggctattaagttaaactaagcttgttagaatgggctctgatgcaatctgactgatgttttgataagaggaaatttggctggaagcagtgcttcatgcctgtaatcccagcactttgggaggtcaaggtggatggatcacttgagctcagaagtttgagaccagcctggccaacatggtgaaaccccatctctactgaaaatacaaaaattagccaggtgtggtggcgcatgcctttagtgccagctactcgggaggctgaggcaggagaattgcttgaatctgggaggcagagcttgcagtgagccgagatcgcgccactgcactccagcctgggtgacagggtgagactctgtctcttaaaaaaaaaaaaagaaaaattagccgggtgtggtgtcacgcacctgtaatctcagctacttgggaggctg

SEQ ID NO: 1561582 - DNA, 4001 bp, Homo sapiens
ctgcccagtttgtggtagtgtgttatagcagccacagaaactaatagagactggtctagcaccctcgacagaatgtgtgtgttgtaaggggctctcctgatccctagtgatggggagtcagaggactgcttagtgtctgaacagagggttggggaagctgggttgtcctgaagaaccagcagtccccacttggcagaaagggaccctgaacttgtgggaggtgggggctgaggggcacctgctagccatgtgctaacagcatcttcggattggtccccagatgccctgctcccaggggtggctcctctgctgcaacaagaacctgcctcccagcaccagacacagcaggtgggagctgtggaccatggccgagtctcttcgtctccttgatctgctcccaggatgcactgtccaactatcccacctgtaggtgggtggcattccagccatggacccatgatctgaggctgagcacagcaaacacaatcgaggctctgggtcccaggtcccaggagcccgtccttgatggtgcattacagctctcccaggctgttcttacagtgacctcccacctgccccaggtgagcatgcttgcacctgggtgctcgcccagcctttctagttgtccttagggcttctggtgttgggaacaggatgcagagttaccaatttagggggactgagaggttaacgtggccaaggctgagccctgcagaactgcagagcaacagcacacacaggaaagctagtgaggttcaacatcctcatggaggttgcacacggcacaatgaggtcttatttgcccaagagaatgtgcagggaagtcgccaggcacggtggtgcatgcctgtaatcccagctactcgggaggctgaggctggagaatcgcttgaacccgggaggcggaggttgcagtgagccgagatcgcgccactgcactccagcctgggcaacaagagcgaaactccgtctcaaaacaacaacaacaacaacaacaacaaaaacagaatgtgcagggaagtcaacgttggtggctctgaggtgtggaggacacaggctagtgcccagctcagcgtggctccacctctctgagccacagaccaacctcacccacactgacagtcccaggggacacagactctagcccctatgtccaattctacactgtgcacgcaatgggaagaacagtgcatcatgcactgtacagcagaagaaatgtcctctgagtgcaggcacagctcccttctgtgtctgtcctcccgacagtgcctccaccctcaaggattagcaagcttcaaccctcgcaggacatccactgtgtcagggccaaacggtgctgcatcctgctctaatagtgagtgaaggaggggaccgcagacaagaagaaatgaacaagagaccgtttaagagagaaaaagacgtgaagaacatcagacagggagcagcgcgagggcgccagggagggaggcagcggattcttcgggcctctgtgaagagggggcatgaaaccggtctgcagacaaggaaagagcaaagtgcaaaggccaggatgcgggggcagagacggtagggaggccggcgtcggcctcggctagcaggtgggcttgactccgagagccgcaggccgccaggatgggtcccgggcctggagcctcccctcgcgggcttcaatgacacccagcacggaaacgcgggggccagaactacagaagcccgtcccgcccggaactcaaggtcgcgagtgctgtgtggccggtccggacccggagcgcgaggaccggaagtgcgcggcgtcacgcctctgccccggaccccgcgcgcggaggtggagaggggactggggtggtggccgcgctatgcgccgggaggtccccgcctcgcaggccgaggttgcgggtccgcgcagaatgccacttactctctggaggcggcccgcacgggtccctggtccccgccccgcatgcagcgcggagccgtcctcccgccacctccgggccgccgcggcactgagggacccgggccacagcaagcgcaggcgggaacccgcgcggggactgctgggaaacgtagtcccgtcatgtcccgctttgacgctgcggagaaagcggtgtagggagaggcttgggcttcggttatcatagaaacagaggccggctacacctaaaaggcggggcgtggacctaagtcgtcgccaaagaaacggcgttctggacggggacgtagggtcccgcccattccttctcgtgaaagcgggtgactggtcatgattatgattgatagcctcctctcccaatctgatttctaagaggtcccaacccggaaccgacttgcggttcgcaggctcccctcgggtgggagagttgggctgggaagcacctggggagctctgaagtgtcttggtgagcgcgttgcgagtcagaccgataacatcagaatctgggactgggcccgagcatatgcgcgtcaaaactcctcagttaagtctatttttttgtattttttttggtttgcttttttgagacggggtctcgctctgtcgcccaggctaatgcagtgacaccatcacggttcactgcagcctcgacctcctgagctcaagcgatcctcctacttcagcctccagagtagctgttaacaggggcgcgcgccaccacgcccggctaattttctttcttctctccctccccctccttctccccctcccttcctcctcccactatgtcgcccaggctggtctcgaactcctgtactgaagcgaccctcccacctcaccctcccgaatagctgggactataggtgggagccaccatgcctggatagtttttttatttttatttatttatttattttagagatagggtctccatatgttgcccagactggtctggaactcctgggctcaagcgatcctcgtgtctcagccttccagagtgctgggagtacaggcttgagccactgcgccaggcccctagtccggctcctagttgattctaacacgtgcggccccattggggaaccacagcctccccagcccctttgggtgttgctgactctacgggccctcccaggtaggatgaactggtcacgcctcctacccatttgtaacccccagctcttgcccccatctattgtgtggctcctgccctcaatagggacatctaattttgttggccagtccagcacatatattgcatgtaacgacccagtttgccccacctttctgcctccactgcatctgcttcagggatgctgggactgttccactccctttctccatcctttgggtgtctgcacatcgaaagccttgtcaggaggtctatctccctgcccaagtacaaaactcagggcttaccaagctaattgagggcgagcaggaggctgaagggcacttggagggctgcccgccttgtgggtcccttggtggctgaagagagttgcacaggaaggccttgacaattgtcacagagaaaggagtgcagctgctggctctgtgtgggtgtgcagatgtctgacaggttcagccactggccccaattgggacacaagtgggatttctttttttttttcttttttgagacagtcttgctctgttgcccaggctggagtgcagtggccgcgatctcagctcactgcaacttccgcctcccaggttcaagcagttctctgcctcagcctcccgagtagctgggattataggtgcccacgacctcgcccggctaatttttgtatttttagtagagatggggtttcaccatcttggccaggctggtcttgaattcctgacctcatgatccacccgcctcggcctcacaaagtgctgggattcaggcatgagccactgcacccggcctgacacaagtaggatttctcacacctgtggatgcactgctactggaggagtcttgagcctatgtggaagaacttcccactcccaggcacagaaagggcctccctctggagtgaagattctggtggtaccacaggcctggccaccacacaaa

SEQ ID NO: 1561583 - DNA, 4001 bp, Homo sapiens
ttaactgtaaagcaactacaaagaaaaaagtaaattcattacaaaaaaacaagactttcaatgcttctgcgaagacataccttgtaggcctagtgtggtggctcacatctgtaattccagtgcgttgagaggctgaggtggaaagactgcttgaggccaggaagtagaagctgcagtgagccgagatcatgccactgctctccagcctaggcggcagagagagaccatgtccccccccaaaacaaaacagaacaaagccaaaaaaaacaccaaagacatatcttgtagtgacagtcagtcatttcttgccccatttctcccctcctttatgctctactccatcattgggaagaagagagttaccacaaataactggatcaagtcactgccctctggctaaataggaattccaaatatcttttgatacaaatacatacaaaatgcacaaggcttatagaaaaaactttggtgattttcatcctcatgagtacaacttaaacatatttcaaatcagagtataaagccacaaatcaatatattacaaccaccatccatatccaatcaactgtcacgcatctggatggggtcctctcccgctttcttcacggctatgtgtttccctctctcattctgagcgtcttttttttctccttttctgttttgcacccctttctttattccctcttttatgtctgttctgcccaatgctctgcaacttacttcacctctcgtagctctttctccccaatctttccgattgtccccaatctccacgtatttctgcctcttttcccccatctaagctccctctctgctctccttgttaaattccctcttccctgttacatctcctttgttcccactctctagcacccccaatttcctaggcttactccctgctgtggttctccctctactctgcttgtcacccactgccctctctccctctctttcagtcccagcaccacgtagctctgtcagccgcggctccaactctttcaccttctccccactgtctgtctgtctgcagtgcctcctcctttgccgccccactctattttgctgcccttcatctctctgaaggtcccctttttttctaaatttctctgtgtgcttttctccccctgctactttttccatccgttctctttcactcttgctctctttgcaagtccctaaagtatcatccattttgccgtgtatttatgggtctccctcattcttttctcctcagtttttccttttgctccgtcgttccccgtcttttcctctcctgatccctctcacccacacattcgggaggaaaggggaggaataggatgcccacctcccggaagagcacattttccagtggagtaaaatttgggaaggaagaacactgggtgtcacaagacagactcaggtaacctgtcccaacggggagtcaagaaaagcagtggctgtgaaggggaagcctggggagcggaaggacccggcgtgaggacgacacgaggtggcgcggagaacgatgtctcacgacagggagggtctgcagaatcccaggacgtgggaggagaagcggctccttcaggagccggacagtgggcgctcccctccaggggcagacgacggaggagctcggggatcgcgaagggcgctagtccacatcccgaatgaggactcgacttggcgcggggcccaagcagagggttttaagcgggaacactacctgaatggggttgtctacatggtcctaaggaagaaaggcagagagcaaggaacggcctcagagagattttaaaccgaaagggaagcaattctcctacttacttgggacgaaggggctgttgcgggtattttaaggtccgtagcgatccccaggtcacgggtatggagaaccgaggactgcgaagtgcacgtttaatcaaggtagacgaagagaagcaaacgtttaatccaggtagactgaaacacactcatagcgacgtggcctttccccagcgcgatctgcttccgggtgtgcaggaaactgggcgcggaaagaaaaactgggcggcctgggggcggggcctaggcggggcgcgactaggaaagggctgggcggaaagactggcctgacttgggagtggcccgaaagggtggtgggaggcccagggcggtagggggcgtgactaggtggggcttggctggaccgaaaactgggatgaagcggggcctccaggggtgggcggggccgaggcggggcctgttctccactccgcctctcacccagcaggattttgttttccaggtttgggagtatttgtgactatttcttgtcctgtgaagcagcgttgctccttgcccattttaaattaatgtttcagaatttaaggttgaatcttaaagttgtggtccacttatactggaaactaagatgatttattcttaacaagttgaactgatttaagtcaaaaccgatttttccgagcctggtggactccatccagtcttaccagaaaagctgaagctactcagtagtcagggaactgggatctcggtggggattggatgtggagcagtgactggatccaggaacccagaagacattatgccaagcgaaatgtgctagacacagtgtagaaaatgaaataagtagaggttcctcttcaaagggactttcctcccagtctaattgagaatagatagtaacctctcttagaagcaaaatttactcaaagacctgtgctaatattcttaaatatctgctagccataatagataaatcaatatactctgtgttcttagctcccacattttagcctagatatttgccctggcatgcctgaattgttccaagcaagcattaggtcacagcctattcctcttccttatttggaagtgtttttgcctctctcagccttccacaagttacttcctctcttcctttgttctcctctgcctttgcctcttttgggaagttctaaggtgctagccaatcaggtcaagcacagaattgggtccgattccagccaatggaaaccagacacagcagtagggtggacgcgtcaggttattattattattattttttttgagacggagtctcgttctttcgcccaggccggagtgcagtggcgctatctcggctcactgcaagctctgcctcctgggttcacgccattctcctgcctcagcctcccgagtagctgggactagaggcacctgccactgcgcccagctaattttttgtatttttagtagagacggggtttcactgcgttagccaggatggtctcgatctcctgacctcgtgatccgcccacctcggcctcccaaagtgctgggattacaggcatgagccaccgcgcccggccagatgcgtcaggttataaatgacccttctcttttgttcatgtgtactctcgtggcaagactgctagtgagcagcaccctttctgcagaaagtaaactagccttgctgagagatcctttgtctcagtgttgatttttgcgacactgagcacccgttcccaacacacacaaagaaacatacttcatgcacttacttacacgtgctaagtacaaacatcaaattcagagtaacaaagtagaagggtggtttccagggctgagggtgtttcctatgcctgtcccaccattgtattttggaagcagataacttctctggcttcacagattcacagctgggcagaaactttgcctcaggatgaaccacaccttgtgtctcacccatatgtgattcagataatatttaggtgatatttgggccttagagttgatactgaaatggattaagacttttcagatgggccaggcaaggtagcttaggcctgtaaccccaacaattcaggaggccgagtctggcagattacttgagctcaggagttcaagaccagcctgggcacatagcaagaaccccgtctctacagaagatataaaaattagccatgcttagtggcacactcctgtagtcccagctacttgggcggctgaagtggcaggatcacttaaggccaagg

SEQ ID NO: 1561584 - DNA, 4001 bp, Homo sapiens
tactaaaaacacaaaaaattagccgggcttggtggcaggcgcctgtagtcccagctactccggaggctgaggcaggagaatggcgtgaacccgggaggcagagcttgcagtgagccgagatcgcgtcactgcactccagtctgggcgacagagggagcctccgtcaacaacaacaacaaaaaaaaaaaaaaaaaaaaaaaagaagacatttatgttatagtttaaatgataatagctcttccttaaacactgccttcctaaagctaatgaaaaaccatgagtcggggcggggggaacagagtggggagcgatgaggagcctgaattttgctatggtatagactggtcccaagatacttctgcagataagtgttttcaggttttttgcttgtctgacacccatggctccactcaggcccaccaaccctgctcctctataagcaactcagcactcaggaggaccatttcccaccacctcttccccgattctgcctttgaaaaacccctggccgagttcggtggctcacacctgtaaacccagcactttggggggccgaggtgagcagatcgcttgagcccaggagttcaagaccagcctgggcaacatggcgaaaccccatctctaccaaaaatacaaaaattagccgcctgcgcctgtagtcccagctactcgggagggtgaggcagcacaatcacctgagctgctgctcaggtgggtccaggatgcagtgagccgtgatcgcgccatgcactccaacctgggcgacagagtgagaccttgtttaaaaaacaatttttagccgggccaggtggctcacgcctgtaatcctagccctttaggaggccgatgcgggcggatcacctgaggtcaggagttcaagaccaccttggccaacacggtgaaaccccgtctttactgaaaatacagaaatcagcagggcgtggtggcgtgcctgtaaccccagctactagggaagctgagcagaagaatcgcttgaatccgggaggcagaggttgcactgagcccagatcgtgtcattgcactccagcctgggcaaaaaagagcgagactctgtcttaaaaaaaaaaaaaaaaattgtaagaaaaaaatattaaagaaaaatccctaactataagccttcggggagactgatttgagtgctaactctgtctccgtcttcggcgttgcgtggtccatctcgtgtcaaacattttctttactgcaatgccctggtctttctttttgcagcacaggcaggaagaacccctcaggcgattacaacaacaaagcatctagtacacattgatcatgatgtgaacaaaaacacgacagcagttgccaagctctaagccacagacagcagggaaaacatttatccgctgtcacaagttctccacgctaggccaggcgcggtggctcacgcctctattcccagcaccgggcctgtttaagttttaacaggagaaagggggcactgagggcctcacagcgcagctcctcccgcacgagccccacacccaaggcgggattgcccccatgaccctcccgtggccccgcacaatatggagaggctccgggctgcgggcgcggagctgtccagagagggctcccgggctggggccgcagtcgccgcgcggcgacgagacagggcgcccaggggtcccggctgccggcccagccgcacccggcggccgaatggaccgaaggccgagctgcgccagcggggctcgggccccagacctcgagtcgccgcggggaggtccgggtcccggcacagccggttccagccagttccaaccagcctccgcctaccctcccccaagtctcgggactcccagcgggggctcacactcaccatttcctggctttcaggtgactcccacgtccaaagcagtcacaacacagacgacagggcgacagaagtatggcggtggcaaccggtccctctcagagcaggaaaaacggggtgccaacctcacccggcgggaggggccaaagactgaggcgaacggcaatgtgacccgcggataaacagttggccgggccccaccccggcgactctgattgggtggagcgccaggccccgccccctgcatcctgagtgacagcagaagtcctgggtaacagggccaagcagagcaggactgaccgcttcaagccacagtccaaggtcaagttccctctctacgccctgctctttgaaaatttgcatttcggccaaacttgctcgtcttaattactagaagtggctctgtcaatggtctgtccctgcttcttcgtcctgcacagtgtcataagtgtgtgcagggagttccagactctatgtttaatagaggtgaaagcaattaaaatattttattccaaaatatatttatttggcaatttcgaatggctgcagctttgcccttgcacaactgtcttctggggggtgaaatttgcgtctatggagtatttccattagtgaagccatgccccctctccccttttccctttccctgatccgggagaaattgagagtctgacacttttaaaagtctggaaagccgggcgcggcggctcacgcctgtaatttcagcactttgggaggccgaggcgggtatatcacctgtggtcgggagttcgagaccagcctggccaacatggtgaaaccacatctctactaaaatacaaaatattagccagtcgtggtggcggacgcctgtaatcctagctatgtgggaggctgaggcaggagaatcacttgaagctgggaggcggaggttgcagtgagccgagatcatgccactggactccagcctgggcaacaagaatgaaactccgtctcaaaaaaaacaaaaacaaaaaaagtctggaaagaggccaggcaaggtggctggggcctgtaataccagcactttaggaggccagggcaggagaatcactttggcccaggagtcgagggctgcagtgagctgtgattgcaccagtacactccagcctgggcaacagagtgagaccaaaaaacaaaataagtaagaaattctggttttgcttttttttttttttttttttgagatggtgtcttgctctgttgcccaggctggagtgagtgacgcgatctcggctcaccgcaagctccgcctcccgggttcacgccattctcctgtctcagcctcccgagtagctgggaccacaggcgcctgccaccatgcctggctaattttttgtgcttttagtagagacggggtttcaccgtgttagccacgatggtctcgatctcctgacctcgtgatccgcccgtctcggcctcccaaagtgctgggattacaggcgtgagcaaccgtgcccggccagaaattcttaaaagaagcattttgcatccattctctctgtgggagtcttcatctatgttgtgggtgagtggctactatctgggccagtggcgcaagggtaaaagaatttatcaagactggccgggcgatgtggctcacacctgtaatcccagcactttgggagaccgaggcgggcggatcacctgaggtcaggagtttgaaaccagcctggccaatgtggcgaaaccccatctctactaaaaatacaaaaattagccgggcttggtggtgggcgcctgtaatcccaactacccaggaggctgaggcaggagaatcgctggagaatcgggaggcaaaggctgcagtgagtcgagattgtgccactgcactccagcctgggcaacagagcaagactccatctcaaaaaaaaaaaaaaaaaaaaaaagggatttaccaagacagttgtaggtaaaaaaaaaaaaaaaaaaaaaaaaaaaggcagatttattaaggaaaatatgaaagtaccttgcaagaaggcaacaggcagaaccagcagaagggagccggctgcaaagaaacaaaggtttgctagagattttatagaatgcaacttgggaacttgcattgttttgtcacctgaaatgtttgataaatcaaggtttttgatggtaagcaagaaatttgtga

SEQ ID NO: 1561585 - DNA, 4001 bp, Homo sapiens
atgcctgtaatcccagctacttgggaggctgaggcagtagaatcagtctgaacctgggaagcggaaattgcagcgagccgagattgtgccattgcactccatcctggacaagagtgagattccatctcaaaaaaacaaaaacaaaaacaaaaacaaaaaacaaaaaacgactatgtaggccaggcacggtggctcctctctgtaattccacctgtaatcccagtaatttgggaggccaaggcaggacgatcctttgaggccagaattgagaccagcctgggaaacagtgaaaccccatttctacaaaaaaaaaatacaaaacctagccggacttggtggctcacgcctgtggtcccagctactcaggaggctgaggtaagaggatcgcttgagcctaggaggtcgaggctgcagttagaggagatcacaccactgcaccccagcctgggcgacagagccagaccctgtctcaaactataaattaattaattaaattaaaattattacataataacagaaagtgatttttttctcccacttcactgccccatttcctacctcaccatgggaagagggaagagaggctctcacaattgaattaagtcactaccctctggctgaatagggattccaagtggaagctgacctctaatgccaagatttacagaatgtatgtgtcttatagataggaattttaaaattctcaatatcatctgtataatttaaacaagttctaagttattagattatataaacagaagtcaacatatcacaactaatcatatccaatgaactcacccactcatctgaacccaaagtcccccaccccttttaatcttttgagacaggctctgctctgttgaccaggctggagtgcagtggcatgatctctgctcactgcagcctggacctcctgggctcaagtgatcctcctgcctcagcctccagagcagctgggattacaggtgtgcaccatcacgcccagttaaattttttttttttttgacagagatgggggggggggtctcactattttgcccaggccggtcttgaactcctggactcaagcaatccctctgccccagtctcctaaagtgctaggattacaggcgtgagccactgcgcccagcccccctttcttcattactgtgcttccctccctaattctgtacatatctctcattctccccttctctctctagctcttgttttctttttccctgggatctgctcctcctgctgttttttgttttgttttgtttttttcatttttgctctctcttggcaaatccctcactcatcctctactttgccatctgttatggtctttctcattcttcttttctctgtctcaggttttctactgctctctctctcagtctcctgatccctttggccaacacaatcacaggagggctttggagtaagacgcctgcatcccggaggagcgcattttccaggggctggtgcagggcaggcaagaacacccggtgtcataggacagccccgggcacctccccaacgcgggctcagggtaagcggtgactgcggtggggagacctggggagcataagggcctggaacgaggagggaggtggggggcgacggcgccttaagacaagactgggaggcgccaagggcgggaatccgcctcgcggtaaggactttaaaaagtgcgggtcgggaggagtcagaaaaaggttttgagcagggaaactacgcgatgggaagtgtatacattgccctatagcagaaagattcgggaagggaccatcctcagggcgactttaaacccaaaaggaagcgacccctggactctgacgaggacgtctaaatttgctctaggtgaaggaacacgggtgagaatttccaggtctatggggaccccacgtcccaggtacagaagcgccggggacttgggaagcgcagacttaacacaacacagagcaaaactcaccgctgcggtgggaccatcactccatgcgatccgcttccgggtttgcgcgaatctgcgcgcgcaggacagaagccaggcctgggcgggacccgcggggaggtaggcggggcctgagcgaggtaggggcggggcgcgaagcggagagaccttcccctttagaattggcagaaggcggggccggggtgggacccgtgcgtctctcaacctcgctcccagcgcctcttgttttcgagctttggaggcgagaccggacaggaaggctgaggcatgattcaaaagccctggaattgtctgaaacggggatgcaaactagaatgtgaaatgcaaagccctgcctgggtggaacatacgatttcatgctgacggcccacagaacagaatagaaatcctctccctttctattctccattcactgggaaaggagagtccaccctgtcctcagcttcagagatttccctagggcctccccctgggatgcgggacggagtgctcaggccagggaggagtgaggtcaccacctactgcttaaacacagcagagatgcgggcgcggggcgaaagcctgaggtcccagctactcaggaagcagtggcaggaggatcgctgagccggggggggggtccaagttagcctgggcgacaaagtaacacctcctccggcagcgctcccttcctcgtctctctctctctccttttttaaaatttctttaaataaaatttttgattttgtgagttagggatccaacattattcattttcacgtggatatccagttagttgtcccagcacatttgtggaagagatctattactttcatttttatatttagatttttcttttcttttcttttcttttttgagacagagtatttctctgtcacccaggctggagtgcagtggcgagatctcggctcactgcaaccttcacctcccgggttaaagtagttctcttgcctcagcctgccaactagctgggattacagacgcgcgccaccaagcctggctaatagttttgtatttttagtagagactgggtttcacaacgttggccaggctggattcgaactcctgacgtcaagtgatccacctgcttcggactcccaaagtgttgggattacaggcgttagccaccgcgtctggccaggaaaactcttagaagttgcgcctgcataccactggactcagcttgcatgaccacattcctttcaaggctcagaattatttaaagatccatacatttacattggaattatttgatgtttgaaatatttaatttcctaccgagatacgggtactgtctcccttgttctttgcctttcaaagagagaccccaagtccttcagaaatacatccatgggggttattaagctgaaaaaaggattacgtggtttctaaaaaataccacttcaggccagcgcggtggctcacgcctgtaatcccaccactttggaaggccgaggcgggcggatcactggaggtcaggagttcaaccccagcctgctatcttaaaagaatacgctgtcatgggatattgggtcatctggacattgtgtttctgtaggagtttgtccttgcaggtatcaataagctgctttccttaaccgtaaacatcttataaccgtgactcgtgagtgagcagtaaggaatacatcttgctatttgttttttttgtttgtttgtttttttgagacagagtcttgctctgtcgcccaggctggagtgcagtggcgcgatctcggctcactgcaacctccgcctcccgggttcaagcaattctcctgcctcaacctcctgagtagctgggactacaggcgcccgccaccacgcccagctattttttttgtatttttagtagagacggggtttcaccatattgatcaggctggtctcgaacccctgacctcgtgatccacctgcctcagcctcccaaagtgctgggattataggcgtgagccaccgcgcccggcctacgtcttgctagttttaatggacttgaactttgacaccctagctctcctaggttcctgcttaacagtttgtccactca

SEQ ID NO: 1561586 - DNA, 4001 bp, Homo sapiens
actaaaaatacaaaaattagctgggcatggtggcatgcacctgtagttccagctactcgggaggccaaggcaggagaagcacttgaacccgggaggtggaggttgcagtgagccgagatcatgccactgcactccagcctggcaacagagcaagactctgtctcaaaaaaaaaaaaaaaaaagtgttctcttcagcaatgcatgcacatcttaaagaagacttgatattgtcactgactttagttatgcttttatttatttatttttttttttgtagagatggggtctcactatgttgtcccagcttgtctcaaactcatagcttcagtggctcctcctgcttctgcttcccaaagtgctgggattacaggggtgagccactgtgcccggcctagttttatttatttatttatttatttagacggtgttttgctcttgttgcccaggctgtagtgcattgccacgatctcagctcaccacaacctctgcctcccgggttcaagcgattctcctgcctcagcctcccgagtagctaagattacaggcatgccccaccacacctggctaattttgtatttttagtagagacagggtttctccatgttggtcgggctggtctggaactcccaacctcaggtgaaccgcccacctcggcctcccaaagtgccaggattacaggtgtttaagttaccgcacccggccaatacacattgatctacacaagagatgcaaagaaacagaaaacatgcaaaatattaacaaatgatcagtctacaacaaggatatataataggtgttcaatattctggcctttcacattttctttggtttagaatattcaatctacagatagcctgggcaacaaaccaagaccctgtctttaaaacgtaaataaataaataaaaatatatgagggggaaggccaggcgcggtggcttatacctgtaattccagcactttgggagtccgaggagggtggatcacgaggtcaggagttcgagaccagcccaaccaacatggtgaaaccccgtctctactaaaaatgcaaaattagccgggcgtggtggcacatgcctgtaatcccagttactcagcatgctgaggcaggagaatcgcttggaccgggagacagagtttacagtgagcctatatcacgccattgcactccagcctgggcaataagagcgaaactccgtctcaaaatatgtatatatacgagaggaaaaacgctgaatcaaaacatgtctctttcacagttaatacaactgtaatttctgatactggtataatgaaggcggcatcctacttcctggaagcccctccgttttgaagctctttgggaggtactgacctaggaagttcagctgcttttgatctcaaaaacacagcggagtattgctactttgctttataactgtggcaatatttgcttttatttctataaacctacaactcctgcacacttgacaaagcatttaactgctgagcaatttcgcaaacttcaataagcgatgccctcccacagccagatcatctcctccgtccagggctcaccggaacgcactgcaatcgccctgtcggtgacaagaggacgctggggcccttttccacaacagctgagatgcttttccttctggagaaaggacacaaaggttgactggctgcttttaaacagaggggcacggtggttggagaaaaaaacacgtctccaccggggaccctgggccaggcccagactgatgcgggcgcagcgggaagaggcgctcagaagagaaggcgggaaccccccgcctcggggtcctggcggggaggaggcgccgcttctccggagcagcagcgggaggccggcgcgtctcagacctagcagaagtccggagcgtcaccctccgaccctcgctccgcctcccgctaggccctcctgccccgccctgcctaggttgagcatgagcgctggctgaggtgaaaacccagctaggaagctgctggagagcggggaatacgtatagctgcgcgccggctggcacttccgcttccggttgcgcacggcattaagtgtaggggccgagccccaagagctttggaatgaggatgatgtgaagctgagagaagagctggggccacctcttcgacacgcgtacagaaaagtcccgttttctcgcatcccaggtggaccaggatccagatcaatctgtcgatattgggaacgacgccggaccaggaaacccagcgccaagggccgggttggaggcggggactggcgcagcgggcggggcacgcgtggaggcgtcacctaaggcttcgattgcagacagcgggatgctcatcgagtgcttttcttttcttttttaatttctctttttagttttttgagataaggctccggtctgtcgcctaggctggagtgcagtggctcggtcatagatcattgcagcctggaattcctgcgctgaagctatcctcccgcctcggcctccggagtagcttggaccacagttgggcccatcacgcccagctaagttatctttttctagacacttgggtctcactgtgttccctaggctggtctcgaactcctgagcctaaaggatcctcccccctcggcctcccaagcagcttggaccacaggtgtgtgccaccacgcctggctaatttatttttattttatttttatttttttgtagagacagggtctctctttgttacccaggctgatctggaactcctgggctccagtgatccttccaccttggcctcccaaagtgctgggattataggcgtgagccaccaccctagggaaattcttttctgcaggattttctccttgtttcttcaaccctctgcagggatataaacatatttacaaagataatcccgctgtagtcctagctactgcgggagaatcgcttgagcccaggagttcgagaccagcgacaccctgtttgaaagattaacctgatggggctgggggcagtggctcacgcctgtaatcccagcactttgggaagccgaggcgggtggaacacgtgagttcaggagttcgagaccagcctggccaacatgccgaaaccccatctctactaaaaatattttttaaaaaatagccgggtgtggtggtgggcgcctgtaatcccagctactcgagaggctgaggcaggagaattgcttgaacctaggagactgaggttgcagtgagctgatacgatgccacagtactccagcctgggcgacagagtgagactccgtctcaaaaaaaaaaaaaaaaagattaacctgttaatccataaaatgctctgtgcctctgatacattcagttccttctttaggcctttagttttgttgtgatacaattatcatagcatacaattaacctgtttaaagtgtacagtttcgtggctttttgtatattcatatatttgtgcatcgatcatcacaatcaattttagaacattttcatgaccacaaaaataaacccagtaccctagccatgatcacccaatctgctcatccagccccacccccacccccagagtccaaagcaacagctaatctttctgtctgtatagattgcctactgtagatattgcctgtagaattagaatataaaacacgtggtgtttggcttgtttcattcaatgttttcaaggttcatccaattagcatgtatcagtacttaatttttttttactaaataagattccattgtatggctgtatcataacatcagttgttggatattgggttttctcttttttttttttttttggcttttttggataatacaagacgcattttaagcagtggtcaaaggaacattcatattcctaaacacttttgtcaataaaaataagaatagctgggtgcagtggctcacacctgtaatcccagcattttgggaggccgaggcaggcggatcacctgaggacaggagtttaagaccagcctggccaacatggtgaaacacggtctctactaaaaaatacaaaaaccagcagggcgtggtg

SEQ ID NO: 1561587 - DNA, 4001 bp, Homo sapiens
aattcctgacctcgcgatccgcccgcctcggcctcacaaagtgctgggattacaggtgtgagccaccgcgcccagctgggtgaagtcaattttaatgtctcaaggagttagcttttcaaaggaagagtacaccaggagactgcactcagaccctgggtatctacctgctcccttgataggatacacttcatacctcaggttgtcctatgagagaaaatgacccaggagctgatattcactagacactctagccaacatagccacaatggtgggcatcctggtttatccccatacagtactgaaaacccaggaccaggaaaaaactgaagagtggctgatgacccatcacaccataaagtctccaaacggaaaccttgacccaccaatattctgataagaactctgtgcctagggaagataaaaggaaaagagacacagagatttttttacaatatggtgtcagggattattattcactttcttctcatgggaaatatttacaaacagaagacaattttttaaatagtgccatccaatgttttgtggaagaattattaattgaaatataaaatgtacaataaaggacaaataattgataatgtgtatcagagaggggaaggtggcatttgggaatgtcaatgacactggaaatttagtattttactgtaaatcagagttaatctggaagaacagggagtaagaagtagacttgagaccctgcttgagacatatgtgaaaaatgcaggggaaaagaagtcccctgtggactgtgaaaatgattcagtggcaggcaattagactgaggtggctctagtccctggggtcctcctttttaaaaaaatctaactaaaatttcattttttagtaaattaccacatcggggaaaacaaaattcaggcttaaccaactataaactgccaattaaattctgatcacataaccagaaaattgccaacacgatcgtacaaattaagagactatataactgtacctaaccaattactaatttgatttttttatcatgcaccttataaaagtcttttattcaagctcctcccatggaccacaaactacaaaccatagctgagtgctctacaatacttgaaccactttttaagttctttaatatttttgcggtgactcctatacatcttttttttttttttttgagacggagtttcactcttattgcccaggctggagtgcagtggcgcgatgtaggctcactgcaacctccgcctcccgggttcaagcgattctcctgcctcaaactcctgagtagctgggattgcaggcgcgcgccacgacgcccggctaatttttgtatttttaaaaattgagacggggtttcaccatgttggccaggatggtcttgaactcctgacctcagatgatccgcccgcctcggcttcccaaagtgctgaaattacaggcgtgagccaccacgcccgtccccccatacatttttaacagaaaaaaagaggaactgggaaccccacagcccaaagctctttcatgaacccgcaccccgagtcaggattctcccctgacaaccctcccgtggtccctgctcaatctgggagagacgcggtgctgcgaatgcagagctgcccagagagggctccagtccagggcacagtcactgcgcagggaagagacaggacgcccgggccggctgtcagcgcagccgccatcttatggctggaggaactggggccgagctgggcaaaaagaactggagcgcagattgtggagctgactacagggaggcctgagtcccgccacagccgcttcccaccggtttcaaccaacccctttccccctcgggatggcggacctggcactctcaccatttctaggcttccagggggtcccggcgtcttagctgtggatctcccaatacctgcaggccacagggccacagaggctgggcgtccacgagcagaaaacacaaagcagggaaaacaagacctagagctcaggctgcagcgagagacaaaggccccgccacatcccggaagccgccctatccgcaccagctgcgttcctgattggacggttcccagcccagcgtctctgattggatgatatttaaggcaccttcttttcaggccctgagtgacagaagatgtgatcagatgctgggctgaaagaagagcgagtgacagcctaggctgcagccttttcagacagggcttccttcctgagctgagccaggctcacaccagagagtatttgcccttaccttgtgtatcaatttatatgcattcaaaaataatatattatatggctattcacaaatgaacaaagtataacaacaattgttctaaaattttagattttatgaccttcctgtattctggtcctttgaacaggcaatcctctgaaataaaatgtgagtcacaggtgaattttaaattttctagtagccaaactttaaaaagaaagaagaaacaagtggaattgattgtagcaatttatttaacccaatatattcaaaatattttcattttaatatgtgagcaatatgtaattattaatgaaatataaatacatttgaaacaaaatctttgaaactaattctgtattttacctttctagcacatcgcagttcagaccagccacattccaggcacccaggagccacacatggccaatagctgccacattgaagtacagctgtgatgtcagtgggggtggagggcctgaacaccccttttctgccacaggtgaggggacagcctctatttatcaacgtctcttttcagttccgagggtgaaacaaatagtggctatagaaaaagctgatggcagcaggaataaatcacaggtaaaccactgcttaccacctgttgcccatctttctttcagagatcagacagtgagcaaaggatgatgggccacaggagaaaaaaaactatgtcttcagatctgttcacagtcttgacctttaatgtttacataggaagaaaatagattaaaggcaaacttattttgctatttgacctcgactctaatgttcaggctgtggttacctgttttcttctgtggtgtgggaaactgagtgaatataagcacaatcacatgcatacatgtccacatgtatttcggcatttcttttttttgagatggagtttcactcttgttgcccaggctaaagcgcaatggtgtggtcttggctcactgcaacctctgcctcctgggttcaagcaattctcctacctcagcctcccgagtagctgggattacaggcatgcactaccacgcccggctaattttttgtacttttagtagagacgggatttctccatgttggtcaggctggtcttgaactcctgaccttaggtgatccaaccgccttggcctcctaaagtgctgggattataggcataagccaccacccctggccatatttctgcatttctcaacattatcttacaagacatctaactttaaatcgggaaaaatatcagtacttttatggtgcccaatgttagaaggtaactagtaatcaacctgttattaaatcttggcattctatctgcactgggtgcacatattagttaactatggcagcataatgaaccatccaaaactgatttgctcataattgaaatgctcagccatttaggctgggctcagtggggccattcttctgttctcagctgagctccttcagacatgtatcatgagctgctcattgactaggaaagcagcagctgtgcttgtagaggtgagcttctgcttctgggactgtcaacagggataccttacttctcctcttcatagtatcttatactccagttggctaatatgggcttttttcttttctttttttgagacggagtctcgttctgtcgcccaggctggagtgcagtggtgcgatctctgctcactgcaagctccacctcctaggttcaagtgattctcatgcctcagccccctgagtagctgggactacaggtgcccaccaccacacccggttaatttttttgtatttt

SEQ ID NO: 1561588 - DNA, 4001 bp, Homo sapiens
agaaaatcacagaaccgtatgagtatttaattcaatacagacatggaaactggcccaagcatttactcacagatgactgggcaaatccctggtgttattggtacaaactattgatcgagcccccaatctcattcctacccctaaaatatagcaaagtgaaagatcttatcacttatttggactgagattaacaccatcccataaactgcatggctttcaatcccagggctatggcgtgtgatgccacatagaatatgcactaatctctgcagcaattgagttgttagggtaaaggctcttgtttttgccttctttctctcacggccaagaaaattaaggaacagggacacaaaggatgaggtcggagcggaagtttaataagcaaaagaagaaagctctccccagcggagggacccaaaagagggttgccaactaggaggctgaatctgggggggtttattaactgggaaggggaggaacgtgggctgtcttgaagaaagcactacccagcttggccctgggaccttagcccgggaccaatcccaggctgaagtgaaagtttggcccaggaccaatcaggggctgaagtgaaagtttggcccgggaccaatcaggggctgaagtgaaagtttggcccgggaccaatcaggagctgaagtgaaagtttggcccgggaccaattaggggctgaagtgaaagtttggcccgggaccaatcaggagctgaagtgaaagtttgggccgggaccaatcaggagctgaagtgaaagtttggcccgggaccaatcaggggctgaagtgaaagcttggcccgggaccaatgagggggtgaagttatgattcaaagaggccgcgctcacagtctaaagcatgtccaaaaaaggaaagtggccgccggaacctgttagtccaagctgcaccgtttcgtaagcccccaccatttcacagaccctggtcagagggaaacattccacccgggtttgggctgtgcgaaacatccttcccaaccgcctgacttccttatcacatcctgctgggcaaaagcccaagaaacatccttatcaactttctcccaggcaacaagccataccgcccagacccctcctgcccaggcctgtaattaccccagcctggaagcggcagtgggctctggcatttagttggtccccgccatagagccgccaactctctctctttctttaaccctcgccttcccttcaaaatctaacagagcccaccgtgtacatgcccacaaaagaagcgactatttcgtggaagcccgctggtcacacaaaggacaaaggcgtttctatgttgggcctcggtcccttatcagtgcagctgaggaatgtcttcaggacaacccccctgtggagttttccttatgtatgcctgcagcctgatttttcaggctgtttctctgtttaaaggacttttaccaaggtcccaccctaactgcctaaagagttttttctctcaaggggacacacaaagtcccaatcgcacacatgcctccgcatatccacttacccactgcctcacagccaatcacactctcctctctcacatacaccaaggggccacacaagttgcacttgcacagccacagacctgcaactcacgcacacaaggtactgcacagacacgcaaagtcacacacccaccccgggacacgcagtccaaccacacagtcaccggttcttcacatccgcacgcacaacgagggtcgtccaggacacacacacccactccgggcgcgcacagtcacaagcgcccacctgatcacccagagtcagcaccacacagccacagtcacagaccacggagacccacggcagccatcgcgatcacacacgcaaactcctctcctcagccctccacacacaaaaggaccggagccggattcctcaccctcagcattctctggttccgctcggggccagcctagccaagttcctcaggactccaaggcgcggcggcagctaaatcggcacagcaaacggtcccgccacctggctaagaggaagccaaaatctcgcgagacgtggcgtcggcctgcgggatcctctgggaaatgtagtccagagcccgactgcgggcttccctatgcctctcatttccaagcctggcttgtttccttttaccgctcctctccaacgaggatcgcagagccctcatgccgagcggctcgctatggggccggctcgcccgctagagtggtcaggcctgattatccctggcagctctgttatctggggtaagacacaggaaaacgtgcttccggttctcggcggaagtagccccgaacggtagaaccgatgggaaatgtagtccagggcagaaaagcggtcaacccagccacgatgcgagccaaaggattcttggctccaagcctggtcctggctgttagtttggaactcatgcacccagatgctaactcgccctcagaatgcagaggggatgaaacactgaccggacaattcaatctgtatatgggtgagtccagggctcagtctgcattgcgcggaaaatgaaggtgaaggtggaggtgggacctgatggtctcgtcccggatagggttgaagaagtgggagaaaaggaatcaaaatcgtggatgggataagattgtgcgcgaatgctctctgggagcggatcgtggccgacgagggcccgaagatgctgccttgtgatcgcaggtgtgagtggaagctgtgtgagtgtcaatgtgagttgcctgtttgggagaccagcattgtatttttgtatcaggtagtaaccttggagccaggtatttgtaaaattatgataagagggcatcattctggagcatcgattttatttggaggttgacaggagagggaaaaaaacccctaatatctgataaacaacataaatagatttttatgttaaagtagttatatttattacggtctagaatgcaaatccaacatggcttttaaagcaagaaagattttttttatacaaagtcaaaggtattatttttatacacttactacaaaacatacaaatagtataccaagcctaagaatataaagagtctagctttaattaattgaatgtaaatttaaaaacaagcatctaataagtagtccttttcacacatcgaaaagccaatttcggaatttttttaaaaactcaaattacaaagtaacaaatatctggtgtcttagtaacttgaagatcagtactaatgattaagccagcttatatgctaatatgatacatgaaaaagcctgtatttcacaaatagcaaaccactaaaactttaattttccacagaagccattgtttcacaccaataattatgttaaagatcaagacaggctaaaagtttttaatgagcactgaatccattaaaacttggcaaatttttccacgaaggtagaattttaatttctgtttaaaccatgggtagatggtacacccttgtgagggtgtactgtaagtacttctaaggagctttatcagacttcatcccaaattatgtacctagtaaaagatgtaccaatgtctactttggaataagaaattattccttgtttgagcaaggattaagcagaaactgaaagaagtgtagtttatagcttcttacataaagtagatgggcacccctcaaaaacaaaccaatatcctggctccttaaatatcaacattaatctaaataatgtatagcatgctcctgtccaatctttcccgctcatttgtagtcttctcagatcgatgcttcattttagtcacacatttctatcctgcaagactgggtacctgggctttttgtctggttttgtaacactaggcagttttggccttactcaaaatataagactgcaaaaggcctgttttacctcaaccatacggcttcaggaaatggtctgtatttccaacagaaaagtggtatctaactctcaggatggtttctaacaactggatagatacctgggtctttgcggcctgtgatgcagcctaacaatacaggacctt

SEQ ID NO: 1561589 - DNA, 4001 bp, Homo sapiens
tgcccgaggccccgggcccacaggcccccggtgtgccttgggtggaggggaggccggctgccccggccagggcgcagggcagctggagccggtgcacctggcggtggcgggtgaggctctgcgggtagccgaagaccttgccgcagagctcgcacttgtagggccgctcgcgcgtgtgcaccacgtgatgcttgctcaagtggaaggattcgcggaagcgcttcccacacacggggcactggtggggcttctcgcccgtgtggatgcgctcatggcgcttcagggtctcgcggcgcccgaagccgcgcccgcagatgccgcagcagaacgtctttcctgggacgctggcgcccgagcctcccgccccgctggtccccgcgccgccgagcagcagcgggtgggcgcccaggagcgggacgggcacagcgccgtacaccaccgccgccgcggccgccgccgccttctcgctgtctgtggtgggagggtcggggggcaggaggtacgggcccggggggaaggtgggcgggggctgcggggccgaggccgccccgtccttgggcgcctccgcagcggcagcgggcggggcgtgggcggccttgtggcggagcaggctctgcggagccgagtaggacttgccgcacaggtcgcaggggtacacgggccgaggccccccggcgcccgcccccgcgtgggccgcctggtgcttgaggaggtaggaggcgtcgcggaaggccttcccgcagatgccgcagggcaggcgcaggaggtcggccgagtgcgtcttcacgtggcgcttcagactctccctgcggttgaagcttttgctgcacacggagcaggagaagggcttctcgcccgtgtggatgatctggtgctggtggaggtgactgggcttcttgaaaaccttccagcagagtgggcaggcgaacgggccatcgccacccccggtggcaggagggggcaccccaacaccagcaggggcggcgctcccgtctgcggagggggcaggcgccacgggcgtggctggagggcccgaggacaccgtggagggggcggcggcggtggcggcgctggcagcgggtgctgggaggcccagcggcgggaggtgggggccgggctggggcgggccccccgcggccggtggcacgtccttgtggcagcggcggtggcggatgaggctggacacgtggttgtaggtgcggccgcagacgccgcattcgtagggcctctcccccgagtgcaccagcatgtgctggaccaggtgcgaggactgcttgaaggacttctggcacacgccgcaggggaagcgccgctccatcaggtacttcagtctccggaagtagcccttgtcgtccttggtggggtcgcaggccgccgccgcggggggtcctggcggggtctgcgagggggcaggaagcggccctggggcccccgcgggagcgcccagcccaggcgtcacccccggcccggacgcgggccctcctcgcttcaggttcccaaacaagtgctggtgccccgagaggtccacgatgccccactgcggagtggggaaagcagcgtcaaagaggggaggagggggcgccccgaaggcgggcggcaggggcggatcgggcttcttggcttgggaagaggaagaggacgaagatgacgacgaggaggacgaagaggaggaggaggaggacgaggacgaggacgaggagggcacctccgccttgggcttgaaggtggactggggcgggtagtcatactgcgggggagggggctgcggcgggggctgcggcggggggccgggggcgcagggcagggccgccaccgccttggcgtgttccccatacagttccatgggctcgaagcgctggtggttgaggaattccaggaagtcgaaggggtagctctggaagtgcaccccgtcctcgcccccgatgccgctgctcccgccacccccggcgccgctgcccgctgggttcgcctccatctccggcgggtgggagacgggagaccctgtgaagaggaggacggggctgaggacacggccgcggcgctgggtctccccgcaggtgaatggagctgtgcgcccactcatccatccttgtgcggatcaccccctagccttccagatttaggcttccagtccctctgcctgtccaccccaaagggcagcccttcctcttggctccctggccccaggactctcctactcaccttcaccttccctctctgtgttctcaactcccacccactccccacctcttttccttctctaattccttccatctctccccatcttttctggggtcctgacacagctttgtagaggggaccctctcctccacaccacctgcaggccctctattatttgtagaaacggggttttgctttgttgcccaggctggtctgaaactcctggactcacgccatcctccagcctccacctcccaaagtgctgggtgattacagatgtgagccagcgcgctggcctgggccgtctctactttctctccttttcagactccaattgtccaagcatcctgggggcctctggactcagttttctttccaaaccctctcagaccctctgctgtctctccatactcctgcaccctaccccacccacagccctccgtcctcatcccttcaggttttatcctaaaatgagcataatgataaggggaatcacagtttctatcagcgtaattaggagggaggactctggggccagaatcaaatgtaagccctgccacttctagctgtgtggccacgggcaagtgactgaacctctctgtgcctccatttcctcatctacacctggggaccacaaagcacatgcctacctcacaggactgtgaggattcaacacacacatatgtgcaaggctcttagggggcggttcctggcactctgtaagcactccgtacatagaaggtatggactgggcacagtggctgacagctgtcatcccagcactttgggaggctgaggcaggagagctgcttgagcccgggaggtgaaggctacaatgagctgtgatcacatcactgtactccagcctgggtgacagagcaagaccttggctctaaaaactaaaattaaaaaattgaagatacgatactgttatcactgttactactagtagtagaaatggggaagtcaggacaagcctagagaactgaaaaaagtcagtatggggagtgcactcttttaatattaatagacagtagaaaggagaatttgcttgcctgggagaaacaaattccagcaagggggctggcatatagtcagaaggtggtctgatacaatcaaaacacagaccctgggcttggacagacctgggttcaaatcccatctccactgggatccacactttctccatgtttaaaatgggggaacccctataccgcagggagattcaacagggttggaacagaacataatgaaacacatgcatcagcagaatgcattcaaccccctgagctatttgtaccatccatgacatcacacacctgggctaagcctagcaacagaagcagggagcttgagttccatccttgcccttagtggggcttctcctgacccccccatgtccttgcccttagtggggcttctcctgaccctccacccccggcatcattctctggcacctcctttacacgacttttcattccagatggcaggtatccatgtgtgtaccccacaccacaccagaccctcagcacccgtaactgatctccgagttcttggtctacttgctggcctggggaagcacctccaccaagtgggcggagggtgagtcggtgaagggcccatgaggtctgacccgcttcctgtccatcatccctacccgatgggggccaggctctaagcccagcccgctatgggggtcaagggggttcctaccaaggcctggaccctttatcctctatccatcgggctgctctctcctcccacaggtgaggggtgagtgtctcttccacccccaccccaaacgccatcctggagtgaga

SEQ ID NO: 1561590 - DNA, 4001 bp, Homo sapiens
cgcctgtagtcccagctacttgggaggctgaggcaggacaatggcgtgaacccgggaggcggagcttgcagtgagcagagatcgcgccactgcactccagcctgggtgacagagtgagactccgtctcaaaaaaaaaaaaaaaaaaaaaaagaaaagaaaagaaattaaaaccccttgcaaagaaaattttaaagtcctgggccgggcgcggtggctcacgcctgtaatctgatacaggagaatcgcttgaaccggggaggcggaggttgcagtgagccgagattgcgccattgcactccagtctcggcaacaagagcgaaactccgtctcaaacaaacaaacaaaaaaacctgtaactaaattgtataattaatttagttgtactaattagttgtattaaattaattgtacaattaatttagttgtactaattgttgcgataattaaatttctttgttttttgcctatataagaaggagcttaactttttttttttgagacagtctcattctttcaccatggctggagtgcagtggggcattccactgtaatcccagcactttgggaggccgaggagggtggatcacgaggtcaggagttcgagaccagcctggccaatatcatgaaaccccgtctctactaaaaatacaaaaattggccgggcgcagtggctcacgcctgtaatcccagtaccttgggaggccgaagtgggcggatcacaaagtcaggaggagttcaagaccagcctggccaatatggtgaaacccgtttctactaaaaatacaaaaattagccgggcgtggtggctggcgcctgtagtcccagctactcgggaggctgaggcaagagaatcgcttgaacccgggaggcggaggttgcagtgagccgagatggcgccacagcacttcagcctggggcgacggagcgagactccgtctcaaaaatataaaaatctggtaaaataaaaacaggtcttttggggaagggggcggggactgggatggaataacgtggcagataacagccctccttcctacagcctccaaattttagacaaagctttacacactctcaaccaactgccacctacagaatccctccaccacctgtgccttctaaccccgcttccatgtgtcccgcctttcggccaaaggaacttacaccttcccggcactgattcatcattttcctgcaattcctgtctccctgaaatgaataaaaccaaactgtcaggagctgcctcgggattgcttactccagacttcgcggggttgtgtttccctcagccgaggtctctcctattcggctcagaataaacttattctacacgatttgggtttttccgttaccaaaccacaagccaggactgggagtttctcattcattaatcgctgtttgctaaaataaactctcattttttaacagtgcctcagtttaatttttaactggaaaaaaaaaggaactggggaccccacagcccacagctcctcccacacgaaccccacacccgaggcaggatcccccatgacccttccatggtcaccgcacaatctggggagacgcggggctgcgggcgcggagctgctcagagagggagccggggccggggccgcagtcgccgcgcagggaccggacaggacgcccggggtcccggctgccggcccagctccacccagcggccgaggggaccgagggccgagctgcgctagggggactgtgtctggagcccagagtcgctgcaggggggcccgggccccgccacagcgggttcctctcggttccacccagtccctcctttcgccttgggactccccagcaccgcatgctcaccatttcctggcttccaggtattctggcgtcctctctaaaggtcccgtgaacagtgcaggtcacagcgcagtcgacagagcaacagcagctacggcggaagtaactggtccctctcggagcaagaaagccccagaccttaactagcgcgagcagccctaggagtgaagagagcgggaatgcaacctccccttccctggaggacagtggcagggccccgccctagcgcccctgattggataggggtctagactccgcccccttccctgagtgacagcagaagccccgggtaactgggcgctgcagagccgaagcgactggttctggccacactttccaaggtcagctccctccctccctcccacctttacttcgaatatttgccttcggccaaacttgctccgaactgctagaagggacactgttgtcttcctcactccgtgggccgtccctgccccttcatcctacacgggacacaagtgtgcagggaattccagattcagtgtccacaaaatgtgaaagacattaaaatattttgccccaagatattgccctgccaaaatatatttctttgacagttttgaaatggctgctgcttggccagcaaacaaaaggtggccttgcaaaactgtcttttgagggggaaatttacatttgtagagaatctccgttaatgaagcactgccagctcccccgttcttttcctttccctgatctaaaagctattgagagtttgacacctttaaaatctgaagagaggtagcacatggtgactcatgtctataatcccaccacattggcaaactgaggcggaaggatcccttgaagcaaggagtttgaggccaacatcatcaacacagcgagatccctgtctttctttcttttttttttttttttttagacagtctcgatctgtcgcccaggctggagcacagtggcacgagatcttggctcactgcaacctccgcctcccaggttcaagcgattctcctgccccagcctcccaaatagctgggattacagacatgcgccaccacgccccgctaattttgtatttttagtagagacggggtttctccatgttggtcaggctggtctcgaactcacgacctcaggtgatccgcccgcctcggcctcctaaagtgctgggattacaggcgtgagccacctcgcccgccgatccctgtctttattatttaaaatttttttaaatggccgggcgctggccgggcgcagtggctcacgcctgtaatcccagcactttgggagaccgaggtgggcggatcacgaggtcaggagatcgagaccatcctggctaatacggtgaaaccccgtctctactaaaaatacaaaaaaaaaattagccgggcgtggtggtgggcgcctgtagtcccagctactcgggaggctgaggcaggagaatggcgagaacacgggaggtggagcttgtagtgagcagagatcgcaccactgtactccagcctgggccacagagcaagactgtgtctcaaaaaaacaaaacaaaacaaaacaaaaaaccagtggccgggcgcagtgagaccaggtctctaccaaaaagataagtaaatagattagggccaggcatggtggctcatgcctgtaatcccagcactttgggaggccgaggtgggtggatcacttgaggtcaggagtttgagaccagcctggccaacttgacgaaatcccatctctaccaaaaatataaaaatgagctgggtttggtggcacacacctgtgatcccagctattcggggggctgaagcaggacaattgcttgaacccagaagacggaggttgtagtgagcagagattgcaccattacactcgagcctaggtgacagagtgagaccttgtctcataaaaaggaaaaaagtctattctctgggggagacatcatctacgtaacagtccacctctagccaagcctcttcctttctcagtctactaagctgtcttgctactaaacctaatttactgacctcaggtcgctatataatcttctctgtcttatagctgggtgtgtcttcattctgaaggttcccatgtatacatgttaaatacatttgcatgccttcttttctattaatcaatctgcctcagatcaattagttttcagcaaacctttaggacacgaagagtctatcacccccac

SEQ ID NO: 1561591 - DNA, 4001 bp, Homo sapiens
tcacccagccaggatgaagcttttgaacacctcccatgtgacaggcactttctaaatgttgtacatgtactaacggctataacaacaaaagcccataaaagaacaatctgttcccatcctattgaagagacaactctttctcagacattctaagaaacttgccccaggtgtgaaggctaaaaatggcagagtaagcgccagatcccaggagtctgggcattagaatcaaactttaagaattaggccaggcgtggtggctcatgcctgcaatcccagcactttgggaggccaaggcaggtggatcatttgaggtcaggagttgaagaccagcctagcaaacatggtgaaaccccatctctaccgaaaataaaaaaattagccaggcgtactggtgggcacctgtaatcccagctacttgggaggccgaggcaggacaatcacttgaacccgggaggcagagtttgcagtgacctgagatggtgccactgcactccagcctgggtgacaaagcgagactccagcctgggtgacaaagagagactccatctcagaaaaagaaaaaaaaaaacatcaaacaataacagatcagcatcaaaagtaaattgacagacaatgacctaactgagtatagttaaaataagttccgggattaaaatcaagaaactgtcgcacatgtatccccataacaggttactatccttacagccatagactcactatcataacagtgtagaacaattttaaggtcatgaaaatatataagatgtaatttcaactgttaaaagatataagacgtatataaactgatgatgcgcctttgataaaaacaatagacttgctcatctgtgcactcatccacacacatcacatgtacacacttattcatatacatatatacattcacacacatatactctagtaaacatatatgtgacaactgaaagagttgtctgtcaataacctcttttttagatatttgtctttgttcgttttttaatgtgtccaggttgcagtgcagtggcttattcatggcacactacagccttgaattcctggcctcaaatgacaccctctccgagtaactcgaatgacaagcgtgcaccactgtgcctggctgtcgttgtttttgcaaatgtgcatttcagcatgtttgcaacaataaaaatgtataaactgtgctcaattcagtttataaacattatttcaaactatttcaaaaagtcagaccatgtaaaaacatagaaacgagaattccaatctctattaaatacccgtactgaaacatatgtttcaaaaattgagatgggggtctcactatgttgtccagagtggtctcaaactcctgtgctcaaggaattctccagcctgggcctccggagaagatggaattccagccccggcccataaatattaggttggtgcaaaagtgatcgcggtttgccattacttttgcactaacctaattttgtccactaaatatttatttaggtgttagcaaaagcccaatggaggctgaaacatcacaatcagcagtaaacatcagatcgatttcctctcatttaaggcacagaaaagggggcaggcctgtgaaaagagggcgaggcttgggggaccggaaagacgtggatccatctcgcgggtgagaactttacgcagcgcgggccgtgtctaggggtcactgaaggatttgaagcaggcaaactccgcgacaggagctgtctacatggccctgtggtgaaagaccggggacaggaccagcctccgagcgattttaacactcagggaagcgaccgccagactctcattagaacgtctgagtttagtcggggtggagggagcgatgcggggatttcaaggtctgtgtgacccctgagatgccgggtacagaagcgcgaggggactcagcatcccagatttaatctaaacaaagggaaactcacacgccgcagcatgaccgtcactccacgtaatctgcttccgggtctccaggaaactgcgcgcgcagctgagaggcgaggcgaggccaggcccgggtgggattgggcggagcctgcgcttccctccgcctcgctcccagctcgtctcgttttggaggctagacctgccgtggagactggaagaactcagctatctggaaatagattgtgtcccggcagagggaaagtttgttgatgattagatccaggaaaattcctgctattaaaattaattttaaatcggctgtaggggcgctcgcatgtggtcctagctacccggatgctgaggtgggaggatcgcttgagcccatgaggtggaggctgcagtgagccgaggtcgtgcgctgcactcccgcctgggcatgagagagaaaccttgcgcctaataaatacataatcataaataacaaattggaaataaataattaaaataaataaatataaatgaataataaacactagtttccggaattttaaagtccttgaattgtttatgaaggggatgcaaattaaaatatgaaatgcaaaaccctgccagggcggaatgtgcaatttccttttttttttttttttttttttggagacagagtttcgttcttttgcccaggctggagtgaagtggcgcgatctcggctcactgcaacctccgccgcctgggttcaagcgattctcctgcctcagtctcccgagtagctgggattacaggcgcccaccaccacaccgggctacttttttgtacttttaatagagacagggtttctccatgttggccaggctggtcttgaactcctgacctcgtgatccgcctgccttggcctcccaaaatgttgggattacaggcgtgagccaccgcacccggccaagtttttttttttttttcatatttatattaatcctagtgtatacctgccattgtcttatggacatactcaggtcacaactttttttttttttttttttttttttttgagatggtctccctctgtctttcaggctgaagtgcagacagctcactgactgcagcctcgacctcctggcatcaagtgatcctcccatctcagcctcccaagtagctgggactacaggcacacgccacaatgcccagtcccatgtcacaaaattttgtctccaaacagcactcatttatttgtcccctaaagttttcaccagagcaaaacagggaagaaatgtattaaacatagaatttggaggcaatgtaggaaaaaaatgtaaaaatatatatacatacaaaaaatataaaaatatacatgctaggtgtgaattgtaactaagtttccagtatgggtagtgggtatccccgccccagccctaccctttagcaatcatgacaccccaagccagtcacctatcccagttctctgaagccacttttggaccagctggaaaagtataccctgctttcccccacagagcctcattatataataaacactctcaaaccatatcagtgtatgggatcatcattctcaagatccaagccaaaccttagggggacttcaaacaagttccagaagagtggtcaaaaattcaaattaccaaaagagttgtgagggtgactatatgaagtttctagttaatgtaccaaaacaaaattccctttctgtgtgtgacttaaaaagaagatgggtgaacattaatattttcaaatgatgtcactgaacactagaagtacaaaaagaaattgtgttacagtattattattatttttttttttttgagacggagccttgctctgtcaccaggctggagtgcagtggggtgatctcagctcactgcaacctctgcctcttgggttcaagcgattctcctgcctcagcctcccaagtagctgggattacaggtgcacaccaccaggcccagctaattttttttttttgtatttttagtagagacaaggtttcaccatgttgaccaggatggcctcaatctcctgacctcgtgatccacccaatgcagcctcccaaagtgctgagattacaggcgtgagccaccaggcccggccat

SEQ ID NO: 1561592 - DNA, 4001 bp, Homo sapiens
cattgcactccagcctgggcaataagagagaaacttcatctcaaaaaaaaaaaaaaagaggaaatacgatgaaaggaaaaagaatgccaaaatcagcagtctcccgaaggagcagttccagcagggcagcttcttgcttacatcgcttcagggccgggacagggtggccgagcagatgagattacaggcgtgagccaccgcgcctggcctaaaacaaaatatttctcaatgaaacttttcttaagcttatatgcctccctcaagctcctgaactttgagctaccctcagtctgagtcaacatacaaccacattttacatccctcctaagaacatgctgatttcagagtaagacattctctgatataaaatctgacttttgcaccctccatttgccattcccctcccacctcctttctaaacttctttgctcctccctagggaagaaagcacttttctgcctacgtttttgcaagccataaagacgttatactttgttggtacttcctcctgttgcaatatgtttttggaattcatttttttccataaatctaacgtttttattttacaaagtcaaacaagtgcctcaaaacaataacatcattatcagtaagacccatccagtttcctttcatcttaatcttaactgcatctgcctggacaaactccatctcaaaaaaaaaaaaaaaaccctccttttgcaggcttaatattagccttagctcggaatcactaggttcaagctttaatttccatgccagagttattcactgggtttttgaaactaagtgttggaaaatacagtgaagttactaaaacacagtgtttacataaaggatggaaattttaagatgcttacttttttttttttttttttttttgaggactctccctctgtcgcgcatgctggagcgcgatggagggatctcagctcactgcaacctctgcctcccgagttcaagcaattctcgggcctcagcctcccaagttgctgggattacaggcgcttggcaccactccaggctaatttttgtatttttagtagagagaggtttcaccacgttggataggctggtctagaaatttgaccacgtgatccgcccgcctcggcgccccaaagtgctgaaattacaggcaggagccaccgcgcctggccgggaaggggttattagccctaatgcagttctgtttttgttttccctccattggctggggtcagaccgcacaatctaagctgatcccggttggcttacactcaagctttttccaaatcgggtaatgcgcgatttgtgagaaaaggagaagggagaagaaggggtaggggtgatttacaacttttccaacttatgaccaggaagttgcgtctttgaagaagaactacgttgtactaacaaccctttacctcaagtgatccgctcgcctcgacctcccaaaatgctgggattacaggcatgaaccacagcgaccggccccataagtttttaataggagaaaagagaaactgtcaaccccatggaccaaagctcttcccattcatgaacctgcaccccgagtcaggattctcccccgagaaccctcccgtgctccctgcacaatctgggagagacgcagcgctgtgggtgcagagctgcccagagagggctccaggccagggcagggaagagacaggacgccgcggggcccggctgtcggcgctgttgccatcttatggctgaaggggactgaggccgaactgggcaaggagaagtcggtcgcagattgtggagctgactgcggggaggcctaagtcccgccacagccacttcccatcggttccaaccagtccctcccctctctcggaatgctggaaaggcactctcaccatttctaggcttccgggggtccctcagctgtggatctcccaatacctgcaggtcacagggccacagaggctggagaagaagacacgaagcagctaagaccagatttggagcaccagctgcagcaagagacaaatggccgcgccaaacccgaaagccttcctcttcgctccagctgcctgcatgattggacggtttccaacccagcgtccctgattggataatgcttaaggccccgcctcctcagtccctgagtgacagaagatgtgatcacatgctgggctgagtgaagaaagagtcacagcctcagctgcagccttttcaggccgggcttcctccttgagctgagccaggcccaccggagagcatgggaaaattcttttttactctttctctttttgaatgtattcaaaaggtgaacagaagtatttggctgtcatattaataatacaaaaaatttttgttcaagagaaaacttttactttggtaatagtgtattatcaatacgaaagctaattttaataaaaccttgtaagtaaatcaaatttgtcatttttgacctctcgagacttacatatacatcatatatattttgtaatctaatgtaatttttttaactttttatattttatttttatctacattctttttattttttcaatttgaaacaacttttaagtaatttcaaactgttataggagacagaaaggaaatcatttagggccaggcgcggtggctcacgcctgtaattccagcactttgggaagccaaagagggcgaatcacttgaggtcaggagttcaagaccaccctggccaacacggtgaaaccccatttctactaaaaatacaaaaccttacctgggcgtgctggtgcacacctgtagtcccagctacaccgaaggctgaggcaggagaatctcttgaacctaggaggtggaggttgtgtaaccgcccaaggagtttaccttgccctttgcccagacaaaaccaattcatcaagacaggggaatttgtggaggaaaagttaaatatttaatttgaactcaattgaacgtggacacaaacaatggtcaccaagtcctggaagaggttgtgtgagccccttgaggcgttcatccagtgctattttagagaaatctctatgtcaatctattcaatctattcctatacattcgttattgaaaaacaatagacaaggccgggcgcggtggctcacgcctgtaatctcagcactttgggaggctgaggcgggcgggtcacgaggtcaggagatcaagaccatgctggctaacacgctgaaaccccgtctctactagaaatacaaaaaattagccaggcctggtggcaggcgcctgtagtcccagctagtcgggaagctgaggcaggagaatggtgtgaacctgggaggcggaacttggagtgagccgagatcgcgccactgcactccagcctgggcgacagagcgagactccgtctcaaaaaaaaaaaaaaaaaagaaagaaagaaaaagaaaaacaatagacaatcacaaaaacaagttgacctttctgtgttccttgagaccagtcatgaagggccctggtgactaggcctcatgctgaacaactcgttacaaaaagagctaggttcccagaccgcgcagaagcgtcattatacctctcctggtctgtgcaccgatgggtggccaactctggagcccatcctgttgctttccggtctggtggtgaatcctccatagtctggtgtggagtcaaagttaaataataaatttgtgctaattgaacgtggacacaaacaatggtcaccaagtccgggaacaggttgtgtgagcccctagaggcgttcatccagcgctgtttcagagaaatctgtatttcaatctattcctatacattcgttcttgaaaaacaacagacaatcccaaaaacaagtgacctttttgtgtttcttcagctcagtcgcgaagggtcctcatgactaagcctcgtgccaaacaactcattacaaaagagctagggtcccagactgcgccaaagcttcgtgacagctctcctcacctgtgcacaattgttagcttgctattggactttactggaaacaaaacacctctgctttaaccatgatgtctttatgaggcctaaat

SEQ ID NO: 1561593 - DNA, 4001 bp, Homo sapiens
gcgtctagggaaaatagacgaaaaaaacgcacagagatattttaccatacagtgtcaggagattattctttgctttcttctcacagggagtatttaccaaaaaaaacaaatctttttaaatgtgccatcaaatgctttgtcaaaaaaaaaattaattggccagatgcggtggctcacgtctgtaatcccagctctttgggaggccgaagtgggcagaccagctgaggccaggagttcgagaccagcctggccaacatagtgaaaccctgtctgtactaaaaatacaaaaattagccagacgtggtcgtgggcacctgtaagtccagctacttgggagactgagagaggagaatcatttgagcccagtaggcggaggttgtagtgagcctagtgcgtcactgcactccagcctgggtgacagagcaaggctctgtctcaaaaattaaaaataaaaatgattaaaatcggtatcaaaatgtacactacaggacaaatagttgataaagtgaattagggaggggaaattggcatttgggaatgtcagacgaaactggaaatttagtattttactgcaagccagagttaggctggaggaacaggggatgaggggtggacttgaggccctgcttgagacacatgtaaaaaattcagggaaaaatcgtccccttttgagtgtgagaaaaattaagtggcaggcaattagattgaggtggctctagtcctcggatttctacttctaaaaataaaaatctaaactcaagagcattttttggtaaattactacattggcagaagcaaaatttaggcttaagcaactataaactgccaattaagctctgattacataagaaggatatttccacctagattgtaaaaattaagaaactaggccaggtgcggtggttcacgcctgtaattccagcactttcggaggccaaggtgggtggatcacctaaggtcaggagttccagaccagcctggccaacaaggtgaaaccccgtctctccgaaaaataaaaaaattggcctggtgtggtggcaggcgcctgtaatcccagctactagggctgaggcaggagaatcgcttgaacccggaaggcagaggttgcggtgagccgagatcacgccactgcactccagcccgcgcgagagagcaaaactccttttcaaaaaacaaaacaaaacaaaacctacataactgtacctagcaaattactgaatttggttttctttaccatgaaccttataaaaatatctccttcaaggcctttcatagaccacaaattacaaaccatagctgggtgctctacaatgtttgaatcactctttgattaaattatttaatcttttcgcggtgacgcccataaatttttaatagaaaaaaagaggccctgggaaccccacggactaaagtgcttcctattcatgagccagcacctccagtcaggattctcccctgacgaccctcccgtgatccctgcacaatctgggagagacgcggcgctgcgggagcagagctgcccagagagggctccaggccaggacacagtcactgggcagggaagagacaggacgcccggagcccgcctgtcaacgcagccgccatcttatcgctgaaggggactgaggccgagctgggcaaggagaacccgggcacggattgtggagctgactgaaggaaggcctgaggctcgccacagccgcatcccaccggtttcaacgagccccgttccctctctcgggacgtcgcacctggcagtctcaccatttctaggcttccaggggttcctggcatcttagctgtggctctccaatacctgcaggtcacagggccacacaggctgggcctcctggagcagaggacacagagcagtgaagtcgagacctggaaactccggcggcagcgagagacaaaggcccagccacatcccggaagccgccctgtccgctccagctttgtgcctgattggacagttcccagcccagcgtccctgattagataacgtttaaggccccgccttctcaggccctgagtgacagaagatgtgatcagacactgggctgaatgaagaaagagtgacagcgtaggctgcagccttttcaggcagggcttcctcagctcagccaggcccacctcagagcatgggaaaatcctctctcttctttgctctctttcaatgtattcaaaatgtgaacaaaaatatttgatgtatattaataatacataaaatttttgttccagagaaaatcaacttttactttattgtgtattatcaataataaagctaatttgataaaacattgtaagtctctcagccgggcgccgtggctcacacctgtaatcccaacactttgggaggccgaggcaggtggatctcctgaggtcaggagtccgagaccagtctggctaacatggtgaaaccccatctctactaaaaatacaaaattattgagcatggtggtgcgtgcctgtaatcccaactactcgggaggctgaggcaggagaattgctagaacccgggaggccaaggttgcagtaagcctagatcgcgccaatacattccagactgaacaataagagtgaaattccatttcaaaaaaatgaaaaataaaatataaaaattagctgagcatggtggcacacgtctgtaatcccagctactccggaggctgaggcaggagaatcgcctgaacccgggaggcggaggttgtagtgagttgagatcatgccactgcaccccagcaaaaaataaaaataaaaatacattaaaatttttttgacctctctagatttttatacatattttatgatctcttataattttttaattttttttttttgagactgagtcttgctctgtggcccaggctgaagtccagcggcacgatctcggctcactgcaacctctgcctttcaggtccaagggattctcctccctcagcctctggagtagctgggatgacaggtgcaccaccacacctgactaattttttgtatttttagtagagatgcggtttcaccatgttggccaggctggtctcgaactcctggcctcaggtgatccacctgccttagcctcccaaagtagtgggattacatgggtaagccatgatgccggtccattgtttaactttttatatttcattttaatctacattatttttactttttcaatttgaaggaacctttaagtaatttcaaagcagacaaatgtttctaactttcttcatcaaaagcatattttgcttttgtttatactctctctattttcttttaatttccaagagagaagcttgttctgtcacccaggctgaagtgcagtggcatgatttcagctcactgcaacctccacctcccagattcaagcgattctccagcctcagcttctggagtagctgggattacaggcgtgcgcgatcatgcccggtttatttccttatttgaagtagtgactggaatttgccatgttgctcaggctggtctcgatctcctaagctcaaaatgatctgcctatctcggcctcctaaagtgttgggattacaaggcgtgagccacaacacctggccttaaacattctctttgaagaattagtttttttacatctagtggtcttttattaattacattaacccttaacaaactaatttttagtgaaatccctaggaagtaattttgaactgttttatattaatatttgtagataaaaaacatttatatattttaatgttaaatacagtgagttctaaattgctcttcaaagaatcagtatgtcagtatattcagctccctgttcttcattctccattttaaagtttaacttctttgttgtttttgtctccagttttagtaaacaaccttcccgccagttctaatcagtagtttacatctgtacccctggtcacctgctccatcctgagtcacccctggtcacctgctctgacctgagtcaccttggtcacctgttccataacagtagttcccacccaaactgctcaccccac

SEQ ID NO: 1561594 - DNA, 4001 bp, Homo sapiens
ttttttttaattagccgggcgtggtggtgggtgcctgtagtcccagctactcgggaggctcaggcaggagaatggcgtgaacccgggaggcggagcttgcagtgagtcgagatcgcaccactgcactccagcctgggcgacagagcgagactccatctcaaaaaaaaaaaaaaaagatcctcccagtttcctttcatcttaaccttaactgcatctgcttgtggggccccagctttctggggctctgtaccttctctcagaataacgcctccttccatggctccggtgaataggctgggacatctgcaggggaggctccccagaaaaagctaaataggactttataaactcctgttggctgggccctgtggctcatgcctgtaatcccagcacttcaggaggccaaggcaggcagatcaccagaggccgggagctcgagaccagcctgaccaacatggagaaaacccgtctctactaaaaacacaaaatcagccaagcatgatggtgcatgcctgtaatcccagctacttgagaggctgaggcaggagaatcgcttgaacccaggaggtggagatttcagtgagccatgattgcgccactgtactccacctgggcaacaagagcaaaacgcaaaactctgtccaaaaaaaaaaccttctgttttaggcttaatattagccttagcttggagtcactaggctcaagctttgtcatgtcagagttattcacttggtttttgaaactcagtgtttgaaaaatccgtgaaattactcaaacacagtatttacataagggaaggaaattttaagatgtctattttttttttaagacggagtctcactttgtcaccaaggctggagtacaatggcaagctctcggctcactgcacctcgcctcccaggttcaagcaattctcgtgcgtcagcctcccaagtagctgggattacagacgcctgccaccaatcccggctaatttttgtatttttagtagagacggggtttcactatgttggccaggctggcctagaactcctgaccttgtgatccacccgccacggcctcacaaagtgctgggattacaggcatcagccaccgcgctgggccaggaaggggatttaaccctaacgcagttccggtttttgtgtccttcccatattggctgaggtcccaccgcacaatctaagctgatcctggttgggctagacacaaactttttccatatagggtaaacgcgcgatgttttgagaaaaggagaatggggaaaaagaaggggtagggttgatttacaatttttacaacttatgaccaggaagttgagtctctgaagaggaacttagctgccctaacaactcctcaagtgatccgcccgcctcggcctcccaaactgctgcgattacaggagtgagccaccttgcccagccccataaatttttaataggagaaaagagaaactgtgaacccaacccactaaagctcttcccattcgtgaacccgcactccgagtcaggattctcccctgacgactctcccgtggtctctgcacaatctgggagagaagcggctctgcgggtgcgcagctgcccagcgagggctccaagccagggcacagtcaccgcacagtgaagagacaggacgcctgggggctgcgctataagcgcagccgccatcttatggctgaagggaaccgaggccgagctgggcaagaactccggcgcagattgtggagctgactaaggggatacctgagtcccgccaccgtcactttccaccggttccaaccagcccctccccgtcgcttgggatgtcggaccggcactctcaccatttctaggcttccaggggtcctggtgtcttagctgtggatctcccaatacctgcaggtcacagggccacagaggctgggcctgtaggagcacaggacacagagtagtgaagaggagacctggagctccggctgcaccgagagacaaaggacccgccaaaccagaagccgccctgttcggtccggctgcttgcctgattggacgtttccagcccagcgtccctgattggataattcttaaggtcccgccccctcaggacctgagtgacagaagatgtgatcacatgctgggctgagtgaagaagagtaacagcctaagctgcagccttttcagccagggcttcctctctgagctgagccacgtccaccccagagcatgggaacattctcttttttactctctctttttgaatgtattgaaaaggtgaacagaagtatttcgttgtcatattaataataccgttggaagtaaagtgtttggtgtcgcaaagtgaaaccagtactcaggcaaaagtttttttagtaaggcaatttacttctgcaaaaggtttttgtttgcattaatcacgatcgcaagagcaccctgaacaaaggagggaaggggtttttatttttaacgtaaagtctcttcctctgtgttactcccccatgggctagggtcggaccccacaatctaaactgacccgattggctatttgtaaatatttttccaaataaggaagggaaggggcatgtataagtcacagtggtgggacgtgtggttttgaagggtgggaaggctgcagagtgagtaatcaagggaacagatgtgaattattgattagagctgttgggaaggaaggttgttacagtaactaggggcaaggaggcatggagaacaagcaagttgagtttgagaacaaagaacaagaaagttaagactaaacctttgaagaggaattttattgtattttacaatttcccccttttaatttttataattaaaaaaaaacctttttttttgagatggagtttttgctcttgctgcctaggctggagtgcaatggcacgattttggctcactacaacatttgcctcccaggttcaagcaattctcctgcctcagcctcccgagtagctgggagtacaggcatgtgccaccacgaccagctaattttgtgtctttagtatagatggggcttcttcatattggtcaggctggtctctaacttctgacctcgggtgatccgcccgcatcagcctctcaaagtgctgggattacaggcgtgagccactgcgaccacacgctttttaaaactttttaaacatacctttactttgttgtttgacttgatcttttaaaaggaaaagtttatctgaataaggtggaggagaactaagggaggttttcgtaagtgtcgtttttataagtctttgtactagcccacagatgcatggtatgacacaacacccaacaagaattagtacacctattacaactataagagaagtaagaattgaggctatgactttttttcgtttactgaaccacctctctagccattctgaaaacgtgttattgaccccagaatttttagctaattcattggataaagtggtaagttcgtgtaaggcccttcttatgttcctattgggggcagtattgtttgggatgaaggtacaacatttgagttttaatcataacacaaactccacctttttcagctaatattatgtccagggccattttgtttttctaagttatctggctagtaggccttaattggttggctatttctttgacagcatttctggtgtaattaataaactaatattgattataatagatgtgatttatctatctaatctacatttttattaatagttacccgtggaaatattgatttaaatcctgcagctatttgatcttgggctttgaattcatcaggtaccacccgtgggactccagttgtgtctaaataaacttgaaagtcaaaagacacataaggggcttctcttattttacagtgttgtggtttttctttttctagtcgatgaaatgccagagtgaaagggatagccaactggacaacagtgcaagtgccgttccagttacttggcagagtgtccagtaagggtccaccacaataccaccatatatttgctcaaagatgaacaagggaagactgactggtaagat

SEQ ID NO: 1561595 - DNA, 4001 bp, Homo sapiens
ctatctcactgaagtcaggttttttttctttcttttgtcttttgggatactattttttctttcacaaatcttagagcatttagggggcagaaattatttctgttttcccctcaatatcagcatgtgattggtggaccagcaatctgtctccaagaaatggaagctgggttgggtgaagacaattgtaatgtctcaaggggttagcttttcaaaggaagagtacaccaagagattccatcttttccccagggtatccactggggaggctgcactccctacctcaggttgtcctatgaaagaaaacgacttaggagctgatattcactagatactctagcagacatagccacagcagttatcttggtttattcagagacagtactaaaacccaggaacaagaaaaaacgacagggttgctgaggacaaatcactccataacgtttgcaaaataaaaacatcttgacactaaaacattatcataagacctttgtgcctagggaagacaaaagaaaaagaggcacagagactttttacaattcactatcaggggattattctttgctttcttctcatgggaaatacttacaaacagaaaacatatctttttctttttctttttttcaattttaaatagttttatttaagacattgcattttccacttacaatacagtgtttataaagtgcaatgctatttccttcccctgtgcatatgttccatattcaaatactgagaatgcccagtaacttactatagcagcttaactttttaaacctcccacagaatttgctacaaatttaggtccttcaaatgagaaaacatctttttcaatatgccatctaatgctttgtcaaaaaatgattaattaaaatacggtatataaaaggtacactaaaaaacaaataataaataatgtaaattagggagaggaagttggcatttgagattttcagaagaaactgaaaattcagtattttactgcaagccagagttaggctgcagaaatggggtgtggggggttgccttgagaccctgcttgggacccatgtgaaacatgcaagggaaaatcagtcccacgtggcggcaaatagactgaggtggctccaatccctggattcctaattttaaaaaatctaactcaaatgcatttttttaatagaaattactacattgggggaaacaaaattcaggcttaaaaaatgataaactgccaagtaagttctgattacacaaccaggaaatttctaggcttaaagtgaaaattaagaaactacgtaaatgtacctaaccgattactgaatttgggtattttcatcatgcatctttccttcaagatcttttcatggcccacaaactacaacccatagctgggagctctacaatttttgaaccgctccttgtttaaattcttaagtactgtcgcgataattcccatacatttttaataggcgaaaagaggaactaggaaccccataaaccaaacaaaagctctttccattcatgaaccctcacccccagcaccccgagtcaggattctgccgacgaccctctcgtggtccctgcacaatctgggagagacgcggcactgcgcgtgcagagctgcccagagagggctccagctcagggcacagtcactgggcagggaagagacaggacgcccggagcctggctgtcagcgcagccgccatcttatcgctgaaggggactgaggccgagctaggcaaggagaactaggggcacggattgtggagctgacagcggggaggcctgagtcccgccacagcctcttcccaccggttccaaccagccccttctcctctctagggatgtcggactcggcactctcaccatttctaggcttccaaggggtcctggcatcttagctgtggattcccaatacctgcaggtcacagggccacagaggctgggcctctacgagcagaggacacagaagggcgaagacgagaccaggaactccggctgcagcgagagacaaagaccccgccacatcccggaagccgccctttccgctccaaccgcgtgcctgattggacagttcccaggccagcgtctctgacttgttaacgtttaagatccctcgccctcacgccctgagtgacagaagatgtgaccaaatgctgggctgaatgaagaaagactgacagccgaaggtgcccccttttcaggcagggcttcctccctgaggtgagctaagcccacccagagggtgtttgccttaaaccttgtatataaggtctcatgtatttgtaaataatatactatacggctgctcacacatggaaagaatagaataacaattatttttaaatttctgctttttttttttttttgagacggaatctcgctgtgtcgcccaggctggagtgcagtggcacgacctcagctcactgcaacctccgcctctcgggttcaagcgattcttctgcctcagcctcccgagtagctgaaattacaggcgcgcgccaccacgccctgctaatttttgtatttttagtagagacggggttttcaccatgttggtcagggtggtctacgatctcctgacctcatgatccgcccgcctcggtctcccaaagtgctgggattacaggcgtgagccaccgcacctagcctgaatttcggcttttataaccttcctggctctggtcctttgaacaggcagcctgagatagtttttgttttgtgttaagatggagtcttgctctgtcgcccaggctggagtgcaatggcgcgatcttggctcactgtaacctctgcctcccgggttccagtgattttcctgcctcagcctcccgagtagctggaattacagtcatgcgccaccatgcccggctaatttttttgtatttttattagagaccaggtttcaccatgttggccaggctgaactcccaggtgatccgcccgctttggcctcgcaaagtgctgggattacaggcgtgagccaccgcgcccaactaacctgaggtttttaaaaggacacaatccttctaagtaaaatgtgagccacatgtgaattttaaatttcctactagccaaactttaaaaacaaggaacacacggggcacggtggctcacgcctgtaattccagcactttgggaggcgaaagcgggcggatcccgaggtcaggtgttcgagatcagcctgcccaacatggtgaaactccgtctctactaaaaatacaaaaattagcgtggtgtggtggcgggcccctgtaatcccagctactcgggaggctgaggcgggagaatggtttgaacctgggaggcagaggtcacagcaagctgagactgtaccactgtactccagcctgcacgacagagtgagactgtctcaatgaaataaaaataaaaatactttggccgggcgcggtggctcacacctgtagtcccagcactttgggaggctgaggcggatggatcatgaggtcagaacattgagaccatcctggccaacatggtgaaaccgcgtctctactaaaaatacaaaaattatctgtgcgtggtggtgtgtgcctgtaatcccagctactcaggacgccgaggcaggggaatcgattgaacaagggagttggaggttgcagtgagccaagatcgcgccactgcactccagcctgggcgacagagtgagactccatctcagaaaaaaaataaaaaataaaaacgctttttgatacgtgtgggctatttatgattttcaacactgattaaaagtactgtgcctgaaccaacctcttaccttaaaatcaaatgactatagacagacctgctaggaagacatttcatttctttcttactttttttttttatttttttagagtctggctctgttgctcagactggagtgcagtggcgtgatctcggctcactgccacctcaacctcctggcttgaagccattctggtgtctcagcatctcgagtagctgagaattcgggcgtgcgccaccatgcccagctgatttttctatttttattagag

SEQ ID NO: 1561596 - DNA, 4001 bp, Homo sapiens
gtattttattgcaagccagagttaggctgcaggaattggggtttgggagtagacataatactctgcttgagatacctgtaaaaaatggaggggaaaatcagtcatctgaggagtgtgaaaataattaaaaataattaagtggcaggcaaatagactgaggtggctctagtgcctgatatctacttttttttttctttttttttaagacagtttcggtcttgttgcccagaatggactgcaatggcgcgatctcggctcaccgcaacctctatctcccgggttcaagcaattctcctgcctcagccccacgagtagctaggattacaggtacaggcatgtgccaccacacctggctaatttttgtatttttagtagagatggggtttctccatgttggtcaggctggtcttgaactcccgacctcaggtgatccgcctgcctcggcttcccaaagtgctgggattacaggcatgaaccaccgcacctggcctttttttttttttttttttttttaatatgagagggagtctccctctcttgcccaggctggtgtgcagtggcgcaatctcagctcacagcaacctctgcctcccgggttcaagcgattatctgcctcagcctcccgagaaactgggattacaggcatctgccacactcccggctaatttttgtatttttattagagacggagttttaccatgttagccaggctggtctagaactcctgacttcgtgattcacccgcctcggcctcccaaagtgctgggattacaggtgtaagccaccgagccaggcctgataatctactttttaaaaaatctaattcggccggacgcggtggctcatgtctgtgatcccagcactctgggaggcggaggagggcagatcacctgacgtcgggagttcgagaccagcctgaccaaaacggagaaacctcgtctctactaaaaacacaaaaattagccgggtgtggtggcggatgcctgtaatcccagctactcgggaggctgaggcaggagaatcgcttgaacctgggaggcggaagttgcgttgagccgagatcgcgccactgcactccagcctgggcaacaagaacaaaactccgtttcaaaaaaagaaagaaaaaaatattaataattcaagtgcttttttttttgtaaattactacattgggggaaacaaaattcaggcttaaccaactataaactacaattaacctctgattatataaacgggaaatttccatcttgattgtacaaattaagaatctacgtaactgtacataacccattactgaatttggttttcttcattatgcaccttataaaactctttccgtcaaatcccttccatagaccataaactacaaaccacagctgggtgctctgccatttttgaatcactctttgattaaatcctttattactttagtgatgactgccatcaatttttaataggagaaaagagggactggaaacctcactggaccaaagctcttcccattcatgaacccgcacccggagtcaggattctcccctgacgcccctcccgtggtccctgcacaatctgtgagagaggaggcgctgcgggtgaagagcggcccagagagggctccaggccagggcatagtcacagtgcaggaaggaggcaggtcgcccggggtcccgcagtcagcgcagccgccatcttatggctgaaggagactgaggccgagctgggcaagagctcggggcgcagactgtggagctcactgaggggaggcctgagtcccgccacagccactttccaccggttccagtcagccccttccccttctcaggatatcggacccggcactctcaccatttctaagcttccagggggtcctggcgtcctagctgtggatctccaaatacctacaggtcacagggccacagaggctaaggacacagagcagtaaaaacgagatccggagctccagctggaaccagaaacaacggccccgccacatcccacaagccgccctttccgctccagctgagtgcctgattggacggttcccagcccagagtccctgattggataatgtttaaatccccgcctcctcaggccctgagtgacagaagatgtgatctgatgctgagctgaatgaagagtgacgggccgggcgcggtggctcacgcgtgtaatcccagcactttgggtggccgaggcgggtgaatcaccagaggtcaggagttggagaccagcctggccaacatggcaaaacccggtctctactaaaaataaaaattaggctggtgtggtggcgggcgcctgtaatcccagctactccggaggctgaggcacgagaattgcttaaactcaggaggcggaggttgcagtgagccgagatcgcgccagtgcactccagcctggatgacagagcgagattctgtcacgaaaaaaagaaaagaaaagaaaaagaaaggaaaggatgacagtctaggctgcagccttttcaggcagggcttccttcctgaactgagccaggccaaccccagagggtatttgcatttaaccttttgtataaggtcacattcttttataaataatatattatatggttattcacaaatgaaaagaatataacaattatctaaaattttcagagtttatgaccttcctggcttctggttttttcatcagattgcctgaggttttaaaaagaaggcaatcctctgaaataaaattgtattttaaattttctagtagccaaactttaaaaattaaaaaaaaaaaaaacaggtggaatttattgtagcaatttaattaacccaatatatccaaaatatcatcttaatacgtaagcaaaatgtaaattataaatgaagtgtagatattttttggaacttcatctttgaaactaactctgtattttacctttccagcacatcacagttcagaccagccacattccaggcactcagtcgccacacatggccagtagctgccacattgaagtgcagctctgaccttaggagagggaagggcctgaacaaaccttttctgccaaagatggaaaaagagcctttccctaccaacatctctcttcagctctgagggaggaacagatagtagccataaataaagcacaggacagcaggaaaaaacaaccacaggtagaccactgctggccacctgttgcctacctttattccagagatcagaaggtgaactaaggatggtaaggccacaggagaagaaatctctgtgtcttcaaatctgtgcacagtcttgacctccaatgtttagatatgaagaaaatagattaaaggaaaacttacttttctatttgtccttggccctaatggtcaggctgtggttatctgttttctcctgtggtatgggggactgtgtgagtataggcaccaattacatgcatacatgtccacatatatttctgcattactcagcattctcttacgaggcctccaactttatatcaggggaaaaatcagtacctatagggtacccactgttagaagagaactagtaatcaacttgtcaatgaatcctggcatcctatctgcactgggtgcatgtattaattagctattgcagcacaacaaatcattcaaaacttatttgctcataattgagatggtcagctatttagggtgggctcagtgaggctgttctttttgtctcagctgagctcctccagacatgtatcttcagctgtttgttgaataggcagctgtgcttctggggatgagcttctgcttctggggctgtcaacaggggcaacttgcttctcctccccatggtatcttatcctccagctggctaacatgggctttattcatggagatggcagcattctgaaagaaaaacagaagcattcaagaccttttgagcctacgccccaaactagtacattgtcatgttcacaggtttctactgccctgagtgaataaggccagcaaaatctagggtttgaaaagcattctggatcttgatgggaacagctttaaaagcac

SEQ ID NO: 1561597 - DNA, 4001 bp, Homo sapiens
cttgatctcctgacctcatgatccgcccgccttggcttcttaaagtgctgggattacaggcgtaagccactacgcccggcctaagaaaatttttttgtagaggtggggtcttgttatgttgcccaggctggtctcaaacctctaaccttgagcgaacctcccacctcggcctcccatcccatcacacctgggatcccatgagacataagaggaaacggagtaaaaggggttggagaactctatggcacctttgcaacttttctggaaatctaaaccagttccaaaataaaacgtttattttaaaagaaaaaatgtgaatgaagaataaggccatccaggatgagtgacccgtgtgcccgggactggaaccaaagcacagacgacccgtctcaaagccactccggcaccacggtcacagccgccccaaaaaggccccccagccctcaccacccctcgctctcccgcccgcagaaacggggattggccttaggcttgatggggatgggtgtcccccaaccccagtcagaggcgggtggcccaacagcagcgaggctgagaatccgctttcaaacccactttattcttttcagaccagaaacattcctcattgcacccccctccctgccctagatctttactgaccaggggcctcaggaggggctgaggagacagtggtatactctgcctccagggacgtggtgctgcagtggcagtggggactggcgcggcccagcagctccagcctccgggagcgtagctggacttgaatggcccagatggggggccggtggcccggtagggaggggtcctcgtccctgaagctgtaggtggtggagtcaaagctgtcttctgtggcggccaccgactgtttgcacacggggcaggagcgccggggggcttgggagaaccaggggtcaatgcatttgcagtggtaggtgtgggagcagggcaggatcttgagttggtcgccctcctcatactcatccaggcagatggcacacaggtcgttgtgccacgtgaaggtgcggacctgggccttctggcaggtagacgtcttcaccggccgtctgtggctgcagcaggcctgggcccagagccacaggtggttcaggacaaagaaggctgatacgaccagggccagggtacagcccagcacccaggacacggtcagcacggggtgacagcccaggtcgtggcacggtgggtcgtcgggcaggagcagcgcgtgggccgacttgttgcagcccaggatgacccgcaggtcctgcgaggcggcctcgctcacgaacactgaggggatggcgatctggcccctcaagtcctcgtagacgtgggtcatgctcacgaggtcgtcggagtggacgttgtgcacgatggccgcctcgaagccggcgcgctgggcgttcagcaccttgaggtcgaaggtgcagtcgtagcggcggatcagcacgatggcgcccagagagcggttgcccagtcgcggggcctcgatgggatggcacgcgttggctggcttgacctccatcaggtagccccgtatgccctcgggggccagggggacgccgaacagcgccggcagatccgcaaagtccaccgagctcgagttgtcttccagcacggcccgtaccactgcctgcgcgggcacctggagcagcgacaagaccagcaaggctttgactgccacgagggctcggcccggccgtggccaccccatggtcacccgcttcgctgtctgtgtgctgctaggtcccactggaggcggcaggcatgaggcctttgggcatctccggggtctcccagggggcctgtggccaggacgcgagggcagttgagttggaatgaccgcgtggctcagaggcagtgacgcggccactgggaccctgctggctctaggcattaagtgctccggacggcagagcggcatgcgtcgtgtctttgaaggccggtctcaggaggtgctggcgcaggtggcctttctggcagatgacatggagaccaggagtcaccagggttctagatgcccccagcttctgtgacatcgccctgctacattctgtcccaggagctgccagctgcctgggcctgtggccaatggatcattcctaggtctgtgatttgccggtacccgggcaagctttgagataacttcttgaaggctcagggtatctttggacccaaggaggcccagggatgcttcaaaagggctgccggcccccagcagtgcagattcagccctcactgtgcgaagacgctaccagcatcagcttctggaggttcctagcaacacactgtagaaggttcaatgttacccttgtctgagactccaagagtgacccagacttgttcaagccacgcccccctacaatgagatcagtgcttaaaacccaaattcctgaccccctgtcaccatccctcactctgctccagccacacagatctccttgctgttcctccaacacaccaggcaggatcctgccccagggcctttgcatgggctgggcctcctgcctggaaagccctttctctccgtagctggctcttttatccggactcaggtctgagtccatatatcctcagagccctcctggacttgatttggagggagagtcaagtgccagggtcagggtggggctggtgggggtcagtggtcccaagtccgcaccgccaggttggcctccaggcttgcaccagcttcattctctctccctatagcattgcctctccagctgggtctccaactgtgccccctgcctgagcttcagccctgggcatcagcctcacctcctccccagtccccatcccccaaatttcacaccctcaatctgtctgcagcccactcaagtcggatttctgtctctgccattcataagctgtatgacatcagctaaattccttagcctctctgggcctcagcttccagacctgtaacatagtctttcccatgctctaaactctcccatggctccccattgccctccagataaagcccacactcttctctgtggcctacatgcacccctgtggttgggcgcctgccaatctctgaagcctggatgatttgcaatgtcccagaggcatcttgctttgttcacctctagaattttgcaaatgctgttccctctgcctggaacagaattcttgctcctcaacttcactttgccaggctgactacttagtctttagattttctgtgttggcctaatacctctcagagcagccctcagccagtgacagatgggaggtggtagataaatgcccccactccctcgtccctcttatgggacaaatcgaagtatgttctaccatatctcctagaggtccccagtcgaatgagctccataagtcaacgaacccagtactgtcttgtcaatgagcccgctactgtctccttcccttccccacccacttctctcccctcccacagcttctgagatcacctcccacacaaatctcttgtaccatgtagtgggtgggccccaaatagagatgttgaacccctaacccctggttctgaccaacccctgtgaatggaccttatttggaaataagatctttgcagaggttttccttctaagaaagggagaaaaggccgggcatggtggctcatgtccgtaatcctagcactttaggagcccgaggcgggcagatcagttgaggccacgagcacatgctgccatgcccggctaatttttgtatcttaatagaaacgggggttttgctaggttgcccaggcttgtctcgaactcctgacctcaagtgatctgccagtctcagcctcccaaagtgctggggttacatttgtgagccaccatgcccggcccctggtggcactcctgcccctgctctgtctactgccacagacggaggccacactatctagaggccactgccttggccactgtggatggcccttgcagcccagtgctaccaagcagaggcaggtttttcagtccagcaggcatgagaggaggcaagagtggaaaaacagaagcagagaggga

SEQ ID NO: 1561598 - DNA, 4001 bp, Homo sapiens
ggagtcctgggaagacgcccatggggggcggccaagtgctttgtgctgttcatacttctctgaatctcctccaaatggtgtcgggctcccatgtgaccttcatcaacatggaaaaacaaaacaaaacaagacatctttaggaaggatttttgaccatatgggaaatgcttatgacaagtgaaaaggagggattccatgggatttttccctcttcatcctctgctgcatttttcatacactctgcagttctcgtgcatctggttttacaatccaggagaaaggagaggtgcagggtggcagaaaggcaactcacggggactgtgcccagccagccatcttcgagtcagcgtacccggccacctgcaccctgattgggaaactaccagcttggtcttccctgccaaggccacaggcaaaaatgctctcttatgttgtattcacacttttatatatgtagttttgaataagaaaaaagggcctattttgaagctccacaggttcaagaaatccctttgccctggggcctcagaccttatactctctcaggtgctcatggcagctcaccctggagactctagggaggggggctgtagcccctcagcatcctccagggtcctgggctgaggtctgtgggaggagatgctaagtttatcagggatgagggtaaagaggaggtcttagcagaaggcaccagaggtccatgggtgtgtctggggtctatatgggggctgatgtggaacacctaggccaatgtgggggtacctgagctgatgagagtcctggactgatgggtggctgtttctggaagatgaagagggcctgggatgatgtgaaggggactgaggtctacatggctggtgaggaggatctgggcccccccatgggcaatgctgtggtggccctggggtcctagaagtctactttggtaggggtctctgattaatgttggggatgtgtgtgtgtgagagagtgtcacttggagggctcagtgcctgtggaagggccaggttcacctggcatgggcactgagatctgcagcccgagccccaaattctattgcggggatgggcagaagggctttgccgctgatgccggatgcttagtgacatagaagacgtgttcactgcgccagtcagtgaatggttctggctttgagaagggggcttacagtggggagggcgttgggagcttaggatgccacacggaggagttccataataaacgagctggggaagtgtgcaagggcagcgcactgggaatacaggggaggggcagcgacgacggctgtggacggctggttggggggaggatggtggggtgattgggtgggggatgggtcgggggcggctgttcaggagggagatgggcctggggcggggagggggagcttgtagggagagagacgggtcgggggctgctgttccagtgggggatgggcccaaggggccgggtagggagggagatgggtccgggggcggctgttcaggagggagataggtcccgggatgctgatcaggtgtggaagggagaacttggacgcggccgagcggtgtttgggcgggcaatgggggtacgtagaggggcttcggcctcaaacggacaggcggatgccaacaggggtcggggtccctgcggaaggggcggccccagcccccccagtccccgccccgcgtggcctctagccttccccttccctcccctacggcgacctcaggactcccgatgggctctggaaccccggcccggcccgccccctcccgggcccgggcccgcctcccccgacgcgcgcccctggaccgcgatcccgggccagctcccgccgacgcggcgccgagaccctcccgggtgggcgtcccgatggacgctctggcgggcggagggacggatgggccgcggcggactcaccgcgcgcgggcttcgctcgggcctgggccactcggtcatggcgacccctgggctggcgagcgcgcccaacgccgcgggcggaccccatccccgcaccctgcgcgccgcgggcggccgccattggtccgctggatcacgccgggcgtcggtgacaagtcaccgctgcgggactcccgggcaggggcggggctgtgacgcacgaggcggccgaggccaatcagaagccgcctgggatgagcgccccgcccccgccgtgccctccagttacctcgggccgcggttccagtcgccttggcaacgggtcgcgcagcgtcagggacgctgctgcggaaagtggagacggtggcggctgcggggatgcgcatgtacgatggggccgcggggcaaaacgacggcattccagacacgcaaccgttttatacagtgtccaagagtagtatgttaaaacattgtttttaatataaatatgtttagtacaagtatgtcccagactaggatcgccactcttagcaaataaaaatacaggacgtcggccgggcgcggtgacacgcctgtaatcccagcactttgggaggccaaggcaggcggatcacgaggtcatgagttcgagaccagcctgaccaatatggtgaaacccccgtctctactaaaaatacaaaaattacctgggcgtggtggcgcatgcctgtaatcccagtttctcaggaggctgagacaggagaatcactggaaccggggaggcggaggttgcagtgagccgagattgctccattgcactccagttttccagcgtgggtgacagagcgagactccgtccccccacccccaaaaaaaagaaagaaaaaagaaacctcagttatatgtaaactcaagaaaaacaaggaggccgggcgcgatagctcacgcctgtaatcccagaactcgggaggccgaggcaggcggatcacctgaggtcgggtgtttcagaccagcctggccaacatggtgaaaccccgtctctactaaaaatacaaaaattagccaggcatggtggtgcgtgcctgtaatcccagctactcgggaggctgaggtaggagaatcgctggaactggggaagccgaggttgcagtgagccgagacctgccaacgcactccagccttgcctgggcaacagagtgagactctgtctcaaaaaaaaaaaaaaaaaaaaaaaaagaaagaaagaaaaagaaaaacaaggaattagtatcaatgtgtcctatatttcatatactttaacgaaaccttacataagaacatttcatataaataagttttaatattaatgtctacaatgtaaccatgtgccagaatagtagggttccacagatactcgttttgtatctgaaatcaggtgggggtgagatcatgatgcaaggagggtcctcagctctgggactgagctcaggatagctgaagctgctcattgctgaagaagaagcaggagagtgtgagctaagaaaagagaggaggacccacctccagggggtccagcatctgctggacagctgtttattgagggcctatgtgtaccaggcactgttctggacactggggtgggagcacatcagtgagagggactgatagggctttagtcccttggaagcccatgttcatggggcaaacaccagtaaacaaagcagatgcttcatggaaatataaatacctagaataaaataaaacgaggcctggagattaagagtcccaggagtggcagggaggggaggggctgcctcagctggataatcagagccgtgtctccgcatctttgctgctggcggctggtccctggaatgttgtgtgtgaatgccactttgtgcagaaaccactatgggaaaaccaaattagggtgctaagggcttattattctccttcttgaaaattaggcacttgtaatgacatggttcattttcttggtagctgaaattggcgtggccctttggggcagtgaaggctcatgtgtgcatttataactgccacccatttgggaaatctcccttgagagaacactgacttagtctgtctctagagtctggatctagacaccatcataggccacctggtaactctagatccat

SEQ ID NO: 1561599 - DNA, 4001 bp, Homo sapiens
acctcacagagtaggcattctggtatgggaataggcaaagaactgcagaatctgtcactatcaaacgctctgcaaactgaggaagcacatacctgcaatccagtttctgagttacagctcctttcccaaaccgtcccaatctctatccactgcccacaactcaaaagccaagcaacctcagagaatgaactgccgaaggaagaagctagggcacggaatttcacctgatgcaagctccatcatcatcacctgcaacccagcagcaaacagtccttagcctagcagccccagtcctagggcatgtgaggattctgcctgttactgagtaaggagagtgtttagaggacagatgtgacctgacaggcttccactgaatcgtgaggaggccagaggcacgggagcaaggagatgcccgtaccagagagtagaggtgtggtgatgtggctaaattctggaaatatcttttttacttctatttttttgagacagagtctcgctctgtcagtgctggagtgcagtggcatgatcttggctcaccgcaacttccgcctcccaggttcaagcgatcctcctgcctcagcctcccgagcagctgggattaaaagcgcgtgctttaggggacatgtgagatcctctgacactacttttgaattttaatttatgtcattgtaaaacgcccagctaactgaattctggaaatatcttaaaggttaagccatgggattttggacagagacgatgtggggattggggaaaagagaaatatccaggtggacaaagaggattgtgggtggagggagtcaccacttggagagactagaaagactgagtttgggggagagtagatgctcagctgaggatcccaaagtctgagaggcctgtccctgggggtcagcattcgggcatcagaggtttgtggagagggcagcccagtatacaaccgcagggaagggaggaagggcaagtcagtggagtcagaacccagcagggatgggaggaagcctggctgggaatgttcacagtgggtaggaaggggaaggaacacacaaccctaaaggggcagaggaggaagccatctcttgggataaaggagaggaagaacagggttgttaggaggagtaggatgaaaagtggggaaagcgtccttgggagtaagacacgggaagcagaataggttgttcaagcccaaatcttgtgaggagaggcagaagggaggggcgtccgcacctgtgcaggaagagaggaggggtccataccctgggaaggtgagaaaaggccatctgtgcccgcaggaaaaaaaaaaaaagagaatattggggaggctgaggttaagggacaggcgaaaaaaaaaaagggatccgccccagtgggagggtagaggaagagaaatgagcccccgccccaaagggggcctgcgcccactaggagagagagttagagggtccgtgctccacagggcgaagggagaggaaattcggagttggcaccgcactggggagaagggtatgggggcccacgcccaacgaagaggagggagtaggggtccgcgccccaccacgaaaggagagtagagggctcgcgccctgcggggagaggcgttagggggtccgcgcccggcgaggagatgcgcgtaccagccccgcacgccaaggggagaagacacgcgggacggtccgcgcctggcggagagagttcctcacgcccgccccgccgggaaccacaagccagcgcccctaacaagcccctgcccagagcagggctgccgcgtaccctcacagacagaaagagcgaccacgcagccaccgcccagccccagccgctctggagtccttgaccccaccctcactaggccttggctccgcgaccggtgggcgggaacggaggaaacagacccgagaggccgcgagaggacggaactcacttcccgccgccgtagcgtcctcgtcagctcgccctccgactctccgcatgggcgcgcagagttcccggatgcgatattccggtgacaccggacgctgggggcggggcctagtgcgacgagggcggggccggggccggcccggggcggggccgtggccgcagctgcctggcagccagaacctgggagcgctcgcagtgctgcctttcggggttctttgtccttcgcttctgctggtaggtgaggtttaacagacggaaagacgccgggagcgcacgtgggctgccttgagccgctgcggacgagcaccttgtctctcaggttgaccagccgtatatccgcttgcgagcctgcaccaccctgggcgcgcgtggtctcggcagaatctcgttcacacgggtcccactcgtaggctgctgtgtctccttcctctcacggcgtcggggactggggcctggagtcactcctctacaggggtgtggaacgcgccaatggacgctgacaccttcatgcggtcgtttaacgctccgtgcacaataaccattttactcagttgtgtgatgctccatcgaaaataacccatttacacggttgtataagaccccacgacacgataacccctctacgcagttatgtaagactccatggcacaataaccccttcatgcggttgtgtaactctccatggcacaaaaacccattgccatgcataaggttccgtgccaaaataaccactttacgccattgcataacactctatggcacaataaccactttacaaggctgtgtaatactctacgccacaataaccctttcatgtggttgtgtaatcttccatggtgcaataaccacttcacttggttgtgtaatcctccagggcacaataatcattttatgtgatcgtataaaatgctccactgtgaatacaccatttgctcattttccttcctgtcagtggatatttgggctgtttccagttgggagttactacaaaggaacctgctgtgaacattgtgtgtgcatcttttgataagcaggtttgtatttctgttgggtgaatgcctaggactgcagctgtctcttcatgggtgcacctgttcaggttaggagataacactagtttacagtgccccctgcagtggtgtataagattcccagttgctccccattcttgtcaacacttggtactatctgttgttttcatttttgccattagtgtgatgtgaagtagcatctcattgtggtttctctgattagtagtaaagttgggcacactttcatgcacttattggccatttggacttttccttgtttatgagggggctggttcaagtcatttgccaacttttctattaagttgcattcttattgagatgctgagttctttatatatttggaggccaatcttttgttggctctacaatggtcttctcccactctgtcacttgccctttcacttgcataatattgctttctgatgaacataagttggttttttggtttttttttttttttttttgagatggagtcttgttctgttgcccaggctggagtgcagtggtacgatcttggctcactgcaacctctgccttccaggttcaagcagttctcctgcctcagacccccaagcaattgggattacaggtgcatgacatcatgcccggttaatttttatatttttagtagagatgggttttgccatgttggtcaggctggtctcaaactcctgacctcaaatgatccatccacctcggcctcccaaagtgctgggattacaggtgtgaggcactgtgcccagcccctttccagttttaaagccaggaacagggagtagattcctcacacttcagctctctactcgctccttcctcagcatctgactccagcccacaatctctgcttttaagggcatgtgtgctagattgggcccatccagataatccaggataccttcttctctatctcatgtcccactcatttcagccaaacttgcaatggcccaggctaccccagaatccatctggaactcacctagtccacatctcatattctctttggtcaggagtttctatcctctgtgattg

SEQ ID NO: 1561600 - DNA, 4001 bp, Homo sapiens
tgggattttcctggagcccagccccccagcctcagcaaatgaagcaatctgcacaagtcttgagccagtcctgtaggctttgctgcacccagaggcctggaatacagaagctgaggcagagagctccacggtgggtgaggggtggctgagctgaggggtcccaagcctggtgggtctccagagtcctgcagcaaatccccttcatcctgggctgagcagagctcaagcctggtttggccctccgtgggcccagccctggccacctgaggaatattcatcgcagctctccatcccaccacactcatcggcagggtctagcaaaccaccccacagccacaggcctgaggatcagccagggaagctcaatgcatgggatgtggttgttgatgggtcgccggatattcccagggtctgccctggcttcatccacagatcacttactcattataaaaaggggtaaaagtgcttttaaaagaatgaaaaaacatggagtaagggtcgtcgttcacatctcagctgccttttgtggtccctgatccactcgccaggacagacagaaccagagagatgtcctgcgcaactggcctaggctccccgaaaacccgaggccagaaatacccaggaagtcacagattcaagcatcatgcacagaaaacagcaactcgatgcgacacgtggtcccgctctgactccagggcaggaaaccatccgcaggacatgatgggatgggggaagtgaaatggaaccgaggaggtgacatggaaccaagtgactgtgccactcagcctcgcccaggagtcagcaaggacacaggcgaatatatgggaaagtggaaggagggcagacagaaatgggggaagcggggagggaaggtagcagggagagagaagacaggagaggaaggagcaagagcagggaaagccagatagtctggacgggggtagagggggattgggaaaaggaaggagcccaggagggtgagagaaaggaaatggggaaggagtgatgggagggtgagtcaggcccccaccccaaccccctgggtcaggaccgaagccagtacacccactcttgcctcttccacgagagaggtctccggggtgggcgcagacacctaactcaaacagaacccacccccaggtgactggggagaggcgagatattccaagggtgggggcagcagagacaatgcccattctaggcacccctttggtccccgcaccctccatcccttccctgctccagcccctggggccacagcctgcccagcgtccccccaccacggacaccctcacatcctcacaccctcagcccccacttcctcccctcctcttcccttcaggagcctccccctcccttctcttccccactcaggagcctccccctcccccttttcgcccccctcaggagccttcccctcccccctttctcccccatcaggagcctccccctccctcatctctcccccatcaggagccgccccttcctgttctcccacccacagggtgccctaagcgcctcccctccacgagcctacacggggtgggggttgcactagttccctacctgcctgcagggcccctcaccgatctggatctcagccacctccggggggacccggcccctgccccgcactccacgcgaagggatgccagaccctcggcctcctggacgcacagcgggggctcgcaccccaaccccgggaacaccctggcccctttccctaacgctgcccactgaggcgtcctcaccgtctaccctgttggggtcgctctctgacccccgcgctgcatccccgggaccgacccacctgctgcgcagctaccccaggccggtcccagccgcccggagccccagtgcgcgatggcggccggcaaactgcgcctgcgcactgggcctcaccgcggactacgactcccacaatgccgcgaggctgtgccgcgcaccggggcgagcaagggagccgtgacaggtgacagtgcgcatggccaatcagacgcgagtgtggcctcccggcgtcccgcccactccggcgcctgcgtcattttgggcaccatggcaacgaagtaaacaagcgggtaaataatagacccctgacagccagagacccggagaaacaaagacggtgagaaacggagaaacaaagacaaaaagacgcgcagaccgggagggagagaagcatgaaggcccacagacgctcgggggcagaccaagacgccctggggtccccgaaacagagatgtacagagtcggacacggaaagggagagaccagctcacggttaagaaaggagggagaccagcccaggatcaagaaagggaaagaccagcatgggctcaagaaaagaaagagaccagctcaggctcaggaaaagagagagacccagagaaaaggagcactcgaggctgagacagatctggacagagatacagagacagggaccagcagacccagtactggggagacaagaggtggagacccagagacactgatgcgctaaaatgggttctacagtttcaaggagtggatagaactcaaagattacccaccccagggattcaggagctgctgaaatgagggaaatgtgagtggcagctggggtgagggctttggcaaagccccatataaatgtagcccccctggaaggcaggatagggccaggagctgcttcccatttcagttttccagatagaggcgcttatgaggatgccattttggtcgtttttgtgtgaactgatttttaaaatgtatatctgaacagtttatatattttaaatttacatacaccacacattttggtattcagttttatgaattttaactcatatccaccaacaaactcgggacaaagaatagctccactgcccaaaaatcctcctgctgcctcttggtagtcactccctccccacccataaccccaggaacagctaatctaagtagtccactgctacaattttgccttcacagtgtcatataagtgggatcatacagtatgtggcctcttcagattggctttttcactgaacataattcctttgagaggcattgaagtagtatgtatcaacagttcattccattttattgagaagtagtattctatggtatatagcagtttaaaccttctcccactgagagatattaggatcgttttaagtattttgctattaaaaataaagctgctatgaacattcgtgtacagatttttctgtgaacgtaagttttcacttttctgggataaaagcccaagagtgcagtttctaggtcacacaatgaacacgtgcttattagtgttgtaagaagctgccacactctcatgcagagtagctggaccattttacactcccaccaccaatgaatgtgtgaatccacttcacatttttatcagcatttgtgttttgctattttttattttggccattctgataggtatgtactgatatatcattgtggtttcaatttgcatttcccttaattgctaacaagtttgagcacactttaatgatttttttggcatttgtataccctcttcattaaagtatctgttcgtatcttttgcccattttctaatttttaaaaaaattgctcagttttgaaagctatgttttttttttttttgagacaaggtctcactctgtcactgaggctagagtgcagtggtgccatcatgaatcactgcagccttgaccttccaggctcaagtgatcctcacctcagcctcccgagtagctggaactacaggtgtgcgctaccatacccagctaatttttttttttaagagatggggtctcactataatgctaaggctggtctcagacccccgggctcaagcaatcctcccaccatggcctcccaaagtgctgggattacaggcatgagccaccatgcccagtctttccagtttattttaatggatataactcaggaactgccaaatggaagagatgcacagctaaggtctggtcaggggcactgaaggtgcagtgcatccatgtaccgtctgg

SEQ ID NO: 1561601 - DNA, 4001 bp, Homo sapiens
ccagatacctggtactagtctaagtcctcttcccagagtgccctgggtaactctttgctagttctgtactgtttcctcagagaggctgggctgtcctggagccacagcacacaggacttgccctatagcaggttcacaataagcaggcattaagcaaatggaatgaccagtaaaggctgagcatggttacccaagaatgtagggaatcatgaggggaaggaggagcaagggtggcagggatgacaatagatgctgcaacagcttccaagttctcttttgcacccctggaacacctgttctggagaaatccctcatgacggtctctgaaatacatgtatgtgaaacttcctcagcctcctcagccaacctcaactcctatcaggttgaggttccccatccacagctgctttaccaaccaaggagggtggttcttttcatttctcacacatggattataccaagcctgataatggtacctacctcagagggttgctatgagattatgtgaggtgatttattataagtgtccagcacaggcctggtgcacagtaaacatgcagtagatgtatggataccatagccccctgctacacgtaagcaaacactgggggacatatccataagcccagctgaatgaccactagtcactcagtttcagctgcagacatggcaaagcacaaatcctctctcatatgcttggtaaactgtttgtggatcacccaagttttagtctccctgataaaaatctcagtcaatcagatattaacacatattatctcaggtacagtctgtcagccacagccttcaaaatacccagacacaggaaatatctcaatgtcacctataatcagtcaaataaacacaggcctggccaggcatggtggctcatgcctataatcccagcactttgggaggcctaggcaggtggatcacctgaggtcaggagttccgggccagcctaaccaacatggtgaaagcccgtctctaccaaaaatacaaaaattagccaagtgtggtggccggtgcctgtaatcccagctactcgggaggctgacgcaggataatcgcttgaacccgggagatggaggttgcagtgagccgagattgcgccactgcactccagcctgggcaacagagcaagactccgtctcaaaaataaacacaggccctcgcagcatttccatcacacagtattattctgatcacagtcattcataatcttagtcaccatctcaaggacacacaaagaaaatcagtcacacttgaaatcccaccgtcacacgctcaccctctcacagtatctcacaacccacgtaggaagtctcaaacggcaaccatctctgtcagtcacacactccatggttagtgttacactcaacctatcagaatcacacactccaacccgtcagatacacacacccaagaggtgtcagacacagaaccgcctatcagacacataaacgggtccgccccacaccctcccaggccactggtcctacattttatctgttatctgtccgcccgctccacacttcgtccgccccacacccggtcaatcagtccatccgacacacactccgtcagtccgacacattctccgtcggtccgtccggcactcagtgtgtcattccgcaccacattcggtccgtgagtctgtccacaccgggtccgtcagtccgtgcacacacggtccgtccacgcctggtccgtcagtccgtcacatcctctgcgcgtgtgtccggcactcgcagtccgtctactcacgtcccctagtcagcctctcactctctacccgctgggcggtaccccgcatctcgctctggccgccccagaggttcgcggcttctggacctgctgtgcccctctccagcctggatcaggacggagaacacccccgaaacccacctcaccagcacagccggcggacccttccggaggtggccgcagagactagccaacttgcgcgcccgccgacccggaccacagctcccagcacacctcaagggcccacgcccgccaggactacaattcccggcgtcctccggaagctcaagtgtacccaggcgcggtgcctgctgggaattgtagttgacgttggtcagcacggaggccacaggatcccagcccggcctttgtgggactgaggtggcgctgagtgggagagcagcaggcgatgcgcgaaaggcgggacttggaggtgagggaaatgtgaaggctgagggtgagagtgcctgtgtgaggctgagggtgcctgtgtgagggtgagggtgagggcggctgtgtgagggctgagggctgagggtgcctgtgtgagagctgagggtgcctgtgtgaggctgagggtgcctgtgtgaggctgagggtgagggcggctgtgtgagggctgagggtgcctgtgtgagagctgagggtgcctgtgtgaggctgagggtgagggcggctgtgtgaggctgagggtggctttgggagggctgagggtgtttgtgtgaggggtgaggggtaagggtgaggcaagaaaatcgggtctggaggcagggaacctaaggacttcctagaagtaaatcaaatggaaactgcagctatggtaggaaatatcctctccatttatgcagggcgtacatggagtaaatcactttgtaactttacttcgtcctcttcatttacatagggcatataccaagtaaccaatggaaacctctagagggtatttaaaccccagaaaattctgtaaccgggctcttgagcccctatgctccggcctgctcccatacagtggagtgtactttcattttcaatacatctctgcttttgttgcttcattcttttctttgtgcattttgtccaattatttgttcaagatgccaagaacctggacaccctccaccagtaacaagggtacctgggtgagaggtgagggtgcccatgttaggagtgaggggagagggtgcctgtctgagggcttgtgggtgtgagtgtctgtgtaagtactgaaggtgcctttgtgagaggtgagcggtgtggttgcctatgtcagggtgtgtattgagtgtagctatgtgtggctctctgtgaacacatgtaatcatttttataaatgtgtatcattttttactgaatttgagctgggcgtctgtctgcatgagtcactctgtgaccaggtttgtgggttgttctgtgtgcttactctgcgtgtgtgtgacctgtgatttaatcatcatatgtgataatcatgcagctgtgtttgcctgcaccaggtgtaattgtgtctgagacagatacttagaggtaatggggtggacctgacacagtataaaggccctagactgtgtgtgatgttgttacggtgactgtgaatggtagtgtgattgtgtgattcagtcgatgcctggactgtgtgtgagaatgtatcttctctgtgtgtgtgtgtatgtgtaagagacattgagcaggagactctggcttggggcccgatacatagaggttggtggcccagcctatgttcaggtgaggcctttttgaggcagggtgtgtatgattgcttggtggtgctggtggtgtttcttggccccagcctgtgctcacatcccctattattctcagactttgccctgcagactgctagcagctggaatgagcatatattcttttccttccacagataaatactgagcacccacaacaggcagccagcaccactgcagattggatactgcaatgatgataagcatggcctgcctttatggaggtgatgttattgtgtggggaggcagatggtaaacaaagaagtcatttttctgagaagttggtatttaagctgaggcctgaatagagcgaagaactcagggagagtaagttcaaggtagatggaacacaaatgcccacgtcaggaggaggcatggatgaggaagactggctggggtggattaagggaaggagatgggaggggacaaggacagaaaagggaggcctgtgggggcagatcttgaagggcttgtgagcca

SEQ ID NO: 1561602 - DNA, 4001 bp, Homo sapiens
tgagctgtgattggggctactaaactttagcctgggtgatagagatcttgtctcgaaaaaaaaaaaagaattactagaacataaagtcatacgatagactttttgaagaaaaatcttcagtcacaccaggcctttatacagagttcacaacatcaagcccttttgggtcagagctgttgtaacaaaagaccattccctacacctgggagacccccatatctctgtagttaggaattttcctgaaatagctatgcctacatacacatgtatacacactcaaagacacaaaattatgtatacacactcaaagacacaaaatgtatacacactcaaaggcacaaaattttccttccattatggaagcttacctccttggttgactgggtaatcccgggccgaacactgagctgatgtgtgactagctttccacactgggtttatctgatgtgcctcctaaggctgctcccttttataggggctgggatcagtgattgatttaaagacgtgattggataacacttgtctgttgattgaattactgatggaatcttcatccagccccagctccatgtcagtgattgatttaaagacgtgattggataacacttgtctgttgattgaattactgatggaatcttcatccagccccagctccatgtctctaatacagtgttctataccatcactggtcctgggtcaacaggtcataaacaaacacattaatatttctgcaggctaggtgcagtggctcacacctgtaatctcagcactttgggaggctgaggcaggcagatcacctgagatcaggagttcaagaccagcctggccaacatggtgaaaccctttctctactaaaaatacaaaaattagccgggcatggtggtgggcacctgtaatcccagctacttgggaggctgaggcaggagaattacttgaacctgggaggcagaggctagagtgagccaagattgcgccactgcattccagcctgggagacagagcaagactctgtgaatccctagcctgagcaacaaagcaagaccctgtctctaccaaaaataatgttaaaaatgttagccaggcatggtggcatgtctgtgtagcttgtttgagccagggagttcatggctacagtggattatgaccgccctactgaactctggcctgggaaatggaaggagaccaagtctctaaaaaaaaaacaaaacaaaacgaacaaaaaaaaaaccatgcctgtaatcccagcacttttggaggccgaggtgggcggatcacgaggtcaagagttcgagaccagcctggccaatatggtgaaaccccatctctactaaaaatgcaaaaattagccaggcgtagtggcgcgtgcctgtagtcccagctattcaggaggctgagcagaagaattgtttgaaccacagaggcggaggttgcagtgagctgaaattgtgccactgcactgcagcctgggcgacagaggtagactgtctcaaaaaccaacaaacaaacaaacacacacaaaaatacaaaatctgcggtaaaatgtaacaaggtccacattaaatgaaaatataaagacaggctgggtgtggtggctcgcgcctgtaatcccagcactttgggaggccgaggcaggtggatcatgaggtcaggagtttgagaccagcctgaccaacatggttaaacccggtttctattaaaaatacaaaaattatctgggcgtggtagcatgcacctgtaatcccagctactcaggaggctgaggcagaagaattgtttgaatccaggaggcagaggttgcagtgagccgagattacgccacggcactccagcctggacgacagagcgagactgtgtctcaaaaaaaaaaaaaaaaaaaaggaaaatataaagacaaacgttagtctcacaaattctgatcaagttttattataaattactcatagaaacatgacaaacttttgctcaaacttttaagttttcagagatttatgaattacaagggtggcagagggcaaggctaatgctgtgactcctgtgccaattccaggctggtgaaacagagggggcccgggacccagagaaggcattcctaatccatcaaaaagatgacaggggttgagactaggattatatcagtggaaagggagaaattggtgcatattttatattgagaaagcatatgatgtttgatagacttaacatgaggcttgagagagatggaggagttaaaatggtgagaagcgcctggtcacctagtgtggtggaagctgtgccttcttccctgcactctccctccccactttccaccctcatacaggctgaggctttggtggagttgagaacgtatcgaaggggtgggagctaattacagccatgtgtttcatctgctccatcaggcatgcagcctcttggggcttagattgtccccctatcactgttgggtacagagtttgaatctcctggtactccactgatgaaatgtctgcttgacttccccacattaggaattatgttctgaatcctcacattataagactgtgtactagtccatttctccaaggagtttcatccacatatactccatacagagaagtatccctgctcccatcaagagccaattttccactggtggtttaggtcctgtcaccaactatgtcattaaaccaactgtgacaggaaaattggctcttgatggaagcagggatacttctctgctacaacaatgaaaaatgggctgggcgcagtggctcatgcctgtaatcccagcactttgggaggccgaggcgggtggatcacctgaggtcaggagtttgagaccagcctggccaacatgatgaaacctcgtctctactaaaaaaatacaaaaattagccaggcatggtggcaggcacctgtaatcccaagtactcgggagcctgaggcaggagaatcacttgaacctgggaggccgaggttgcagtgagccaagatcgcaccactgctctccagcctgggcgacagagtgagactctgtctcaaaaacaaacaaacaaacaaacaaaaaacaaacaaaaaaaaaacaatgaaaaatgtagacaatgtgagtaccactggaggccagttgttaatttgtggtgggttgaaagcatttcctgtctgcttctgcagtctcaaggagttccttgagctctgtaaggagctgtaaggaaaaggtttggggaaaagctggcaatttctgtttggaggaggttattggatttttgagttcagatatacagccagctgttggacatgctggtgtgtaactctgggagcagttagacctgaggcacgatgatatcagtaagagtagtaatagcatcagggatcataataactaacctttaagcagtcagggcatatttgactctgttctcagtgctttctgtatgttaacccatttccatcacaacagtcctgtaaagtagatcctaaataactccattttaacatcaaaataacagaggcacagagaagttcagtaccttggccagtgctacatagcctgtaagtggctgggctaggatttgatacctggctccagagtgggactctgaatgctacattaagaaggcaaagacacacagccactgtgtaaaaccagcagctttctagggaatgggctaatggaggagtgaagggcatgagcaggaggatttatccttggggaaacacagatggtggaggaaatgacctggtgataccccaacttaggcatagaataaacaggcacaaaacaataaaaataaatgtgaaatccacatagtaatttaatcaaataaggatattacaaagacaactatcaaatgcttttctgatcaattgggaaggcaggtagtgctgcctttggtaaaaatagatgacccgtttacatccagcatcatctcaacttgtgtctggtgagtatccccgctccagtgtgagtgaggaaaataacctttgtttccaagaagacaaagccaatccgcctcagtatgtaggaa

SEQ ID NO: 1561603 - DNA, 4001 bp, Homo sapiens
aacccagaggaggagacaatatttacacaccacacatctcacggggctcctgtgcaaaacataagcaactcaaactcctccagagcgagaaaacacataacccactagaagggcttaaggcgcctgtgtggacatctcagatgaagacatgtgaatggccagcaggtctaggaaaaggtgctcattatcactcatcatcagggacatgcaaatccaaaccacaaggcacccctcacgcctgctagagtggctgttcccaaaaagacacatggaacgagtgttggtgaggatttgggggaaaggggtcctctgcgccctgtgctgggatgtaaattagagcagccgatatgggagacagtatagaagctcctcagaaaattgaaagtccaacaactgcatgatccggcaatcccgctccggggcaggtacacagaggaaaggaaatcaggacgtggactccaaaacagtgaaactctggagggatagagggagggagggttgaaaaactacctattgggtactatcctcatatcctgggtgatgggtagagtcatacctcacacctcagcatcactcaatatactcatgcaacaaatctgcacaggtacccactgaatctaaaacacaagttcaaattacaaaaaaaaatttaaaaagaagtaaataacataaataataattaaaaacccagtggaactcatagtagtagtgagtagaatagttaccagggctggggtaggggttgggaagatataggtcaaagagtacaaatttcaattgaagaaatcaattcaaaagagcaattgtccaacatggtgacttcagttcataacaatgtattgtatacttggaaactgcttaaaaaaaattagatttcaagtattctcaaaaccaaaaatggttagtacatgaggtagggcatatgaatattagctcaatttagccatttaacaatgtttgtaatactacaaagcatattatgctatatgccataaatatatacaatttttagttttcaattagaagcaaattaatttttattgaaaaagcacacagatatgatagagaaaagggagcctgaaattctggaattaaaagtggttttgccagagggcgcctgctgctgctcaggaggcagaggcggaggtgggaggatcacttgagcccaagtgtttgataacagcctgggcaacatagtgagatcctgtctctaaaaaagaaagtggtttcatgttcctagaaatcactttgtatttgatcttagttcattccccgttaaagtaagaaacaagacacaggaaaaaataaaggcagacacaggagttagtattcaattctgggagtatataccacacgggtcacccaggtagggacacttagctcagattctcattggcctagtaggttgatgctcattcatcaatgatttgatttcaccctgtgcaaagggaaaatccagcaatgctttttaaaaagggtgtgtggcaggcaaagtggctcaggcctgtaattctaacaggttggaagaccgacatgggaacatgctagagcccaggagttcaggaccagcctgagcaatataccgagaccccatctctgcaaaaaaaaaattaaaaatttatccagtcgttgtggcatatgcctgtagtcccagctactcgggaggcggaggcgggcggatcgcttgagcccaggaattccaggctagtctggaattcaagcgagaccctgtctctaaaataaaataaaatataacctaagcttgatgagaaagttagtattattcctagtttacagaagcgttacataacgagtcagagttaatcatggggtgcaaaggagacccgctgccttcacaaagtctccgagaaaacgcacgaaaaaataaacccaaactttctgaaaccaacccccgacatgccagctcctaaacccgacagacatccccgctggacactcacctccttcccggcttctgcctccgaccttctcggtctgggatgcgctctccaaccggcctggagctgaactgcgtctatttatggagaagcgggactccaggccgcgtttccggttccctgcgccgccccgtgattggtttagggccatagagtccattttacgtaatcggcgttgattatggttcccactgaaaccccacccacaggaaattaatgtactaaacatgcctactgtgcaaatatttcccgctctactgagttgtcatactgctgaagtatttggtggcctcagaaaatatagatttgcgagttttaaccattttgggtcccctcatgccacagacagtaatatcctaacaagtaaagaacatgttaagagctggtggattagtatcaaaccagtgatttgatctagtttgagcaaagctctcacatatgaatgtcaagatactgaaaaaaagagacagtctttgttgatacataatgaatattggtgataattttttactgaaaaaaagagacagtctttgttgatacataatgaatattggtgataattttttattttttaaaaagaatattggagttgacatgggaaagctttgtttgaactagactaaatcagtggtttgatatcagccaacctacccttatataaaaacagtgggaaccagagaaaggcacatggtccccactctgcattcattccaggacggtgatagggtggtttatagatacactgagggtcctacggggttccctagttctcagcccccctcagttagggctctcaagcacgaaaagccttaacggtgggtgtgaattttactgtgtggatcatggagttaatgtggaatgataattaagtgctaggcaggattagattacaatttgggaagttcacaccatcagttggatgacactaatccattcaagtagtgactcattcattttaatttcagaggaaaccttctcgtctaacctttaggacaaattggagggctgttaattttacactgattctggtttaaatccttggaaaatcttaagccgcttcactctgggaacttcaaacttcttgggagtagaactttcctgatgtgttgttttgaagatgaagtaagactatgtcagtaaagtgctcaatacaaggttcattttgccaagaaattgtaacaattattttctgaggcatgttctcatactttgttacattttttcttgtttaccactgaggtgttgactctaactcaactctaacaaatgagttagagttaagaatggaattattcactggaattaactgggagctgcctaagccactctctggctacccaattcccgattcccctaaatcctcccctctgtaaactcatagtcttatttctgtgaagctgccgttggtattttggaagagaccgcatcgaatctgctgatgtctattaatagtatggtctttttcacattctatgaacatggctttccatttttggtggtcttttttgttttttttcattagcacttaatagtttttcttgtggaaatctttcacctccctggttaaatttattaccaggtttttaggggttcttttgctattgtaaatgggattgctttcttggtttttgttccactagcttgttggtgtataaaaacactactgatttttgcatgttgacttcgtatcctgtagttttactgaattcctttatcagttctgttttactggtggaggtttcaggtgtttttatagatgataacatgttgtttgcaaagagagacaattcgacttcctccttctgaatttggatgccctttattccttgctctggctaagactttcccaacacattattattatattattattattattttgagacaaagtgtcgctctgtcacccaggctcactgcaacctctgcctcttgggttcgagcaattatttgcctcagcctcccaagtagctgggatttcaggcacacgccaccatgcccggtgaatttttctatacttaatagaaatggggttttaccatcttg

SEQ ID NO: 1561604 - DNA, 4001 bp, Homo sapiens
tcccctcctgactggacacaccagacttcccatggaccaccccatcaccccaagtaaacatcaccacctcatttctgcgtctgtccctaatctgcaccctccatattctaaatcagctcctttgcctggcggttttcactgtttggttctctgagaatatttctccccgccgtgccaatgtctccctgcccctgacgctggaagaagcatgactctaggtggaggcccctaacccctggcaccattggcattggggctgcatcatcctcctggagggggcgctcctgtgcagagcagagaccccgcctccaccctctagatgctatcaacaccccaccacccctgagaatgccaaacaaaaatgtcctcagacattgccaaatgtgtccttaaaggcaaaatcaccagttgagaaacactcctcaaattaagaaatcaacagtctgagaaagtgggttccttgctgaatgacttcatgaaatgtctttgcggaaactggatggggtagggaccttcagttcattcatctgtgccaactgcctccctcacttcactgagaccatttcttacccacccccccaccctaaatgctaaaagctctcatggtggagagaaaagtagatgaggcttccctctctgtgatggctcaggaatgaatgtttggggatgtatcatgtccatggggaatggctctaatcttgtcctgtgccaaatctctcaatcagttctgcagccacacgatttcctcctgttccttctcccacctctgcccagacaccaaggcctcacacactcacctgcctcctggacagtgcagcgaccctgggcaggatctgctgctctcggcgggcctggcctgtccccggatgcatctggttcacagaggaggcccactggctggacacgtctctcggatcatctctgacactggcgggggcttcagccatctcgacatctgagttcagcataagatattctttgccgagcaagttgactatagactgtagagagaaaaaagacaatcagacactatgagaacctgaaagtagctctcatatttcctgggtcctgccataatgctcacactttactgtaattaatgttcaaatctaccttcctgatgcagaatcagctctgtggacacagcaatctgtctgaatttttttcttcactagataagtacataaatatgagtcatttagatgaaagggtctctaaccaaagagaagacaaggagaaatattctgggtgaatccaactcaattggccaatggcagctcaccttgtgttagaacttaggggctcatttggggacctggaggcagatccctgcatctgataccaaccactttccctgcctcaggatgggacttctgggccccccttcagttcactctaatgcctccttccctacgttccatcaggcctaatattttaccaatgtctttctttcaggttggcctcacacagtgtgtgggttcctgtatcccctctgcctgtccatctcctaggtcaggtatttgcaatattagctgtgctgatatttgagactggagaattctttggcccccatcccagctccccttccctgcaccaatcacgaggttcccactcacccatttcttgggtcttctgttatttcgtagcaggtcctccaggtctttgcagctctgcacaccgttcaccttgactaagacctggagctcctggggcatggagatcatgaactgctccatcaccagcatgtccaggatctgctctttggtgtggaggtcgggcctcagccacagatggcacagctcagtgagtttcctcagagcctggatggggtccgactcctctgggcagctgaacatcctgaaattcatgtgccaagtctcagggttcctgtcgtgatttccaagttgagtttctggggacgccacagaccgtggagtgtctgacccagggctgttgcagggtcctccctgaccccatgagagtgtccaatttgcagccatatctactggagaatatttcaatcagcctctgagcaagctcttccagtagccagtatcaaattgagacctatttacacaggctgcccctgtttcttctcagtaatatattcacagtttgttcagaagtctgcaggaaaaaagcatgagcccgattattttaactttctactccacacacccctcccttccaaatccctcatcccaatcctggaccccacttgtccatgggcatcggactcagccctgtggaaatgaatccactctgttcttctctgactacatgttctggggtaaaatctgaatgctcccctggattctgatctctaggggatcattgtgcagaggtggaactggttttcctttcaactggaacaacactgctcttgactgtaaattaaatcggatatgtatgtgaagctcctagaatctgatgtaacaataatgtcagttctttatgttttcccgtcaagacaagatccaaggcaaagcccttagtcataattatgtaaaaagctagagaaaaatattaatagttacaacctacgattgtccccaacacatttttcctgttaaccccaggatatttatttgctgcagggaagaggtgtcactaaaaaatcctatgagaggccgggcgcggtggcccaggcctgtaatcccagcactttgggaggccgaggcgggtggatcacgaggtcaggagatcgagaccatcctggctaacatggtgaaaccccgtctctactaaaaatacaaaaaattagctgggcatggtggcgggcgtctgtagtcccagctactcgggaggctgaggcaggagaatggcgtgaacccgggaggcagagcttgcagtgagatcatgccactgcactccagcctgggtgacagagtaagactccatctcaaaaaaaaaaaaaaaaaaatcctatgagaattaagctcctgcacagatatgtggttgtttcggtaaaacacacatttatgaaattcatcacttttactaagaacatgcgctatgttgtgcaaccatcaccactttctaattccagaatcactgcatcaccccaaaagagaacgccatccccatcaggaattacctcctgccccaaccccctcccccagcccctggccatcactaatctgcttattgtctctgggagtttctctgttccttatctcattccataaaatggattaaagtcttatgaaatttccaggtagtgggatcataccatagagcggttttttcttttttctttttgagacagggtcttgctctgtcatccaggctggagggaaatttgcagtcatggttccctcggcctcaacctgggctccagtgatcctcccacctcagcttcccaagtagctgggactacaagtgcatcaccacgcccggctaatttttataggttatttttgtaatagagatggggtttcgccatgttgcccaggctggtctcaaactctgggctcaagcgatgcgcttgctttggcctcccaaaattcggggattacaggcgtgattgcattgcagctggcctacatttttaaaaaattttatttttttatttatgttttttgaggtggagtttcgcactgttgcccaggctggagtgcagtggtgcaatctcagctcactgcaacctctgctgcccaggttcatatggctctccttcttcagcctaagtagctgggattacaggcccccgcccagctaatttttatatttttagtacagacagggtttcaccatgttgaacaggctggtctcaaactcctgacctcgggtgacatgcctcggcctcccaaagtgctaggattataggcgtgagccatcgcgcacagcccaatttttttttctttttaaatttggttctaaacatagcttcaaaaggcaaaagccactgtatgatactctccaggcatcaattatcacccaagttcaacagctatgagaacacagccctgctttcctagacacaggtgggggaagcaacc

SEQ ID NO: 1561605 - DNA, 4001 bp, Homo sapiens
tgggatgaattcacttgttcagggtcccagagctgtgagttgtttcaactcctaagacagactctgtcgttcctcagtttcccttccatgccccatccctgggaaggggccccaggaggggagggggtgtcctggccaccgctgtgggctctgggcaatacagtgagctggctgagcctgccttccaatctggacttgctattccctggctgggtgaccttgggcaagtttctcaacttctctgtgccccagtttcctcaaagtgggaacaagaacaactgccaaagggttgcaggggattccatgagcttctgtgggtcaagaactctgagggctcggcttggccagggcaggtttgtgggaggctcggagatggttttcagattgttctgtgtgtctcacatgcaatgaaggggccctccttagcccctactccacctgggtttctaggggaagtgggagaggcaatgaccagcccaggcctcagggacagttggcaaatgactaaggagggattttccagtccatgaatcagagcctgcccatccacacttggcccaaacccatccgtccaggccgacttcctaactccagagaggccgggcaggaaagaacgccccctgaagctggacagaggatagagcccgtgtgtgcttcctgttcaagtctgggccatgtctccagttccttgggggcccacactgaagctgaaaaaggggacttaaagggccccagctctgggacatcctgtcagtgccaccagaagccacagaagagagcttctaggtgcacctgtccagggaccaccacccaggctccgcccctgctgttttcctatgggaagagataggataggtcagggggatgaggtggggaggaggagggaccctggcatttcagtaatccctgcggcaagccaggagaagacgggcagccccgaaagaggaatctggaggagtagagaggggtccccaaggaacaggtggaatctggaggctcgagggcaggaatgaatggggaaaaaaggggtgtcttgagctggaatctggagagatgggggagttatttacttggggtgtacggtagggatctggagagcaggaatggggtagtgtgagtctctagaggctacgatggagggagacagggtgtccccaagcggggggccgaagagaggattgaagactgaatggggtgccctgattggcgaataaagatgcggtaggaaaagaggggtaccgttgggggataaggtgggaaaagaggggtaccgttgggggataaggtgggaaaagaggggtaccgttgggggataaggcgggaaaagaggggtgcccagggttgtaggcgggccatgggggccagatctcagagatctggggttggtaggagaagaaggaagtgtcctgatttgggatctggggcgctgaggggcagagatggcagagaagggatgggggtgggttactgggtttgaaggacagaaacaggaggatgagggggtgtttccaggcagggttaagggtcctgggggtggaatctcagggggtgtctctgattgggttagctctggagtctggggattgtgggggaggagaagacaggtggggaaggtgctgggggtgcgtccctgcccccgcccccttcccccgcggtcacctgctcgaaggcccagctctcggctacccgcttggcgctgaggtccagcagcgcctcgggccggccccggccacgcgcggccccggccccggcatcgcgctcctcgggtcccgcggggcagccccggctccgcttggccgcggggggttccatccggcccggccggggccagggccggggcggggcctctttggggggctcggtccgatgcccgctccgcttcgccggctcccgcgccccctgccctccttcccgtccgtcctctgcgctcggccgccccgggacccctaccgcacccacccccgacccgcgccgggccggcagggtgatgcggcccctttaagactcttcacaacaatgaagctgcttcagccgccgctttagctccgccgtcgtcccgcccccaccgcctgtccctattggccccccctcggcctcctcggccctcccccgccattggctgcgccgccagacccgtgtccaagcctcgctgctcactcgatgactgcgatgccagtcttttcttgtttacccaaccagagcgcacagcgaggggcgctgtcaatcacggggcgccagaggccaatcagagtgggaggacccccgcggcccaggccttatgcggagtttcggggcgggcccggggttcattcacaacattcctcccccgcctctcttgggctggactgcgcgccccaggcttctggggctgcgcccacacacggctttgtttactgagggtcgcttccgggcgccgcgaggggacaatcaacatagcccggccggtgagcgagacagagcagcgggatcccttggcagtggctcagcccctcgtccctcccagctgtgcgacccgagaaactcactcaacctctctgggcaccgggtcaagttttggttcttgtgggggcggaggggtcgcaggctcactgagggagctcatgcgggccgcggaccccctctccagaaacaaagctcggttagggggttcataggtcatcccttgagcctcaaaactagtatagtaccccgcccctcctttccatgccctagatactatcttgggtcatatgaaattgctaatttttttttaccatttttggcctgttaaaatggcaattccatgaggttcaccctaacacttaatcaaaccccagcacctctgagcattttttctgactcagcttgtgtaggccaccgtctctggcctggaagctggccatggcttccatcacccgttcccgtcccggctccttgccaatgtcctcagaggaccctgcatttttccttcctcatacttctcaccattaccatttatttatctgtttcggcggtttttttttttttttttttttttttttttacggagtttcactcttgtcgtccaggctggggtgcagtggtgcgatctcggctcactgcaacctgcgcctcccggggtcaagtgattctcctgcctcagcctcccgaatagctgaaattataggcgcccaccaccacgcccggctaatttttgtatttttggtagagacggagttttgccatgttggccaggctggtcttgaactcctgacctcaagtgatccacctttggtagttgcttaatttcaatctctccctctccactgtgagcctcaggaggcaggagtttgtcccatctgtgctttactgtaccggcagcacctggaaggtaggcgcttaacctagaacttgttgaatgtaccaaccaacacatgctttgcctccattcagttaaatgataggcacagcagaaaaaaaaaaaaaacagtgattatccactcatccatatggaagccctagctttttcttggagaaacttcgagtctcacagctgcaccctctggccagtcttcacccactctccctgccaccccctcaattagttaaactcccctgcagacctgcactgtccagtatggtcaccaatggccacaagtggtctctgagcccttgaaatgggactggctgaaattaggttgtgctggaaaggtaaaatacagagtggattttggagacatagcaggaagggaacaaggaaaaatatttctttttttttttttgagatggagtgatctcagctcactgcaacctctgcctcccaggttcacgtgattattctgcctcagcctcccaagtagctggggctacaggcacccaccgccacgcctgactaacttttgcatttttagtagagacggggtttcaccatattggcaggctggtctcaaactcctgaccttatgatctgcctgccttggcctcccaaagtgctgggattccaggcgtgagccaccacgcccggcctaaaatatttcattaag

SEQ ID NO: 1561606 - DNA, 4001 bp, Homo sapiens
caaaaataagagcacattttatcattgttacctcaaaaccaccacaaatgactcttaccctgaatcagcactttgtgtttcaccaaactgcaagtcacaatccattagtggattaggaaatcaatgtgaaggtctcaaccagcattattttttaaacgaaaataacagaatttttgaaatatcacaatacatcatgagtagtaaagctaagtactgttttctggagctttgtgtgtttgtgtgtatacttggttgtgccataaaatgtattcgttactgtaggtcacagtcataaaagtttgaaagactctgctctaaataattcgtatcaacaggccgggcgtggtggctcacgcctgtaatcacagcactttgggaggccgaggcggatggataatgaggtcaggagtttgagaccagcctggccaatactgtgaaaccccatctctactaaaaatacaaaaaaaattagccgcgcatggtggtgtgcgccagtagtcccagctacttgagaagctgaggcagaagaattgcttgaacctgggaggcagaggttgcagtgagctgagatcacaccactgcactccagcctgggggtctgagcgaattccgtctcaaaataataataataataataataataataataataataataataataatacgtatcatcttcctatttgtaatcctgaattcagaaagtatttaatatttgctgaatgaacagatattccatttacaataacagctcatcaattagccattttcccttgtgacatctgtgtgctcctccttgataatgacgtttctttcatgctaattccaccagtctgtaattctattcactatatctccagcagctggcacagggcctagcacagaggagatgctaggaaaacgtttattaaatatgcatagaactctgcagtctaccagcccctgtcactgacagctctgtgagttcctcacagtcctggaacacctaaagtcacatccatccacttctctccaccacctccctaatccaagctaccatcgtccctcactcagagtgcttgctcctcaacccattctccattcaacagcagtaaccttttcaaaatgccaatctaatcacaacaccacccatgtcagcttctgagtggtttcccatatggttcttgaaaaaccagaattcttcctattacctacaaagcctgcacggtctgactcctggcaacccctttagcttgtgtcacacaatggtcccccacaagctctctgttccagccacaacggcctctttcagaacctgaaattggaggctgtctccatatagaaaactcttccctccccactttgtcaaatccttttttctgatctcagctcaatattcacctcctcagtaaaggttccttgccctggggctaggtcaggtctcctgtgatataatctggggtgccttgtacctttccgtctcaatgatcacaactgcagttttggatgtttgattgaaggctgtcatcgccacgagacttgagtcctgctgtatccctagcacagattcaacgcttagtaaacatttatttaatacaagtatgatatccattttgtaaacgagaaacaaagcctcagttcggggaaagaccttactggaagtcacgcagagagtagggcagagccaggtcgagtgcaatcagggtctccggcccccaggctctaaagttaagaaaaccgcgacgtaactctggcgacggcttctcaggaagggcctccagagacaccagcgtcccacaaacagagaaccagccgccccggcgaggtgggcctagttcaaggcactccgtgactctgagccgagaagaggggcggcccagccacacatacacaaggaatcaggaaaggaaaaagaggccaggaggccacactcaccgcctcgccccacgttccggtacagcggaaacgcaccggaagttctccagctttggcgtctgactggagcgacgggggaagcggtccggcagagccctgggtcgcgggaagaatggcccgtgcctgcaggttccgccggatgcaaggttgccttttgttattcttagtttctcgttttagcttctgaattgtgaacaactttcattaacctatgcattttatatccccgtccagaaacacagccaccagccatcttactttgggctcaagcagtcatggtcactaaagcacagccaaggcttgtaccagtggctactattcagaagtagccagtcaggcgctcggtcactgtctttgtcagccagtctctatcccggtcacagtgtctcagcttccagtcacactcagccctcggggagagcctcagaaacccagccaccagcccagagagaaccagcgtcagcctccgctgctgcagcagcagcggtcgccacctcagtccctctggccattatcaccccgtgtccttcctgcaggccaagtcctaacatctcagtcaggctatcaacgcactagggaaggaatctgcctgtcttgttcctcactgtttccctggaaccgagcacaaagccaggcacaaaagctcagctgagtacatatattatgcatttaattaataatgatgataatttggtattaataaataactatttgtgggtctaaccctgcactattaatcagggttccaccaaagatacagagccagtaggagatctatattaagtgatttattgccaagaattggcttatgtgattttagggcaggccacttgggtatttctttttttgagacgcaatctcactctgtcacccaggctggagtgcaatggcgctatctcggctcactgcaacctccacctcctgggttcaagccattctcctgcctcagcctcccaagtagctgggattacaggcgcccaccaccgtgcctggctaatttttgtatttttagtagagacggggtttcatcttgttggccaggctggtttcgaactcctgacctcaggtgatctgcccaccttggcctctcaaagtgctgggattacaggcatgagccaccgtgcccggcccacttgggtatttataatccttgcactaacccttgtaaggtatgtgtattcccaatttgcagaagagaaaactgaggttcaaagagatgttacacagccagagaatggcagagctagaatgcaaaccaagggctgtctgttcttatctcttgtgctgctgctccttagcttgtctgtcacatttcctcagtgacagctggacacgccaatctgtctcggtcaaaatttatctcttagtgggttgcagactagaccgggccctgcagtcatggttaatcacaatgagctgctgcaggattaaccagagacagcctccatcagtcacagtcatgcttaccaatctcagcctgtcctgtcaagtttcatctcctgcatgaagaagctcagctccctctccacccctccccactcccagtcttaagtgctgagctctatggtctggtctcaaagctccctgtttcagttgggctcaccgtcttttcagagactccaggacactgaacactggttgtagaagctgtaaatggtggcctaggagtcccaccttgtgggtcacatgtccatttagatcagaatttctcaaccttggcactattgacatttggggccagataagtatttgttgtatgtggctgtcctgtgcattgtaggatgtttagcagcaaccctggcgtctacccactagagctagtagcacccctcagttgtgacaaccattgctaaatgtccccggggcgggggttgggggtaaaggaggaggggtcatttccccactctcaatgcagttgaaaaacactaatctgggtgaacttacctttgattattcgacaaaagccgagtcaggatggtcctttatgggagacagaaatatggatcagggtgtatggggtcctgaggaatcatatgaagacccattgtttgtaaaccaagtcctattccagaaccctagggataaca

SEQ ID NO: 1561607 - DNA, 4001 bp, Homo sapiens
tttagtacagacggggtttctccatgttggtcaagctggtctcgaactcctgacctctgataatctgcccgcctcggtctcccagagtgctggcattacaggcgtgagccaccgcgcccggcaatttgattttttcgaaggaagaattttccaatttatctaagcgttatgccatgtctgttaataaaattgtattaaagttaaatcatgagtttttaatgcagataaatctttccatagcaaagagaacagattagtttcacaaaagatattgatcagatgctacataattttacacataaagacacaaaactatcagtctccgcccttctgtcaaaccatcgacttagaagtgtctatagtttaatttcatgatttttttaagcaatgaagttgaaattctacttttccttaggagcgatacgcatattttacactcaagtggccagcgtcaactaagggcattccagatggtcaaaaaagaagtgcctctgctacaacgcctgagatcatcatatagtaacttcttcaaaccaccacgaagtagcaaggcttcaaagctgtcaggaatgctacgttctacaacagccagataattaggaaaccagcagatgggaggagaaatctgtccctatgaaacacgttcccatctcagttttgaaagtggctttatataaacgcattcatcttctacccaataacccaaaggttattgaacgccaataaccaaacgactcaggactgcgagatgattcccaaggaggcgaacttgtgcggacagatttcaagtaccacgaaccatcaccagcagagcgaagggcaggtttccctccgacggctgcgatgctccgagtccctccttcccctagcaccccgccgcccactgagcccttccccaaaggtccccgagttctgagcgacgcacgcccccgaccctagttaccggggagagccgccgagggcccaaggcgccagtaaggctccgcgcacgcagcccagcccgaggggcgcccgcccgggcgctcggtgtggggcctgatgcagagcaggaggaggaggtccgagtgggccccagcgctctcagggtctggcgccggcccctctgcctcccgcctctgctgtgcctggcgtccagggatcttccaaggactccccaccccctaccctgctctcccacgcggggtcatgacttcgggcggcgccaagcccccagcgtaagggtccccccggcttccccgggaaagggtcggggtgcaaggctaggccaggagtgcctggcgagagggccggagcaggacacagggggtcagcggcagggcagggcgctcccgccgcggtgcctggggaagggagcgggggtggggctgccgcgggccaaatgcgggacacaggcgcggacgggggcggccgcggatcgggcggacggccactctgggaggggctgggaggtaccgcggccccctgcgggacgcacctgcgcaaagtgagggaccggccccccccccccccccgctccgcgcgaagcctcacctgcccagcgcccgcttcattcccgcgtcggctgcgcagcgcggctcagccgccgccgggcccgtcaggcgtaggttctgcttcaggcggcagtcggcgtccagcgccgcggcggccgagccggaggaggacgagcccgcggcggcgcagcgctcatgctccaaggcgacgggctcggtccgcttcctcatcccgcggccgacagggccagccgccgacggcgcccgctggcctgcgccgcagtgccgccgctcacagccgccgccacccagagcccggagcccggaacccgccgctcctcacatcccagcccaggccgctgcgccggctacgaaccagcggcgggggcccgccagccaggccggccaatcagcgccgggctcccgccggctctgccctacccccctcccccggccccgccccggccacctcctctctagttccaaggagcgcgcgcccagcatccctggcgccacccgcagccattttgtgggagggtgggcgaagctgcagcggcgcgtcatctgcagggcagggctctgggctccatccgcaggctgcagctgtgctcgcccgggcgctcggtgtgaggagcacccgctcccggtcgtgcccgaaaggggtggcccagcgaggcagagccgcagcgctgggctcctcgtgcttctgtgaacggaaaaccagaggtagcaaatagcagttccgttctcgtgattcttaattctttttccacaaggacattacctttaaaagtatgctttccggtcgtcagtttttaatttgaagtaaatgtatatactcagtgtttacttttgggccgaacatcaggaaatgaactgcttgaaaaatttactttttaaaaacctgtgttagattttagatttttataaagcaattaagactacctgatgggaggaaaatccatttcaaagataaattcgcccttatgaaacccaaatttagtactaattcaacccatcctagaaagagaaaaggaaagaataaagggctgtttcacaaatttagttttataactttggctttcttcaatatggcattagttttacagatgatctataacaaagagagatatttgcttattccaaagtaacgttagaaatttcagcatttgtcactttgaaaactattggcaattgataaaggtcaattggaaatgcgtttagaaattcaacagctttttatattagttttttctttttttttttttttttttttgagacggagtctcgctctcgcccaggctggagtgcagtggcgcgatctcggctcactgcaaactccgcctcccaggttcacgccagtctcctgcctcagcctcccaagtagctgggactacaggcgccggctaccatgcccggctaatttttttgtatttttagtagagacagggtttcactgtgtagccaggatggtctcgatctctcgatcccgtgatccgcccgcctcggcctcccaaagtgctgggattacaggcatgagccaccgcgcccggctgctttttaaattagttttgtaatgatactttgaaattgcaaaataatttattgaccatattactaagtgttacagcctgcattcataattgtgtcaatatctccagatatactttttaaaaacattatgggccgagctcagtggctcatgcctgtaatctcagcactttgggaggcggaggtgggtggatcatttaagcacaggagatggaggccagatcagcctggccagcatggtgaaactccgtctctactaaaaatacaaaaattagccgggtgtggtggcacaagcctgggtgacagagcaagactctgtttaaaaaaaaaaaaaaaaaaaaggctgggcgaggtgtctcacgcctgtgagcccagcactttgggaggccgaggcgggcggatcacgaggtcaggagattgaggctatcctggccaatgtagtgaaaccccgtctctactaaaaacacaaaaattagccaggtatggtggcacaaccctataatcccagctaattgggaggctgaggcaggagaatcgcttgaacttgggaggcggaggttgcagtgagctgagatcacaccattgcaccccagtcttggggacaaaagcaaacttctgtctcaaaaaaaaaaaaaaaaattagctgggcatggtggcgcgtgcctgtattcccagctacttgggaagctgaggcaggagaatcgcttgaaccagggagtcggaggttgtggtgagccgaaattgtgccactgcactccagcctggcgacagagggagactcctctcaaaaacaaacaaacaaaaaaattagctgggtgtggtggcgcacgcctgtaatcccatctacttgggaggctgaggcaggagaattgcttgaacccgggatgctgggattcggaggttgcagtgagccgagattgcaccactgcactctagcctgggtgacagagcaggactcca

SEQ ID NO: 1561608 - DNA, 4001 bp, Homo sapiens
gtatttgtaggaggaagagagaaaggaggggacagagctaggaagaatgggaggacggtcagaacgcccctgtgaaggaaggagagcaccaagtccccgtgttctgcctaccctcccccagacagcagatcaggagcaccccgcgcgcccccccccgccccgccccgcgtcggcgccggccccctgcaatggttggcggtatggggaggtgaaccaagaaggccaggagttcaagtgcgtgatcccccactggggcatataggttacagccgccagggcaactgaaactcctcaggctccagagggctgaagtgagtcgcctccacgttcttgaggtgcttccgagccaggaacagtgcgaggcgccggcgccgccgcgagctcaggccctggcccaccagccatgggaaggcgggtccgtgtggccccagggcctcctcgccctccagctcctcttcgcagcgtgcacggtaggagcgcagcagcgccaggcaccagtcctcgtccacgcggtagcgtgcatagaaggcggcctcctgcgccaagctgccagcgcgcagccagcgggtgacgacggcgcggccctctcgcgccatcacgacggggtagcggtgctccagcaggcgcagcagcagctcattgccccggttgccctccacgtcaccaggtgacagggggcgcaggcggcccgaagtgctgaccacgtcatcctgcgtgcgtcggagcagcagcaccggccccgggtagcagcacagctgctcggccacgttgaggttgaagtgctcgcgcacggtgcgcaccaccagccccttccaactgtggggcatgaccttcagcgccagcggcacaaggtcgtcgaaggtggcgtccagcaccagtgcacccagctccgggtaggtcatggtggcccaggtggccgtgaagccgccaacagaccagccgtagaccaccaggtgcgcgggcgggaagtgcaggcggtgcagtgcgtactcgaccaccacgtccatggcgttggcgtcgtgctgagggaagggcacgccagtgctgctgccgaagccggggtggttccagcccagcacggagtagccggcctcgagcggtgcagacagacagcccatctcgtagaagcccgcgttgccttcgcagcagatgacgaggcgcggcccgtgcacgtggctgcccgggtgctggcggcggtccatgaacatagtgtcgatctcgttgccgtcacaggccaccagcttggcgcgccggccgtggtagcgctccacgaggcgctcttggccctgctgcagcagcggcagcagcgcgcgcgtcatcagggacacggagccggggtacacgagccagcggcccagcgagtgggccagcgcgtagctagcgagctggccgggcagctcgcggagctgctgcaagaggcactgcgcctggctgcgcgccccacgtggaggccgccccagcgcatccccgcccagcgtctcgtcccgcagcaaccacacgcccgccgcggctgccgcgcaggtcagcgcccggtggctgctgctccggcccacggcgcgcacgtcatcccagcggaaggccacgggccagccgcggaatgggtaggtgtagctggcggtcaggtagatcttgaacacgcgcaccagcgccttcacgaagcagatgacgcacatgagcggtggccctaacgcccagccgctgggccgggatcgccgcgagaggcacagggcagtcttaggggataccggctcccggacaagccctgatggcctttgtgacctggccttccagggcggagggaaggctgcatcctgttgctaggtgatgggtgcacaaagggttcccagagatgatgaacccaaggttctgcccgtcccccgccttcgccaagaccccaccagctaaacgctcccaggcccagctttcccacccatgatttgagcagctactgtctccctctttcttccttatttatttattaaattgagatggggtctcactatgctgcctaggctggtcttgaacccctgggctcaagcgatcctcccgcctccacctcccacagtgttgggattacaggtgtgagtccctgcaccccgcctccacctcccacagtgttgggattacaggtgtgagtccctgcaccccgcctccctcttccttaaatttaagatggacagccccacgggccaaaaagggacagcaaggcctcctccgcctgtaccaggcttgctgtgggtcctgcaagtttcccttcagggtctgctggtttaaacctcatctccccaggacggccggggtcagagacagggctgctgctgcaccaaaaaggcggtatttgctctcggcccggcccctcctctccacaccttccttcttcggtgctgaccagaaacaagccctctccttttctggatcctcttttcactggctgccagcaacagcagtgaccttctggggcgggtcctgcctggctggggttcctctttctcgctcctgggtcgagcccccactcccaggctgcgcctccctcttttctggagaggtatcttttctcctgccctggaaagggccagcccacctgagggcagggtcggaagccgcctgccaggaggagccccagggaagagggcagctccaggtactcaacagctccccagaccagaaacaaacatgctacaatcagggagtttggcaaatccagccagagcctctgagcccaggtgccaggcccgcctgggaccccagccttctggggaaggggtagtttcaggctgaagcaccccctctctgctctcctgctcagcgtctgggttagaggcactgcctgaccctaacaggccccgcccctagttgggggagtcagctgctgcctttaggggttgggggacagaagacagggaccaattaacaaagggagcgatttggggggctattacccccattctaggttgccagataaaatacagaataatatgccagttaaattggaattacaaataaacaaatactttttgggtataagtatgttccaacttctgcttgagacattattttaaaattgtttatctgaaattcaaatttaactggatatcctgttttttctgtttgtttgtttgtttgtttttgagacggagtctcactcttgtcgcccaggctggagtgcaatggtgcaatctcagctcactgcaacctctgcctcctgggtgttcaagcaattctcctgcctcagcctcccaagtagctgggattacaggtgcccgccaccatgcccggctaactttttgtacttttagtagagatggggtttcaccacgttggtcaggctggcctctaactcctgacctcaggtggatcacccgctttggcctcccaaagtgctgggattacaggcaggagccaccgcacccggtctagatataccctgtttttaaatttgtttttgttttgctaaatctggcagtcctacccccaggcacacacacagttgagatccagattttcctggttatccagctttgatctccgattggctactgtgctcattggtcaaagcctgaggacaaagagggtgtctcagggtccactggtgcacctgtcacaccatcctttccactgggtcctgggcagcaacaggagccctgccccaggaggaaacacacagggtactgcccctgcagccaagggatgggcaaggcttcccctggggattggtggttctggtcctgctcaagtgtccacccctgaccctgtggggaaaggagcctggtggataggggtggggatggaaacttctgcagagggtgggagatgattcctttcccaggagcctctttcataaactcagcggctgcctactctaggcaggttggggctgtgggcccaaaggctaccggcccattttgtgtgagaccacaggagtgaacccagcagcagagccgaagttctgacaggaggtgtccctgccacctcagttcagatcctggcagcggcaggagtcc

SEQ ID NO: 1561609 - DNA, 4001 bp, Homo sapiens
atatggtaaaagccataggtcctttccccaggcaaatatccttatgcataaaaatcctctgggccgggcgcagtggcttacatctgtaatcccagcactttgggaggccgaggcaggtggatcatttgagatcaggagttcaagagcagcctggccaacatggtgaaactccatctctactaaaaatacaaaaattagctggacgtggtggcatgcacctgtaatcccagctactcaggaggctgaggcaggagaatcacttgaacccaggaggcagaggttgaggtgagccaagatcgcaccactgcactccagcctgggtgacagagcaagactccatctcaaaaaataaaattaaataaatgtataaatgaataaataacaagagccctcagacatcaagtctaactccttcagtgtacagatgagaaaactgcagcttggccccagagatgaaaatgcttgcccagaatgtaggcccattggaagctgaataattatgtctctagcctcccacgtcccagctgtttggcattttctgtaacaatgagttatgaacagccctccatgacctggcaggtggctctcgcctgtaatcaatcccagcactttgggaagccgaggtgggaggatcgcctgagcccatgagttcaaaaccagcctgggctccaaagtggggcctcatgtctactaaaaataaaaaagttagctggatgtggtggcaagcgcttatggtcccagctaaacgggagactgaggcagaagggtcacttgggcccaggaggtcgaggttgcagtgagccatgttcgtgccactgcactccagcctggacaacagggccagatcttgtcttcaaaaacaaaaatcaaatagccctccaagaagttatttacaattccttaagtggaaggaagggagctcaaagtaagataacttccagtaaagccaggagaagccttggaggtcaaagctgttagaagccttgctgcagggggctgggcgcggtggctcatgcctgtaatcctagcactttggcagaggtgggcagattacaaggtcaggagttcgagaccagcctggccaacacggtgaaaccccgtctctactaaaagaagttaaaaaattagctgggctgtggcgcgcctgtatgtcccagctaatcaggaggctgaggcaggagaaatgcttgaacccgggaggcggaggttgcactgagccgagatcgcaccactgcactccagcctgggcaacagagcaagactccgcctcaaagaaagaaagaaacccttgctgcagtcaagaacttcagcgatgctgggaaagaaaaaaacatgcttaggcctcagaataagtaatgagaaaccagacccaccaaatggtactgggggcgggatattgtgagaagaaaaggatactgaagacacaaggagctgcggcgtcggttttaaggctgatccatcagctgtgtgcccttgggcaaatcactgccctctctgggctagctcccccgtgaaggcttagggcaggctgccgagcagggtctctcaggtcaccactatatttgctcagctgtgcagacctcgcagcgcggagaggaagggaggaagccagagcagagaggacagctctgttgggggcgagttctctcctaatcgtggcagagggtgcatcccacgcagagccatactagtcccggagccaggggccccgggcggcggcagtcaagatcaagtttctgccctaaaggaggggatgctgggcaggagctgccggctacctgaagagatcctcgtccagcggctcgaggttgagcacggtcgtgaccaagacgctacggaggtccccagggggatcgccgcggtcgccacagccctgcccatcttctggggcctgcggggacgacatctagttcaatgctgcaggccctgcacacccgctccgcggaagacgcggagacatacacagaacctgactcttccggcagattgccctagtaaccggaagtctcctgcagaccccgggaaggaggaatctaggttatgattggtcaggactcctgtcagtccgctggtggctgtggccctctttctctagcaattggagaaaatgaatgccaatctgcgaatcctgtgtgtgactggatatgtcgctgaggaggcggaacctcgggactggataatatggactgagtgtcatttcccctgtcagatagcaaatacacccccttcctcttgtaacccggtcaggcctagggttcctccctgagttccagaataggccacccagttggggcggacccttaaggcattctgggcccacgcctgcctataaaccctcatagtgtgacctttgacccctggtgtgatcttgggcccgggctgggaccagcccctagtgtgggttgtgggggcggccatggagctgggcagctgcttcaagacctatgaggacttcaaggagtgcttcagcgcctacaaaagggagaacaggtgctccttcattctcagggactgcgtctccgtccgcttccacaacctcaaccatggcacctccatccgcgaagacatcctgtaagggcgggcggggcggggcgggccaagagggtggggaggaggctggacctccggagggctgcctggaggaggaggggtgcataggcacgcattgggctgcgtggccattcattcaacaggcactcattgagcacctgctgtgtgccttgtgaagagagctaagcctccacggccattggtttttgaccacccactccactttcactccattcacaggcttttctggaatttataactgcagtttctcccattgttttgagcagctgcagcaacccaaatacaaagtatggctttcataaacggataaaaacaccttggcgataatttccttcatcagtctcctctttacaaaacagtcacatggtcgttggaatgttcgttcattcattcattcagtttttagttcttatatatttgttgaaacagggtctcactctgtcccccaggctggagtgcagtggcacaatcagctcactgagccttcaactgctgggctcaagcgatcctcccacctcagcctctcaagtagttggaactggaggtgcacgccaccatgcctggctaattatttgattttgtacagactgggtcttgttatgttggctaggctgttcccagactcctggactaagcgatctttcggcgtctcaaagtgttaggattacaggcatgagccactatgcctggtctattcattcattttgtaaatggtttttgagctccttatattaaccgttttcaaacactttccatgtgccaggcagtgttctctatgcatgctttaccctgcagggcttttttttcagaattatagataaatgttatttttttgcatttgacagatgagaagatttgacagatgagaagtcaggcttagaggttaagacaggagttgaaaactcaaatgccttcagggattaggtgaaacaacccaatgtaagaaagttttaactttgaattttactttaagaaaaagaatgatgaaatagcaaccaacaccaggtctttgtgctagggacaacagaagtgtgaaatgggccaaatggagagtagatgccatctaatcagctccagctgatggctgccatatgaaaataaagatctagtgttgccagaattttgggcaagagttgtcagaaatccacactttatgtggattttcccatttaaaaaaattgaatcagttcaaattttaactcagagcatgcgggccaactcagagttaaagcatatccgagtttgagacttggattgagatgctcaaccaaagctcctcaattagacagccaggctatattctttccactgttctgaagtccagtgctatgctgggtataggtgacataaagatgaataagtgttcaaactatccccagagaactaggataaacttgaactcaagcaaactggtgtgtgataaatgcttt

SEQ ID NO: 1561610 - DNA, 4001 bp, Homo sapiens
gagtggggctgcaagtgtgcacaggccaactgtgaatgttccccatgaccttggcctcacaagtccagagcaggtcactttccacctctgtccttgggcaagctgctctagtctccttcaagggcacattgccccaactctgcaaaccaaagggtttggtttttttcccactagttcaagggcacttgctgctgactcaatgttaaagaaaacacttatctagtaagtgactcattttaattaaaccagcaaagtaatatacaatttcggggagtgggggaggtccaaagttccttccaatttctttgaaaaataactgcaagacactatctataattgtatgactatttctgaagttatctaaaatcgctactgcttatgggtcaccagtaagcgctgggtctgctgcacaccttgcagcactcagcctaacctctgagcatgactgcccccatcctcacaatgaggagactgagggctgggggggcagaacaacaaggacaactgagggaggagttggagaaaatggggccctggtgaccctgccataaagacccgcaggtcctttcttaaacactcccaaatccagcaagctggttatgaccacccttctggtctgcatccctctgatcaacaccgtgtctgccagcccctccccgcaggccccacacccaggcccaccctgcatccggagcccacctcgcacttggcacccaccctgcgtggccagccctgcctgcagttcagggcctccccctcggtgcccagtcagcgccttaggtgggggcgagggtgctgtgtacgacccccagccccaaatcttagcagagcagcagggcctctgctcagcaagttccaaacaactgaccaccagtcaactgtttggggccgacgtcagaccccgcgggtccaaagcaggccccaggtcgctggggtgcagttctctgaggccgagaacgagaacggggaggccgccgttacttccttcccgtccacaggccccaggccccaggcccgcagcgaagaaataactggttccagctgccacgccgagtttcctcctccccaggtcgcccgccacagctctgtttgtttacgtgggcagggcttgtccccaggctgatccccgggcaccgcagcccgcagtgacaaccgccaccgctttgtttttccctccaccccggtatgggaacgggaaagtcccgactccggggcgctcgggtgtagcccgcggctccccgccggctcttgctcagcggcgctatgcacccggtaacgcaactctggagtccgccgagcgaggagccgcgccgagcaaggccagcagcggggcgtcccaagcggccgccgggtccccgcgggcgccggcccgagctgggcacgtggatctggggcccgatgggatgagggacggggtgacgtggagccactgcttagagcgggcggggcggacggaataccggaggaggggcccctgcagggctgcgatccgcgctgcccggggacggctgccgctggcgagaggctccgagtcccctcgggacccaagagttgggggcgtcctgggtctcccgaagcccactcaccagagacatttaactggcctcccaggaaccagccgatcttgccagtgctgaagtcgcagtcccagacggtgtggtagggggtgtcccacacgagagtgtcccgcgccagaggcccccagaaggcggccggctcccgggctgcctgtgcactcagcgcgggatacgagcctggctgtgctgctgctgctgcaactgcgggagcgctgcccgagggtcccgaggccgccctgcgcggcgcgctcaccccgcacggcggccgcgcgggctgccccgagagccctcgcaggctgcccagcagcctcccgacgccgcggcccagggtgcgcgccgccatctaggcaggctacctgagctctctgtgctcccagagtgggtgcctcacgcccggggcgccccgtggagtctccgcgggccccgcccctgctccgcccttccgccaccatccattcctccagggccccctcccggagcccgcccgggtcccaccccttcttctgctgcccgggagagggggggccgcttaggaagaggggagcagcgtggggaaggggtgcaggggagcgcggggcggagcagggtcccaggccctggcccaggcgctgcgctccggtgagtctgcggtcccacccggatgttcctcgagtcggcctgttttggtttcagtttgcacgctctcctgcaagccccgacagcttcttcgagctgccagaggcacgtgcggcccaggaccccaggacgcaggctcagggcctggggcgaggggaccctctgggatggggaggagccgggagggagccggcaccaacgttaagggggctggtgcacccaagcgcactggtgggtcccaagacaataggtcggtcagttccgcatctcagaggctgaagccaaggttttcatgcctttgtgcgcccctgagagtgaaccccacccctggagtctcagcagcacgcgaaaggggctggcgcctttctaggctcccgcctagaagccaggaggctgcgcaagcctgagtccgtgttctgggtcccatgctccagccccccagctgccggcctccgtcctggcgggggtcacgtcctgctgggggtcggtggtgggtgatatggggcgatgaggactttctccagttgctgcagcatctgtagcctgagttcaaactctgtgaccttgagcaagttccttaacttctcggtgcctcgttttccttttggggaagacggaagtaatgtctccctggggggcggggacggcgggggtgggcagctgcagtaaggaatacattggacaatgtctgtcaagcgtctacccttgcgtggccccatagtaagctcagtagtggggatgatgtttttgcagctgtggagccaggaaggacagaaggaaacgtataaaactggtctccaccgagttcttaaatattctgacacccaagaagtaaattcataacaaacgggtaaacacagggaagagagattttggaaaactggtttattgagttctctgtgatgggaaagtttctttcccttgagctgtagggcttgcagaggggaggagcctgccattggaggagcctctgcgtgggctagccaccagcccctgctggggaatgctgctgtctgccagagaagacaggagtgtacctagagctggagaatcagtgacatctactagcataacacatgccctgcacagtgctagcgcttgacctgcattttctcctttatttatttatgatacttttttagagatagggcctgtagcccaggctggagtgcaatggttcccatcacagctcactacagcctggaactcctgagctcaagcgatcctcctgactcggcctcctgagtatctggaactacaagcgtgtgccacggcacccgactagtctacttaatttgaaacttatctagtgctgtccattcccaccaactgtcaaactccaggtggaaaaaatgaggaaactgagcccaaataaataaaaggacttactaaagagcatgcagctggctaagggaagagcaagactaacacccagtgcccccagtggggagctcgttggcctaagttcatttgaatagaatattaaagacacccagtacagggcactgagaggcagaggtcagtgagtagtaaaattgtaaactgagaaagctcctaactgtggcagggggtcccaaagacggccaccaactcttccttcccacgcctgcaccgcctgcacatgatggtgtgctgctctgtccagaggaggaccctggctggctggattgctttggccagtacagcctggtgggagggatgctgtgacagttccatgtggaggtcctgagagaccccgtagccccagcttatcctcccatggaacccagctgcgagctgtgaggaagcggggctggccttccagaggaa

SEQ ID NO: 1561611 - DNA, 4001 bp, Homo sapiens
acaaggatcagggaactccagggttcctccctccccatgcccacctcctcaccatcattgatcctcccagccaaggactctgcactgaagccagcaaagatgactgtgtggacagctccgatcctggcacaggccagcattgctgccacagccaatggggacacgggcatgtagatggcaacacggtccccacggtggactccatgcctcttcagcgtgttggccaggcggcacgtggtctccagtagttccctgcagcacagggaagagaaagccatcagagatggaggagggccaaaatgcagagcagtttgggggtggagcaatactgcaaattttatgtcatatacatccagcccagtgccaggaaaacaggcacttgaatacttaatgcatggaaagtacttttccagaaaaagaaaagtttttaacatttgtagattgctattggcagagattcactgccacattgctagggtgacaaggctatccttaagtccgcttacggcagggtttttttaggggaacaggagcgtaggggagccatggtgacaccattttagaatcaattccatcttaaaactagcaaggcacattccttgccagtcatgacccacagtcataagatgtttacagctgacgaagtagcttaatacctgcaaagacaaactcttgcaacaacagaatgtccagatgccccaatattgcataatatatgcttttaagatgattataggcatgctttgatgtacttatgcactaaaatgccaaggatagctttctttcaatcaacaaagtaataaatgtcacttcgtcagcctacccgcagggagacatagcttagcttttacatagataagacccctatataagaaagaaacaaaacagaggcattcctcctcttgctgaggatgccctactatgtaactgagaagctttcaataaactatctcttttcactgcgctctgccactcgccttggattccttcccggcatgatccaagaaccctctcctgggatccggatggggacccctttttccagcagcagcttctcagggaccacaagtgtctgaggcatagatcatcatggttccaaaacttccgaaaatgtttgcctccaaaagaaagactgatctcataagacatttagtcgagaaacaacaggtcccagatttctgaatcaacacagtcgaggggcaccaaataatgctctcagggagcagacccccaagcccagatagggcggactccagctctgcaaagccacagtgagttgggagtgaagaccgcaagcagggcagccacaactccctgcagccccgagacagcactggcgggtagagcaagcaccctgctttctccccaagctaggggaccatggacaaggggaagggaaagcactgggcacaaggtgggtgagcagcacccccgcccagcccccatgtcgtccaccacgttgcctatgtctatggtgtgcgcatgcccttcctctctggccactctggggcctatcaccaggttcacccaccactcagggcgcatcatctctctgggcaagctgattggctcagggccgacacgtgacccaacctggtccagtcagagtcaaccatactcaactccgggaaaactgggagcaggcgagagccgccaacttgccggccatgcggtgcgaagtggaggaagtggaagcgatcccaaggttgtctttcctttcggcgcctcatccctctgaatctggacctggcaattgcattaaccactttcccactcttgctgtactgactttaattaattatttgcaataaaaagagctaacacagaacgaagaatgaggggaagccaaggccctttctctctgggcggggcagaccaccagcccgcgacccctgccctctgcaggggcccagaaagcagaccctcctcgggctctcaaggccgctcgcagcgtgtttgcatagctctcctctgttcaaagggtagtcaaggaaagggctcccgagaacagtgaagctcaacgaggccacccgggaaaccacagcagaatgaaaatgagctgtccgcatcacaggcaggggcctcaaggaggcctttgtttcttcccaaggccatctgcagaggggaccacatgagaaccagatcgcaaggccagcccgcagttctccccgcagccagcacgcctgcccagcctggctccagcggcctcttctgtgggatttcatcgttttcccttcaggctttcagaaggaggacaaaggcgcctttcagtggcgccccacccacgcaccccttgccaaggtttatgataaaagacggaacactcccccggaaaacccccagcaccaagctctacagaatctagggctcagaaacactcctgctactccggggaggaggctggggtggcctgtgaccggctgaagagggagccgtggtccagagtcactcaacatcttcagccagattccgttttcatagctctgagagcttaagcctcgctgctaccagagatgaaggcttgaattatgctcaccagttaaatggcgatgaaatttagtccctgttctgcagacggagggcagcaatctgaagccaagaaaggacactggactgtccctacagaaaggcctggggtagctttctgtagtagctgcctagacatgggagcttatctttctgagctgccatgtgaccatctgagaaacagcaagcaccctccaccttgtacagctgtcacaagtattaataaaaagcaagactgacttggaactctgccaaacattcagtagctatcgtctttcccatcagatggaaattctcagaaatctttgtttgaaatcgttttctaaaatgacaaaaaccagctaactcacttcagtgaattcctgagatgttaaaaatcccattctaggcaccttgggagtgagtggggtgtttgcatttgagaaaggaattgacagggagagtgtcctccaggagcacagctccgatgaggaaatgacggcacatgtgaaggtgtgcagggcactgagcagctcaacttggtggtacagccactgggggtggcagggaagggcagcagggagagctttctggatagattggctgttgggaggaggactggggcagaaagaagagtggattttccctataggggcagaagtcacccagtcattgaagctggacagctaaacgacagcctccagggagggtctagagaccaggtttccctggaagactgaggggcctcaacatgggcccaagagctgaagcagggtctggtgagtctcacactcttgctgctgagtccagaggaggggctcctgatgaaggatttgatccggtaaatctcagagctctctcccttcctattttctctgccaaggtcataaaccttgaagtggaaaggatccttggacgtcaggcggtgcagcctccttgaggttctgaaatctggcagccacattctggcctacagcagtccagcctctacttaatcatcacactgccagagctcacctcatggggccacatctctgtcactttaatagggaaacagtctaccaaaaattggaccaagatttgcagctcttcaaactccaccccttagtcctacctcagacctttaaagcttcccagaataaatctaatttctcaatgacagcccttcaaattcctgaatactccttgcccctcatcctcttggaagcttttcctccccaggttctctggtcgagccctccatgacggcactcgatctcagtagacacccccagacttccaaatggacccccacattctcatggtgcctgcccagagctgaatgtgggtacccagacccttgacctcaattctatatttaacctttttttttttgaggtggagtttcgctcttgttgcccaggctggagtgcaatggcacgatctcagctcactgcaacctccacctcccaggttcaaacaattctcccacctcagcctcccgagtagttgggatt

SEQ ID NO: 1561612 - DNA, 4001 bp, Homo sapiens
taactactatttattgaatgtgtactgtgcatcaggcatgttatagcgcatacttattacacactttagacctcatacaaacccattaggcaagtattactagacctatcttatagatggaagaaaaggaatctcagacaggcttaaaaatttgcctaagaccccacagtaaatgaacagcagagccagggtctaaatctagatttttctggatttgattcgtggcccatgtttgtcccacaaccaaacatcatgctgcctcccaatgggggtgcaattttgactccttggctaggcgcagtagctcatgcacatgtaatcacagcactttgggaggccaagtaaggaggaaagcctgaggccaggagttcaagaccagcctgggcaacatggcaaaacctcgtctctccaaaaaatacaaaaaagtagctgggtgtcatggcgtccgcctgtagtcccagctacccaggaggctgaagcggaaagatcgcatgagcccaggagatgcaggctatagtgagcctagaacgggccactgcactccagcatgggtgacagagcaacaccttgtctcaaaacaaactatctatctatctatctatctatctatctatctgtctatctatctgtcctttacccagactgagggcaagggtagggggattttccttatacctttttttttttttttttttttttttttttttgagacaaagtcttgctctgtcgcccaggctggagtgcagtggtgctatcgtggctcactgcaacctctgcctcctgggttcaagcaattctcctgtctcagcctctcgagtagctgggattacaggtgcccgccaccacacccggctaatttttgtatttttagtggagacgggggtttcaccatgttggccaggctggtctcgaactcctgacctcaagtgatccgcccgcctcggcctcccaaagtgctgggattacaggcgtgagccactgctcctggccgattttcctcatacattttaacagacatggaaccatctatcagaacttctgaactattactaatacaatcccagcccaagttaaaaaaataaataaaacaacttgacatcgtagtaactcgttcagtcttataccgcgtaatttccattaggatgtccgatatactaaaaatagatcggggactccattactaatctgaggaccccaagatgggaaccagacccgttattgccctcaacagttcacaggttaagggtctcaggaggcagtggctgagctggtgtgaaagggaagcaaagaaagttctattcgtggccctcctcccttcaaggctcccgtcgccccttagagaccctcttttcgcctcaggaactccccttctcttcccatgaaactttcactctcttggccgacctccccgtcccaatctcaaggaacctcacttcttccctcacggaatcccgcgtctcctcgcaaaaacccgcatctccaccacggaccctccaagtctgcagggaactccccagctcccatggaaccctcgtctcctcccggaatcccttttccattttcaaagaaccgcaattcttccttcacagaacctccatctcctcacccacccctcagcttcccaagggagcccccgactcccccagggagcccccactcttctcctcactgacaccccaggcccgcccgggccgggcctcaccccgcggctcctccacggagcgccggtgcagctcgcggtagcgctgcagcgaggggacgtgcgcggagcggctgacctcgggcggcggagaccaactccgcgcccggcctccggctccagcttcctcctggccccggctcccgctgccgctccggacccgctcctcaggaagccccatcacgtcaagttcctagaaccgcggccgcctttgcggtcgcggcgggtgccgggactgagaaaacaggccgaactagaggcggggcctccgtagaggggcggggcctggtgagtgggggagtggcttagtctggcgggtgggcggtgccagagggggcggggccgtgtctggttggggagggatcgaggttggcaaggacagaaatactataaggaaaagtcgagggataggggtggagctgacttgccggaaggagtgacgccgtcgagtgaaagcagaaggggcggggccgggtgtgacaagggagagggtggaaccgtggagtgccaagggaggggcggggccaggcgggacaggagaggaggtgggcccatggagtgatggggagtaacccggctggttgtgacaggagaggaggcagagccatggagtgaccagagtggggtggggtcttggagtgacagataaggggttgggttaaggcaaggatcgaaagggaaagggatggactaaggagaggagttgagtaaggtccatcgcggagccgccccgtgatctgattgcacagtcctgactatcaccagttccttccaggtgacacccttccctccaggtcccccctctctgagccacacccacattctcgtcctccggaaaaacttctcccatgaccttgagggcatgctctggcgacagcacctcctctctgctcaccctggaaccagctcagattttctccctcttatgaggacatgtcttcaatctccttgccttcacaaatctccatccagatctaaagtacaagactcaataagtgaagactaggagacaccttcaggttttttgtaataagcccacctcctaattgcacaaatggcaaacccaggaaagggaaggaactggtgcacagtcagagagcaaataacgaccaagttagggccaaagctaggttctttgactccagatttggttttacttcctcgtcaggcttgaagctaaggcttgtaaaatatcaaagtctgtgcaaataggaaaaatcattcacattctctttttttgttgttgtttttgttttgagatggagtctctcgctctgtcgcccaggctggagtgcaatggcacaatctcggctgactgcaacctctgcctcctggattcaagcaattctcctgcctcagcctcccgagtagctggaattacaggtgcacaccaccacacccagctaatttttgtatttttagtagagatgggatttcaccatgttgtccaggctggtcttgaactcctgacctcaggtgatctgcccgccttgggctcccaaagtgctaggattacaggcgtgagccaccacacctggcccacattctcttctttccttcacaatctctttactccaccaagggaaacccccaccaccaccaccacaacctgggcttaattacctctagcttctctctagcccctccaccccagaaagaagtcaggcaggaccctcctccatctctcacctgcactcaccacaaagaagtgcccacctcaccatcatttcacagactggctgtcaaggcaggaaggattcttaaatatctaactccaagagtgattctgaggcctgaagcgggcagctcccacctcctgaagcctacacaggccttgtgaccccatctagcccagcctcccttcccagctacttccctgcactttgcccagctgactgtaaaccttgcacaccctaagctgaaaaaaaatctctctatgggagaccgagagtctgcccaatcccaaggagggcgggaatctgagggcccactgaaggagtacagacctcttggggtggacatagaccccaccaaggggtcagatactttcataaaggagatattcactgcaccgaagggacacacacttcactgacagtacatggactccactaagggagcacagatgttgctgggggttctcagatctgactgaagggccctgggccctgctaataggacatgaatggctttgaagggcacttaccctagtgaggagacatggatttcccctaagagatacagaggatatagactttactaaggagacgtggaccctaccagaggactcaaactccagtga

SEQ ID NO: 1561613 - DNA, 4001 bp, Homo sapiens
caaagaaccgcaattcttccttcacagaacctccatctcctcacccacccctcagcttcccaagggagcccccgactcccccagggagcccccactcttctcctcactgacaccccaggcccgcccgggccgggcctcaccccgcggctcctccacggagcgccggtgcagctcgcggtagcgctgcagcgaggggacgtgcgcggagcggctgacctcgggcggcggagaccaactccgcgcccggcctccggctccagcttcctcctggccccggctcccgctgccgctccggacccgctcctcaggaagccccatcacgtcaagttcctagaaccgcggccgcctttgcggtcgcggcgggtgccgggactgagaaaacaggccgaactagaggcggggcctccgtagaggggcggggcctggtgagtgggggagtggcttagtctggcgggtgggcggtgccagagggggcggggccgtgtctggttggggagggatcgaggttggcaaggacagaaatactataaggaaaagtcgagggataggggtggagctgacttgccggaaggagtgacgccgtcgagtgaaagcagaaggggcggggccgggtgtgacaagggagagggtggaaccgtggagtgccaagggaggggcggggccaggcgggacaggagaggaggtgggcccatggagtgatggggagtaacccggctggttgtgacaggagaggaggcagagccatggagtgaccagagtggggtggggtcttggagtgacagataaggggttgggttaaggcaaggatcgaaagggaaagggatggactaaggagaggagttgagtaaggtccatcgcggagccgccccgtgatctgattgcacagtcctgactatcaccagttccttccaggtgacacccttccctccaggtcccccctctctgagccacacccacattctcgtcctccggaaaaacttctcccatgaccttgagggcatgctctggcgacagcacctcctctctgctcaccctggaaccagctcagattttctccctcttatgaggacatgtcttcaatctccttgccttcacaaatctccatccagatctaaagtacaagactcaataagtgaagactaggagacaccttcaggttttttgtaataagcccacctcctaattgcacaaatggcaaacccaggaaagggaaggaactggtgcacagtcagagagcaaataacgaccaagttagggccaaagctaggttctttgactccagatttggttttacttcctcgtcaggcttgaagctaaggcttgtaaaatatcaaagtctgtgcaaataggaaaaatcattcacattctctttttttgttgttgtttttgttttgagatggagtctctcgctctgtcgcccaggctggagtgcaatggcacaatctcggctgactgcaacctctgcctcctggattcaagcaattctcctgcctcagcctcccgagtagctggaattacaggtgcacaccaccacacccagctaatttttgtatttttagtagagatgggatttcaccatgttgtccaggctggtcttgaactcctgacctcaggtgatctgcccgccttgggctcccaaagtgctaggattacaggcgtgagccaccacacctggcccacattctcttctttccttcacaatctctttactccaccaagggaaacccccaccaccaccaccacaacctgggcttaattacctctagcttctctctagcccctccaccccagaaagaagtcaggcaggaccctcctccatctctcacctgcactcaccacaaagaagtgcccacctcaccatcatttcacagactggctgtcaaggcaggaaggattcttaaatatctaactccaagagtgattctgaggcctgaagcgggcagctcccacctcctgaagcctacacaggccttgtgaccccatctagcccagcctcccttcccagctacttccctgcactttgcccagctgactgtaaaccttgcacaccctaagctgaaaaaaaatctctctatgggagaccgagagtctgcccaatcccaaggagggcgggaatctgagggcccactgaaggagtacagacctcttggggtggacatagaccccaccaaggggtcagatactttcataaaggagatattcactgcaccgaagggacacacacttcactgacagtacatggactccactaagggagcacagatgttgctgggggttctcagatctgactgaagggccctgggccctgctaataggacatgaatggctttgaagggcacttaccctagtgaggagacatggatttcccctaagagatacagaggatatagactttactaaggagacgtggaccctaccagaggactcaaactccagtgaggagctgccaactacactgtgggagtggacatcactgagaaggtgcagacctcatcaagtggggaagggtcccaccagagggattagacctcagggtagtgtaatagaccctacaaacatcactgaggagataagaactctctggggtggggaaaggcacagacaatgggtacactttttggtgatagactgttaccctccctgggcactcttaccacacagctctgagtagccctctccttcctatcctctctcccaagtcctacacccaaaccccagagctgttcccgacacactgcttccccctcctgtctatagttgctactgcagctgctgtgtatatagtagatttttcaagcacttcaggccatccctgagactggtctggggttgggaagagaaaggatgtgtgtatagaggcttcaccagcccccctctcttcctgtggacttcacaatgaaagtttggaacagagacctcgtaaaagaaggaacctccctcatccttggatatggagaagtagtacaagctgtagtgtggttggaattttggagtggagagaggatggatgagtttggagggaatgaatctaccagattaaggcaatgatgatgatgatgatgatgccatttattgagtaggtgccaagccctatactaatcgctttccattctgttacttaatcctcatgacaaccctctaaaatgggtactattattctttccatttcacagatggggaaactgatagagagactaattgtcttgcccaagattacacagtgtttgagcggtggcagaatagaacccagacatccagaatatggagacctattccccaccttgccccactcctgccctaccatcactaccaccactccttctttctcaaagtgtcctttccagaaccacatcaaaaactcttaaaatgatggtaaatattcaggttccaaggacctcatcccagcctactgaatcatgatctctggagtggaatctggggatccgctttcaaagatcctaacacacactaaagtttgagaatgcggttgaaagaggagtcagaagtgtcggggtgcgggaagggatctgaggtcagaggagggatctgttgtccaaagaggcgtctgcagtcaaagaggcctggagatgaagcatgggctggggttttcaaaagggtttgggggtgaagacagagtctgaagtcgaaaaagaggtctaaggtcggaggaggagtctaaaatcggaggaggaggatctcggaattcaaggaggggtctggggtccgaggagtttggggtcagagacaggatctggggtcgagagggatttgcggtcagtgaaagggtctggggcccgaaaaggaagcctgggatttgaggaggacactagctgtattcaggctggaaggaggaaggggtttggtccctgagctgcgtaaagtgcagagccactgaagtctcgcttgccccgcgctctcccctcgaccctgcgctgccttcctggctgtccatctacacgcacctgtgtgccagctgcaggctgatagcgctgagcagacgg

SEQ ID NO: 1561614 - DNA, 4001 bp, Homo sapiens
tttattgccataaagtagggccctgtgggtaggcagctggactggcattctctgaactggcagtggttggggagattcaaactgcagttcaaaatgagggtcccatgggtcccaaataccttctcctggcccagaaagggtatgggggtgacccatccagtcagctccaacctccaggaggaccctgccagctccaaacacttgactctttagatagagagctgtcccccaacgcagtgccaccccccccagtccagcctgactcagttgaacacatcgtacagcagcctggagccacactcctggtacatggcccgagttatccagcggcgctggaaggagtgcagggaggccaccatggagccgccggtccacacagccatgccacgcccatgcttggccaccaggtggggccgcagggccgcgtagccgtgccgccggcactgcgcctccagctccttgtccaggcgctcggcgaagccaggaaacagtgtggagccgccggctagcaccacggtgtctgccaggcgtgtccgcagcgttttgggcatcttctgcagcgcccggaaggccagcgcgggcagcccctgctcagcctggcccagcaggcccggctggaagatgggttcggggcagcggaagcgctcactgctgaggcagacgcagcacccgttacccacgctgaaactggccggatggtggcgggcggggtcgcggaggtcgccctcgaagtccagggacacgtagcagctgcgcttcttgagatgtgtgatggccttgcggggcagggcctgctgcaagaggtcagggttcgccgccaccagcagatcccgcaggtagcgcgacagggtgctgcctgccacgttcagtcggaaggtggcctggtgccacgagtgacccgcgtagatgggcgtggcgtggcacacgcccgcgcccgcctccacggccagcccgctgaacgcgccggtggagcagagcgccagcaacgcggtgctagccatgtggcacgcgggcactgccagggtctcgaacagcagctccgccaccctttcgcggcccgcgggcggcgccaacggcgagtcgctcaccagcacgggccactgctctgggcacacccgcaggccgcccaccagcaggcgctcccacagcccttccagcgcctcccagtccgccaccacgccgtgcttgatggggtgcgcccgcgccacgccgcccgccagctcgcagcccggcgctccgggcagcaccggccggtcccagctgggcaccaagctagagctcttcagcactatgcgcggctggttctcgcccgcgaagcccgccttggtgaagcccgagccctggtccaccaccaccgcgatgcggcccagggaggacggccggtgcacgcggcggctccccgacaccgacgccaccttcgggctcggcccagccgcggggctgaaggctccgctcctccgcgccactcggcttcgtcggcccgatacctcccggcctctgtcctagggagtagtccccttcagcctttggctctgcctccggagcctaagttcttcctcttctggaccaaatcaccacccttttcagctcttggctccgccctctggtctgaaagccccgcctcttctgtccgggccatccgcctccttttcagctcgtggctagttcctaggcctgaggcccggcccctagttcaggcttcagtctccgctctggctgggttccagccgcatctcaccctcttggtctccctctggcgccgggcttcaggctccacgctctcaggacccgcctctgctttgctgttccgccccgtcagcccttgctgagatggctgacgagatggctaggactgatccttttagatcctaagaagcccccgggaggagcagaactttgagggcgaaggggccttgtggtaaggccatttggacatatatcccccttgaggacccaggcagcctcctggcacctctcacctgggcttgacggaagttcctggttgtggagaggggaggggctggtcagaaggcagaaaagaacttggattgggctcattgtgacctcactccccagcagctgcacttcgcagctccctaccttatgacaactccctggacccatcctctcttctggacagagccaagggcagtgattttggcatccaggggtctggcttcagcagcccagcacagtctgattcctttcccaaaccacttagaattatctgatgtactctgtccagatgtgtggccccctacccctcccagtgctgaagaaaaagctttttcatcacagatctgcagcttccctgaagagcccccgagaggctctggccctacctttatgggcttccacggatggattcacgtgggcctcagtttgagactcagttcttttttttattattattatttttgagacggagtctcggtcacccaggctgggcgtgcagcgttgcaatctcagctcagtgcaacctctgccttccgagttcaagtgattctcctgcctcagcctcctgagtagctgggactacaggcatgcaccaccatacgcggctaatttttgtatttttagtggagacagggtttcgccacgttggccaggctggtctcgaactcctgacctcaggtgatccacctgccttggactcccaaagtgctaggattacaggtgtgagccaccgcacccagcaagactcagttctgaagctgactcactgtgcagtcctaagcaagtcttgatctttctctgggttcggttttctcctccaaaaggtagtaataatccccccacacaggaaagaggtcacttcttgtctctgcaaagcctcatcctcctgaggaccagtttggttgcaggtagaagactcaggtgaatgtaacccaaaataaggactttattgaaaggatcttacatgttatggatatcaagagcaagggtgaaatcaggtttcaggaacagaatctgactgcggggctgtggggaacccaggatgtgcactgcattgtgttgtttgttttttgagatggagtctcgctctcttgcccaggctggagtgcagtggtgtgatctcagctcactgcaacctctgcctcctgggttcaattcccctgccttagtctcccgagtagctgggactacaggcgcccgccatgatgcctggctagttttttgtatttttagtagagacggggtttcaccgtgttagccaggatggtctcgatctcctgacctcgtgatctgcctgcctcagcctcccaaagtgctgggtttacaggcgtgatccactgcgcttggcctgcattgtgtttttattctgaaggctggcttagcctgtgcatgttcaagtagagaacatggtctcttacagctcctgaatcacagtcctagggggaggggctgacaggaccagcttgggccaatcactgtatgggcaggaggtgcagccccatggaagaacatggttaccctgattgtaaccatgtggatggtagggaagagtcagttctcacaattagcaggagtgatgttatagctcttgcagcctccagcctggtgcaggcaaggtggaggagatgttcatcctggtggcggtgacaaaagtgcatcttcagcagaagctgggctgatggctgtagtgagctgggacttcagtcctgctgcatctgcccccaaaagagggcatcctgaggttggtcaccagagtgtggcaggaaggcgggctgcaggtttggcaggccaggggtggcattgggtgtggagctggatttgggacccgggagagtgaggagaagcagcagcaggatcccgcccacagaaagtgtggcagggcttcttctaagtgatttggggagtgagactgaagctgtgggctttttccctgttggtaatggagacctgttgaaagcttatgagcaggggagtgagctgccctagacaggtaagtggtttggaattagtctttgtcacgtggggaaggagatgggacagggtag

SEQ ID NO: 1561615 - DNA, 4001 bp, Homo sapiens
catccaccccaactccctccagaaggtcacaaaggacacaactatgggcaaagggacttacccagtcacacagtgaggtagttcaaagctaagcccaacggctcagttcacaggctagtacttgctctttctactctgcctttaaagcacgcagtaaataaatgtttcctgaatgcttctcaaaatcgcactcaaatgccacaagtgcaactcacctcccttctaagatgggtaaaacatgcgtacactggtatccagatgaaatgattagcccactgcacatcgagttctttggcttattgtggtagaagctgaagaggctgtctattccataggcaaccttgggaatcccgtagcactcaaaaagaagctcagacatcatttgccgtgaatacagtgggttgcacacagcttctgtcaaaactatgggatgatcaacacagccctactttgaaagaaaagggcaaataaatgagtggtaacagaatactctttttgaagcataaaagaacccaaaatccttattgcaggactgaatttgcttttggcttcttaatcaaaaacctgatcagaggcgattataaaactcccatctcatctttacttgaaaatacgaaagtagagtcaatttaagttattaagtcaaggtcccatccaaactgtcagcaaatcgtgttggctctatcttcaaagtatttccagaatccaactgcttctaatgacattccctgctatctgcctcatctaagccaccatcatcccttacctgggttattccaacagcctcctaactcgtccctgtttccaccctatgatccaagacaattcattctccatacagcagtaatagtgatccttttaaaacacaagtcaggtccttcttcagctcaacaccctgccatggctccccatttcactcagtaaaagcctataaggtgtgtgatctgcctctccactacctctctgacatcctctttcaggtactactctccccctcacacaggcagccttgcagttaggattagggcacactcctgcctcggggcctttttactggctgctccctctgcctggaccgtttttccttcagatattcacatggcttgctacctgaatcacctccttcaagtccttgctcaaacatcaccttcacgagtcctaccctgaccatcttactgaaaaaatgtaactccctcctctcctatcacggcgtagaatctactatttctatgtttactgtctgccttttcatactagaatatctttccatagtattaacagctccataagcacaggaagttttgtgttcacacatgtactccaaatgcctaaaaagtgcctgacacagagtaagtgctcaatacgtatttgttaataaatgggcttcttaacaaacaagcatatatgcccaaaggtatgctccaagatacaaggagcagcattttattcgctgctacacccacagcgcctagcatctggtcgactaaaagacaatcggagctactgaagtgactgttacctctccgagagcagagtgagcggagacgagaccgcacccctcccctcaaacccagcccagcccagcctactccgcccttcacctgtgaggagacacccaggtgctggaagctgtagtccagcagcaactcctgaagctccaggttgaccggcacgttgcggtcgaagggcgagcgcagcatccagcgcagtggctccaggctgcccagagcgttccccacctgcgggcccgacgcgccccgtgccccgccacgaccgcgggcgcacaccgcgcggaactgcaggcgcggctcgggacctgggtcctgcccgggacacgcccagccagcgcggacttggaacgacccgttgtccagcaccagcggtaccggcagtggcccgtgtgccaccgggccggcctccagcactgggtccggtgcggcacgggcgtcgcggaacgggaacacgttcgccgccatcttggagcgcgcgtccagccccgcccctcggcgcagtgtccgcccagacgccgcgaaaccgcgcccccgacgtcacgccgcgcgattcaggcctttaagtacctcgatgccccctcccttctcgaagcccggccagcctttccacttgactcgcctctggctgtcaaggctgctttcaggatcgctgagacgtacccattctggctgcgaaattctacgtttcttaacctctcccccaatagcctatgagtgcccacgccccttcactctagccgggacgcccggtttggaagccccgccccaaagcctatcgccgccaggccccgcccctttctggctgccagcttcagcgccgcgctcggtggagccccgcctctctgcctggccacgccccattgccgggcgcgcaccgtcggccgggcgcgcaccgtcggccgggcgcgcaccttcgaccgccggcggccccgcctccgcgtggctgtctcgccctcagtcttgcgtcctggctagaagggtcctttatcttttgacgcttcctttacgttaagaaatctcaaactctgccgactgttcaatttcttgactagggagctgactactcagttctgttcactttactaactcgcacagactgtgtcttctcactaagacacagtgttttctcaaaccctgagaaaagactgctgattgttccccaagcattccctctcttttagtggcatcacctcccactcccacgtggccatccgtctggctgcgatctagatgcgctcatgtgactaaattctggccaggagcgggtgggagaggaggccatgtgtgtgacccactcagttttagccctaaaagcactcgtcgcgctctatcctgtcgcatttccatcttttcactagctaagggggtaagaattagagcagttgttttactacaacctttttttgtgcagtggggcgatctcggctcactgcagcctcgacttcctggactcaagtgattctcccgcctcagcctcctaagtagctgagattacaggcgtgcaccaccacgcccagctaatttttatatttttagtagagaagggatttcactatgttgcccatgctggccataaccattttgaaagaagaaaaagaatagagcagctgccttgaatctactctaccaggtctataacacttcagtttgagagataaaatcaaattagttacaaaagatattgtaagcgagaaatgaaactcctaacttatctcaagaacctctattaacagtgtttgttgttgttgttgtttgttttttttaagacggagtctggctctgtcacccaggctggagtgcagtggtgtgatcttggctcactgcaacctccacatccccggttcaagcaattcacctgcctcagcctcccgagtagctgggattacaggcatgctccacaacacccagctaattttttttatttttaatacagacgggatttcgccacgttggccaggctggtctcgaactccttggctcaagtgatccgcctgcctcggcctcccaaagtgctgggattacaggcttgagacgacgggcccagcctgttaacacacctaaaccagattgggagccagcccagtggcaaaaatcaggttgtgttgtctttcaacacacgtccattgttcagatatctgaagtaaccatcgttaagttaattaagagggggaccagcagaacacagaaaccagtaaatgtaagttagtgaatgttaatttaagaattgtgtctatgtatattaatatgaaaaagcactggctgggcgcagtggctcacacctgtaatcccagcactttgggaggccgaggctggtggatcgcctgaggtcgggagttcgagaccagcctggccaacatggtgaaaccccgtctctagtaaaaatacaaaaattagctgggcatggtggcaggtgtctgtaatcccagctacttgggaggctgaggcaagagaatcgcttgaaccctggaggcggaggttgcagtgagccga

SEQ ID NO: 1561616 - DNA, 4001 bp, Homo sapiens
ttttttttttttttttttgagacagcgtctcactctgtcacccaggctggagtgcaatggcgagatctcggctcactgcaagctccacctcctgggtttatgccattctcctgcctcagccttctgcgtagctgggactacaggcgcccgccaccatgcccagctaattttttatatttttagtagaaatggggttttgccatgttggccaggctggtctcgaactcctggcctcatgatccacccacctttgcctcccaaagtgctgggattataggcgtgagccactgcaccccgccaatcaaagagctttgctattgccataggattcacatcagggtacagtgggtccccagcccaagggcagagggagcccagagcatttaataaaaagactgcaaaggggaggcgccaatcatgggccccagctccagtaagacgtgaaggaggcaggggtgggggtaggagggcttgtacagcacctcagtgcttccagcttctgacggggagtagctgagcattttccctgggctgggggcatcagtagtgggggccaggcctcaccctcctcagaaggtaggtgggctctccacagcctgtctccctcactgacacatgcacactcactggattctcaccggcacttttgtgatagctgtcatcatcattcacacctatttcttttcttttctttttcttctcttttttttgagacagggtctcgctctgtctcccaggctgaagtgcagtggcaccatcacacctcactgcagcctcaacctcctgggctcaagcgatcctcccgcctcagcctcctgagtagctgggactacgggagtgcaccaccacacacacttcccctaactttttttattttttggagagacggggtctagttttgttgtccaggctagtctcaaactcctggactcaaatgatcctcccgcctcagcctcacaaagtgctgggattacaggcgtgagccaacctcctgggccactcacacctatttcttagaagggtaagttgaggctgactgcagctgactccttccccaaccactctcacaccctactggctgactcaccctgcttggcagactcctgggcccctcctctcggactctgcgacaggccaagggggtccagaccctccctgaccccaacagtcccaagacgccacagctggtgggcggagaaacaaggggattctcccctggggccagtggccatggcttggcctcgagtgaaccctgctagggccccaaacccagggcctacctagctcctgttcttcccgcgcgggggaaggggggtgctctgctcccctccctcccctttctggcagggctcacggttcttccccggggcgcatccacaaacctgagctccttggcgctcaccaccataacgctggcgtacaaagctgcttccattcactgagcactcagtaggcgccgggcacagcactaggtgcctatccggcgtagacatcgggcctgatcatacagctgagcttcagagacctcaagtccctgcccaggcccacacagcgctcagcggtgctaggatgcccacttgacagacagcgaaactgagacccagaggggtcaagtcaggggcagaagcagactctggaggcctccgggttctggaccttctctgccccattgtccctgattagcccgcaagcaagccacggcctaagccgaaggaagaactcgcctgcaggagcccccgttcgttcccagggtttggacgccccgggctgggccccgctaagcccctcgggccgcccaggcgccggacccccgtccccggagcccccgcgcgcgctcactttgggcttgtcgaaggcgggcgtctgggccatggtgccctcgtgcgccccggcgctgctccctccgccgccgctcggtgggtctctgccggctcggtggccgctcggctttccctggggccagcggtggccgcggccggccacgctcttcttaacgggccgggccccgcctcccgccccgcccgccgccgttcccggggcccgccctctcgccggagcccccgccccgcccgccggcctggatcgcgcatttcctggaattctggacccggcgtcctcgcccgccgacccgaaaactacggccccgcggcgcccgaccggacccacctgtgggcgcgcgctccagccgcctcgctgggcgctgccttccccccggctcctccagcaactttcaagcgtccccctgcagtctgggcgctgctgtgcgccaggcccaagctagaagcggggaccccgggagcatcgcaagcctcgagcggcgtgccttccaccggatagacggacgctcgtcgcagaaacacacaccataattgtatagttaaggaactttcgaggggggccagccgtggcctgcagaacctgcaggagttcatcaggggtgggtgggggtggagaggacattctacgtgagagactccagggagctgggagtgaaaggaggcgaggaaggctggagctcggagggagggagaacacagacagtcccctcctgggcattcacctttaagaaacccgcccaggcgcagccagagacctgtgcagaatgttcacaccagcgctattccgaataacaggaacattggaaacaccctcaaatgcccctccacgggcgagtgggcaaataaaccggaatattcacaccatgaaacgttagacagcagtgaaacggaatgaacttcagccagacaacaacagaaacaatgtctcagaaacaatgttgagtgaaaaaaactaagttgcggaaaactgcatacaatggtgcaacttttagaatgtgtaaaagcaaaaccaaaagtatgtatgtttagacacatgcatcggtggaaaaaatgtaaagcaagggaaagatgagcatagatacgagaagagtggttatctcaggtgaaagggaaggagccgggaggaggtaaggacggagggaaataacacgcgggtacaggttatttatttatttatttatttatttatttatttatttatttatttactgagacggagtttcgctctttcgcggaggctgcagtgaagtggcgcgatctgggctcactgcaacctctgcccctctggcccgcctcctccccaccgctcccccgcacccccagcgtttcaagcgattttcctgtctcagcctcccgagtagctgggattataggcgcccacaaccacgcctggctaatttttgttttttgtttttttgtttttgtttttgtttttttgagatggactcttgctctgtcgcccaggctggagtgcagtggcgaaatctcggctcactgcaacctccacctcctggattttaagcagttctcggcctcagcgtcccgagtagctgggattacaggcgcgtggcaccgtgccctgctaagttttggatttgtagtagagacggggtttcaccatgttggccaggctggtctcgaacacctgacctcacatgatccacccacctcggcttcccaaggcgtgattacaggcatgagccaccacgcctggccacacacaggttattgataatgttccagtactggggtggatggtagcttcatttcatttcatcataaataaattaacaaacccataaacaagggggaaagagagagtgggagagtggagagcaaggggctagaaggtctgatgggagctgaatcctgccagggatgtgggacccagcgatggtgtgggattcctaggaagtcagtggagtgttttaagtggaggcgagacaaaatcacccttttatttggaaaaaatattctccagctactgaaagtgtgatccagggatcatcagcacccacatcacctgggagctgactacaaatgcagactttcagaccccatcccagacctactgaagtagaatctgtattttatacaaacaggacccccaggtggttcgcacccacagggcactttgagaagcctgggctccctgctgtgagg

SEQ ID NO: 1561617 - DNA, 4001 bp, Homo sapiens
gggacgcttctggacggagccttggtgctccctggccgggtgtgcctaagggggctctaggaggaatcccagagccaagcattactcagagggcgcctggaatgttcccctggaatgctcccagccctccactggccccaaccactctcacaggcccgccctgcaggagccaggccccaggcacccagagcctgcagcagccctccttcccccggtacccagtcccagctcccagaacagacagcctcccccctccacgcagccctggcctcagtcctgctgggctgatggctgcctgtggaagtgactcagctcctgctaggccaccccaactccttttttctcctccaccttctctcccagactacaaacatcaaagacccttcctccaagaagccctccttgattggatgagtgaattgccatcaggcagatgagggccgagaggagtctgccaccttggaaaggaggctagaggggccagtgcagggagggctctgagtggatgtgggggaggggaaggaggggaggtctctcagcccagagagcacttaactgagagtagagaaccaagctttgctgctcctaggcctctaagggtttggggaagaggtagggtgggcccgggcacaggtgtggtgtgggtgcagtgtggtgtgtgggtgctgtccacatggccttgcgcgcacgtgctggccacgggcaccctgaccccaatgagggagagaggggcagagctggagctggagctggagctccggtgaccgggtgaatgggggtggaacccgagggagccaggctggtattgggcacatagacgcccctctcccaggggtcccatcacctcccctgaccccaggatagggctcagaggggagggagcagtggaccgcctggggccctcccctggggccagaacagaccaggcccctgtacctgtttggtccccacacagtgctgtggaagccaccgcccagtctgcatagcacagcccagccccgcatgccccctccctggttgccctccctgttcccggccaggcacttgctgtgcaggactggctaatcctcccacccgcttgcagaggttgttccagccccatcttaacatctttgtttggaggggttaccccgaggagacagctgcagtcttcccagagcactgctaaacagacaccttctatctggagaggcccttctctatctcaccaaacaaggcaacaatataaacaacatacacactgccctgctgccctgggaggagggacgaggggtgagcagggtggaggccacagctagttctgcagcctgagagcaaagcagggactctgggggactcttgggcatgggggcttcctagaggacggagccccgctgagtcctaaggggtggaggagcaggagcgggtcacacggtggcctgcggatggaagctggttgtgagagcgagaatccaggaagagggggctacggctatgggctgggggctgggctgcccccgagggggagggagccatgccctctgctttgccagcggagtggcagccgggcagtgtgggcaagtccgggcccggggccagcccaagcacacttgagcgtccctgggcaggtcccacggagacccccccaaagagtccccacgccctgacctactggccgtatggtgccggggccgtgagaccctccgcgcgctgacccgagctctgagcagaacccatccccgccaccaccaccgcgcctagcctgcccctcagggcgcaccccgcccgcgtcctcaccttgaagcaccccggcgcctggcactggccagagcagcagcagtagtagcagcagcagcaacggggtcccccgagctctccggggcctccagcccatagctgtgagctcctcggcctctaggcagcggctcgcaactccggctccgcccaggctggattgcggccgacccgtgcccggtgcagcctcaggccgccgccttcggaccttcccgcccccacctcccaccgcccgccctcgctcccgcctcccctccccgccaaccccgctcggagcctggccaggggccccgacggcgcgcgccatgggggagccgggtcgccactcccggaccgccgcccctcgagggggtggagctgggcggaggagggaatccgtgcggcccctcggatgaccggcccgagccgtccctccccgtcggtctcagagggcctctactcctgagaggaggagagaaccgctgggaaggttcttggaggaccgcggcgtggtgggatgaggcggtgggcaaaggccgcctctcgctgctgaagttggccccaggagcgcgatcttccgtggtctcctggggccgatctctgtcccctccttgctacccgtcctgccccgagggtgccctggcggaggttgagtcgggtcatccacctgcactgggtgcccccaaggataggaaggttcaggcaaccggctgccgctgtcttgggggcttcattgctgggcaaaggcgatgcagcagacggagacaacctttcttccctggcggtggccagagggcagaattgcataaaagctgcagactcccaggcctgggagaccctttcggcctcagtaacatctgtttcatgttttaaacttttgttttcctactcggtgcaaatttggatgagatgttaactttttttttttttttttttttgagatggagtctccctctgtcgccaggctggagtgcagcggcgcgatcttggctcactgcaacctccgactccctggttcaagcgattctcctgcctcagcctcccgagtagctgggactacaggcgcgcgctaccacccccagctaacttttgtatttttagcagagacgaggtttcaccattttggccaggatggtctcaatctcctgatctcgtgatccacccgcctcggcctctcaaagcgctgggattacaggcatgagccaccgcgcccggccggagatgttaacttttaagcaaatcttttttttttttttttttttttgagacagagtttctctcttgttacccagactggagtgcaatggcatgatctgggctcactgcaacctctgcctcccagattcaagtgattcttctgcctcagcctcccgagtagctgggattacaggcattcgccaccacgcctggctaattttgtatttttagtagagatggggtttctccatgttggtcaggctggtctcgaactcccgacctcaggtgatctgcccgcctcggcctcccaaagcgctggaattacaggcgtgagacaccgcacccagcctacttttaagtaaatctatttgtttttgagaatttggaatgtagtaatttggttagtgaaagttcgagcagtgagagaaacctacattcacatatctcaaaatcaaaaagtacagaaagcatagggaaaagtctccgtgctcttagccctcctcaccaacaggaaaccaatatgattagtttctttcataggcttttagattattttttcacactcaagacaatacagacatatttttttctcttattaacgtttttctgcactttgattttcttttttttttttttggtcgcttaatacaccttagatatcagtgcgtttagagggtccttgttgttcttatgattattatttagagacagggtctcactctgtcacccacgctagaggacagtggcctgatcatgcctcattgcagccttgaaatcctgggctcaaggtatcctcccacctcagcctcctgagtagctggaactacaggcacacggcaccaggcccagctaaaatttttaatttttctgtagacaggggggtctcactttgtttcccaggctggtctcaaactcctggtcttggccaggcgcagtgtctcatgcctgtaatcccagcactttgggaggccgaggcgggcagatcactggaggtcaggagttcaagaccagtctggccaacatggtgaaaccccatctctactaaaaataca

SEQ ID NO: 1561618 - DNA, 4001 bp, Homo sapiens
tttagcacaaggtctggtatatagtcagtgttccaaacaggttcactattattaggaactattaagaagcaaggatgaggctgggtgcggtggctcatgcctgtaatcccatcactttgagaggctgaggcgggtggatcacctgagctcaggagttcgagaccagcctggctaacatggtgaaaccccatctctactaaaaatacaaaaattagacaggtgtgatggcgggcacctgtaatccccgctacttgggaggctgaggcaggagaatcgcttgaagccaggaggcagaggttgcagtgagccgagattgtgccactgcactccagcctggctgacaagagtaagactctgtttcaaaaaataaaaataaaaaaaaaaggatgatatctgaactcatatcttccagactccagagagacaacttttatcgccagtatgcaaacaaggctgactccctaccagctgtggggcccaatgcctaaaccgtgcccctcagggagggctgtggtctaccctaggactatgaggagaatatactttaaataaacactttctagaaacaaaaggacatcccaagttcttgccaggaactcccaataattacataattataagcccctacatttgagatcatggggctagcaggggtgtggggagggacttctcaccctgcctcaacaacatctgaccattgctggcggcatgtgctgcgccctccctgcctagcttgccaaaggtcatggcactcagcagcaggaggtaggaggtcaagtggtccccacgaagaggcctttttttgacacagggtctcactctgtctgctggaatacagtggtgtgatctcggctcactgcagcctcgacctcccaggctcaagcaattctcccacctcagcctcctcagtagctgggaccacagatgcatgccaccacacctggctaatttttgtattccttgtagggacgttgcccagcctggtctcaaactcctgggctcaagcaacctggccaccttggcttcccaaagtgctgggattacaggtgtgagccactgtgtccagcaggaagagacctcttgctgaaggggatgctcagggagacacatgccagaggagcagaagtcccactcctgccacacagccaggccatatcctgatccagccacccccagcttcctccacagccagcttcgtcccacctcttgctcctcttggtggcatgctgaggtcagggtgaatgtcagctggcttccatgagcctgtctcccaaagcagccagatcctttctgatacatggcttaggcagaaacagtgagtggtctgcaggtatctgaaaaatgcctaaggctgctgtatcccatcgtgcaagctgtttactgcacaaaagcagccaattgagagggtgagcggggctgaaatccagcccacgctctgctcacagagccttgcaccccagctgaaaggggcacctggaagttcatctgcctggagcgataacctctgatttgttcaaaagatcactctcgaactctaggttcaaactctaggactcactctcaaactctaggttcaaactctaggactcactctcgaactctaggttcaaactctaggactcactctcgaactctaggttaagaaaccctaaacaaccaaaccaatcctttccacttaagagttgactgcttgtatctaagcgagcacttaaaatgactgaaggaagccccttctgcagttgtttcaggacacactggcctatttggccccctgcctagctccaggattagggtcctgcctggacggggtaagaagctcaccttggctaagtaagaagcgtagccagatgatcaataacaacagcaaacccacagggaggcagaaccagaaaaccaggaaagaaaatgtgaggtcgttcaccagcggcatcaaagggtacttcatggcgcatgtgtggctaagctgggccagcctgggctgggctggcagggctgccccatgggacctggcaggctgggccatgctctgctctcagcccaactgtgactaagctgtgacataacaaagaagtcacagtgtacttcaggcaaagcatgcaggggacactttgagggagagctgttctggatgaaagggtgggaagtgaggcagtgagacagacagtctggctgagaattaaaaagcccaggtttccaggcaggcctgggcttgaatctcagtccagtagctattgggttcatgacacccctctgaccctttttcttgtaagatggagataattctgttaagttagaaaaatagatgggacaaaaattacccccaggatcggtgttcatatatctgaagtcacagaccccctccaggagccagctgggtccccaggtcctgtaataccagctgtgggtgcccacgtccacacttggtgggggtgctggggactgcggcaaactggatgcagcttactgcatcctaagcatgcagtgatggcagctccaaccaataactgctacaagtgaaatgcaggtccattattgcaggactcctaactttcccaagacaggcaaaaagtctggatttctgtgaaatctcccaagtttaaaatgtcggatcagaccttgtcaaagcactgttggctaaacaaaacgtctgccaggctggattggtcactgggctgccactgaaaacttttaaaatctaacacatagtagattattctaattattactagattaaatgactataaatgattattacttaatctgaaagcttgtgcctctccttattagggttttcagtgaggggcttctaacgacttgaatcttgttcctttatctcctgagtggccagaacacttccacatgtcatcctcatcttctcctatctgtcatccgttcactcatcaagtattcagtaaacctccatgtgccagaccatggcagaaaggaggcttcgggcttcccactggagtggctgctgcatggtattctccaagaggacccttggaccacctgcctgtgactgccagcaggtgggtgggtgctggagtgtatttattaaacatgccaattcccaggctcaccttcgtctcctcagacctcttgggggtgggggtgtggcttgggattcaacacactgataagcaactagaatgattctgatgcaggcttgattttgagactacagcatctcatgacttaaaagcacctgttgaaaaggcaaaccaggtccaggcgggggagcagctgcaggaagggggtggtaaacttagggaaaaacatggagtagaaaacccccttataggaaaagacaccgattcaaggagaagggcgcatggggccagcaacaggaaaaaataagagcatgggaggggctgggagagctggggcatggtttcaagagtcctagcccagctgtgggaaggccagaattcctacaagaggaagtctgggaaaatggactagaatgagtgtccaagaggagcagtgctctggcagggtgctcctgatgcagggcccagaggccaagagaaggaggagcaggtggtctgggttgggggtgattccctggaactgggtcctgaaggggctgcggtcagagagagagctgagcagcatagctgggaaaggcttgagcacacattttttttctggctacaaaacctttccagacaccaaaacagggctactgtgcagtcagcgtctctggccactaggcccagctggaggtcctgttgtgcgtgggcagagcaggcagaacacacagtgcaaggtaggcagctcccaggcacagttcagagggcacacgtcagcagctcttggcagaggcatggccacaatggttctcatgattgtttcaagtggtccattcactccactatgtgtgatccaggcctgaaggcactcatctggctccaagatgcccttcacaaagggggcagtgggcggcaggggatgatctctgcacctcccccctttcctgactgtctagtcctactagggct

SEQ ID NO: 1561619 - DNA, 4001 bp, Homo sapiens
caacacttgagttcgacaatgaagaacccaacatgggcttgatgtttaccaacaaggctttgcaaatcatgacacccatctacacacttaatccaacatctctcaagaatgatttttaactctcaaagaattggaaagatttggcctatgaagaagggagttaaccagctatgcccccaaacctgttactttgtttcaaaccttctcctttaccaccagacttaggaaagatatggtgacacattcaaaacttgaggtggaagaactccagaggaagggaatccgaaccaaggatgtgccaaggtgattcgtcaagaacaaatatggactgggggccaacagttttgaaaaagtaaaaggagaaaacttctaaaatgcagggtgggctctttaaaagaagtaaaatcactgctcttgactcacttaatccttcgccatgttgctgtcagctcaccaactaagagtgcgagtgtgtcttgctgggcccattttcccatggtctgtagaaggcgctgtgaagcacatcctgttctagctcgggggcccttcccccctctgcagccttacccagtgcagagaatgcgccccctactgactccaacactcatcgcctttagccgacttggctgcggtgcattttgggtgggggctggtattttctccatggccataaaccagaagcaacaatgcagatttctaaagaaactgtatcaagctatccaagagatttttttttttttcattctgaaggttcaagatacaggcacaagaagcatcagggatgggaactgggtgtgtggggatggacatcattaacatgacaaacacagaaacagtttggttctttttccctcctaagcctttgtctgtgaaatggggttatggcaagaagtgtccagagtaactggtaaattcaagaagattaagaagacttcgtgtgtggggggtgtgtgtgtgtggctaaaaaggatatcagacctagagtcttggtcttgggcagaagaggaagagaagcaatcgcgccttttccagcagacagggatcaaggttgggggggaggggaaggcaggcaggcctcccagaggaaagaagaggtgaatacgagtgtgttcacaaaactactccccattcattacattaaaaaaaaatctttttgcagctctctggatttccattttctaccaccttactgcaaagttggggctcagaatgttcgaaagaggtgctgaccaggcagctgagattggggaaaagggatggtggtgaactgtggtcaggataagaggaaagctggcaggttggggaagaaggattgcacaggggaggcaaagactcactccatgccatgcatgctccccgccccccccaaccccgtcccccctcccccaggtaagggtgggcagacctggcagaaggctggttcaaggcatgggggtgtgcgtgggggggctccttttgggggtggggggcggacgggattagttccaggatgggagaagctcggttctggctgggggagatgcccttagctgcaaaagctccgggcggccaggcagagtgctggcctcggtgggctcacagggcggagaagggggtcgggctgcaggaggaggcgcctggacctccggagcagagtcgggtagcggtccgtgccgggacgggggacccgtcggcgccggggtgtgcaaaggagcgtgtgtgcggctggagggcggcgatgcgaacaacaatgcgcccgcgcccggggccaggctgcactggcggccgcgcgggccggggtcgggaagccaggcagggcagggccgcgggtccgcgcgcggcggcgccgggcttaccttgactcggcctcgaggcgcgcgcggggccggcgtgctcgggggccggacagcggcggcggcggcgggcggatggcggcggcacggcggtggcggcagcggggagggcgcgcccggggcctcgtcgcgctccggctcggcggactccggctcgcgccgcggccgcgggtgctgccggggggcgcggcgggcgcagcagagcggcgggcggcggcggcgtcgtcgagcggtgcagacaaaggaggggcggagggaggagacggagggtgtgggagaggcggcttcaccggcgcgggcggcggcggccgcgctcctctcgctcctcagcagcggggaccgagagagggagctgtgtctgagaagacgccaaaatcccccttagcgctgcctgcgggagggggagggggcacaagatggcggcggccgggggggggggggcgggagttcagctcatggatcccggcgggcggcggaggggagaccgggccggcggaggcggcggcggcaacgggcgggggagggggctgatcccgcgtctcccctcagcagacaatacaagcgcctcggaccgagtccccgaacctgccctagccaaaatggcggccgagaaagagcggaagtgacgtaagtgcctcattagcataagaggactcattgtccagctaaataggggggggcagtggggacagcacccctaacccccttttccccagggggggttcctcttactcccacccctgcttgcacctaacttttcctgagggagggtgctctcagcacccccacccccgcttgagggaaattatataatccccactgaggggggagctctcgcgagaaccaggcggatttgccattgacccactaggaggcgccgcggataatggccgcagtgcgctcccggggcccgtgtgctcggcgggcgccttcctctggccgcagcgccggcggcggaggcagaagcagcgggccgcagcacgcccagcactcagtcaggtggccgtgctggggatccctgcgcgggcccagctgggcctggactacatctggcgggaggggtgtgcggggcggcctggggcggctccacgtgctcagatgcccgcgcttccacggctgagaagcggcgggaaggcgccgggacacctggccggtcgcccctgacgcctcctgccttaaatgaggtgtgagggcctcgtgcttcacacagcgacttgagatgagacacaaccccatggatgccttagcccttcctggtggggtattcggtgcagaggggccgagattttattaaggtccgccgttaccctgtgacttgacattcttcccagtcacagtgatggactcttctctgacctgaataaaaaaaaaaatgggaatcctagtgccttgaggccacccaactggtgaaacttaaggatgagaagtgatgttgccaataggggcattggctctctgcaagatccttaaacaacacactttgtagtcctagggacatagcttttggtgctcccacaatctgggtagcataagacagcacatggttgctttgtaaatttaggtcaatcccaaccaatacattatctcctcaacatttttgaaccaaccttttaaagtaggttgttcaaagtaacattatgatttaaagtatcattggttggttaaatgtattgacaagtaatagatgtcaatagtgaggaattaaccaagcctgtttccttaatatgtgatctttaggtaaatacacctgtcttttgctgtttctttacatttcaagttaacatagtttcaagccatacttaacatccgaaaataatctgagttcgctgcaagtagtataaattgtggttacacatagctgttcaacatctaagacttcagttagccctgtttaacaaacttttatacaacacatttctgcaattgtgataaaatgtatctttaaaagccaagtcagtatttcaagggaaaacagctgaaaaaagtcgtggaaaaaggggttggggcaaagcatttgattcagaaaactaaagaatctaattacacactgcagaagacagataaaaactaatatgaaataagcaaagtaagtttaagtttagtttttcttagatatacttagattccatatagtgataatacaaatacaagggaaaacatctggatttc

SEQ ID NO: 1561620 - DNA, 4001 bp, Homo sapiens
gttgccatgttgcccaagctggtcctgaactcctgagctcaagtgatctgctggctttggcctcccaaagtgctgggattacaggtgtgcaccaccatgcctggccaggaatgtatgttcacattaactcagaacattctacaactttcagtgtaaagattataatgctcttcatatgcgtatttctgacattcctaataaccttggaaattccataatctccctttctccagaacaaagtgtgccctccatgcatttgttcatggagatcatttctctaagattttctccatttgcagctgaagtaacagtcatatacactggcaccttcaaaagcatttgcaaagatttttctgttttttttttttttttttttgctttaaatacttttctcagtagataaaacaagcacacaattcagaaatataagcaaagaaggcttccttctcactcttatccctccagccacgcagctccccatcccagaaggggccactgttaccctttcttgtgagtgttttgaactataacaagccaaacaattctttggaaaaaagtttcaaccaaactctatcagtcaatcattatgggtgataagaaaaagaagagaaggaccctatgtttctttgcagctactgcttgctgttaagaaacataagttcaaatcaatagctggctccagggttcattaatgttatctaggctgggcgcggtggctcatgcctgtaatcccagcactttgggaggccaaggcgggcgagtcacgaggtcaggagatcgagaccatcctggctaacatggtgaaaccccgtctctactaaaaatacaaaaaattagctaggcgtggtggtgggcacctgtagtcccagctacttgggaggctgagataggagaatggtgtgaacccaggaggcagagcttgcagtgagctgagatcgagccactgcactccagcctgggcgacagagtgagactctgtctgcaaaaaaagaaaaaaaaagttatctatttgattctcctttataaatgtggacaagggatccatacttaagtaactgaggggtgggaacagaatagataagaaattgtctctgcctgaaattcaaggccctttcctcactttcgaatgcaaagagagctaaaaactaaaatacaggtaattattactcttagggagaaagaaaccttaacactaatgccaaaaattgtcccagagatgggttttgacatgcagaaggatagctaatcccttctcttttgcctcattaggatggccattaaaaaaaaaaaaaaaatttgccagccatggtggctcacgcctataatcccagcactttgggaggccgaggcgggcggaacacctgaggtcaggagagtagcctgaccaacatggagaaaccccgtctctgctaaaaatacaaaattagctgggcatggtggcacatgtctgtaatcctactactaggaaggctgaggcaggagaatcgcttgaactccagaggcggaggttgtggtgagccgaaattgcaccactgcactccagcctgtgggcgacaagagtaaaactgtctcaaaaaaaaaaaaaaaaaaaaaaaaaaaaaagaaatcagatgagcatcattattccaacaccaaggagaactagctcccttcagccgaacctttcagctcatgacataaaaaaagaaaaatatccaatttaacaaacctatatattgttcatctgttagacaatcattttcagagcacttgcacttagccactcaactgtgctaggaatagagagatgagtaagacatggttcttcttccccttcaacagtccatttcttccagcttagaatacacatagccagccctcaatcagtagggtttagacacctgtttttgcctgcccagcctcctcttggaaacgcctctgccacgattgatggaagacagaaagtcacttttccagcagagcagagtacacatgactcagtttgactagttaagaatatttcatctatgtaagataatgaccagtagagttggacatgtcccccgaacagggatgacgtgacgctgaaaaggagagttgagacctgccatcacatgaaggaagcaaagggaacaattcctattgatattgtttaaggtcctcaatccagctgtgcccgaagaacagcacttccctatgccagccttttccaatatataaacacacacattatcgtttctgcctaagctaagttcttgtcacccacaaccaaaagtcttgacagacccactgggcaggcggacacagaagagaaagtgaataaataagagggaagatagggtatttatgcaaaataattacacttgtgaactgagtctagtagaaagaacaggagtttgaaagatgaaagttactctaaaaaatgctttgactctgatttcatgaagtaaaaaaacaaaaaacactatatgagaagagttaaacaccctaaattctagaattcagagaaagctcaatgacctattaataacagaattaacatttgcaagtattttatttacgactgaaagtaactaggtgtgggtgcaatgtctcacacccataatcccagcatgttagagggccgagttcaagaccagactgagcaacacagcaagacctatgtttctataagaaagcatgggtgtggacctgtggtcctagatatacaggcggctgaggtgggaggatcacttgagcccaggagttcaagactgcagtgggcaatgatcgtgccactgcactccagcctgggtgacagagtaaggccctgcctctaaataaatagagagtaactagctttttggtaagcacatgccatctgatgaactacatgtaaacattcaattattattatttttgagaaagggtctcactctgtgttacccaggctggagtgcagtggtatgatcacagctcactgcagcctcaattctccaggctcaagcaatccttctgcctcagcctcgcaagtagatgagactagaggtatgcgccaccacattcagctaattttttaaaaaaatttaataggggtcctccctatgctgcccaggctggtctccaactcttgagctcaagtgatcttcccacctcggccccgcaaagtgttgggattacaggtatgggccaccgtgcccagccaacgttcaattctggagactaacactgttgagtgaactagccatactcattcctattagtctttgcaaattatacccacatctactgattagggcccaaacattaacgttttactaatccaggcccatatcctattcatgtgctttcttacaaagcaagagtcagacagctggaatgaaaatctaagattcatctaggccctaggctacagataaattaaaaccatatgcatgatatttgtatctgtgcagaaactttttcagtttaagtcccatctatttttggttttgttgcttgtgcttttgaggtcttagtcatgaattctttgcctagaccaatgtccatgagagtttcccccaggtttccctagtttcaggtctcactttgagtcttttttctatcttgagttgatttccgcatacggtgagagataggggtctagtttcattcttctgcactatggcaatccaattttcctaccaacactaactgaaaaagatgtccttgtacattatttgggtgatggatacactaaaacccagatttcttttcttttcttttttttttttttgagacagtttcactcttgttgcccaggctggagtgcaatggcatcacccaacagatgacagtcccagtttagcaggctcaaggtaaagtctgcaggatctggcacaccaagaattagtggagcttgtctatggtagttctgcagagctaccacatcaaggatggcaccatatagtctgtatttttacgggcagaaaaaaagcagaaaagcatttactagtatcatctgaaagaaagacaaaacaaacaaaaagataagcctgttttag

SEQ ID NO: 1561621 - DNA, 4001 bp, Homo sapiens
tgctgttcccccactactccttgcactggtccagcctccagtcccagacccagggcttccaagacaggcctcaaggggtaggaggcggcctctgaagacagctgcctacctcccaggactgcagcacagcttgtgaaagaagcaggaaagttcctcggaagagctcaaggactcagtaagctcaagaaataacgattaacaatatgaactttccatttgataatttatccccatccctgtgcttctcattgccactcagcctccttcctttccaagaggggatctcagaaatgagaactcggggcactcagaaacaccagctggggagggtcccaaatggggccagcttccaaactgaatgagtgctggggaaaagcgggtggcttctggcatctgctgatgtacctgctgactggccagggcttgctacccatgaatgaacacatgtaggcccacccactctgtgcacccacctcccgggagggggatctgtagggggacacatacactgccgaccacatatgggcagatgcccgcccagattttcacagacgttttatttttagaggggccagcagcataagcccaaggcttggaaaagaagaagggaaggacagaaaagttagaagcctgtgaaacgaacctggcgaggatgaagaaccgttccttggcactccacaaaatggtgcatgcacacctgcctcttaggagactcaggacttgctaagtcaaccttctaggttcaggtgggggtcgcccaagtctgggtgccaggagggcaccgccataggctcagggagaacaggaggggccggtgggagaggggtcactcaccgagcggcaggacaaagaagaaagggaaccagcagagcacgaagacacccacgacgatggccagagtcttggccgctttcttctcacgggagaacttgagcaggcgcacggagagcgagctgcggaaggtgtggcccttggcgctgcgcatgccgtgcgccccgtcggcgcccgtggccgcgccgcgacagtggatgcgcagcaccacctcggaggccttgcctcgctcgcgcttgacgcccgcctcgaggctgcgcgtggtgctgcgcgcgaccacgtacacgcggcagtacatgaccacgatgaccgccatgggcaggtagaaggagcacacggaggagaagacagcgtagcccgcctcctcggtgataccgcagaagcgctcgtcagggggcacgggctccttccagcccagcaggggccctacggacaccaccagggctacgacccagagcagggccaggatggcggccgccttgcgctcggtcatgatggctgggtacttgagtgagtggcgcacgcccacgtaccggtccacggagatggtgcagaggctgaggatggaggccgtgcagcacagcacgtccacggcggcccatacgtcgcagaaggcgcggccaaaggcccagaagcccagaacctccatggtggccgagaagggcagtacggtggcgctcagcagcaggtcggccacggccaggttcacgatgaaatagttggtgacggtctgcaggtggcggttgcaggccactgagaggatgacaagcaggttacctgccacggccataaggatgaaggctgccaggaagacgcccacgcccacgccctgcgcgctcaccaccagtcccccgacggccgccgtgccattcacgtcgccgcccgcgcccgcgctccccggctcccccgcggagctccggttgtcctcgccgctgcctgcgcccaccacgccgccgccgccgcccgcgccccccggcacgccgcccaccgccgggccctccgagggggccgcgccgcccgcgctgcccccgccgccgcccgcgctggagccccctgcgctgctgtccgggcggggtccctcgaaactgacgctcaggagatcgcggaaagtcatctcaacgcgcggccgtcggtggccgggccggggcacagaacgagcggccggcagggaggggagcacagggcatagccgcggggctccagatgcagctccgcgcacgggtcccgtcggggtcctgcccaagttcctgtgacgcggagcgcggctgtccgagagcggagctgcctggcccgggcggcggccgggctccccgaggccggccgtggagtagcaccgaagagccggggcccgctacgcgcgcggcgctctgagcgtgcccggcaagcgggcaaagcggcggctccggggccgggcggtgcaggcagcggccactgcggcgctcccaactcggcgcggggggcgggaccgaggaggggcagcgccaggaaggaggagggggcgacccgggccgagagacgggcgccacactccagggtagaagggacccttcgctcaggacaagcgattgtgtcggggtccggggggctgcggcgctggcgcgcgctcgggtcccgcagcagccacccacgcctctccgcaggtgcccaagcccgcgctctcccctagcggtgccctttgcgttccttcccgctcctctcccggaccccctcccccttggccctcagcggcgtccctcttcctcccgccctctcccccgagtctctcggtcactcgctggtgcccttgggcgcgcggtgcgttgaaggcgtgagtcccgggtcttcgggatcccggctttggccgccagagagcagcaagcgcctgggatctgcggactgcggaccggacggcgcagtgccgctgcgggttgcctcctgggactgcccgcatggatctgccgcacctcctttttctcacgccactggccagggcagggtttcagacgcctctgtccagtgcgatggcgtgaagagagcccaggaagggtcggaagcctgtgctgggcagaggctgggtacgatgggctcaggagcagcaggctgtggctacagccctcggaccctgcccaagacacgctggtctacatacgccaactttcccactgttacttttccctgtatcagatgcgggaataaacctttctatagctaccctaaataaggggccttgttcttgttctggcctttttaagagggagggtttaagtgccagagggtgggaaagggcacttggcaggatggttaagcggggcgggtgtgagacagtctggctccgcatctgaatccaggctccgccccatattaacagcggaacctctttgtgcctcagttcctcaactgtcaaatgagaataagaagtgatgtctacctcctggcctgagggttaactgagtaaatatgagtgagggccccagagcagtgcctgggcatgtcagcggagtagggcttcttcagggcaggcttttaacagggaggatggaaggcgaggaggtgtggggctggtatggaccccgggtgcagatgtgggagagggtgtgagaagcttcttgagcaatagcaggactgggtagggagaggcacaaggaaatcatacagttagccaacataaaaataccggctgctggcacgtggcaggcaccatgctggatacactaactgtaaggagggtaatgccgtctcatagttgcagaatgaggagggcttgagccctaccagggagatgaaggcctgtttgcagaagtgtctgggaggggacggagaacccatagccctagtgttcactggttatggttgacacaggggcaggatgtctgagttctagatgagaagctgctttggagaaaaagtaaaaaactgcagaaatgtttagagatgggtggcctccctcctccccattgcccagtccaggaagataaggcttttataatcatagcttggaaacagctcttccaaggccttccccattaaatcttcttttattttggtttttggaaacttactatagtgagttgaaacgaaagcaacgtggcttctagggattagctagcagctgaccaaaagtaaaatcttgggtttgggcttcctttctgagaggggagggacagtgggaactgaaaggggaggcaaggagc

SEQ ID NO: 1561622 - DNA, 4001 bp, Homo sapiens
tgggggcctcagtgacccacggcaaggggcagagagagggcactgggcatcgttagaaccagggccagcatgtctgtctgcctggaaatttcacaccgcaatcggttgcccgcagcccagcctggagcctccgtactctgggagaggacctcggccccaggtagcatgcaccgcagccctgaggtggcatctcaggccgtgtggccgggtgtggccggcgcctgctggtttataaaagccaattgcaccacactgtaagcaagttcctaaccgaatcgcagggcaacaaaaaggcacaaccccaaggcctgccccatacctgcatccagaagaaaagccgcttggaccctgccttgaacttcagcacgtagaccctcccgctggggcactgcggcacccgcttgaactcacagtcgtcagggaagatgatcaagtcctggcaagccaggggaagagagagtcagtggcgcagatggcatcactgtgcccagtctcaggagagcgtactgagccctgggtctaaccgggtggggtgcgcaaggggcagctaagccgccagacccctcgctggcagggtctccacaaggcagagaagccagggtcagagacagcccatgaaaggcaaggccgggggagagagcagggaaaggggcctttcagatggcaacggggtttctgagacgtgctggaaacaacattcccagagtagttaaaaagtcaacgctgaactgctctcaaatgtaacaaagaacaactaagagtttgaaaaacaaagaagactgagtgaagccgccaggcacagagctccaggctctccagggccacacctccaaccccaggcacctcacacggacagttcaaggccaggcacagagctccgggctctccagggccacacctccaacccaggcacctcacacggacagttcaagatacacagtggccgagatgcccctgtcaccgcggaaaccaggacgacccatcagcagggcagtcgatgacggccccacgagcggtccccagatgcggccaagcccccaccgcgaactccaaagcgaggactccgagggcccgagaagtcgcctgtcctgctgctgcggctcagggacactcacgtcttccacgttcccggacgtcctgtccttccagcagaagtgaataagcgagtcgtccgtctgctgaatgtacaccagccctttccgcttatccggagtcacggtggtccccttcagggacatctttcccgcccgaaactccaccaagtacttgttggaggcgccccgagagcctggcaccaggcttggaaagagcgcgcctgaggtcgtcatcctgaaagcgcggagaggacgctgagacgcggcggtcactgtcgcctgcggtccggcaagctcccgccccctggggtgtttgcgagcagggggcctgcgcccagagctgcctaaggcagactcagacacgccgggctgcctttccgcgtttgccccgctcacgacgatcgcaccgcccgcactcggcgctgggccggggcagccccgccaagcctagtggggccggccctaggcttgacgccgtctccgcggggcaccagcctcgacgcgccaccccggcgacccgctccgcggggcagacccgcccgagctcccgccgagccccacgttcagagccgcaggcggaaccggggcggcgcccgagaccccagaacccccgcccggcccggcccccgcaggccccacccgccgcgccggccaccttctcgtcttggctgcccccgccccatccttggtccagcagcccctgcccccgcctccggtcgcccccggccgccccaggcccggcgactcccgcacctgcctcgcgcccacactcgttcgagaggcgccgtccgggctcgctcttcctcctcggcgcctgccgggccccgccggaaacccgcgttcggcccgccccgcctgccgctctcgccgccgattgagccccgtaagccgcgcagccggctctaacctgccaacgattggcgagggcgaccgtccatcgcactcgctcctccccggtccgcccccgcgccggcggctcttttccggcggaagcgcgggccgcagggcgcttggaccagagcggcccctattgttgctgtgtcataggggagcggcggcggcccctagaggcggcgccagggaccacaggcgggtttcagaggggcgctggggaactgctcaggtggggccgagcccacccctcggcgtcgcccgcccgggcgggcagagctgtcactcgtgtggctgagccaggggttaggcggaggccgaggagtgcggtccggctgtgggcggcgggcaccagggctacgcatagaagtgaccatgggttcagcgctttggggacccaggcgggagctggagtccacgcgtccgggagagcaggggtccgggagggtagagcgagggtgagaaccgtgatatggtctcagctgtatacatctagtcccgcaggggtccgggagggcaggggtcaggaaggggtgggtccgggaggagaggggtcccgagaggggaggggctcctggaggggagggatctgggaggggtgagtccgggaggggaggggttcccggaggggagggggcccgggaggggagagggtcccggaggggagggatctgggaggggtgagtccgggagggaggagtcagggaaggcctgagtcccagacgggtagggtcctggaagggaggggtcctggagggcaggggctcaccctctggacgcctggatgggaaaggccacagggtaaaaaggcggcagtcgcccgccagtgttgtgtaactttgagtcactttgacacaaactaaagcgaagacaacagatagtgtttgtggcgccccagccggctgctgaagggacacgttctttgggatttgcctacagcgacgccaggcgggggctcttagagggctcaggcgcggtggctcacgcctgtaaacccagaactttgggaggccgaggcgggcggattacttgaggccaggagttcaagaccagcctgggcaacatggtgaatgaaaccccgactctactaaaaatgcaaaaattagccaggtatgctggcacatgcctgtaattccatctactcaggaggctgatgcacgagaatcgcctgaacccgggaggtggaggttgcagtgagccgagattgcaccactgcactccagcctgggcgacagaggaagactccttctcaaaaaaaaaaaataataataataatagtaataaaatagagaggtcaggcgcttcgtgagaaccctgaggtgcagtggcctctgcaccccagttaagcaagactagatgtttgcagctgagactgtgccagggtcctcaggttctcctttgcccatcgctcacttccttctttccttcagatacttcactcccttcgggcgctccccggggtcaccgtgtgcttggtggctcaccctcagagtggatgcacagctgtgtgcttacgtgctctctgaggtctttaggtgtgtgttttcactcacccttgttgggagatgcgttggtgttgatgctggcagctccagtcctttcattctgcagggagcctactactcaggcctccattgtctcggtggcagagcttgtgccagttatgtttagttgccagcttttgactgtcataatgcttccatttgaaacattgattgagctaaagattcacgttttttgttttggaaaatgtagccacttttcattttaaaatgtgtgttaacaggtagtaagtttgttattgttatttttatgtagctaaataattttaaatgtcctcttaattcctagtatggtaaatgtcaatagataaagctcacataaacaaaagctctttggggtcctgtataatttttaagaatttaaacggttccagaagctaaagggcttgagaggggctaacacaaagctctgtggcccgctggtgacaggtgcgtcactgatactgcagcccca

SEQ ID NO: 1561623 - DNA, 4001 bp, Homo sapiens
tgcaatctctggagctaaggacttgcaaaagtcacaggaacacctgtccccaggacaagccaagaggaacagcaagagcccctgtaaacatcagtttcttcatctgtaaagtgtggataatcatccctagcttgctatgcgccttaagtaaagataatgccatatgatcaagatctggcatacagcagggcctccttcctccagccccacccagctaagctccccatccccaaatccagctttatctccacccacacaacccaatggccccaatcctgacccactaatctctccacagtatgacaagcccccattccagctctactattgatgtgaccttcacataacctttctgggttcagtttcagcatccacacaatggagacagtctactctggtagcaacttgatgaactacttcaacagaatctttgcaagtcacctcccaagggcctcagtttcatgctctatataacgggattacgtccacctctatgaagattattgtgtaaacacacgtaaatcaccagatatacagcaagtgtttccataaatgtggatggcattctccagacttaatagtgtctttttttgtttgttttttttttttgagacagggtcttgctctgttgcccaggttggagcgtggtggtgcaatctcggctcactgcaacctccgtctccccggctcaaacagtcctcctgcctcagcctcccgagtagctgggaatgaaggcgcccgccaccacgcccagctagtttttgtatttttggtagagatagcgtttcaccacgttggccaggctggtctcgaactcttgacctcaagtgattcgcccacctcggcctctcaaagtgctgggactacaggggtgagccaccacacccggtccaatagtgtcaaagttacttgaaaagctaccagccaaactgaactggtttttgctgaaaattcactaggattgttccgcgtgtattcgcttgcacacagtggtgaaagggtgcgctcagagatctagatggcctgcgttccaatcttgctccatcaccaccagctgtaagactgagggcaagttacctctgcctcaggattctcatcataaaatgagaacagtttccctatagagccatgagactagaataaagctagaaggcagtgccgatcccacaggaaacactaagtaaacgttaactatccctgtattacacttcaatcggtgggacagcaggatttttcaaaccactccaaattttcttcgagatttctgcaaggctgcccctgctggaggggtgggggaccccacaggttgggtaactggcccaaagtcccaggggagaggaggatcggagccggcctggggctcgctttccaggcctctcctcatacaccctccggggtgccctcgccgtccctgtaggaggcccagagaggggtggacgctcgtcggggccgcccagctggacagggtccggtccaggcctaggaggccgggcgcaggccccccgagcagggtccggcaggtgccagccgtcccaggccgtggccaggtgtgctctcccgcggagcacgccgccagtttgcggctcgcagaccgcgcggcggccccggcgtcgcggggcatgctgggacttgtagtccacggccacccggaacggcccgctcatggccgcgcgagaactccaacttccagctggcttcgcgcggccagaaacgcgccgaggctgcgattccagggggtccagagagccccgagtcggccctgcagcccccgccacgaacaagccccgggcgggtgccgggcggccgcaaccggctgcaggtcctgggactcaccgactttgtagggcagtttgtcagacatgctggcggcactcgtgatggaaacgggcgaagggggctgggcctcagtctgggaacaggaactgggcgggcagcgccgagcagggatatgcgcgtggcgccgacgcctttaaatatcttcctcgcacttgcatattcatgacccgctggggcggggcccaacgcgcagggcggagccggaggggatttcgatccctgaaaagaagcctcagaatttcacaaggcgtggccccaggagtctcactcaccggtccggaagggagcgccgggagaggcctgagagccagccgggccgtcctctcgctggttcagccagttgattcagtgtcaaaacccagcggaactgaaattccgccagttcacttccctgtgcctcaatttcctcatctgtaaaatgggccaaatgacatctgccacacagattattataagtaaagttgcaggccaggcgcggtggctcacacctgtaatcccagcactttgggaggccaaggcgggaggatcgcttgagcccaggagttcaagaccatcctgggcaacacagtgagacctgaactctacaaaaaaaaattaaaaattagccgggcgtggtggcgcgcgcttgtggtcccagctacttgggacgcggaggcgggagggaggatcttttgagcctggagatcgaggctgcagtgagctatcatcccaccacagcacttgagcctgggcgaaagggcaagaccctatctcaaaaaaaccaaaacaaagttaagttgccatttgtcaggtacctactgacatcccaaacattcgccttactccaagtaaccaacaccctgaatttaagtaagtttgcatacatttcttatacttttactgcatccgtatatcattaaatagttctgtgtttagcacctttatatatcaaccgtatttacccttctgcaacttgcttttttctgtgagcattatatttatgagactcatgcatatagcttgagtatattcatttttgctgctgtataattcagtcatcccaggcatgggaaggggaaattggtttcaggacctctgtggactccaaaacccttctatgttcaagtccctcatataaaatgaggcagtattggcatataacctatgcacattcctccgtacactttaatcatctctagattacttataactaatataatgtaaatgctatgcaaatggttgttttgtaatttgtattatttttatagttatgtttttttaattgctttttttcccctgaatttttttttttttttatggagtctcactctgtcgcccacactggagtgcagtggcaccatctaggctcgctgcaacctccacctcccgggttcaagcaattctcctgcctcagcctcccgagtggcttggattacaggcacgcaccaccacacctggctaattttgttttttctttttttgagatagagtttggcgcttgttgcccaggctggagtgcaatggcatgatcttggctcacaccaacctctgcctcccggattcaagcgattctcttgcctcagcctcccgagtagctgggattacaggcatgagccaccacgcctggctaattttgtatttttagtagagacggggtttctccatattggtcaggctaatctcgaactcccgacctcaggtgatccgccagcctctgcctcccaaagtgctgggattactggcgtgagccaccgtgcccggcctctactcattttttaacctaaaaatgagaaaagaattaaactcttctggccgggcgcgtggctcacgcctgtaatcccagcacattgggaggccgaggcgggcggatcacggggtcaggaaatcgagaccatcctggctaacagggtaaaaccccatctctactaaaaatacaaaaaaaaaaaaaaattagctgggcgtggtgtcgggagcctgtagtcccagctactcgcaaggctgaggcaggagaatggcgtgaacccgggaggccgagcttgcagtgagccgagatcgcaccactgcactccggcctgggcgacggagggagactcttgtctcaaaaaataaaaaataaaaataagaattaaggtcttctatgacatagtaaatgtattggtctcacttgatctgtacatctgacctct

SEQ ID NO: 1561624 - DNA, 4001 bp, Homo sapiens
taattaaagaaagaaaaaagagaaaagaaaagagagaggaggagcaggacagaaggaaggagggagggagaaaaggaggtagggagggaaggagggagggaggaaggaaggaaagaaggaaggaaggaagggaaggagggagggaagggaaggaaggaaacaatagaagaaccatggaggtggaggggtgccttcttagtgccaggttgggggtgaaagtccaggctccctatgtggcttggggaaattgaatgatgaattttttttttgagacagagtctcacactgttacccgggctggaatgcagtggcgcgatcttggctcactgcaacctccacctcccaggttcaagcgattctcctgcctcagcctcccaagtagctgggattacaggcgcctgccaccacgcccagctaattatttttatttttatttttaatagagatggggtttcactatgttggccaggctggtcttgaacgcctgacctcgtgatccacctgccttggcctcccaaagtgctgggattacagacgtgagccaccatgcccggctgattaattttatttttaagtttactatcacatggataaaaagtttacagtttaataacatactattggtaagagtgtggggaaacaggcctcctcatactttggttttgggattgtacattggcacaaccttaatgaacaacactctggtaataactaacaagattacaaacccgcatgccctttgaccaagcagttccacttctaggaatttattccaaagatgtttgtacacatgagcaaaatgacgttaagaacaaaagactgtccttccatggaagacttgttaaataaatattggtacagtccacatgatggaatatgcagatagccatttttttgtttaaatgagctgtttatctaacaatatagaatgatcttcaagatatggtggcccagtgcgatggcccaagcctgaggcctaagcgccactgcactctgcctgggcaacaaagcgagaccctgtccgtattttaaaaaaacgacagtcgggcgtggtggctcatgtctgtaatcccagcactttggaaggctgattcgggcgggtcacctgaggtcaggagttcgagatcggcctggccaacatggcgaaatcccatctctactaaaaatacaaaaattaggcgggcgtggtggcacacacctgtaatcccagctactcagtaggctgaggcaggagaatcgcttgagcccggtaggttgcagtgagccgagattgtgccactgcactctagcctgggcaacagagtgagactctgtctaaaaaacaaacaaaacaacaacaacaacaaaaccaacaacaaaacatataatgaaggacaaaaagcaaagtgcagaacggtgcgcctagtatgcgattatttatgtaaaagaaagaaaagaacacacaaacaggtatttgcctatacatgcagaaaatataccaggctggatgtacaagaaactgctaacagtgcttccctggggatccccgcccacgccgctgaaagctgccctggacgttaactgttgatgtcccttctccaggtccaggccccagtggagcttctggcgggaaggtcgaaaccccaggcagaagcaggtcccggtccctcctcccgacctttgtacctgccttttccgtgtttgcttttgcaaacaattaggtcctgggcgcggaggggcggagagggggcggagagggggcggagggcgcacaagcctgccctttggccgcggggctttagcctgccctagcttcagcatccccgctcgcctcccggcggtcctgcgtctcactctggattaactggaggcttcgagatgggatagagaggggtgcaggcgctgagaaagcccgctgatggggatggagccggattaagcagttctgtggagttcctcccttcttgtccaccccgctaggggtctctcctttcccgctgtatccacgcccctccctccaggccccctgggcccacctcgaagtcaccgctgggctggggagtacagaggtgggggacttcttagagaccctgggacagggcccccctctctccctcaatccttctcatcccacgcggctccgctgtgagtcgggcgtcccaggagctgccggcccacccatccgcgggtttcttccgttgggggagccctccagactcgtagaatataagagagcgcccctccctagccgcgggccatctctaagcgacaggctttaagaggcaccccgaaagggggatgtgaggtggtgtggttctatatcattatatcgaaatcatctgattatgtgcctgtcccattacttccaggagggacagaaacctgtatggctttgccagctgctgtgtccccagggtccagctcagtgcctggcacacagactgcacacaatatttgggaatgaattaatgttcccagatgtctgccccggaacccacgctgtggtgccccttggcttcagcccacagtcctggctctcctcagggtggagccagggagtcccctaatccaggtctctgacgtcccccgctgaggctggatcgttccccagtggggctggatggcctctgggttcacttcccagccttgtctgagcttccacgccccttttatcctaatatttgctaagagcctcgtccagggaccttaggagtcacacagccaggggttctgcccctgcccttcatttctcagatgatagaaaagcaaaaggaacactctgagaacttgtaatggggaggagtggggggttggtccagtctgacggggcgggggcagggtgggagacgtccttggagcgagatctgaggcagaggagctcagtccacagaaagggagcacgggctccacgctgcaagagtagggagctgtaaggtgccctccccagacggctccattttgcccaccttcctttgcggatagcacccctggacctccgaggtcagcctgtgccctgcagctggagtcgcccttgactccactgtgccaggagagggcaccctgctcccagctttggcttcagactgctgcagtgcaaactcttccctccaggggcaggatttggagcgctgtgatgataacctcccagctgccctgggagaaagcaaagtacagcttatcgctccctcccataggaagaaactgaggttcagagaagagcaatgaatgttgctagtaagtggtctttggacttgttttgaaggggctttagcccttggaagcatttgtcgggatgtttttgttctgttctgttttgttgagccagggtgtcactcttgttcaggccggaatgctatggcaccatcagagatcactgtagcctcaaactcctgagctcaagcaatcctcctgcttcagcctccccagtagctgggactacaagcatgcatcaccacatccagctttttttttttttttttttttttttttttgagacaaagtctcactatgttgctcaggctggtctcaaactcctggggtcaagcaatccttccacctcggcctcccaagtgctgggactacaggcataagccacattgttgggactgctgggtgttgacagtgacacccaggataatgatactagtccaaatttattatatccaatgctccacacacaattctaagctctttgaacttccctgtaaggtagatgttgccctactttatagatgctaccctataaggtaggtacccatttaacacatggaaaaactgaggctcctagtggttgatttgcccacagttaggaagcaccaatgctgtctgactccagagtcgctgctggtaaccactgggctacccttcctgcaatcatgctccctgctgcaacccccatgccagacatgttcatttgagtgtgctagaggcaaggacaaaaaaacaggacaagacaaagtccctgctcccatggagttccattcagtgaacatgtttacacctacagatacatccatacaaac

SEQ ID NO: 1561625 - DNA, 4001 bp, Homo sapiens
tatttcgtacggggaggacaaggagggcctctggggagatggcgctggagaggataggaggctggggtaagcaaagtgggagtctgggagagggaactccagggagtaagggttcttgcttttattcggatgcatggttagccctgggaggagggagaggatgtaacttaggttttgatggggattctttggtctgctgcatggagaacaggaggtgggggccgagtgttagcagggagccaggggggcagccaggacagctatcctgcctggagccagaggtggttgtcaagcttgtctgctgtttaataccttctaaaactccaggaattagttcgcatccttcattcctcagtcatcgcccagactgtctcctgggtccctctccctttccttggtagctctcacttagggactctgaagagtcccatctcagaccccccaggatgtctcctgtaccctcatgccccgccagggccaagcctgctttgcacacctctgtagtcagtgcttctccgagggtacacaataggtgctcacactgctgaaagacgaaagcatgacagggcattctacagcagccctggtcttgggccaaaaccacagtggcatcctcagctccttgcttcctcccactccgcatccaattcaccagcagagctgatgggctctacctccagaacccaccagaatcttactggccacaccccctcctagccccgttctgctccaggcctccggtaccttgcacctgatggctgcagcggccacctctttgggcttcttccttccaccctgcctcctacagtctatgctgttgaaatcgaatcacgggtgtctgtctctgctcacaaccttgcagtggctcccatgacactcagaacaaaagctgaagtccttccagtggccccccccccagctgcatggcctgccctgctgtcacctctcagacctccccgcacccttgctccctctcctctgctccagctacacaggccttcgccccatggttctccaggcacacaccgctgcggatgcattccctcctcacggtcaaaatacatgcagctccctttgcagaacgttccctcaaatacctgcctggcccactctatcatttcccttgttctctgggttcaaatgtcacctcctctgagaagtactctctaatgatctgacctcaagcagccacccagggccgccacttgccctctttcttcttcattttgcttcaccatctgacatagtagattatctcttactgcctctttcccctactagtccagagggagacatactatactgtcgtatccccagcacccaggaaggcttggtccgttcagcccttggtcagggctgaatggatttctgttggatgaatgaagggacggcagttaaagagccaggttgccagctgacattgcccaatcttgctgtgtggcctcagacccacccctgcccctctttgtgcagctcagagacagccctctgtgctcagggaaggcctcttggatggacactccacctgctgattgtgacagaccccaaagccgccctctgccccctgcaaacctcccatgccccgtaccttcttcagccactgcgtgttgttctgcagtgcctgctccagctgtttcacctgctgggtgggcaacttccccaggtgcagtgggttggccagtgattctctctggagggtgttggagtccctggagacctcaggccccggagggcagggctcagacttgggcagcaagaaggtgtagctacagtggccgtgctggactacaagtgtctcgcagcccctatccgcctcctgccttgtctgttgagccacagacatggtggcaaccacaaggaggaggctgccctgcagcatggctagctgggagagcatctgaagatgtgtcaatggcgagggatgtctgctcagagccctaggggctgtgcctgggatgtcctgctgcagccaacagtggccaggcttgcctgcagctgcagctacaaacctctgtctggccgagctctgtccaggcagctatttatacttgctctgaataccacggctgctctgcttgcttcctctcaccgcctccctccggccccacccgacaccctctcacctctattcttcactccttcccttcctccttcctcagtcttggtggcacgtcgcccttaccctaagcgtgcaccaaccttgctctgtctgcctcacctctgagccctctgattatccagtgaggcctggcttccctgctggaggggagggaagaaaacagcacacagacacgcgcacacactcatgcacacactcacgagcacacactcacacgcacgctgacacgcacacacattcatgtacacacaaacgccaagctccaatgctgcccgctttggaaaaccaaatgcaacttaactctcccttcctgtctctgtcttggtctccctctttccctccacccccatcccctgccccccaagtctaagatctcaagtttcagtcccgctgccatccccttctctccccgctgcaccttcctccctctggttccatgttagcgcttggagtacaagtgacccccggagagagcagagggaggggaggaggcagaggggtgaggctggggagggcccagcgaatccactttgcctctggagacacagaaaatccttccaaggtggggcaagtgagcaacccagctgggagttgcttcctgtcctctcttctccctcagggccaggggaaagtggtatgccccaggatggccctggcttggttgcttgtaacagtaatgagaagttgtcatgtcctggggcagattgtcctggggctgctggagtggggatgtggagaggaggcagtggggagaggaggttggagtgccaggaggctaaccctagatctcgctccccgacagctggccacgagacctagggtgggcagctgtgcctctctgggcctccacaccctgatctgtaaactgggtaaaccttatctcttgcaggaggaatgcgtgtgagtcctcagcatggggatggagaagttttcagcttctgggttcaaatcctggctctaccatctaccagctgtatgactttgagtaagtcacttaacctctctgtgccttcatttcctcctgaatgaggaaaataataccacctacttcacatggcatgaaaattaggtgagttagagcaaggttggcacagagcgagcactaaataaatattttccgttgtcaatgttatagttgtcattgcacctcccctcccacgacccactggagcataaactcctctagggcagggatttgtccctgggggacatggtctccaggcagaaggtgcccaggagttggtggggcctttcctgcatgggctgcctttatgttctgccagctgtttgggcttttcctctctccctgcttgtttcctcagagtaggggccagtctggctgtttagtattttcctttttgttctctcaaatcccgatagagttttgaattggggcaggctgcttctgggcagctgtgaactgtggtctcatctggggactgagaacattataccaggtgtggggcttttgcaggcaaaggaaaagcagctggttatcagcctccagcctcccctgagccttcccacatgctctgagctctgcgtgccccgcttggccccagttgcctcagctgtaaatggggtcatagcaccctgaccatgtgagagtaatgtggactgatagcttatcacagctctgggtgcagagaagggcagtgtgaatggtggtcgtcattatgattgtcttgactgagctgcttgataatcccaacgaggcagttacaccaggccccaagcttagatgggccccatgcttggtttacactctgccagcactgtcttgaaattcttaatacatttggaacaaagtactcagcacttgcattcttcattgagttccacaaattaggtagcaggccctgcctgggaaacatgaggcttc

SEQ ID NO: 1561626 - DNA, 4001 bp, Homo sapiens
tctctcctttaaatgtgtctctctaggcaccacaacatctccatcgcctgcttccatccaacaccaatgccccctcctgctcaggctcctttgctgactccccatttcaagaagcctatgttgggtgcccagggctaggtcctcaagactcttttctgtcctcacacactcccctggtgtctcgccctatcccatgaccctcgaccctcagcccaactctcactctgtcacccaggctggagtgtagtggcacaatctcggctcactgcaacctccacctcctgggttcaagcgattctcctgcctcagcctcccgagtagctgggattacaggtgcccaccaccacacctggctaatttttgtatttttagtaaagacagggtttcaccatgttggccaggctgatcttgaactcttgacctcaggtgatccacccgcctcagcctcccaaagtgttgggactacaggcgtgagccaccgggccaggcctcctttgccttttaatctgtttataacatgcggtggactagggaaccaactgaggctgcctcagagtcatccacttggactttgctgcacggcttggtgacactcaccttagctgctatttatggcttgttttattattatcggccatattccgattaggtgcggtgtcatcatactgcatatgtatatgtgtcatctatggaatagggcaagatgctcctacataggtaatgattagactgaatcaatgccacttgatttgtgaaaataaggatttcccaatcagggacttcaatgttgcctctgttagcacccatctctaacggagaattaattagcagctacagtgatgaattcagtaggtccatgggtcggtttcctgtggactgcctccctcccagctaaagccctgaagtgctggggagagggcagcaccctgtatagtgtccttcacaatcaactgctaagactgaccaagagctcaccccactgcaggaaatcacacaagtgtagcccttgggtcctgggttccttgtaaattgagcagcatataggatcctccacatacaagcacacctgtacttttccccagcatgaccctgggccaccttagtcacatctaaccatctaccaaggtagtggaatagagcagaatgtcttgacttgaggtccatgttcggggtctgaatactcggaaattacatgaaaatctgtgggaatctgtgtgtgttcaggtcatttaactctcaaaggggggctgtgcgacaaggaaggatcattagaaagaggaatggaggaagacaagcttggtacagtggaatgtagggtttgaggtggggaaatccgttgtgatcctcccttccctgtatcattatttacacaaactagttggatataaatatggatatgctacctacctagtttttacctcagtttctgcatctgtgaactggcaatagcaatggtgcccacttcatgggactgtgtgaaaaggaaatgagatatgatccttgtaaaacatttagcaaagtccttcaatataggctccttatgaatacaccaaacttttgcgggtttcagctcacccacaagtgtaagcgatagtttacatgttgggggttctctactgtgctttccactttttagtctccagaaaaatctggagaagagaggagtggagggggtagagatgtaacgtcaaaggaaaagccatgtgtcatgctcacctcttagtcttccgggcgatcagaagccagggatctctgggcacctatgtgcctgggcctgctggggcgaccggggaggcccctgctctcgtcctctgacgctcagcgctggcccagccgcgaccttgggctcccggagcccggcggaggcgcccaggcgtgaatgatgtcccttgggtagggctggtgagctggcgcgcgggacagcagggctgggtgtatgtgtccatgggccccgggtccccggaaggcgagcgcgcgggcaggtgagcgcagggggcggggtggaagccggagggaccgggctgattgtgagcttccgccacgcagggcgcggctgccggggcaaccgcagcgtgcgcggtggggcggtgctcgcctccgcctccgcctccgcctccgcctccgcctccgcctccgcctccgcctccgcccccgcccccgcctccgcctccgcccctcgcgcctggcttcgacgccaggtggccggcctgggcgggatggggtagctgcgctgggtgttccagggcggagcgcagaatgctgctgtcttgaggattccgcccttctctcattctcttctcccacctcctgccctgggtcagaacgtaatttagttataaaattaaagctgcatatggcaattaaaaaatgaagtaaaatatacaataaatatttagtttacaaagtacaattaaatgaaaaatacaataaattacacaataaagcgaaagtgaacctactctcaactgccacagattcttgcaaatcttcccagaaattttctttccatactctaggatgcatatatgcttaaaaaatatttatacacaaatggaagcaaatatggagatcactttatttcagggcctacaaatgcaccataacacccctctctctccctccacacatgctttttggcggaaaattctgaaagctttggtttgattatgtgaatgtaaaacatatatatgtgtgtctatatatatatgctttttaatgcagtatgtaattgcttccaattaaaaacagtaattccttacaccagcctaccctattctactcagagactgtttaaaaatgttaagagcgaagacatggaatcaacctaagtgctcatcaatgatagactggctaaagataatgcggtacatatacaccatggaatactatgcaaccatataaaggaacaaaattatgtcttttgcaggaatatggagctggaggcaattatccttggcaagctaacgcagaaacagaaaacccaatactgcatgttctcacttatgagtgagagctaagtgatgagaacacatggacacatagaggggaacagcacacactggggcctattggagggtagaaggtggagagtgggaggagggagaggatcaagagaaataactaatgggtactaatcttaatacctgggtgagaaaataatttgtgcaacaaaaccacatgacacaagtttacctatataacaaatctgcacatgtacccctgaacttaaacgtcaaataaaaaataataaaaatgttattaaggactatttcatgcacaccaaaatatactgtatgatatatggaaagtacataccataccataccatagctaaagaaataccatagctaaagaaaaagaaagctaggaaaaataaaggaaaaaggaaaaggaaaaaaaagtctgcctctactgctgtacttatatgtatttcttcccaacactgcatcctcctcttcctgttcccagagataatacctgttctgaattttacatttatcatcccagcctcttaaaaatgcattgctacattgaatgcctccctaaataatgcatgtttaatattgcatattttgagaatttataaaaatgtggtagaatgttgtgtattgttttgatgacttttttcctttcaacgtcttgtttttgaaatgtatctttgttggtatgtttaattggagttcctttatctaaacagctgtaggctattccattatattaccattccacacccctttcaaatcaattccactattgatagacatttgggatgtttccagaatttgctactaaaagcaatactactaagatcatgtttataaatgtctttggacgcacacgttcaagagtttcactagagtatatgtctaggagttaaatttctgggtcataggttatttataacatcaagataaagacaacttgttttcccgacatatacagcaatttagactcccatcagcagtgtgtatcttagccaaaacttggttttgtcacacaaa

SEQ ID NO: 1561627 - DNA, 4001 bp, Homo sapiens
caggctgaacaaatgctaattatactaataatgataacagaattattatttatttaacccttttcacgtaacacttatgaaaagctgtggaagactctctgggaaatgctactctaaaacttcctctctgcttcttagtcctcctatttctctgcgtccccactccccgaaaatacctattacaatcaggtacgtgttcaatgaaggcctggggctgggctgtgtggttacctggccacagctaaaatctgttccttccggagaagcctgtccctctcggcaccatgcggccgtgggtcatcaggtgacttctcagcaccgaagacgcaggagtacagcactcggcaaaggcccgtgtcctcagtattcggggccctcaaggtgtgaatgaggaaggcgtggaccatggctccagggtgggtgctacagggaagccagagacattggtaaggtgagagtgaaccccagcaggagaggcgaccacaggaaggggctgacctggcagtgtctgggagtgtatccagaggccagtgaggctgaacactttgaataacagcatctgaacaacatcacataacagaatccagtgataaaaaatctcagacatacataagcagaataggcataaactaaaaaaaaaaaaaaagaaaaaagaaaaacaaacaaacaaacaaaaaaaatctcagaccaccctaaacctagttctacaaaacaacaggtatcttcaaaagcgtcaaggtcatgcggtcatggaaaacctgaggagctgctccagaccgaaggagactgaagagaccagatagctgaatgcgacgtgtactcctggatcgggtcctggaccaagaaaagggtaatttgggccaggtgtggtgactcacgcctgtaatcccagcaccttgggaggtctaggtgggcggatcacttgaggtcaggagttccagaccagcctgccaacatggtgaaacctcatctctactaaaaataaattagccgggcatggtggcgcatggttgtaaccccagctacttgagaggctgaagccacagaatcgcttgaacccgggaggggaggctgcagtgagccgagatcgcaccactgcacttcagcctgggcgacagagggaaactcttgtctcaaaaaaaaagaaagaaaaacaaaaggataatttccataaagggcattattaggacactaataaaaactttaaaaacatttcaatatggactatgggtcagaaaaagtcttgaccaatgttacccgattttgaatgcaggagctcgtccttgtttttagaaaataaacacggatgggcctctaaatatagaggaaacaggatttcatatctgcaactaactcacttggtccagggaagaaaaaaggcagagagaaaaacagaggaaataataaggtaaatggggcaaatgaggttacaacttgtgaatctcatccaagtgcatacaggagttacctgaaactgtttcaaaatagaaactaaataatagtaatggttatctggctggctcagtggccggcccgggggttgaaaggcggcgggtacacagtcagtgggtatctgtagctaaggctaaacagaccgtcagtttaaactggtaaaatagcaggttcgcaaaggcacttcgagaaccggagcccagcacccaattgctgacctccgcaaccctccagccgccagcagagcgcgtcatcactccgcgccgccgcgtcccgcctctactagagaaatggtagcggtcaagacagcttacgtcactgcctccgtaaccttgaggcgcaaggcacttcgggggttgtagtttcttactccggtcagccaggcctaaatggggcaccccgccctgaatgtgttgcccctgcagctccggtccgctgtcgtcgaggcgtcgcctcagccttccgtccgggcccgcggactgccaccaagcgctcccctccgtggcaggagagcaatggcggctgcgcggcccgtgggcgcctgcgcacgtcggtcgcgggcgcgcgcgccagctgacgccgtcgggttgggcggagcgctcatgtccagcgcggtgctgcagcagccaggtgctggcggcatatcccgatgcttggaccctcggcgtgggctggccttgcagtcaaaaccctccggccccgagctgccggcagggaccatgctggtcactctcgctgcgggctcgaagcgtcccccgctcgttgccctagatcagcggagccccaggctgccgaccccggcggccgcgagggggcgccgcggctcggagcgcggagtctgcggaaaaggccggggcctagttgtccccggagggcggggcgcgtcgcctgcggccttaggaggctccgggacgggcggcgggtggacctaggccgggccgcgcagctacgggctgcggctgagttcttatctagccaacatgcgtgagaatcactggggcaccagttcaaatgtacattcctgggctgtacccccggaaattatgactttggagggaaatatgtgtatttaggcacatgggtattttgcgcggattttaaatacaaatatgtgtattttgcgcagattctgaatttgtgggttcctgcagcggtttaatgctgtcactcggttcggcgcagaacgattcgaacgctgcttctggactctcagtgtgtgtccctggcagatctgtcaatttcattgggccccagtaaaaccttgtagagtgtcgcccagggcgaacgcttagtagggctgaccagcaagcccccttcttgactggaggccatcaaaacaacagggaagaggtttataccttaaacctgaaaggggcactctggcgctaacccctatagagccttacgtaaaagccccaacttggaggcttggcccattggtgtttgggggccccacaaggcctgcctgggcctcactgcctgacttgcatgtgttcctccagccaccaccaccactaccacccccaccgcgaccatgaagctgcacctcctttacctcttggcatgtgaatggcttcagccttgtcccccaaatgtgcctcggagcctcccccactgactgttcccccagcctagaattccctttcccggctttttttttttttttttttttttttgcagcctcgctgcccgctcccatcagcaatgctcctacctcagccccccaagtagctgggactataggcaggcaacacatccagctactttaaatttttttgtagagttagcgtctcactgtattgcccaggctggtcttgaactctgggctcaagtgatcctcccgcttctcccccacaaattgctaggattacaggcgtgagtctccacgcctggcctttcctgtccttttaattgaccttgtagatatatactcagacaaaatgggaggaagccttcctgctcaggctgcccgttggcattcagctgcggcctttgcacccctgtgaatcaggtctcaccaatagtgctgatggcttccatctccactccccagggccatgcacaacacaggactggagccggcttgaacacgctctttggtgacaagaaaggagaacagggtagggtggcccaggcagggatcctagagccagcaccccctgagaaagtgcactctgggccccttaagccataggacccaggataggttaggaggtgactgaagggaagctgcaggtggccagggcctggccaaagcatgtgacaacacgtaaatgtgtgtgcaggtgttgcggcaagcccagagactgtggggcctcagctacgaggctggggagtgatgttggcacagctcctggtccccagtccctattgctctcagccagggctggtgtctgccagctgattacagcagagagctagcaaggagagggctctggttgctgggggccacctggcatctggaacacagtttcccagcctctgtccactcctcaggcagtgagtcaacaccaagtttctgaccactagagggctggcctcatgtgagg

SEQ ID NO: 1561628 - DNA, 4001 bp, Homo sapiens
ccctctctcgtcaggcccccgggcactcttggcttctctgctgttgaatctgtctgatttgctgtggtgaaaggtcaccgaggagctgggcagcaagactccccaagagccagccacggctctacactcacagtgatttcattggcatgacgggaagctccggcctgccaaagacaacagccatgtgctgtgactgagactgcaggttcctggggcatgtgtcccaccactctagactgttccattcccactgggtgcaacggcctggaggaggcggatgagagcagatggacacccggtttccccatcctgtcctccctatctcagcacccagcagaggcgcgcttccacagctggcccccttgtcaccctttccagtttgcattttcctgccctttcgaaagaaccagcaggggtgaggtggtctattttcatgctgatgatcaactaactctgtggccaaggacagctgtgtcacctctcgctcccagactggcaggggaagcggcccctggatgaatgtccctttcgacaggtgaatctgcaactcttcaaactgcggaggcaccctcccctgaccctccttcagacccctgccagttcttctcaaaacagcttgtttagaaatttgggggctgggaagaaaagactgtgattgaagagctcctcgaggtgacttagactttgctccttgcctatacatggagcagagcgtgctctgtgggaccgcgcagcccctcttcaccccggggttctcggctgccattccctgaacatgagctcagtgccaggcagcaagtggagtgatcctcctgcacgtgctctcgtaatcttcacaatcatcccagacggaggaggggattttgtgagcccatttgacaggaaagaaagtcaaggctgagagagccgatggccatgcttacccaaagccagacgggttgatatgatgttgatctgggcttcccagccaggtggtctaactccagggccagaattctcagccattcataatgtgagggtgcttggggatgagcccccagctgggcacacttcaactgtggttactgtcatttttgtcagtggtgactgggcccctgtgatggcacactccagtcagctggcctttgtacagttttgtctaccctactccccacccccacgaagagccaccagggaaccccttagtcctggagaaggcattgactactctaccaggggttcctgaagccccttggtcccctttgtcaggcctgctgggcacaactcgagcctggggtcactgcgcgctccctagcttctccccgagtcctgctgcaggaagaagccccgaccccgcacaggtcaggattccgtgggcaaaaacaaccccagtaaccttggtctgaatagccgggcttgtcccgcaccatgggggtctcagtgggcctgggatcctcctgcatcttcttggaggccccggtcccactgggcccggcacaaagggcagctctgggtacctacaggccaggccccgactggcgcagagagtgcagcggctctcatattgcgaggtgacgcgactccctcccgcaggccccaggaagctcctggaggcgcgcaggtgccggccaggtgagactggagaaaggcgcgcagggcgcagcatagcagccgcgtgggccgacccagggccgtagtccccaagggcccttaggggacattagacggcgagctccctcccttccgagctcagccagtttgccgggtgggggagggtggcacctacctcccaaaagcaccaggacgcaagcgtaggggagcatggctgcgggcatcccgtcggggctggcaggaccgcccgccgggcgctgccacggtgcgcaaggggaggcgcgggcgcagggctctcggacggctgcgggcgccggcggccaggctggagtcctgcgaagaagttgcgagggtcctgcgcccccctcggcgctcacacgcgctcagccttcccggctgttgatagttgtaagcggagctgcgcactcataggtccaacttgccagaagaggtggagacagcccccggcgaggcgcgcacacccgcgcagcgcgcacagccccctggtgcagctcctgccattcagacccccagccctcccccagatgtccgtcccctggccgtcgccttccccaaagtcttcgcagtgggcaaggaggcctcccccaagctctggtcccggccaaggcagagcgatgcgctccttgcgtcaaagcgcacccctagccaggccgttccctggaagggcaagcggggcggggagttcctctaagccccgccagtcctgggacccctgaagtttctattcaggtcttccagctactcctggaaaagtcgcgtcaacttggatcccagcaaacccagaagcgcagtgaaagtggccaacccggtcgcctagaagccagccccggcctctgtctgtaaatgaggccgtcacccgctccccaccacacccaaacgcatctaggcaaagtgtggacccgaccaggcgggttttcctccttctcgcaactcctcctcctgcccccctccctcccaaatctcatctgagtgagtcagctgagggtggcagctcagaagcgaggcagccgtgaggcggaggacaggctgggggatcccaaagggtgcgctccagcccccaacccaggcactgggactctggtggcaccctgggtggcaggcaagccttgaaatcaagtgcacgagccttggaaaggaggaccgggagagttatggcatttatgaatgaagaagagaaagagaatcactcggatgggaaaagttaactggattgttcccacctgcatggatcaccgggtaactgcagtgggaccgagggggcgaggctgcgggctggggatgtgcgggtttccttgtgttgccacgaacccagagagggagaggaagaagatggaaagaaaaaggaaaaagggaaagaaagtaagaggggagagaggggaaaactgaggatgaagagagacagagaagagagacctgagagagggagagaaagaaagagacagaaagagaaatgaaagtgaggaaaggggaaacaggcagagaaagagagagaaaggggaggaaagagaaagggaaaagaaaggagggagtgaaatcaacagaaaaaagagaaccaggaaggaggagggagggggagagagaagagagaagagagagaagagagaacaagagagaagagagaagaagagagaagacagagatgcggtctccctggggaaaggtttggagaactgggccaggcctgtttcccgggactcacgagtgagcagtccacctgcccctctgaagcattttatagactcatttgtcccacttttgtgggctgatcatcccacaggggaacaggggacaccacctcaccttttgatttcttaccagaaacttgggcgaggcttccaggagccacaagagcccttcaatccacccagggacccccgatgtgggcccaccagccatccttagctttcctcctctccagaggcaacagggaataggaaaaagtccagagcaaggccacaccatgatcttaacgcaaatggaaatgtgaggaaaacgatcaatttgcttcctgaaaatgacattttttttttctggtttctatgagactcgaggtggccttgctgaaactgaaatcggtatgagctttccctggcagacaatggccattgtcacatattaaattctcatgaaagggataactttgtgggcaagaggagagttgtgcagggtgattatttatacttgcataattgtgattatttgtggcaattatgggtctttcaatgtacaaaatttacaattatgggtagtttaaaaactacatgctaaggccgggtgccgtggcacacacctgtaatcccagctctttgggagagccagacgggtgggtcacctgaggtcaggagtttaagagcagcctggccaacatggtgaaaccccggctctactaa

SEQ ID NO: 1561629 - DNA, 4001 bp, Homo sapiens
ctaccatgttacaataataattgcggaaaggaagggtggtgacaagacctcactttgaaagagatcattacagatatacagaaaagggataaacaaacaagaaggacaaacacagggaaacaggaacaatgttcatggacagggaagtcaaggaaataagtaaacataaatgtaaaaggcacactggaaaagatcaggcagtaaaagatgactttagaatcagatttacttactcattaaggaagaaatccccacagagaacctgaaaaaaacaattaagtctgcctgcttgccctggggccagaagtgtgagccagccaacttgagagttgggactacctaaccggtgccctcaggggctgtaggccctggttttcaacacactgcacctaatgacaaactcaggccactgctcttccatttctcaggtaaaaatgccttgttttcaagatttctgtaggaaagtgttgccaattcttgcatgtccattctaaatggctcctcaatcatcaacagatgattaattcacaatattcacagtaagtagggtgatcagattgtcccagtttgcccaggtttagcactgaaagttctacatccttggaaaccccagtccagggcaacgcaggatggttggtcaggatatatgggagcatcttcccgatcttttcactggcccaaggagtcaactatcaccgcaaagtcttctctctaaattgcctctctagagcctaaatgctccttcctgccatcgctctccttcaaatgtgttcctcttatcatcagtcaataaactcagtctacaggggcaaaaactgcctctcattcatatgtaccccaccacctcttggcacactactgatgaacaaatatttccagtatttctatcaaatataagtcaatcagtcccacaacttcaagcttggtctatggggcctcttgattctccctgaaacttaaaagttatgaaattcaggacacagaattgaaaagtgaattttaagtatcttatattgaaatctatgcttacgaatcatgattcagtttttagctaacaaaacacagcattcttatattctgaaagatgggagaggaggcaaagggcaaaacctgatatttcttaggtgtcaacaactacagtttcctatgtttctccatccctatcaggaaaaactgccaggctgaattctcacaaaaattgcctacaatgtcactactgttctccactctttccaagaaccgcggtgaggactggtcacgcagcgtgaggggggcaggtgcagaagagcaagtgtagaagccatctcttcgccggataacgaggcaggaccccagcatctcgtgggacctcctcccttcgggaaattgcgagcggggaaccaggaacacgcagggccccggccaagtagctgtgctcagggggatcatttaagccaaaggaaggacagcgcgaggggagcgagggaaaggcgaggaagcaaccgctatgcagggtggggcaggagtgagggagggaaggcaaaggagcggcgcgaggcggtctcgggtccggagagccgaggacaacgcggcgactgggcgcagggtgcacccgaacctgaaagacctggcaggtacatccgccttgtcggagcctgcttcctcggaaaaatgagtttttcttggggatgaaacgagaggactctgacaacgcgctcggcaccgcatccccaggttactgttactgccgtcgccgctgtccaagagggtcgccctccactcctagcggcccggctccagcgcccagtctgggagtccgccctacctgccgtccttagcctccggggcctggccatcatcgtctgtgacgacctgcggccgcaggggccggcgctgtcgcagcccgtccgcctcgctcatggtacgggcgccagcctcacccgcagaaaccacctcacactgagcggcgccggctcagactccaggcccgccctcccccgtacgcggaaatgacgttgcgcccagggaccattccgcagcgttctccccgccccttccggcctcatgggcgggaggtccccggcgcgtcgttgctcggcgctctgaggctaattctgaccgcccggaagtggggctcggaacccgctcagagatagcaccgggagctgccggggtccccgcctgtctcggactccggggcccagaacgcgagtggttcaacctcgggctcgtctagcccagtgcctgcgcatgccgccttcgtctcacgtttctgaggacggggatgctcatgacgcacttgggaattgctagcacgagatgttggccacttttatcgttggagaggatagcgctgtttattcagtgtcagcgaccctgctcttacaggcagcgtcaaaaataatgcattcacacccttggaacgaagtcacctctgcctgaaaattacatccttccccgactcagccggttaaggggaaaacttgggctagaaaatgtttccctctggttaaggccagatgttgagtattaaatctttttgtgacgattacaacagacatttgataaagtttattaagttttgataaagtttattaagttttgataaagtttattaaggattacccttaagtaaagtccaggtagaagtagaaattatcactaacaaagtttaagaaagcatagagaggcattgttctttcaacagtattgcaggaaaccagaaatgttcccaggtgctgggagacgatggtgggcaaatcacagacaaggcccctccttatagaaattaaactagtgggaaagatgactttaatcagatcatcatcataaaatagacgtaaaattatcaaacgtaataattgcttcaaaagggaagagctgaatcttgtgagagcatttgagattcaaagaggaatcgaatctggaggaagtgacaggcagaagaaatcaaagcccgttaccagtggcacgaggaattatctctggaaaagccatgttcaaaatgcagtgttaagaaataatttcctcttggaggcttttacctttttaaatgctagatggcactagaattccatgtgaatgctttttatttattcattcaaagagcggaagaaccagcttgagggaagtggagagctgtgcaaatccagttctccagagatcccaggtaataattcaggcctcgacaacattttacttcattctgtgtcattgagaatagccaatacagctattaaatcagggatagtgttaacaaagtactgtatgatctcacgccttcctgcctgtctggactatccctcttgctccccaccccccatttcagacattcaggatggcttaacatgtctaatctcatgcctggctgcctttgtccttgaggttccttcttcctgtgatacactctccttcacctccacttggccaattatttttatcattcaggacccacttcaagtatccttgctgaaaattcttctcccagtttcccaagcagaacatcttcctctttgtcttcaaggcactttaaacatgtcccagccataacattgaactcactgcattggagctatttgtgttccatgcccagtgttaaagcccacgcactgcaaacacccagggacacattcagaagaaaaataatggcagtaagttgggtttactgaacttgctgcagcaaagaaatgcaccagaggaccggtgaggttcctcaaaatgggggagtcatgggagactccttgtggggtttgggggctggagttagtccatcgatagtcttgcccagggttggtcagaatccgttaacaacgggagtcactggaggaaccgtggccttagctctgggacatgtaagtccattcggagttatcaggaggtcagctcgtgggcttatcatgaagcacgtaggtagttggtgttacagtggtctgagctagatcatttgtgctgcatagcacgggttcagtacagtttttctgttttcaagtcacggtgaagcacgctttgcttgttgtatttgt

SEQ ID NO: 1561630 - DNA, 4001 bp, Homo sapiens
ttgatatagttaagattcaaagccggaggaaggggtggtaccaaccccagcgtcaagggggaatgacccagtggccctgcacaccacgccaccgagcaaactgtagaagatagtccagcctggaggcagcagacctggatccctgccagcccatgcctcagtgcgttgtctgaggctcatccacctctcaatatgaatggagccgtgtgctgttccctctacctctcactacacagagaacacgctgaactctgtaagccatgggaagctacacacgtgtgtactgctgaccttcccagtgccagcccttccctccttcactgtgtttaagaggactgtgtagaccagctttcctattcacagtgtaggcagagcttttaaaaaacaaaaaacaaaaacctctgtcttatatttcatttctaatcttaagtatccagaaataagatattcactgggcgggggggggggggggggtcccaactccacacggccaaagtttctaaattctgaagcccatgactcctagtattgaccagtgcccaccttaaacctattcaaagttaggaaataaacacctgttttctgcagttcatcaaaacaaaaccaaaagttcaccctgggctcccttctgctccataattctgtgccttctgtaagagtgtccaggaaccacagatcatgaggcagacatctgaatgctcactcctgaccgcaggacttggacccccagcatgactcattcaggcggataccgtcatcaaactgagcatccacctatacagccgactgaggatggaatagggaaaacctgtggggagaggtgccctggcggggcagggagcgggactgagcttacaagggcctcgggacacattcttgtcacagcagccactgagggccctgtgcagaaccacggcacatgcagaagccacggcccacggagaggaggtgagccgccaaagcaggacgagaccaatcctggtcgccatactcggtcctgtactctttccatagcaccacgtctgccctcggggcttatgtattggtcaacagacacaggcaaacaaaagtcagaaccatgaggagacggctggaatttctaactgtaaaacatacaggatactcacagaactaccggagggagagagtgtgtaaaaaggaaaggacttggcttggatttaagaggaactcctctacgtgactattttgaatattcaagagccctagttccctgaaatgttaaagttagtaacacgaaagcaaatacctcctaaccttcaaaagtacaaatatagtttatcttgaaaaataacgcaaaaactctgaacgcttgaaaccaagatgtaaaaatatatctccttcttaggaccctcacttcttagggggtggaagccccaccgggcttcagaggccacctgactgggatgtgtccaggccgagtcctgggtccgaaggagctcgggaaaagggtgttgaagcggacggggcagggtcctgctcgcgccccgggaggcgacgtgcgtgggcagggaccctctggactcccgtaaccggtgggagattccagatccggggtgcgggtggagggcagcttcgtacggaagggggcacgaggggcggggggcggcacggcggaggggcggctgcagcggggcgtccgcgcgagaagggccccgccgcccagcgccgagggaactgggggaggtcagggtgggcgcccccaagctctggggcagcagcctcagggtggagcggggtccgggtggaggaggctgcggcagggaggtccgcccgcgaaggccggggacgacgccgcggcagccggggcctcaggccgagcccgcgccgccgagccgcgcgcttacctggagggaggggcgggcagggccgccggggtcaggccagggccgaggtagggccgccgcactgcaatgaggatgcgcccggtcgcccaccagccgccaccagcttccggctacgttgcgctttgcaaggtctcacgggagccggcaagggcgggacttccgcctcaggccccagcccctgacgcgcgcacccgcccggtcgccatggggacgcgcagccacgcagtccaactcccaccccgggccccggaccgcagctggtcgtagtggccgcggaggacggcagcttttgggggccgggcgggagaagcgtccgttcatccgcggaaccaagctgaggtgcttctgggacggcgcgttcaccgggggccgacaacgggggcggggcgggtgggggcctggggcgggagctgcggggctgggacagccgggcaggaggacgcaggtaggaggaccgggggccatggaggaccggcaggggagcgaggtctacggggcgggggcagaggggccaggacagccggggaccggcagggggactcgggtaggaggactggggcagcgggcgacaggcagggaggcgagggtcacaggcagtgggcagcaggggaccgggggaccggcgcgggggtggagggttgcgtcctggggcccatgctcccgccctggggtctgtctcccaccacccgagcctttgggccctggtgggaggcggcggggttgagagcgtctgcgggtccccacccctgccacgcagacgccccagagcgcaggtgcgccctggtgggacctgagtctgcactaggaaggtacaaagctgaaaaagcgatcacctgtgggaggttaattgcaggtcactttttgttttgtttttactttgtacttttctgtgcattccacgtattcctccttgatctgggtgactttcgaaatgatggagaataaacatttttgagatataagctacacaccgcaaagcgtccagttcaatgagttttgacaaatgcatacccccaggtaacgtctaccatagtgaattatagaacatttccatcagaggcagccactcttctgattccagtatccccatatcttagttttgtctgttctggaatatcacacaaatagagtcgtgcaaaatacactttcgtgatggcttctttccctttacgtgatatctcggagattcagccacgttgtgcgtatccgtaactgccgagtagtgtgccatggaaaacacgccacattccttcatttattcacactttgcacactggggtggtgtctaagttttggctagtatgaataaagctgtcttgaaaggtctttttgtaggcatattttttcttcctcttaggtaattacctagaagtgaaatttctgggtcctgggtaagtgtgtatggaacgttattaaaacatgctaagtggtcgggcgcagtggctcatgcctgtaatcccaacacttaggaaggctgaggcaggtggatcacccgaggtcaggagttcaagaccagccgggccaacatggcgaaaccccgtctctactaaaaatacaaaaattagctgggcttgggggtgcacgcctgtaatcccagctactcgggagactgaagcaggagaattgcttgaaccctggaggcaaaggttacagtgagctgagatcactccactgcactccagcctgggtgacaaagtgagactgcatctctaaacaacaacaaaaagatggtaagcatttcacgcttccgccagtgatgtgtgaggtccagctgctctgcatctctgtcaacacttggtattgtcagtcttttgacggcagcaggccttgtgggtacaaaatggtgtctcagtgccatttatttgccctcaggagggagtcgccagttcttgcagtaagaaaccactggtgtgcacaaaaaggaaagggccaaggtgacgtgcacaggcaccagcagcatctacacaagtggcagttggaacagtgtagatttcagcaccgatctcgtggtcaggactgtgtgggtaccatcagttcagagagtgggagccatgtgctggattagtcacagtgggctgcctggaagaggcagactgtgaaggttgagaagctgaaaaggaggagaggaaaagggaa

SEQ ID NO: 1561631 - DNA, 4001 bp, Homo sapiens
taaaaactcttctgccaaataactattctgaaacctccacaacaatatcgagaagatagagtccaggcagatttcaacgtggagttataaataccaggctcttgcctaacaaactgctttgcagtgcttatcccacattgctgataaaatacccaacagccttggttattggaagagaaaagctttaaaaatctacatctcagtaaattccttccactgatcctgaatttcacggactagcaactgtttccagattatctagactaccacctctgcatcaatagttggcccctgagggagtctcagggccctctgaaaatctgatgaaagccagggaccttctttccagggaagtgcaaagttcaccagcctatttctaaatgccaaaagaacactactctatactttgtagcaaatgaaaggagaaaggtgataacaatctcaaactatgtgactaaaaatcaaactttccatttgctcattttgttaggaaaaacaggcctttacagattccaaaccaaagacgttggggcagtgaattagcttgaaaacagctctggtcaaatgcatggattctcccaccaagaactctcttctgaaactccatatggtggatagttcttgcctttcagtattcagctcaagtgtcaccctcttggaaaagattactttcctgaccacctgattacttttcctcttggaaaagattactttcctgaccatggaaagcagtcctcaagccctctttatcacatcttgctgttttattttcaaaatagtatttatcagtattccaaaatacctcacctattttcttaattaattattttgtctcctctattcgagtataagctccataggggtaaggaccatgtccgtcttgttccccactgaattctcagtacctggtatgcagtgggcacttgataaatatttgttaaatgattaaaactgaaagataggatagtgattttgctatcaattatcaagcctttaactattagttagaattctccctctttccataatctgagggtccattcaatcagcaaatatttatcgagcacctactgtgcgccaggcactgttgcaagcgcaagggatacagcaatgaataagtcagacaagtatcttcgcgctgaagaccttgtattttagtggactgctaggaataagcagatgtcttgctcactacaatgcctgggagatccagaacaccttctacaatccttccttgagggaaagagctatgggagatccccaaaccaaaggaaaacattctccaacgggcacttccaaaacaagaatcaggggtttccctaaaccagttggacggctcttcctacatgctctgttcacctaggggaaccccaatcagcagagctcaggtaacgaaaaaacttggggcaagggctactgtttctaggacttggaggtggtgaggggaggaaccaggaaacagggcgacaaggaatcgtggcaaaagccctgagctggaaccctgaggaacaagctctggttgtcaccaacttgctaggtgaccttgggccagtcccgagctgcccgggcaacacttcctccgggggtataatgaggaggaggccggaagggtggaattcgggatcggggggaagcggaggccaggaggccgggccaaggccgagtaggatagggcaacggccgacgtgctgaggccagcgcggggcagggcgggagcggctcacccaccgagcgccacctggcaggccctgcgcagctgggagtgctggggccgcttcacctccttgtcggctaggatcttctccagggcccgggacacgaacatgctcttggtctggctctcctgcatggccccggcccggcgggggctgacggccccgcgggcgggcggcgtgagcgagatggcgagctaggctgcgggcccggcgtcccggccggcaccggccgcgtccgtccgcgccgccccgtcaggaagcgacacctcggccccacggcgccgccatgttggagcgcgtcacgtgaccacgtgactggcgaggccgctacggccgcctagcgtccgtcggccccgtgacccccagcggggcggagcctaaggctgggggcggagcggagtcaggtgggcgagagacagaaggcgagggtggagggtggaagaagagaaggtggggaggggagtgggcatgggcgaagggtataggggacgcgggggctaaagaaaggcgaaagcggggagaggtggtgatggagatgagaggagagaagcgcaaggtaacgggaggtgaaggggagcacgagaatggagatgacgtgggtaagagaggagatgaggaaaggaaggggaacgagaggattggcaaaaaagaacggtgacaaggagagatgataaaggggcaggaggagaaggcgagtaggaaagaaaagaggtgagggagcgaggactggaagctggtgaatgaatgagaagtgatcgggagtaaggggcgtcaggaggaaggaggaagggcgatgagaaggcggcggcggaggggaaggggggaggcccggcgcggcggctcacgcctctaatcccagcgcttccggaggccaaggcgggagcatcgcttgagcccaggagttcgagaccagcctgggcaacatagggagaccctttctctacaaaataaaaagtaaaacagccgggcctggtggcgctgcttgtggtcccagctactggggaggctgaggtgggaggatcgcttgagcctcggaggttgaggccgcagtgagctgtgatggcaccactgcactccagcctgggccacagaaggagaccctgtctcaaaaaacaaacaaacaaaaaggaggtgagttagttatggaggagatgaggtggtgtgggaagaggtgagagggaggcacagaggtaaaagaaaaaggagaaagacaggagggagaggggaagtgaaaaggaaagagaggtagaaatgagaggaggggaaagagtaggagaaagggtgaagggagaggaggtaggaaggggagctgtcaggaagaacagaaaagaaagaaaaagatgagagtaacaagttaggaaaacaggaaagagatggaaaaaggaatggtgtaggaaggaggtgaaggggaaggaggtgaggaagagtggaaagaacatgctgggagaataggaaatggaaggggtggagggagaggggaggtgaaaggaagacagagagggagagagagaaggtgtgtttatgtctattctccacaagcagggtttcaccacagccactggcaagatacacacatccatatgaccctcctgtcacagcagcagtgaccttgcagttcagtgaacttctgtttattgagtgtcgcagctgtgcatagtataccaggaagcactgacctctctctgtagtttatcctgttataaacctgtgaaccctcacagtgcagtgaactggacctgggctttgggagtcaggggaagaaacccagatggccagtgtcacacagcctgcaaatgagtgctgggggacagatactctggccccaaggcagcttccactccattccacaatgatgctatcacagcaaccattagtggtgtcccctgggccccttcccccaagggcagccatgggcttatgcaaagacagttgtcttccttggaaacctcagaggcacagacatcccaggcaggcatgctccagtgctcgggtcttagctcagacgtctctgggaagccttccctgacctgtctcaagtagccccctctctccctagctgatgttttccacagcactttctgagcttttgtacgtgttgactatttgttgtctcactaaagcacggttgcagaggggcaggccatatccccagggcccggtctacagtcacgttgaatatttcatggccttaaattctgcaagttccactgcttgtaatgcgatttcgcagtcactcccagcaagaggtagagtttgtttctccaccagcctgaacctagactagcc

SEQ ID NO: 1561632 - DNA, 4001 bp, Homo sapiens
ggtcacctgaggatgccgcactctgtcaacaggttcccctaatacatgctctgatctgatcgccttggcatttagtgattctttccctggaattctccactggccccatcgcagggaactcccaagtgggaaactcccctaccaccacttttggggcaacttcagctaagggttcagctgggacaaaacagggagccactcgggaacctgggacaggaccagagagaaaacccgagggacagagtgggtaaggaaaactgctgaggaagggcccaaagggcactctggaaagaagtggcactggagggctggggtgggggtggtcctggccagggagtcttaccttgtcccacaaagactgcagctcttcctgccctcctaagtcccagaacatgagccgagcctttcccacatccacagtgccgactggggagaggaggaaacaggcaaggctcatgaccttggtcctcgacacacccagtcccagctctcccaggggatggggcaaaccatgctggtgccactcaaatgagacttgagaggggcccgacagggctgtggccacgggccagctggactgtgaatatcacggcatcctcaaggccccaaacccacagcctgctattgagacccttactgtttaggcccacggtggtggtgattttggatagactcatccccttgtagttcttgttaaatcgggttttcgactgctccaggaaggtctgaggagagaggcagaggcgaaacacatcaaggaggggctatactggcttccaaatatccttactcaggtctgttctttaaaagacagaaacagaaacagagcaacactctgctcttcaggaggctggtggtgactatcctgccgtctcaggtgaaatttggcttccgtctgggtagtgaacgtgcagctgacagcacaaaaccgaagggggcgccgccaggccgtgggaaaggtgcgcgcaagggcgtgggcactcaccgtcttcccagcattgtccaggcccaggatcaggatgcagtactcgtccttctgaaacatgtacttgtacaagcccgacagcagcgtgtacatcctgccctgggcaccccaacataggtcagtgtgcagccagaaagcacctcccctcccccgggcttctccacggtggtcagtggcgccccacgtccagccgaccgctcaggacgagagcctgggggccattcccgactcctcgtccctctcccaccccgtccctctgtaacttctcccaggtcagccgccactgtgtcctgctcacagcaatgactgcgacctctccgcatacacatcggttccggcccctcccctgctcgcgggactacccagccgggtgttcacagtgagctcagccgcgctcccgccctcccccgaggcttcgctcccacgcttcacgcgcgcggaacggggaacacactcgctgcagccccgcctgggccacggcaccctcgagcgccagccccgcgccccacccgggagcagcgagccaccggcgcgctccccaggagcccctgcaggcgccgggtagggacgccccatcaccccatttcttaaaacggggacggccctggggggagcggactacagggcgggtgagcagcggcgcggctgctcctggagtgcacctggaggcggcgcgcggctggcagggaacgactgcgaaggaagaacctgggtcgcggcccccggctacgtccgccccaagccgccgccgccaggtctgaggctccccgacaagcagccaaagctggctcctgtcacacccgcgtcccacctcgagtcctgggccgcccctcgggcctcgcgcctcaccgcacagcctgcggcctacctgcgtccgccgcgccctcggagccgctgctgctgacccccgctgacctccgctgaccccgcgctaaccccgcgcggcgcctgacgggacgcgggccggcctcagggaatgagctgaaccgcgtcccagcggcctccgcgctccgcttcccggctgcccccgcgcgccaagcacttccggaagcggcggcgctcgggaggaagtgccgatcggctgctggggcgaaaagggggcgccgggccgctctagccggtgaggccggcgggctctctgtggctgcggctgggaaaccgcgcggaggaggtgcccggccggggaccaggtggccgcggtttgcggggacgcggccctggccagacagaagagacgccgggcgggggggcgcggccggcctggaaggcggcgggcgcggcgggtgggctcggcggagggtgaggcggcggggcgccccgcggggaaggggctccggagtgacgcgggacccggctagcggcgagcccacggcggctcggaagggaagcgcggagcctgagcgggggtacccgggctgcgacctctgcgctgggagctgtgcctctgagccggtgtctccccgagggaaaggggacgtgcccgtgcccgtgcccgccctcaggctgtggggtcggtcccgagacgcggggctcagctggcttctcttcttgcagccctggtccagcgcctccctctctcagcatggacgaggagagcctggagtcggccttgcagacctaccgtgcgcagctgcagcaggtggagctggccttgggcgccggcctggattcgtctgagcaggctgacctgcgccagctgcagggggacctgaaggagctcatcgagctcaccgaggccagcctggtgtctgtcaggaagagcagcttgttggccgcgctggacgaagagcgcccgggccgccaggaagatgctgagtaccaggctttccgggaggccatcactgaggcggtggaggcaccagcagcggcccgtgggtccggatcagagaccgttcctaaagcagaggcggggccagaatctgcggcaggtgggcaggaggaggaagagggagaggacgaggaagagctgagtgggacaaaggtgagcgcgccctactacagctcctggggcactctggagtatcacaacgccatggtggtgggaacggaagaggcggaggatggctcggcgggtgtccgtgtgctttacctgtaccccactcacaagtctctgaagccgtgcccgttcttcctggagggaaagtgccgctttaaggagaactgcaggtaaagccctttgttgtcagatgccaaccttaggggcgtaaggggcacgcacacagggtcgggtcaggatcggccctccctttgctttgcagttttgtctcagcttcctggggcaggcgtgctttgacagctgtgtctgtgttcaggcgtctacgtcttccttctggggtgaatcaagaagcatggaaggaggccaggcgcggtggctcacgcctgtaatcccagcactttaggaagccgaggcgggcagatcacctgaggtcaggagttcaagaccacgctggtcaacatggtgaaaccccatctccttaaaaacacaaaaatgaaccggtcgtggtggcgcgcacctgtggtcctggctactcaggaggctgaggcaggagaattggttgaacccaggaggccgagtttgcagtgagtggagatgcagccactgtactgcagcccgagcagcagtgcaaggcttatgtggaagagagtaggtctccagcctatcgtcagtttttttttggtggttgttttaattttttttgagacagggtcttactttgtcaaccaggctggagtgcagtggcatagtcctggctcactgcagcctggacctcctgggctcaaccgatcctcctgcctcagcccccctaggagctgggctacagactcacgctactacacccagctaatttttatattactataattttttatcttttttttgagatggagtcttgttctgttgcccaggctggagtgcagtggcgtgatctcggctcactgcaagctccgcctcccgggttcacgccattctcctgcctcagcctcccgagtagctgggactacaggcgcccgccac

SEQ ID NO: 1561633 - DNA, 4001 bp, Homo sapiens
aaacccaagccagggtttgaacattcccagacacttgtaagatgtttaggttgttaacataatgttcaggtttcaaaacattgaaagaaactagccccagccctgaacccagatcccccccggcttcaggcatgaccagtgaacacgcccttctctcactggtcacctgaggatgccgcactctgtcaacaggttcccctaatacatgctctgatctgatcgccttggcatttagtgattctttccctggaattctccactggccccatcgcagggaactcccaagtgggaaactcccctaccaccacttttggggcaacttcagctaagggttcagctgggacaaaacagggagccactcgggaacctgggacaggaccagagagaaaacccgagggacagagtgggtaaggaaaactgctgaggaagggcccaaagggcactctggaaagaagtggcactggagggctggggtgggggtggtcctggccagggagtcttaccttgtcccacaaagactgcagctcttcctgccctcctaagtcccagaacatgagccgagcctttcccacatccacagtgccgactggggagaggaggaaacaggcaaggctcatgaccttggtcctcgacacacccagtcccagctctcccaggggatggggcaaaccatgctggtgccactcaaatgagacttgagaggggcccgacagggctgtggccacgggccagctggactgtgaatatcacggcatcctcaaggccccaaacccacagcctgctattgagacccttactgtttaggcccacggtggtggtgattttggatagactcatccccttgtagttcttgttaaatcgggttttcgactgctccaggaaggtctgaggagagaggcagaggcgaaacacatcaaggaggggctatactggcttccaaatatccttactcaggtctgttctttaaaagacagaaacagaaacagagcaacactctgctcttcaggaggctggtggtgactatcctgccgtctcaggtgaaatttggcttccgtctgggtagtgaacgtgcagctgacagcacaaaaccgaagggggcgccgccaggccgtgggaaaggtgcgcgcaagggcgtgggcactcaccgtcttcccagcattgtccaggcccaggatcaggatgcagtactcgtccttctgaaacatgtacttgtacaagcccgacagcagcgtgtacatcctgccctgggcaccccaacataggtcagtgtgcagccagaaagcacctcccctcccccgggcttctccacggtggtcagtggcgccccacgtccagccgaccgctcaggacgagagcctgggggccattcccgactcctcgtccctctcccaccccgtccctctgtaacttctcccaggtcagccgccactgtgtcctgctcacagcaatgactgcgacctctccgcatacacatcggttccggcccctcccctgctcgcgggactacccagccgggtgttcacagtgagctcagccgcgctcccgccctcccccgaggcttcgctcccacgcttcacgcgcgcggaacggggaacacactcgctgcagccccgcctgggccacggcaccctcgagcgccagccccgcgccccacccgggagcagcgagccaccggcgcgctccccaggagcccctgcaggcgccgggtagggacgccccatcaccccatttcttaaaacggggacggccctggggggagcggactacagggcgggtgagcagcggcgcggctgctcctggagtgcacctggaggcggcgcgcggctggcagggaacgactgcgaaggaagaacctgggtcgcggcccccggctacgtccgccccaagccgccgccgccaggtctgaggctccccgacaagcagccaaagctggctcctgtcacacccgcgtcccacctcgagtcctgggccgcccctcgggcctcgcgcctcaccgcacagcctgcggcctacctgcgtccgccgcgccctcggagccgctgctgctgacccccgctgacctccgctgaccccgcgctaaccccgcgcggcgcctgacgggacgcgggccggcctcagggaatgagctgaaccgcgtcccagcggcctccgcgctccgcttcccggctgcccccgcgcgccaagcacttccggaagcggcggcgctcgggaggaagtgccgatcggctgctggggcgaaaagggggcgccgggccgctctagccggtgaggccggcgggctctctgtggctgcggctgggaaaccgcgcggaggaggtgcccggccggggaccaggtggccgcggtttgcggggacgcggccctggccagacagaagagacgccgggcgggggggcgcggccggcctggaaggcggcgggcgcggcgggtgggctcggcggagggtgaggcggcggggcgccccgcggggaaggggctccggagtgacgcgggacccggctagcggcgagcccacggcggctcggaagggaagcgcggagcctgagcgggggtacccgggctgcgacctctgcgctgggagctgtgcctctgagccggtgtctccccgagggaaaggggacgtgcccgtgcccgtgcccgccctcaggctgtggggtcggtcccgagacgcggggctcagctggcttctcttcttgcagccctggtccagcgcctccctctctcagcatggacgaggagagcctggagtcggccttgcagacctaccgtgcgcagctgcagcaggtggagctggccttgggcgccggcctggattcgtctgagcaggctgacctgcgccagctgcagggggacctgaaggagctcatcgagctcaccgaggccagcctggtgtctgtcaggaagagcagcttgttggccgcgctggacgaagagcgcccgggccgccaggaagatgctgagtaccaggctttccgggaggccatcactgaggcggtggaggcaccagcagcggcccgtgggtccggatcagagaccgttcctaaagcagaggcggggccagaatctgcggcaggtgggcaggaggaggaagagggagaggacgaggaagagctgagtgggacaaaggtgagcgcgccctactacagctcctggggcactctggagtatcacaacgccatggtggtgggaacggaagaggcggaggatggctcggcgggtgtccgtgtgctttacctgtaccccactcacaagtctctgaagccgtgcccgttcttcctggagggaaagtgccgctttaaggagaactgcaggtaaagccctttgttgtcagatgccaaccttaggggcgtaaggggcacgcacacagggtcgggtcaggatcggccctccctttgctttgcagttttgtctcagcttcctggggcaggcgtgctttgacagctgtgtctgtgttcaggcgtctacgtcttccttctggggtgaatcaagaagcatggaaggaggccaggcgcggtggctcacgcctgtaatcccagcactttaggaagccgaggcgggcagatcacctgaggtcaggagttcaagaccacgctggtcaacatggtgaaaccccatctccttaaaaacacaaaaatgaaccggtcgtggtggcgcgcacctgtggtcctggctactcaggaggctgaggcaggagaattggttgaacccaggaggccgagtttgcagtgagtggagatgcagccactgtactgcagcccgagcagcagtgcaaggcttatgtggaagagagtaggtctccagcctatcgtcagtttttttttggtggttgttttaattttttttgagacagggtcttactttgtcaaccaggctggagtgcagtggcatagtcctggctcactgcagcctggacctcctgggctcaaccgatcctcctgcctcagcccccctaggagctgggctacagactcacgctactacacccagctaatttttatatt

SEQ ID NO: 1561634 - DNA, 4001 bp, Homo sapiens
ccttatcaatgaaagagggaggcaggagagtcagagaaggagacatggggatgactgtggaggtcagagtcagagagatgtgtgaagatgttacagagctgcctttgaagacggaagaggaccatcagccaaggaatgtgggcagctgcagaagctggaaaaggcaaggaaacagattgctagagcccccagacagaatgcacccctacagactcctcgatttggggatttccagcattcagaactgtcagataacacatttgtgtcgttttaagctactaagtttatgtgatttgttatagcagcaatagaaaactaatataaatgagagagagagacagagagagagatgatagataagcttatgtgatttgttatagcagcaataggaaacatagatagatgaatagatagatggatagatagattagatacagaatagatagatagatggatagattagatatagaatagatagatagatagatagatagatagatagatagatagatagatagatagatagacagataaacaaacttgtctttggcttcttaaaattgattcttattaaaatcctatcctgagtaatttttgcctgtgatggggcagagccccacgcacataggagctcagcgaacatgctgtatgaatgaaatggtctcactaagctccccctccctttcctgagcctagaagttgttcccttaagggaattctaggactcagttgtcctacgatcaggatcacctgctccctgaatctgctttctgagtacagaccacgtctagtcttcaggtccttgggtggcaaatgaatggggcaatgggggtctcctgctgcaggtgtgttccaagctagaacacttttggagggcagggtctattcagattctaacattccttttaaacttgcaactacaagtctaggatgtgaattttacccatgcaagtccccagagatgttcattgctgtattgcttagaatcgttaaaaattggaaccaacctaaatgtccattagccaggaactgattcaaattaaccaaagatatccataaagttggatcctggcaggccactaaagtgaatgaattggatctttatgttactgacatgtaaatatgtccataacattaattgaggggttgcaggggaaaaccttacaagcacatgtaacacaagagcctatttgtgtaaaactatacaagtttaggtttacatatgtcaaaaagttctcccaaggtatatgtcaaaactttaacagtagtaagttttcaagaatgaacatatgtattcctgtacagtattcctgcactgtttgactttctataataatcaaattgtaatatgatgtaatcagagtgggggaaatgactatttgaaaattctggtctggctgtcagtggcaggctgagcaggaataaggggtgaccagttctcagccgaggtgaccacacggccacactgacccagaaacttgacccagagactcctgaatcttgagcccctgggccccctaagactctacacccagaggaagaggaaatggcacatactggcgtcactcacggtctctaagaatctgaaaatcagtgacccctgcaggaggccagtagcctgaacccagggcaatgctgtgtcccaggaaggctctgggtttggagtcccatggactagggctaaaagccatctccaccacttgacagccaggtgaccgggctctccaagcctctgtttcctcatctgtacgatggaggaagattcttgcctcacagggatgttgtgaagacagaccgcacatgcccctggtgcatagtagggccaacttccctcccgctcccgtgacccctgtacctgcagcccaggtcggcccagcgctgggcgcagcgcctggcaatgcgggcccgcgggatccgaggacacggtgaggctaggggccctggggccagcctctccatctgggcggcggggaggagggcaggctcggccatgggctggcacctcgaggatcccggtcggtcgtggtgctgccgccgtggggctgactcgatcggcaatgtgagagggaggagtgaggtagggcccccgtggcgcacccagttcccagacaccctcatgcaggactaatgttcagcctcctcctggggcggggctggcttggccggggccacctacaggcaggcactcgccgcacacacacacaccactgagtcccacccgcctgcactggaactgcgaggtggaaacggcgcctttcaaaaactgtcatgaaatatgatttgcatggccactattattacctacagccatcccgatttcagagtaaaaccacatgaataaagcacctggctactatgggtggaagaacgtgctcacgacccaggggtttttatctggctgggctattccctctgaggcttctctgagcctcggtttcctcctctgtgaaatggggatggtgacatttgccaggagacaggaaaaaagcaagcaggaagatgtcagggtgtaaagagagcaggacctgggcacgggggcgggaggataggaagggagcaggaaatgggagtggcaaagtgagggggcgtccggagagcctcccgggattggtcttttggctgggatgtaaaggaggaggaactagctggggaaaggctgggtaaggggaaaacccagggaatttaaccccctcttctgtaaaatgagaactcattcattcacttagcaaatctttatggagctctgtaggggccctgggggaaggcgaccagagtgtctgaaagcaaagagcaggagagtgtggactcagctgagaggagagcagaggctgagtgtcagggtggggagtgggaaggggtttccaggtgccaacaaggacacaagccaaggtgttgcagtagggcatttggggaacgtatgagaagcgctcctgccagcttccctggcggtgtcctattccctgcatccattttggaccatgagccccttctcttgccctctggccaggactgaatgccatagacttccccagattgcccgggcccgccctgccctcctctaagcctccgggtgtcagtgaatctttccaggaagcatattcacctgtactccaagaagagaggccccagagtcctcatcaaggagggcccccaagtctatgggtccccacagtctgaagctctgttctggccttagggaggcaagaaatgggccccaagaaactgaaaacagggccccacgggagccatagagcccaggagcatgcatggttctggcattaaagacgggaaaggcctcgcaacacaaagggtcctgaaaaaccccaagtttcaggtggctgtcactggctggaacctgcagaccagggctgtgcagaagaccacccatccacttctcctgagcctcctcctgaggaggagacaagggaaccatgccactgtgaggccaaggagctggggtccaatatgtaggtgaattgtcagccgaagtgggtgcagaactactttgggagccatagggagttttgggtgggaaacatggtaggtgcttaataaaggttgggtggatggatggatagatggatgcatagatagatggaagaaagaatgaaagattggttgggaaaatgggggatgagagaagggatgaatgggaaggcaattgaataagaggttgatggttggtttgatgggtggatggatggatggatggatggatggatggatgggtaggtggatgggtaggtggaagagtgaatggctgtgggcatgaatatgtgagagcatgagtgaatgaatgaatcagtgagccattaggtgaatggggggaagagtaaatgagtgaatgaatgaataaatgcttgagtgagtaaacaagttagtacctgggtaaatgaacttctagtccagactgaaaacatagttcattgttaccttccttaggtgcaaggaacctttcagaagaaagcaggaaggaagagagagtggcctgaatcttggat

SEQ ID NO: 1561635 - DNA, 4001 bp, Homo sapiens
cctgactctgccaatataatgactatgtggctgtgggtaacttacttatcctccatgagactcagttttttcatctgcaaaaaaggttccataatatctgccttgcagtattgtcttgaggataaatgaagtctgtttataaagtgaaaagtctgttacactgaagatcaataaatgttgatgttcctcccttccctgtctgatatgtgtagaatatcctctttctttcttcttcttcttttttttttcttttgagacagagtctcactctgttgcccaggctggagtacagtggtgcgatctcggctcactgtgacttctgcctcctgggttcaagtgattttcctgtctcagcctcccaagtagctgggattacaggcatgtaccaccacacctggctaatttttgtatttttagtagagatggggttttgccatgttggccaggctggtctcaaactcttgacctcaggtgatctgcccaccttggcctcccaaagcgctgggattagaggtgtgagccaccgcgcctggccgattatttatttattaaaaaatttcttttttgagtcagggtctgtctgtcacccaggctggagtgcaatggtgtgatcatagctcactgcagcgtcgacctcctgggctcaagcaatcctcctgcctcagcctcccaaatagctggaaccataggcatgcaccaccattcccggctagtttttgtttgtttgtttttgagacaggatctcactctgtcactcaggctggagtgcagtggcacaatcatggctcattgtaggctcaaactcctgggctcaagtgatcctcctgcctcagcctcccaagtagctaggactacaggcgcatgctaccatgcctggttaatttttgtatttttaatagggacggggtttcaccctgttgaccaggctggtcttgaacacctgagctcaagagatctgcccgcctcagcctacgaaagtgctgggattacaggtgcatgccacgtgccttgctagtttttaaatttttctgtagagacggggtctccctatgtcgctcagtctggtcttgaactcctaggctcaaacaatcctcatgcctccagcttcccaaagtgctgggattacaggtgtgagccacctcacccagcctcaaatatcctcgtttcctagcaaaagccgaggtagtaagagatattagttttgagcttaggttctggagttaagtacctgattttgaattctggctttgccagttaaaaactgtgtgatccgtgctagttacttaattctcctaagcctcaagttcctcaactgtgaaatatgaataaagaccatactcacctcacagtgcctaccacacagtatgtctatgattattatcaggtgaagtcaaaccagatctccaatgccaggctccagtgcccctcatattttcccctgagccttcattcccaaccctgacatgacaggactggtccatcccagacttgcatatgttctggagcatttcctgaagtttgttactgttgacaggagttctgtgattcattaagtttcagaaatgctaaattaaacaaagttcaccaagtgtcttaacttcaggcctttcagagcctctaccatatgctaagctgcttattagactggtggcatgcagagctttcccaaaccaaatgagtcaagggccaccttattctcccaggattatttcctggaacgagcaagaaggagccgtgaccatggcggtggatcctggtagcaccctgggaagcatgcttgatctcctgcagcccctctcctgggccagagcccagaggctaggtgacttacccacaatagagacagaagggacatccagtaggttcacagaggagttgcttctcaggctcctgtcatctcggagcttctcctcaggtggcaggtggctgttggcagtgaagaagcagaggaagaccagcagggtggccaggagtaagcgggtgacatccatcccaggaggcctgagtgggacagagaaggtggtcaggtgggtgggtcaggggtaatggtaagaggccttcctgctttctttgtgcttctttgggctggtgttgtgaccctgttaggcaagtgtcctggtggagctggaggattagcaaggcttaggatggggaaggggaattgatgagggaagaagagagaagagagatgggaagaggaagagagaaagacaaggaacagaaggagattggagcaaagagaaaaagcaatgcattgcactggtctctgctgtccagagggtggtgtgttggctgcttctgtgtgtttttttaatgtctgtggccccaggagaccccaggcctgggcagagttgttgaaaggcccccagtagggcctcacagtagcagagattttattaagatgtacagaataaggctaataaattaagtctcagtgagaaagatgaagaggtaagtggccccttcagacaagcatatatgttggctcatatcctagattcccaaacccagagagaacgaatgcaggtatagtttgtgtcaggaggatggagctgttgacataggccccctggatttatgtatttatttatttgctagctggatttttttttttttagatggagtctctctcttgttgcccaggctagagtgcagtggcataatctcggctcactgcaacctccacctcccaggtacaagtgattctcctgcctcagtctcctgccccagtagctagggctacaggtgcccatcactatgccaggctaatttttgtattttttgtagagacaggattttaccacattggccagactaagcattttatattttctaactctttttattttttttgagacagagtcttgctctgtcagctaggctggagtgcagtggcacgatcttggctcactgcaacctcctcctcccaggttcaagagattctcgtgcctcagcctccagagtagctgggattacaggtgcccaccaccacacctggctaatttttgtatttttagtaaagacgggatttcaccatgttggccaggctggtctcgaactcttgtcctcaagtgatccgccagccactgccactgcacctggcctatattttctaactcaagctcatatagtttttttctgttgtcattgtttgttttgagacagagtctcactgtcacccaggctggagtgcagtggcacaatcttgggccactgcagtctcaacctcccaggctcaagccatcctcccacctcatcctcctgagtagctggcactacaggcatgtgcaaacacacctggctaatttaaaaaaaaatttttttttgtagggatgaaggctcactctattacccaggttggtcttgaactcctgggctcaagtgatcctcccacctaagcctcccaaagtgagccaccactcagccatatttgttcatttgtgtgtatgtgtgtatatatatatacactatatatataatactatatatatagtattatatatatcatatattatatatacactatatatataatactatatatagtattatatatatcatatattatatatacactatatatatactatatatattatatatatcatatattatatatagtatatatatactatatatattttataatatatataatatatatatatagtatgtatatatatatatatatggcatcccccttctaagatattaactcctcaatgacaggggctctccaccatgatttccagctttatattttctcacaggaagtaataaattccatccaagcttggctacttcctggtccccatatgatgcttgtcctttcccactgatcgcagtgcttagcttgctatacaaacatttatttacttatcatttgttaatggtcatcaaagcccaaatgagtgactacagtacttatttgcccttctcacatttcatatggcatttatccagtctggagataagaatggtttttacatttttaaatgatt

SEQ ID NO: 1561636 - DNA, 4001 bp, Homo sapiens
aatcagaaaaaaaatatttcggaacctcaaaatcttcaaacttcacatgccaggccaaaataaactgaagcacaaaacttcagcatacaaacaattgctatttttgttccctgggcaacaaatgactagggaagaggatagcaagcaccaatgaaaattctgtagcccaaattccttcagtttttataaatctgtaacttttacagacttcgagaaagaaaaaggtgtacttcaggtttgtgtcaacccccccaatacagtctattttttttttttttgcacaacacctttgaagcagaaaactcacttcaaaataagagagaaaattaagtctgagcttcactcatcattaaaactgaattacaaccattacatataaactacagtgtcaagagacacttatgctatccgcaccacaacctcgctgtgtgacagatcttaggaactgacatcttagtataacctgttactactggtatcagcagataattacccgaatatgtctcaaagtgtctgagctttgtgggagtaatccaaaaggaagctatttcacctgcaagtcctctgacgctctgaacacaaaattcacaacccccatcggttgaacgagacggcttcaaacactcaagttacgctctcccttgctaaatcctcagtgaacaacgtctcccaacagagatactttgtctttgtccaacatacattctttgcaaagtggattcagttctcctcaaaataccaatttccagtccagcttctgaaggcaaacagcccagtctgcgtttctcaaagtggggtccgtgagccactgcgtttgaatcacctgggaagctggtgaaagcgcagattcccaggctctatcccagaccctgaggctcagcaggtcttacgaagggccctaggagtagcgttcctaaccgcctcccaggtgtcgcccacaggacactaaagttagagaaccgctgctcagggttcaagctgggagtaagcacttgcttccctccacgcacctggtttagattgggaaagctcaacatgccattggcgtccttgaatgtggggtcgcttttccacccccggagtcaaaggcaccaccccattacccaccaggaagcgagggaggagcttccgacccttcccggaaacccaactcccccgggtgaatgaacgaagctgccccagacccccagacgctgccaaatagtgggggaggggacgcgggaccccgctgcccagagtgggaggagccggcctgccagctcgcccctccgccggaatttagctgcgcggggcggggggggcgcgagggcgagcggaaaaaggcgccacatcccatcccggcggagcgctccccacccctcgccttgcggggctgtcccgttcttaaaggaagatggccccgccccctcccgcggtgggcagggccttgcccctccccccccagtgggggggtgcgcggcgagccccccccaccccgggccccacggagcccccctcggctgtccgcctcaccaggcgcgcggcctcggcccacgtgcgctccttcttcttcttctgtttgtccttcatccttctccccggcggcggcggcagctccacgcgggacctccgggctgggcgggctggggcggtggcgcggggctggggcggcggcggcggtggggggggcgcgtggcagcggcggcgcgcgaggtctcgggtgcggccggggagaaggggcgggcacgcggggaccggctggcgcgagagcggcggtgggggaggggcggcggcggctccacgcgcccgcgctgcgtcagtcgcccacggcggcagcggcggctgccccgcgatcgctaaggaatgcggcggctccgcataaccacggggtcagaggtcacggctccggcctccgctttcccgctctgctgagggactgagacaggaccgacggcggggcgggagggcgagacgcggctttcccttcggcgcccgggtgcgtgcgtgtctgccgtgggtgtgtgtgagtgtgtgtgaagagtgaggagggggagtgtggggttttttttttttgaacaaaaacaaaccgaaagggcgcctgggagtcgtagtcccaacggcctctctggcctcccccgctccggaagaatatggccgcgtgaagcgcgtggaccacacttcccggcgtgcccggcggcccccttccgctctccctctcgcgtcctccgcctagcaccgacctcagctaggaacggggacgggtcgctgttcggggaaggggctgggtggagtctcgcgaggtgcgagaactggctgggggcctgcgggattctgggaggcgatgctgggaaggggcggtggctgggctcccccggccacccttaaccccttcggtgctttttgcttcaggacctcctggcgggtgcgggtggggagtgaggatggggagctcgactcgcagttcccacttcgtgcttctcctcgcctaaacggttcttacctacacttctcgtaggggacgagaggcaggactttcccttttggtcacctctaaatgactcactgccacataataatgagacaaaaagaccctcataccagtaaaacggttattccacggctgatggacttagacggttcttcatttcttcctgtgctttcaggccgctgtgtatttgcagagcctgcaccagcagcctagagcgttcttaggaacttggtgatatgttgacgggtcgtgtaaagaacttggactctggggccatactgaccagaatgcacctgagggcgtttttagaggcagtaccctggagagaattcaggccctggagtccagcggacctagactggaatcttggctgagtcactccctggctgtccactcaacctctctgagcctcagttttctgatctgcatttgtcttgtatttcatggcattattggaattaaaattaacatacaattcttgacagattggaagaggatgtgaagggagatcttgacattatcaggtccgtatgatatggcgcctggcatagagcaaatgtttaataaatggtagctgttattaccagctgagaaacaataggcaatatacttagcctctctgagccttagttttagaacctgaaatgaaattcagagcgcccagcacataggttttctgtaactataggttcagtcgttgtccagaaacatttctagagtccgtccggagttggattgatgccagctcttaaaaactatgaaggcaggatcagtggccacatttaaacggtttccctgggtgaggaaacacactctccactccctaatgttaacacgtagcgagagccagtattgataggagaccattatggtgtagcccaaactctaacgccaaggggttcagtgttttctgcttctaatactggtcacagaaaacttgtgagtccggtaagcaaaatcctacaaagggaaaagactgcaagttagaataagacacctcttaaaaatctctctagctttaccctgagagaaaggaggaactactgtccctcaaaaaactgtttgccttgattttttacaaaggatttttaacttcttttttttcaatctacggctgatacagtactctttggcaagtcatttggcttctttccgatgtcttctgaagtagctttactgccctctgacctacagggaataactgaaatttacatgtttaatacaggtactgtggtagacagaataatgtcttccccgcttgcccaaaactgtccaagtcctagtccctggaacctgtgaatatgttgcttttttatttatttatttatttattttttgagacagagtctcgctgtgttacccaggctggagtgcagtggcgtgatcttggctaactgcaacctccgcctcctgggttcatgcgatcctcctgcctcagcctcccaagtagctgagattacaggcatgcgctaccatgcccagctaatttttgtatctttagtagtgactgggtttctccatgttggccaggctg

SEQ ID NO: 1561637 - DNA, 4001 bp, Homo sapiens
tgaattctgtcttcagtgcatctctcactgcttttgcacagatctgggagtatcggatgtagctgggagaaaatgagagaaggtatatggttaattatcaatattccagccagacagctgttactgtgttttcgcttttcttcctgtactttttattttggtttggttgtaccttattgtagaattggatttaaaaatatgactaatgccaaaaagtatctatacaaagaaaaagaactagaaaaaaatgtaccaaagtattaactggtgtttggatggatgatctttgatttttcttctttgtactgtgttttctctttagtgtatattaattcaaaatgaaagatgcataaatgtttttaaaaatcccacagcatagaaaaaaagagactgaaatgtttagagactataacatgaatcatgaattctctcctcgatttctctccttaaaactttaattatattattcttggaaaatgaggtatacataagagaaaactattttgaattaaaacaattcgttctaaattatttaaactcttctctgagaatactgaattctgtctcacaagtctgccactgaaaataacctcctaatgaagatttctaaatcaaactgaaaagtgcttagagaacatcatcaattctagcaaaactgtaaaacctgcttcctgtttggtagatggactcccatcaacactgtagtttccaaaagatgtcagatcacctttcccacttttgaaaaacaggaagcggggaggggtgctattttctcatgttttagaatttattttggggactcagaggtatgagttccaatgcctgcttccattcttactaactgggtgaccttcaggctgttcaaccttttcagcacgtttactcactcacctgaaaaaaacaacagaataaaaggacaataatacctgtcctgctgatagctgggaggaggaaaaacaagtgtgaaaaagtatggatcacagggtaggttgcctaataaacggtatctactactgggactatcatccttccatccttccaattctacaagacttcgctggcttgacctcagcaagtcgggaagctccgctgtagtgtacccacaaaatgtaaagtgctacaccatccagtcaactaacaaggtgtgtcacctagagcaaggtacttctgctcactcaggtgcacgggtaaaaaaaaatcggatgtgacagctagaccaatggtttgcggttccactatgagacaccatgtcctcaagtgggttccatatttgagctttccaggagccacctctcatctttgtgaggggctctcgacagttatggctttcaccccttttagacataaggaaacctgaaatcaacaggacttaaaagtttaaaaaaaaaatgtgtaaagttgtaaaaggctccacctcgatgctggattaaaggtcaaagctgctaacggcggtcacgtggagagaaatctcctgtttcccgaggtggatgtgactgtactactttcaccacctggctccagcaccattctagaagaaaaaggtttgctaaataagagctggcctctctctcgagaaacctgccattcacaaaggtgtccaggggcactctgtgggtgctgggccgcaccgtcgggaagcgaggcaggacacagacgcgctcccacgcgaggtcgaggccgcgcccgcctgagcgctttgcccacagcgacgccatcttggcggcgacgcccgaggcttggcccaaccccggtcacgcgtggggccgctgctctgtgtcctgcatgacctctgggcaccgggatgcgcgcgggccggctcgcgaagcccttccctctggaggcctgggcctacctgagtccagcctgtctccagtaggccaccatgctgtagcgaaagcggagctcgtcgggccgaatcgccaagacgccggcaatgtcggctcagccgggcggttcagccgcaggaagatcagaccacagaagcggaagaggcggggcgtgcggacctgccaatcaccgcctcctacccggccccgcccctgagcacggcccctgctgccctgccgcggaagccccccggcgccgggagccaatgggcgcgcgcggtctggactgcgggtgccaatcccggggcgggccggccggccgcgcccacctattggctccaagagctcccggggcgtgtgtcccccgaccttccgtattaccccggcggggacgacgggggcaagaaggccggggtgtccccgctcgctaaggaccactgagccgcgtgctttcgggaagcgaggacgcgaggcggcgcgggcacggccgccccgagggcctggctttgcgcccgcttcagggaaacggcgccggcttttttaaatctgtggacagacaagcgtgtcctgagagctgagatttagaaaggctcttagggcaccccctttctcggagtgacactaaaccctggaaacccagtggaggaccccctagcgttttctgtagttctaggacctgcttccgatgtgcgacaagacggagggtaaggcaacagttgtcactgttgcccggaatggatgggaagaaaaatgtgaggaaaacccactggaggcacagggaactgccaggcggccgggaaaatgctcatctcagagcctgtgatttagagaaactaacccaacgcagtgaaggctcacagtctaggaattaaagtgtttctctcataaagaaaaaaaagcctttgcccttcacctttaattactaaaaagaaattataatcaggaaaaacatcacttaaaagaaagtttttattaacaaaagttttccttaattcacatttcaactttattaaatagtccaagggtttcatttatgaacacttattccagtttagttctcttaaattcatttgcttgttgtgcatttatgtttaaaaaggtaactaactgcactggaaaatgaaaatttatagttttatcaataggtcagtttttaaaaaatcaaaggataaggatttaaaaatattagggcattacacctttttcagaacaaggataatttacagaaattatacaaagcagattttcatcaaatatcaattatttagcgatgttttatttagctgaaatgttatttcacttgtaaaaactatctccggttacaaaaaaaaatcagaaaccttattaaatttaacctgcttttacaaatgtcctaagaagtcttaagctaaacaaaatttaagtaggaaaacgataatttaaaaatagtgtgttatactatttctgtggtttatgtacatatattaactggtctcttggataggaaacatgactagaagtttatcacactaagcactgtaaaataaaggcaagagctaatcatcttctagcaaaaatagtctctatgcaacaattgcaaatgtcaaagctattatttagtagttaattgcctgctacaatacataaaacaaagtacatttactggattgtttttcagtttgcagctgccctcttgacatcccaaataaggaattcccgttaagtaaaacctgcagtgcaattcactcagtggttagtttcaggccaagcctccccctaccattatgcttgttcttccccaccgcccccaaatcctgcagtggcaccatattattaaaaacactaagtacctgggatttatgcctcagagcaagacatcatttgagtaatttcaaatgatacacagctccttcatgtaaaaaagatgttttgtggtcacaattacttcaaaaagtaattatattcaaataacctgacatatcatgccttagcaattacaaaaccatgattttgacacatggcaatttttaagttaggcaaatgtaaaatgctaaaagatgtgaacagctgttcttctgtttaagttagagcactgcaaaactcaggtaatgactttatttttttcagttaacataaccagcccacgatacagcatactaaatcacaaagtacaaatccaaggaagttaataccttt

SEQ ID NO: 1561638 - DNA, 4001 bp, Homo sapiens
aattgctcatggcacaaattaataaccactggattttagactccactgatcatattaattcatcacagtatttacggaggatgtacgatgtaccaggcactgttccaggcatagtgttcaagtcaattgtcatcattaaaacgaaggaggccgggcgcggtgactcacgcctgtaatcccagcactttggaaggccgaggtgggtggatcacgaggtcaggagttcaagacaagcctggccaagatggtgaaacccccgtctctactaaaaatacaaaaactagtcaggcgtggtgtcgggcgcctgtaatcccagctactcgggaggttgaggcagagaattgcttgaacccgggaggcggaggttgcagtgagccgagatctcgccacagcactccagcgtgggcaacagagggagactccgtctcaataataataataatactaataataataaacgcaaaacagagaagggaggagtgagggaactatctttgggtcagacaatccggagttcaatctccattttgcagtcttccctatagcccttaacctccgtaacctccagtttcctcctctgggtaatatcagtgaggcctcttcttcggaggattcaggaagccagggacaaagaccccacaaaatggccgccagcaccattctttttttttttttttttaattccactgacacctggtgaagccacccttatggttcactccacccgccgcgtctcctgttccgagcaactgacgctgcaataagcggccgccaccgggaaatgcccagagaggaccagacgcccgaggaagggcggagcagagcggccgcaggccccgcccaacaccgcgctcagcctcccgcgggctccagcctcacctgcgcggcctgtggagctgcacatctccaggccccgccccccagaactctgattggcgggtctaggcgggggccgggaaatctgcatttgcaccagcgcccacccccgtccttcccacccccgcccctcacgcccaggtaagtctatggcaggcgatacgagagccccgcaaacctcaacgcgtcacgctgccatcctccgaacaggaagacggcgaggcgcaaaataccaacccgtcccctcttcccaaatgcagaaaaacccttgcctgttccgcgcctaagctgccctcggggtctcctactgcgggaagggcacagcaggtggcagcccctgtcccagccgtgggattccttccccgaaattgtggggggagaacacaaggggtagtgtcaccaagcggccagtaggagaccctcccaccctcctgcgactgctggttcgggtccaccccgggcggagggggaaggggccaccggagcgcaggtggtctcggcgcagcctcctggggctgggacccaggggcgctgatggggtaccccgaggcgtaggccgcgcccccctaaaagctgagcatatctgggctcccgagtaatgctccaagcgcagagctcggtgtgacactgaccaaattgttacctcagatattaattacggacagatattaattacggaacaataaaacggtgagaaagcacggctgatccgaattccgcgagtgtgtaaacagcactggggcgggcccggcttctcggggtttctaaaggaaggtgggcaaggaggcccaggcaaccgggcgctcgaaccccaaagggccggcatcaggctaggtgccgcccggggctgaagcgcagggaccccctccccacctccccgcctccccagccctgccccaggctcatggcgccgggcgcggcgcgcggccaacctgtcaggcccggccaggctggcccgagcgccgggctccgggaggcgcggacaaaggaaaacacgggcccaggcccactcacccggcgcggggcctgctgtccatccgcttcttctggcgcaccggctgcagcgggatgttgtccgtcatgtcggcggcgccgcccgccttggccgccgcgccccccgcgccgcctgggccgccgcccggtccggcctccgcgccgccgcccgccggcgccgcgccgccccgggggaggaggcggcggcagcgggcgggccgggcccgcagcgagggggcgagctcgcgagcgccgggccacgcgcggagcgcccgcgcggcccgaccgacggacacgggcgcaccatgggcccgagctccgcgctgcgcccgctcgctccgcgccgcgccgcgcctgccacggggggcggccgggccgtgtccgcgccgccgcgaccgctgcagtgtccccgcccccggcccgcgcccgcgccccccacgcgcgcccacccggccacgcgccccccgcccacgcccgccgtgcgcgcaccctgccaccgcaccccccgcaaaatcccacattcacaatcacatcccagccctatacacgcgcgctgtgacactcatccccaccaatatctgacatgcacaatcacacgggcacccggccacgctcaccccatcagtcagtcattctcactcactcttgcaccaacgtgcatattcacgcccaggccctacacacacacctgccactgctcactgcctgcaacatctaacattcacaatcacatgtgagtcctgcacacacacataacactctcaccctcctgttggtcaccatcatccatgcacccagtttctcaagcctcacacccatgtgcctgcagaaatcacagtcacacagggaccctcagcttatcagactccttcaccctctgaccttcaccatcctcaccctcattctctatctggattctgggaactcaccatgacacacacgcacctgcctctttcatccaaacacccttcaatagtctgaacaccctcattctcacaccagccactttcttgggcttgcacatgggccccactctcaggcctcagacagtcaccctgcattacctgtcactgtgattcacggtctcacacacacacctatctccaccgcagcccacatccacactcacttccacaccctcccacacagtgtctgggacccatgaacttttcaaaggcctgataaagttatgagagcaggaaaaaaaaaacagagggaaggaacaaagtgagggagtttaaaaatcaatatgtaactaaagagcctgaaattgtaataataccatataaactaatctaaagctgacttttacatagttacatctaatgactgatcatgttggacgccgtttcttttttttctttttgaaacagaatctccctctgtcgcccaggctggagtgcagtggcaaaatctcagctcactgcaatctctgcctcccaggttgaagcaattctcctgcctcagctacccgggtagctggggttatacatgtgcctggctaatttttgtagttttagtagagatggggtttcaccatgttggccagactggtcttgaactcctggcctcatgtgatctgtccacctcggcctcccaaagtgctgggctcttccttggcatttgctaaatgccatagagatttaattgggatgaaggaagagcatccggcccagtccacctttccaactctcaccagaagcctttccctgctcccacgggccactgcgcttggcccttttattttgttttatttgtttgtttttttaagttagtgctaactgccagcaagtggatgccttttgtgtttgctgtcacacaggatggagccaccaaatatcccagtgtctgaggtggatctcaaaccaagaagtgtgacttatctcatgcaccagagaagttcctcaagaaaagaagcatgtcattagtaattgctgcattgcacatttggagaggaaatagcattctccagccaacaggcctggtgtgctttgcttcctgctgtctcttctacatctaaaatgatgcttcgtacatagcatggcacaagttggcactcaataaaggcttcttgcatggaagaaggataaacaccctgacacaccaattatggcatcagtgtgggtcccacc

SEQ ID NO: 1561639 - DNA, 4001 bp, Homo sapiens
tggtttctccatccataaaactaaagagctcatctgctcaacgttctctgagttcctcagaagacctaatattacctaagtctacaattttgctattccaaactcctctctcacaactctcttccacataggcagcagcaaaactttactttccagcctccacaactttgtttgcacccttctttccatctgtaatttttttccagctccacatttccaaatcctacttaaccttacatgctcaaatccaatgttaccgcctcctcaaagtcctccttgcatccctccagctagccacaacctctccatccctgaattcccacaagttccctgttgcctcattcaggtctcagatcaaatgtcatttcaaatgagaaccctctccaagagtcaccaccggttataattctctatcagaccacgctgtttttattttcttgatagcatttaccattacctgaaattaccatgtttatttctctcatttatttacttgttaagtgcctgttgctcccactagaatgttaaggtcaatgagagcagaggccctgtctgtcttgttcacatttccccactcccccacatcagacatgtgttcagtaagctaaatacctgtcaaaggcgtgaatgactctgtaacccttatgactagggttatgtgcgcacattatctttctcttgctatattccaaactccctgtggacaaggccaaagtctggctaatctgtctgtattatctggaaaatcattgcacaactgaagcaaataacgataactgctaattaatttattgatttctccaagaggaactgccccaaactaagccaattcagaacttcatattgtccagaaaccaaggcaaataggaatctccttccattccctcttcaccacagaccctattccaatttgccacctccagggagcttttgccaaaaggctagtttcctcactttcctttagaaggaccactggtccttctatccctaatatcttacaatgctaccctttcccttttatctccagccaacaaagcatttccagggccctgtttcttcagagcaccccacatctccagtgcatcggggaactcatcgggtcctagggcacatgtggatgttaaaaggaagtgttcaagcaaacctggctcgaccacctttccttggatacctcgtttagctgaaacacgccgagttttagagcgatcggctttgatgctctttgggtccctcagcattcttcccatctaactaacctaagcacccaaataccgtcggggtgcccccacccttgccccacaccttttcaccttccaacagagaaagaccccaggccagagacgatgatctccccggaagcaaatggccctcaaaccccatagggcggccctaccctctccactttctgtccagcatctccctctgacctggagccgtctcgaacgcccctcagccccagcctctggttggacccgaccctccgacaccacccgccactcacctgaagcggcccccgcagtgctggcattgctcgcccacccagccggcggggcagacgcactggccggtgccagggttgcagcgaccgccgttgacacagggccggtcacattccttggcctcggctgcggctgagcccgacaccgccgccgccgccgccgcggcctcggcctcacagggcagcagcagcagcagcagcggcggcgagagcaacaacagcagcagcagcagccgtggccgcagcggtggagacagcagccgcgggaggcgcagcccggcccccagccccggcctcccagccctggtcacgtcccagtcccagtgcggcccgccgctcctgcccgcgagcgctgccgtcgccgccgtcctcctcctcagccttgcctcagttgccgccgctgcagccaccatcttcccggggctgagacggcgccccgcgaacacatacacacacaccgcacggccggctccgcttcgcctggccgtgcggggcggggctgtgcggacggtggctcgtgcggtccaaaggggccacagcggggcggtgggcggggccggcgcgcgcgtgcgcgagtacgtgggtgcgtgcgtgcgggggcgcagacagtggtctccggcgtccgcggcgccggaggcgatcttctgacgtggaccgtagaacgagctgaaacccggctgcgctgtcccggccggcgaaagctctagttttcccccttcgcctttcgtccccggcggcggggttgcagccccactggatgcctaggagccgactgcgttgagtgttgccctcctagagacccggcactctgccctaactccagctgccggacggaaagggtacaggaggctgcatcgcagcgaggtgctgggtgcggtactgtagaagccaggcttcattcgagcctctgtaacacaagagtcaagaaagaacacatgtagaacctggcataggccgggcgcggaggcttacgcctgtaatcccagcactttgggaaactgaggcaggcggatcacttgatctctgggatccgagaccagcctggccaacagggtgagacactgtctctactaaaaatacaaaaattagccgagcatggtggtgcgcgcctgtatccccagctactccagaggctgaggcaggaggatcgcttgagtctggagaggtcaaggctgcagtgagccgcagtcgcagcactgcactccagcctgggcaacacaagaccctgtgtcaaaaaatgaagaacctggcatgtaggctgtgctcagtaaatgcctaataaactgaatgaagacacacagccaggcctcttgataacagatggactgtagctgaccagaccccctacctttaattctgtaaaagtttggagttaccttgctccccacaatttgccctccaaccatcttctctgaagagtgggcaatatagaattaggaaatggcgctcacacagacctgccccttcttgtctggtagttgttactctggtgtccctcaatgagacatgtcttccatcaatgtagccttttatggtccttgaccctggaatctgggctgggtcatgattgagaccatgagaaaccatgactcaatttcaccaatagaagaagttggtaggagtagcaatgtcttgtttctagctctgagcttaaaaaagacctggcagccttggccgggcacggtggctcacgtctgtaatcccagcaccttgggaggccgaggcgggcagatcacgaggtcagaagttcgagaccaccctgatcgacgtggtgaaaccctgtctctacaaaaaatacaaaaattagccgggcgtggtggcacacacctgtaatcccagctactcaggagagtcgcttgaatccaggaggcagaggttgcagagagtcgtgatcgcgccactgcactccagcctgggggacagagcgagactctgtctcaaaaaaaaaaaaagacctggcagccttgattttgagctgttggtggtcatgagctgcaccccgttagccaccttgctggagagaaaccatgtgcagagaccacttggacttggagagggagagctgggccgctcagctggtggagccatcctagctaagggatcagtcattgagtgaagaagctatctgggttgggttattccaaccgtctgggctgttccatgttacctacaacagtaacaggtctttcctaactgtgacttatccaaaatcctaagaaataactcatttatcatttaacccttaagtgatgaattatttataatttttcataaattatgatttatgttattttaagcctctaagttttagagaggtttgttactcagtaatagataagcagaacattgtccgacataatgcttgtgctatgaggaatattcctatggcacctacctcagaatctgggcaccttacagtccctgggaaacaaagaaaaaccctcatagacctgtggagcctctcagctttacctcagagtatggaattttaaggttctaagat

SEQ ID NO: 1561640 - DNA, 4001 bp, Homo sapiens
ttcactgaggtttctttttttttttttttgagatagagtttgctcttgttgcccaggctggagtgcaatggcgcaatctcggctcacccgcaacctccacctcctgggttcaagcaattctcctgcctcagcctccagagtagctgggattacagacatgcaccaccacgcccagctgattttgtatttttagtagagacagggtttctctatgttggtagggctggtctggaactcccgacctcaggtgatccacccacctcggcctccgaaaatgctgggattacgggcatgagccaccgcgcccggccttcactgaagtttcttatcaaatatccccgcactctggcctgggcaatggagtgagaccctgtctcaaaaaaaaaaattaagattaccattttacaattaagcaaataattccatgatgaagccaggcccagactacaggctgcagcccttataaaaaaacagtgggtaagtaaaagttgataaacagcaacaaggaaatgcacacttgtgttaatcaaatatttaatttcacacatgctctaatgctttacttcccttacaattctaagtagcagtctaatgagatcacataggcctaacaacatttattcaacattcttctgacagaagctacaggcatttgctccaatttattctacctttctttctagggaaattgaataacaagcagaatggaataagattctaatccagaattctggagacaacgccaaggagactgcccttcaggtgactctaatctgcaaccagattgaagaaccagatgactttcacaggatccattcagttcaaaccagaagtcctactattttgaatagaaaagctgttaggctaatagcgcaggaggtttatacggtttattccttcctccctcagacctgtgcatgtctgcagagatgaagggaaggacgaactgagtaggttgctgaaaaacgtttaattcaagggacaaggaaggttacggaagaggaagagacattacgagagttaaggacagtggctacgtctacctcagccggatggttcttagaaatggagactctgaggcctaaccccaggtctaaaaaaacagattctgcattttaacgtccccagacgatttgtatgcaccggtctgcatccctagttctcaatgaaacctaagaatcatctggagagtttgttaataactagacacctgggtcctacccctcagagattctgatttaccgggctctcggtggagctatatgtttaacaagcactgcaagttatcccggtacaactgctccaaggtctacggtctgagaagtacggaccgggaaggcctctgcaaggaggttctcattcatcaattcacccactcatccagccaggacaagggccttcttaggctattctatctaaagcggcccccgttaaaccgcactcctgcttttcctctgtaacacccaccccagctgcaagttctccgtacgcttaccgtctgtctccccacccactagaacgtgaactccaacacagcagagaccttctgtgcttttcttacccaggtgatctcggaggacaaaatccaatctgaagcccacccacccctcccgcgcatgtcaacaccactcaacaaaccccttgtacctctagctgtaataagtaacaagcagtatcctacagggcgcctcggtgcccaggagcggatgcaaaggcgctgggcgggcacaaggcagcgccaaggacactcagggacggaggaaccgacaggggacttgacgctccgccactccgaccagccgccccttgtccccgccgtcctcgtccgccactgagatatcccccacggtctacccacccgtcggctcccacctgcgacccaaggacccaagtcttccaagagctcagccgttagaattcaaaggttcttctttttaaataggagttaaaccctctagctagaaagccgattggcctgcgctcgagcgaggctgccttgtgattggttgacaacaaacccgacgccttgagtcgcgtttaagggcgcacaccgcgcgcaggcgcacttgctccctaagaacccggaagtggtggagccaacggccagccagacctgtggcagtcccagccccagggtgctctccgcggtcggccatttatcggtgaagcaacagccccttgacgtcaagcttgacgcattggagataaagtccaaggaggtgaactaacctttgaacgtgccagtaagtaagatggcgagaaaagcaagagagagtgggaccgatcgatagcgcagcggtcggcttggcgccctttcagcgtgcgcagtgaacgtgcgctcggagcggtagattgggcaggattcgcgcctccatttttccaggagagagcgggataccaagagaaccggaccagctggtactgggacacggggagagtagctggtgcggtcggctggggcatttagagaaaaccacagaaacgactggggcgagactggaagagtcgagagttagcaaggtggcatgcgcctctactttgcgtttcctaagttgcccggcttggcctgcaccccttcctcttctcgaagggcctcgcttccattcccacccagtccttagttcgcctctgcatccagatggtcgcggcgcatatagtgagggggcatctgtgttctagcctttccaactgcgatgtatccggtcctggatcgggttcttgtcctcgtgtgctcacctgcaaattggggataattaggcttctgtttacctggcgagtgaacgttctgtgggagttgagaagttaggggtgggccacttaaaatatatatatatatacacacacacacacatatacatatatatacacacacatatgtgtgtgtgtgtgtgtgtatgtacacccgggatgtgctcagcagaagtgaagagaccggatagaacagtggtgtaggggaaccaaaaatggcttccctccatccttccaggtaccttattaggactaagagttaaattcacataagacgaattaacagattactgcagggtaaacaggatgtgcatgtaaagcattgagctagcatacggaaattattcgagtcatattaacccaacgttaacagtagaatctctcatcaacttttctttgccagactacccacttgtgattttcattctttattggtacttaagaatctcccatttttttcgggtaactgaacattgtccatgggagaaaaacgatatttaattacgtacaggagtcccacaaaatacgagactaaaagttgaagtcagatgattaaagcctacatggcatcctgagctactgaaaggaatgaatagagaattgggggcggggggcgggaagcagctctaacacaagttatgggacggtgaacggaggaaatgtatggtgaatcaagtttgttatgcagacagaataggtgatcttctgggtggtgtcagcctctaatctctcatgtgatccgagttaatcttccctggtttataaggattcgtgacaattgaggtatttttggagggtcagactttaggcaggtaaggaaagcacagggaaagcctcttcccgcctgctgttctccaggtgccctcagttcaaggtaatcagcccgccaaagcatcttgttttgggctggcatttcctgaactccttcagtggttaagctcagggatctggagttggcaattctggtgtgctttaaccttggacaagtaactcagccactttttacgttgagtaggtgtcctgacctccttgaacccatttcatcatctttatttgtgtcccaggattttctactcaagcatagacctactatgttcatgtactacttcatatacttgaatacattgaatgattttattcagtgaactgatgcttacaaagtacttagcatgacggtatctggcatgcaggaagtgcttaatgttattggttattattaacaccatcagtgtcatacagtgtgtaagaaatca

SEQ ID NO: 1561641 - DNA, 4001 bp, Homo sapiens
gcgtggcgttgctccggtcgctggcgcgggcgcggcggtgaaagccctcgcggcactcgggctcggtcacgcagctctctgccgggaggacgtgtgagcacgggcgccctggggcgggcgcagctcggggtgcggggggcccacaccctccctgccgggcccgacgcagcccccaccccgccgcaggcccgcgtcccccccacccaagcggtctgcgccccccccagccccaggcccgcccccgccgcgcaccgtcgttgcagcaaacgccgaaggcggcgcagcggcccccgctcccgcacgccttctggccggactggcagggcgacggcaggtagttctcctcctggcagcgcagcgcctcagccgtgcccacgaagcagcccagctcgtccgcgcagcagatgctgggcccgaagcagcggcctttgcccccggggccgcaggggaggcactgcggggacgggcggggtgagcgggaggaggggagccgggagtcgaggggttggaggggaacgcagcgaggcggggatgctggggtccagggctcggagtgcgggcgggacaccggggctgcggctgcaggcacgctcgggcgccactgggcctcgaccgcggtcacgggcggggcgtccagatctgctcggcaccttggtttcttggatgacctctcggtgacagccctcagcgtcctcaccctcagctagggacgggtctcccgtggactacagcgtggggaacccttcctcgagcctcggggtcatcgctggtgggcgccactgttgcagctgccccaccctccaccactccagacccttcctccttcctcctcgccctgctgcggcttgagcccgggcccacccccttccccactacaccatgcggagaggccctacccatccagaaccccggcccttcccatttcctgtctcctctcttgccttgcccctggcccccgccaagcttgtcggcctcagctggagccctgacccctgctcagccacctatgacctatcaggtgggtggcaggggcctgagacctagaggcgagcacggacacccaggtgcctcaggaccctaaaggagcctagcaggaggaagagaggctgcgggggttgccgagcggccactctcatctgctcaacagccggttctctggcgcaatggatagcgcattagacttttagctgagcctggtgtggtctaatttgctcaagggctcatcattgagcctggacagaattgcatgcacatcgtgattggatttccttcagctctgctggaaatggaggaaacgtccagcactatagaattaggccaggttcccagcagaacttccccacaggatgccccactcaagcgcgctcagaccagtggccatcttctgtgtgggggcctgggcgcctgtggctgggaggctggggctggatgaggaaagcctccaatgctaggtaggatggagcctctgctgccccagccagtccagatgcaagaacgccatgggcacaggggaggccatgatgccccgttctccctatccagccccaagcccagtcaccggggaagcatccctcatttccctgcatccctgtctggatggcgacagtgaccaggagcgccttcagcctctcccagcctcctccaaagcctggtcccctctggcccaccccattggctcctctgcccagccatgccatgcctccctcttcctcccccgaacttcccctaaaggctaccaccacccatgacttccctctttcctagcccctgacccagggtgtcagcactgcccgctatggcagccctgagatggcccacagtgggaagtacctgtctcagctccaggtcggacatggccctcttgccgcccctcgggcagttctggaagtagcacgcggaggagaaggccagtaggccgaggaagcaggcgggcagcatggtgtcaggcatcctggtgcacacaggtggaccccgtatgcagcactgcttggtggctctgtgctgctgcctctgctggctgcctatttatgtccgcaggtgttcccgtggaggcgagacgcggccgccaccccctccccagtggctccccaggagcccacggccgccaggtccccagccgtcagcagtgattcaggcatctggggacacacgtgggcctgtctgtgcaggggatcataggggaggggtacgggccgccaggctgtcatgggccgcggaatgacagcaattgcctctactgtgactgcagcgctctggattcagggagagggacagactggggggtcacctggagaccatctctgagctttctgattacccagaaatggcgtagggtccaagaagagggtaagaggaaccgaggggctgcgtgttaggggcagggacaggccctggcctaggagctgtggggcaggggacagccaggtgtgtggggagggttagccctgtgacaacaagataagggaccaagaacagcacaagcccagagtggtgaggacaggggctgcaccagagatgagaatccctgcctcgtggacaaggcagccgccgtcgtggagtcaagggacacagaatgagaggggcttgttctcacagggtaggggggtggcaggttgctggggaaagtgcaagacatgacacccccgcacccccatagagcagggcatggggactcaggccctgaaactgggggccttggggacacattggcacatgacccgtcaccccctcccaggtagaaacatgagtgtggagagctactatggggagaaagaactccatgccaagtaaggttcaaaggcggggggagccccaggaaacctgacaacagtttgtcccaattcctacccccaccaggaccttagtatgtggcaaccagggcaggtacatctcaggcctggggtgggagagccgggggtggggggtgtctgggcctgggggaaggtgcaggaggagccatacctaaatggacccagcctgagaaagccacttttggtccctaatcccaaggtggcaggtctaaagaggacatggcctctctccctgggccaccagaatgccccgctggtctggggttcaggcccggtaccccctgcctctcaagctgtgcgcagtccccagctctcgcagttcccacaggctcttggcctcctctccagggtgcatagaggtgctgcgaggaaattccaggggacacagcagccccatctccagcaagggcagtgagggggccagcaacccaggaggggcctcctatactcaggccatggcgtcggtcttttcaggaatgacccctcagggactgcaaggaccctttgagaggcaacactgggcagttgttattgcaggaacactggctcccaatagcttggctcagggtctggcctctgttgctcgacacttcatggcttgggcagctcactggacttctctgtgccttactttctgccagtgtgaagtaaggaaaatcatggtacccacctcctagggtcaatgtgaggacagaaataaataatttattatacaaaagctttagagccaggcatggcagcttatgcctgtaatcccagctacttgggagacccagacaggaggttgagaccagtctcggcaacatagcaagaccccatctctattttttttttttttttttgagacagagtctcactctgtcaacccaggctggagtgcagtggcacaatctcggctcagtacaacctccacctcccgggttcaagcgatcctcctgccttagcctcccaagtagctgggattacaggcacgcgtcaccacgccaggttaatttttgtatttttagtagaaatggggtttcaccatattggccagtctggtcttgaactcctggcttcaagtgatccacccgcctcggcctcccaaagtgctgggattacaggcatgagccaccgtgctcggccccatctctaattttaaataaataaataaatactttttttttgagacagagtcccgttctgtcaccc

SEQ ID NO: 1561642 - DNA, 4001 bp, Homo sapiens
cagctagttctgcgttgacaggtcaacagagaatggcactagttattgctacaatcctaaaaggcatttccctacagctaaaccatcaaccctttcctaaaatccatataatccaaaatttttctagcagaatttactctccctgcccctaccccagcagcatcttctgatcatttttcaccataaactgaggtttcctcatagtgatgccaagtcaggcaaacacattccttaagcgttccacctaactcccttcttcctggaagttacatgtaatagctgcctttatttacttatttttaaaactcttcaagcaccaggtacagtggtaagtgcttttaaagaacatgtatctacttccatccttaacactgtatgagattgggactcacattcccattttacagaggagaaatgcaaaggcttagtaacctgcccaaggtcatacagggcagagattggaatccaagtctgacctctgtgtcctccgctcttaaccttcatgctgtctttccttctgatctcttcctgtcctaactggtgccctgtggtcttataaaagactatgcttggggcaggcgggggaggggtgggagggtcagtttctccagagaccgcctttcctttaaaggataagactttgaaaagaaggagtacccattacatctttcctccatgctcccccttctcacctggtaccatttcccaaaggccccaatcatatccccttctctacggacaatttaaacttctcctttgtccgcagagcaggcactatccaatactgaagaaccacaccatctaccctcaaggctaggagagggcagaagtggaagaaagaacacagacagcaccccttccccaggtcttcagttgagaaagaagctgtggctgaaagtctggggggctgggggcaaaggtgacaaggatgtgcccttgtgggtacgcgaggtgggggggggggagatggggaagaggcatgggacgctcaggggattagcaggagattgaatgggggtggacctctgtaaggggaaggggggtgccaccggcaggcagagagatcaggccactgaagaggtgaacgtgagttagggaggaggacctggaggtggatgtaataggggaagtagaggaagaaaggggagggagggggctcacgggagcaggaaacgatggagtcatggggagtgggggaggatggatgggagctagaaggtggggcggcctgggacccgggcacatgggctcggcgaagagcgggcgcgccgcgggggactggggtgcggggaatgccgggaatgggggttcgaggagaccccggggaagggaaggggaagcgggagttctcgagcagaggagcgggaagtgggagttccagcgaggcaagagcgggaagggggttccggagcaaggggcgggcgtgaaggtacagtcgggttcgcgagggtggcgttaggaggggcggggtgggccggaggctggcgcgggagagggatcccgggcgcctgttggggtgcggagggcaggaatgtcctggcgtccccgagagccgggccaggactccggagtcttcggaggaccaggctcagggccgcctcccggccggggccccttagggaggggcggggattccccgggtccctcaaggccagagcggcagccgccgcggtcccaagcccccttcctacctatgccgggcgccacatagacgaagtacagcagcgaggacgagagagaaaagaagaagagcgcggcgagcagcgagcggcgcggcagccgcagcagcccccggcgggcgcgcatgctgcagccaggcggccgctagagagccaggccgggcctgctcccgcagctccccgtccgccgcctcctgggccgccgccgccaccgcctgggcctcggccaccgcctcccgggcctcgcgggccgccactcgccgccgccgccgcctcgccgctcccagccgccggccgtcgcgggccgggccacatgaagcgggcgggggccagagcggccccgagcgggcgcagcggcgggggcggaggcggggcgcacgcgcgggaggcggggccagtgccgccgggcaccgtcgcaaaagacccgcgcgcttgcgctcgccgccgaccctcgctcggcgcccacagcagcccgcatggagtaatcgccaaatggcgacagaccctctcccagtgcggccaccgcccaggctttcggggaatgtctcccaagtgctccgcgctagctcgtcccccatctcgggggccaaggggccatctacaaagtctgactcatctcgttgcccactgcagcagaagagtggggactgcaaggcttgggggttcggcctggtatacaccctcattcattcattcattcattcattcaattcaccatttatttattgaatgccagacacagttgttggcgctgggcatgctacagagaaaaaaaacgataaaaatctctgtctacttgaaacttacattatgtgagagataaaagaaacaaatcagctagtaatatcaggtactggtaacacatatgaatacgataaaacaggaggatgtattgcaggcaggctggagtggtcaaggaaggcctcactgagcagtgacacgaactgagatataaaagggtgagaaagcgccagcttttttgaataagctggggaaaaagcagtcataccagggggaacagcaggtgtaaaggccctgaggtaggaaaagggctgatctgcccccgagttgaatccaaggccaacatggataaaatccagtgaagtagggggggaaatagggatgagcttggagctgtagtcagggatcctactgtatcagaaatagcataatgataacaattgtcaatgtctctagacttctgctgagaaacatggacttcactcatgccatgaaattcccccaccagtcttgagatgtgtgctgttattattactatcatacaaatgaggaaactgaggtttctagatggaaaggcaattcacccaagccttgcagtaagggcttaaatcaaaactggcctgtctcccatgtcaggcccttgacctctaggttgtaactgtctcagcagtctgtatgacctctaattcttatcctgcaggcaaatcggtatcctatccccatcacctgggtatgggaccatatccaaaaaaatgctttcagatcagcatcagctcaaaggacctcagaaggcaatgaacagtcctagaaatttatggcaagaagcagtagcctcaaggagctggactgaggaggccagtgtccctgtgtagacatatctgaaactagggtactgtcttggaatgccagaagcagtggggaggggagaggactttgcagggattctgtgagaatcaacaataattctgatttatattcctaaagtgatttctactttttacagtgtttctttgatcctttaagtggggagtctagagccacactgcccaggttctctgactcccagcttttccattgttagctgtgtgacctcacgcaagttaaactctctgtgcctcggtaaaatggaggaggttattagcaacctcatcaggttgttgcgaggatttaagtaatacatgcaaagtgcacatagtaagagtgcttagctgtcacctaattcaatacccctggagaatggtatggtggaagagaagaggcttaaacgatcaaaaaggaaagcagagaattttgactcagatagatgtgagttcaaatctcggcttggcatctcctggctgtgtgactctgggaaagtcacttacctctctgagcttctctattcatcacctgtgaatcggacccagtgctgcccaccccacggggatgtgatgtggattcgatgaaatagtgcaggtaaggccctggaccagaaatcccagactagccggaatcatctaacttgcaaatagtttttgttggcccacacaatggcccctcccaaccctcgtatctatgaaacattttcaaacatacagaaaa

SEQ ID NO: 1561643 - DNA, 4001 bp, Homo sapiens
aatggtggctgaatcataatcttgataggaaagaaccaggtgaatgagagagatgggcatgggaacgtttgatcagcactcagaactggctcctccatttgttcagtcaacacaggttaactctgcaaattggctctggagccttggaaaactccctcaaccagcctgggttcctctttcctacctggggcccgtagctgatctctatggttcttcccagttctccttgcctaacagaaagtttgcagccgtccttaaggcgtgacccacctgagttcaatcgcagagggtgggcaaagtactaacacccagaaacctacaatcttggatttggaaacagcctttaaaggtcttttggtccagctcccagctgatcacaagaatcccgttcccttccatgctgatggaagagccgtggcctgcacactcttgctgccttgcaaagcagcccattctcttttcagagagctctaatgttggggatagtcgatagagagtgaaggcatgctccaggttaatgaccctctttagacgtggcaccagcacagaacagtcttcagtttctatgtctgtagaatgaacctgagaacacctgcttcacagaggtcggaattaagagcaataacatagctggtgggtctggcacgggaggttcagcgtttgctccctttctcctctccaaattaaacctgctgcaggacggggaccacaggttgctctagcgccggcccctctactgtcttttttccttttccagtggggcctaacataggctaaaatgttcttagcatgcttggtgaaccattggcgtcttggatttgtgtgtgaagcagaggttggcttcagcccatcacatataaaactaaggagggatggcaaagcctaagggtaaaatatttctctgatccaccccccaccacctccctttctaccttacacagtcaaggagagccaggagccttcttaaaatcatggggtccctatagaagccactcctttgtgggagaagggacgcagctgcagctgtgtggacgtgttggcactcacagatggtgaatggaccgtagacagactgtgggaaaacacgaatgggccatggtagggaaggcagctgtgcctcctggggcccagaacgggtccctactgtttgttatagaaggccttgagtctcaaaccaccctcagccgagtgcaggtggcccatatggaaagagccagcatcctctttgagagatggctttggcctctgtccctgtccccgctaccttagattttgcccactttcctggtgttctaatccatctccttatttcccgtcacgatcctaaagctctcttactgtcccaaaaggaaaggaagtgatttgatataccagcaggtcaccaggaggtggatttaaaaacagccaaagcaggaaggcctcttacagaaaggaaggaccgtcgttcacattttggacgggaggtggctgtgtcagctacctctgctcatcctgctatgtggtgtgtcatttggccaatggctgtccctgacctcaattagggctagaagtgatgctctagtgaatttgccatctgaaagcctggcctctctgctctattaagaacacaggtgacctttgcccagggagctggtgcaggtggcaagccgagtcttaggggagactagagtaccacctcccgcagatggtgacacagcaggaagaggctgggaaggggtgtgtgcatcaggtgagtcagctttcctaggaagagtttggggcttacctggtgaactcctgtccaccggtttggctcatctaaacctgtgtgagaatgagaccttaaagtgctaagacagccagctgttggctgtatctccttccatgctgcttgggaaagttctgaatactcaccaggtgctcctgataagccagtggcagctggcagtttgtctcagtcaccttggatctggaactgcaggccagaggttcagcttatgtcttaggcccatggggcaaatcagtctcaagatcctgaatggactacattgtgatgtcacaccacaggtcgggggtgagcacaaaaagggctgcagtggctgctggcatcagggcacagggcagggcaggagcaagagcctcaggcctctccagaagaaatcagcctgtctgggtgctgttctcagctggggttgctgggaaagagtgagggatgtctgctgtacagaaaacatcagcctggaagactgcttatgaatccacctgctgccacttgctgccacggttcctattctcacctggcctgcgtcaattcagttaaaccaagtccatccttcatgcagttttcctgcacaaagtgacttccgtgggtacccccagctccttgcacatcttctgtgatggacttgaaattccagggcagctttttcttctaccagtatacccgtgactttccccctactgcccacctggtagggactcaaggaaagagaagtaacttaaatattagctcaggaaaacaagcagaaatataaatcctcccaccttcaagttaaattcaacacaggtgtcttttaggttatcctctatagcatatatgcctgggctactttccattgttggtaattgataacttggtacaatgtatatttactaagcctaaaaagaaaagaaaaactcaaaaaagggggcaaagtataaaatgtttccagagattccattcccttttgctgctggtgcttgggattggggatggaggagttctaaccaagagcaaacggcttcgctttggaaactgttgggtggccctaaattttagagtccaaaacagtgggtcttaaactgtaggttgcattagaatgacctggaagactcgttaaaatacagattcctgggccccactctcaaagtttctgactcattaggtctgggggagaacccaataattcacatttcttacacgttcccacatgacgttgaggctgcttgctctgagactacacactttaagaacatgtaagggtgctggtatcttaggtttgatcctgaaatagtattgccagctgatggcagtattcaggggttgctggagaataaacaggagctgtagctttggggccaaagctggctgagctctctgggttcaaccagcacgctttactgaggatctattcattgccagaactgagccacgttttggggaagcacaactgacgttgtcagtgccctgcccatagcctcttggccttacaacttcattgtacaaaggtaatctgactcccagctgccagtacctgcgtatctttgcttgggggcttttgccagctgctggagtccaccctgcctacaagcgggcagctgcaagttgcagaatgtcctcattcaatgactattatcagttggtagataaataacccagctccctccctgctcaggtggaataacctggagtcatgtcctgttccatgtcccagaggacccacaggacccacccgtaggtgcctatgctaggccattctcttcctataaagaaatatctgaggctgggtaatttccacagaaaagaggtttaattggctcacagttctgcaggctgttcaggaagcacggtgccagcacctgctttgcttccagtgaggccttaaggagctgacaattatgtctgaaggtaaacagggagccagtgtatcacatggcaagagtgggaacaaggcaagggaggtaccacacaccttttttttttattattattttttatttttgagatggagtctcactcttgttgcccaggttggaatgcgatggcgtgatctcggctcactgcaacctccgcctcccgggttcaagcaattctcctgcctcaacctccaaagtaactgggatttacaggcacccaccaccactcccagctaatttttttgtatttttagtagagatggggtttcacttttttggccaggctggtctcaaactcctgacctcagatgatccgcccatcctggcctcccaaagtgctgggatta

SEQ ID NO: 1561644 - DNA, 4001 bp, Homo sapiens
ggtgactatatacacatatatgtatgtgtggtgtgtgcatatgtaatgtgtaatacacacacacacacacacaccctaggtttttctaggggaagaaactggaaagaatacactaaaatgtgctagttgttatgtttcacagatgagattataggtaatttttgtatcttcttaaatttaccaaaattttacctatgcgactctacttttttttttttttttttttttttgagacaaggtcttgctctgtaccccaggctggagtgcaggtttgtgaacatggcttactacagccttgacctcccaggctcaagcaatcctcctgcctcagcctcccgagtaattacaggcatgccaccatgcccagctaatttttttttaattattgtttgtagagatggggtcttccctttgttgaccaggctggtctcaaacccctgggctcaagcaatcctctgggctcagcctcccaaagtgctgggattacaccatcacacccagccttactttttaaataacagaatgaaaaatgttcattttttaaaaatttcaagctgctaaaggcaagtgcttatggtggtctataaaaactctggagttttgcaaacagagtccttggtcaaagtccctgtcccactacttcctcgttttatgacctaaaggaagttacttcctgagcctcagttttcttatctatataatcagtttgttgggatgattgaattaggatagtgtatgttcaaagccctctgcaggcagggtgcggtggctcacacctataagcccagcactttgggaggctgaggcaggaagattgcttgagtccgggagttcaagaccaacctgggcaaccaagtgagaccctgtctctacagaaaattttaaaaaaattatccaggcctggtggcacgaacctctatttctagctacttgggagtctaagggaggagaatcacttgagcctgggaggtcaaggctacagtgagctgtgatggcatgactgcactccagcctgggcaacaaagcaagaccctgtctcaataaaaaaaaaaaaaaaaaaaaaaaaaaaaaaaagagagagaaaaaacaaaaatagccccctgcaaactataaaacactacaatgttagatgcaatgtttcacacaatatattaataaatccagggcttacctttgtttctgacctcttaactccttgctcatgagcactacttcctcaccagcttccactcagttcctaagattgtcgaacaccctcctgcctcagggcctttgcacatgctgatccctgcacctagaagacctctgctcccacatcttcaacagctggttccctcgggtgattcagagttcagctccagtgtctcttggggctttacctaatcatcccaaaatagcctcctcccactctgtcccatcactgtgttttatgagtacttgaaattgtcttggttttgtgctgactgtccacctcccatcccataccaccttgtggagaggctttgcatcggttttgttcactgctgtatgtccagcccctggagcacagtaggtgctcaaaaatcatttactgaatgaacgaacaagtacttattgacaattaggccacacgttgtatgtattcagttcaatctgccaattcatcgcaacaaggagagactgtgaggcaaatgctgcttgttcccaccccagtggctgaaggaatccgtccaagacgtgcccgtcggccatagatctgaacgcttgccactgcccatcaggctccaagtcagccaccgtggtgtgaagatgcgggaataaggagggcattgtgctgcctgcagagacacgttccgaaaagaattcagaattcgggaaagcacctcctcccactggacacacctctcctagccaggtgatttgtccttgcctcctttccccgccgtctcttccccaccgtgagcaaggaagtcagaccaatctgccttacctttgttcctcgcagcattcagcgcagggttgctttaaagttctgattctgcataaaccctgccaatgccacagtggaattttctagcccatgccaaagacggagctcattaattttcgtgcctgaaagaaagaaaacacttctttagaaattggcgtgtttagcactctgctgagggagggtgaagcctccctgcaaggaagattaatctaggtttgtaggtaggtcattcagggaaacaccagcacactgcaaaagacattgtccacgccaatggccacccgctgcctgtgggtgacttgtgcaaaggcaggaaagcacccactcctctcaaaagtgcccatccagtacatttccagaaagttcttctgccctgtctcttccctccttttctgaaatgtccatggttcctggagatatcacatctgagtgccagcttttcaaagtggaaatcaggctgggccaattccccagggcctggacctgatgctaccacaaagataagccagaatctctttatgcagtggtaagtaatttaaaactttttttatattaaaacaaggaatgtgtcttagaaaatagtgtagaagggaaaaaaattaaactatgacatcgggggttgggacttctggtgatttttacattattcttgatatcttgtcctgtattatctgtattatgcattcaaatgtattactcttatatcataaaaataacaatgatactatttccatttttagaaaaccagcttatgtggaaatagcttgaagaagaataaaaaatcacatgggaccgggcatggtggctcacacctgtaatccccgcactttgggaggctgaggcaggtgatcacttgaagttaggagtttgaggccagcccagccaacatggtgaaaccccgcctctgctaataatacaaaagttagctgggcttggtggtgcatccctgtaatcccagctactcgggaggctgaggcacaagaattgcttgaacccaggaagcagaggttgcagttagctgagatcgcactgctgcactccacgctgggtgacagtgaaactgtgtctcagaaaaagggaaaaaaatcatatgggtgtttaatggtaacgtcaatgtcttcttggacagatggcttaaaggccatgcccctccttggtgtccacattcactctcgtctgacactagaggtattatggcaaaaatgcttgaaaggcatttcatggtaagtcagtaaaactttagtgcaaattagtctatctgaggtaatctctctctctgtctctctcacacacacacacacacaaacacacacacaacacctaaaatctcatgagaatctgcagattcaccaggaaatggcactggaaggaagaatgaaaagttgcctaaattcaaccacctaagtaaattttgccctggcctggagttttctgaccacagtgacaagtagctttctgaagaagagtacaagtggggctgcaggctatgctctcatccctccaaatctagtttttctgcagtgcacattcagatcagaggctgggacgattgtgctgagctgggatagttggcctgatctattagctggcagaagggactgcagggccaaagacagggagatgaactcaattgccctggtggaccctttctgaatactattatatatatatatattttgcctctggtttaaggaccttctttaaaactctcactaatcatttaaaaataaagaaaaaatgctgattaaccgaatttgagaagtgtcacaagatgattaagtggctggggaagaaagatttaagaagctgcagtttttaagtctggagggaagaacctggaggagggaatcaaataatgatttttaagtaccaggcacttactaatcaagtgacaggcactttgtgaacactcagcagagacccagcattgagcagagtgccgaagctctgccctaaagccatgaagaataagactctaagaaataagcgcacagtgatgtagaagtgatttaaggtagacataagaaaggac

SEQ ID NO: 1561645 - DNA, 4001 bp, Homo sapiens
cttcagggcagggcacttggcttgaagagaagctgcagacacagagacaatcaagtcacatctaatactccagcaggacagatgagcctgcaaggtgcaaaggtacccccgcccccaacccaaagcctttttcaattcctctccctccacatctcttgtcatggtaaagcaggcagaatccatgggctttaacgggcccattgcttttcccaaagctcatgcctttttcctaaaaacaaaacccttctgggttccagaactctttggaaaaaaagaatcttctgtgatttgggacattggtttgttcccccaccctcacttaaatgagaaactactttagcatgccccgccccgtctgttgtctttatttaggaggaagcaccctctacataccctgagtatatacacccagggcctgaagctgctgtgatcagctcaggatccccaggaggctgaggcggatcaggccctggactccgggggaacaatgtaagggacaccaaaaagctcagccatggagatgaatagtattttaacatgaaatttgtgaaaatcaaaattaccgctgttcctgatcttatctttctgtaacatgttcatagtttgttcatcacgggtgtcttgccattaattctgacttttaaaaatgttgtgttaacataccgtttatctccatgactgagttttttggcatcccttacatttcgtgcccaaggtgagagtctcactggctgcaccctcatcccaggcccgactggactccagttccacagcatcctttccatgagacctggaaccagatgcagctccctcttcacccagcttcatgttcctagttgtaaaatggagacgatggtaacagcgaaaacaagaaccacagctaagagttactaagtgcacaggtatttacgggcagtagagtcctctcagccctttgatctcagtactgttattaggttcactttacagatgaggaaactgaggcccagagggctgagggaacctgctccagggcacccagccagcccagggtggagctggggctggcatctggcggtgtggctgcagcgcacccgcattctaatcgcaatgactcttccaggcaggaaactggttcagagggagatgtaaacagcaggggtcctgaagccaggatttgaatcagcagctgcctcatagggtggtcttgagcgttaaataagattcacaaaaggcactccacaagtcctttttcttgtcctcccacttctttaggcaatgcctgaggtgaaggctcagattccactcggctatggggcattcttgccctgacggatccccaaatcacacagcctatccctccatccagtgacttctccccatgtcctgtgcttgaaatgaccctcaatagttccaccaaataggagttatttatgtggctatgcgcctaacactgaccacattgtcatttgctccttgtaaaactaaaaactttgagatgagtgctatctttgggtccatttcacagatagtggaactgaggcttacacatatccaaggccacacagtgaacagaaggcagagctgggatcaaacttgaccctgtctgacccctggcctctatatgacaccgtctaccacaaacagcaaaccctccagccatgcctaaaggatctgaaagcagttacctgctgagcccctgtgggagtatcttcagtcccctcgtgtcacccggagctgctcctgcacagggtcctgggtctccagtgcgtgctgcccagtgcctggctgtcggtggagcctggctccctgcactttgcttccttgtgcagagcctgctggctgaatacacagagcagggcaaacacaagcctgggtggagtcctcccttctccccggaccatcctgcagaaacaggttctcttcctgatgtggggctgccctcccaactccaataaaaactgagcacctgactcctctcgcattaatgcctccctggcaccccaagtattctacccagtgcccctcacctactgaggctgccgggttgacctggggaagcagtttccttccccagtaaccgtaggtcatggtcagagcagggaaaacacgttctgtgagattttgtagttctgtctgctgacttcagaacaccacctccaccaccacctaaccacctaattggaaggaaatagcttctcatccactcaactacccctagtcatgtaaaccttattcccaaaggggtttggacaccagaaatcaggtaacctgagggtggtttattgctctggagacataccatgatgttggaaagggcattctttttctttgcaggccagaaattcgacaggctatgcaatttatttaattcaagcaaggatgttgtttaaagtgtcttacaaggacatatacaatagattatgagagcatgaaataacatgtaacaaaagaagattgaagaacaaaatttggaacatcaaatgagaacaggatcaaaaataaatgctcttgttgatttacagacttgctatgaagggtttgcagatatggctttgagcttcctaacagccaatgcaagaaaggaaacttgataagttacactacttagtgctctggagaagacattcaagagaattgcgaccaataattattgtggttttattcaacagtatactcagcttaacccctatcatgaatacttgtcaagcaccaggctatatatataagccagagtttaaagaggtgagtaaaagatgctgggtctctacccttcttgcactcagtgtcattggacatagaatcctgtaaatataaacatagaattacagggtgtgattctcattataaaagaaaagccaaggcagctaagggagagaaatagagagagctggggaaggcctctttcagaaatcaacatttaagaaaaaaaatactatttaaataaatgctgaatacacaaccaggcacaccgtaattagggttgtaaagtcgattccagctcagcactgtacatgtcaatctggaatgtagtaaacccaattattaagcagctgccatgcacacgctctgtgctgacccaagcctggaggctcaggagcttgagctctggccctgggttgagacagacaagggctcggatcttgattcttactgatcggctgtggaattatgagcaagctactgtacttccctaagtctctgtcagccccctcagctgtgtgctcctttgtgtttattttgcatctattcttgtatccccaactcctggcaccctgcaaaacgaggatggggatccctctatgatagagtaggtactctgcaactcctggctgattggacttgttcattctttttttttttttttttaagacggagtcttgctttgtcatccagactggagtgcagtggtgttatctcggctcactgcaacctctgcctcccaggttcaagcaattctgttgcctcagcctcctaagtagctgggactacaggtgtgcaccaccatgcctggctaatttttgtatttttagtagaggtggggtttctccatgttggccaggctggtctggaactcctgacctcaagtgatccacccgcctcagtctcccaaagtgctgggattataggcgtgagctaacactccccattgtcttgctctcttttaaattatacatggcagtaactgccatttggatggcattagtctttgcaaagccttttgtgtttatccgtccatttcatttatgtccacagtgaaattaagatcttttgctcccattttacagaagaaaaacataaggtttagggatatgagtgatttaggagattaagaaaaatcattcaggtgggggcactcagcagtgtgtctggcaaaacgtagaccatcaccaagcatcagctggtgtagtcaagggtgttgatgaaggatctggcaaactgtagaccatcaccaaggatcagctggtgtagtcaggagtggtgatgaagggtctggcaaactgtagaccatcaccaaagat

SEQ ID NO: 1561646 - DNA, 4001 bp, Homo sapiens
tgtgtcactgcactccagcctgggtgacaaagtgaaaccctgtcaaaaaaaaaaaaattaaaaacgtctgttcaaaaattattttaaaaatatgtggagatggctgggcgctgtggcttacgcctgtaatcccaacactttgggaggccgaggagggtggatcacgaggtcaagagatagagatcatcctggccaacatggtgaaaccccgtctctactgaaaaatacaaaaattagctgagcatggtggcacacgcctgtagtcccagctactcgggaggctgaggcaggagaattccttgaacctgggaggcggaggttgcagtgagctgagatcatgccaatgcactccagcctggtgacagagcaagactccatctcaaaaaaaaaaaaaaaaaaaaaaaaaatatatatatatatatatatatatatatatatatatggagaaaaagaaaaagaaaaaagagaaaactcatatatatgtatatatatatatatggaaagatattttatggtttttttttttgagagggagttttgctcttgttgcccaggctggaatgcaatggctgatctcagctcactgcagcctccgcctcccaggttcaagcgatcctcctgcctcagcctcccaagtagctgggattacacacccggctaatttttgtatttttagtagagacggggtttcaccatgttggtcaggctggtctcgagctcctgacctcaggtgatccacccgtctcggcctcccagtagtgctgggattacaagcgtgagccaccaggcctggcgagatagatttttttttaaatgtctcactctgtcgcccaggctggagtgcagtggcatgatcaagcctcactgcagcctcactcttccccgtcccctatccccatcccaagcaatcctcctgcctcagcctcccagaatgctgggaccactggcatgagccaatactctgcctaggcagatacagatatctacatttgtaaatgcattttaaatgtccggaatgatttataccaaacagttaatgctggttttctaagaaaactagaattggggtgggagagaaaagagaaaggggtgcatagcctttatgttaaatactcctgtactgcttttgtggtttaaaaagagaatgggttgaatttctgaccgtaaataactcctagtgaactcagacaaataactttttcacaacagcgtcgacagatgcctccagccggaaggtagagggtctcgttttagatctgcttttcacttggtgcttttaaaatagaaagcgcagacagaggcgtggtgttttcgctccgagctgcagcagcgcagcgcggcccgcacagccgcagcctgaggcgccgctcggcccgggcaccgctcggaggtagccggggcagcagaggtcccggggtccgcctctcccagggccggcctggcaaagggcggcgcctgaggacccggcggatgctgggggacccgggtggggagggaaagcgagcctgggcctccggggcccggtgtcgcccggaggagcgagcagggacgacccgctgcacatctctgcgtggcgccccgcagccacccttcaggaaggggggaatccccgggccccccactccgggagcgagaggatgctccggggaagccgagggtccggagcccggacccctaaccgcgagaaccctctcctccaactccacagccccgtcccctacctcggccccaggctcgggggtcaggaagagcgcgagctcgcgcgccccgctgcgcatgggctccggctgatcagcgtccacgagcagcatcaggagggcgacggggtccggctggcggaggctgcctgggagcccgtggttgcgcccgggcctcggagccccgcccccggtccgctgcatgccccgcggaccgcctggcggaggcggggcaggtgcgctcccggcggtcgcggctcgcagctccaggagcgccgggccgagcgggcagcgccacccagtggcgagcggcgcgcgctgcgcccgcccccgcagcacctgggcatcagtgctttgcaaactcgcttgcagatggcagtcacctggagctcttttagaatttcccaagcctggaccacaccgtctctgggttaagacctgggcatcaggatcttttgatgtttgttaggtggttccaaccagattgttgacccaaagctaaatttgagaactattggggcaagccacccctccccatcggaatcccggtagagtacaggctcccggccccggacccggccgtaaaatagaatccccgggaagcttttaaaagcccggaagccaggcctcgcaccaggccgattaagttggaatccttcggagtggggcttgggcatcggtagtttctaaaactccccgggtgattctaacgggcgtccgggttagagaggcgctagcttagaggaagcccaaagccgcccgccccccacccgttcccatcctactaaagcatctagtttgcatcgggcggagggtcctggaatttagggaaggccgagtgtgacggtcctcgtcttcctcttcggtgcggattttaaaataaacttcaccaggaaactattgagcgcactacatttcacaaccgcacccactccctccatgccctcggaggccggcctagatagaccctttacaagccttggggctgaagagagcgaggtgcgcctcatctcccaccccaacagtgctaatgaggaaagtactaaaaggcaaataggtataagacaagtctgaagttttgatttttcgtttgatgacttatttttatttttaattaattaattttttttttttggagacggagtctcgctctgtcgcccaggctggagtgcagtggtgcgatttcggctcactgtaacttccacattccgggttcaagcaattctccccctccctcagcctcccgagtagctgggattacaggcgcctgtcaccacgcccgactaattctaatttttgtattttttagtagagacggggtttcgccatgttggccaggctgctctcgaactcctgacctcaggtgagccacctgcctcggcctcccaaagtgctaggattacaggcgtgggccagcgccccctgcctgctgacttttctttaaatgttaaatcgcctcacaaaaaaaaaaaaaaaaaaaggctgagctgcttgggcaaacataaggagactccatctctctaaaagaaaaaaaaaaattaaaattgcaggatgtggtggggcacaactgtagtcctagctactggagaggcagatgcaggaggattgtttgaggccaggagttcaaggctaccgcgagttatgatcgcaccactgcactccagcctgtgtgacacagtgaaactctgtcttttgttgttgttgttgttttttaaaaaggaggggctggtatcaagggtgcaaataaatatataggacgtcccacaccttcctctccattaaatctgaatttatattgtagttggccaccctaggtaggggcctaaacaacacatgtttgacctgccttttgtgtagtccatcactgcacaattcccacttccaaatctgtccactgctaatttctccctatccaaatatccaggccttcaggccagtcattttctggaaaattcttggcaaagacttgggcctcaagtgcttaagggttttataggaactcactgagcccacactcggccattcgtcattgtcatgatttccctgatgctctgagccctcctcgccatcccctgggagccggtctcagacccttgcccttgcctgctggctaggcatctcccacaaagagcccaggactggcctcagatcaccaaattgacctgagcacagcaaacttctcctggtggataaatctcagaaacataaagctaaggaagaaaagtcgtgttgcagaaggctctgtagggcactgtgccattagcacagtttttaaaacacgcagaaccacactgtatattgttt

SEQ ID NO: 1561647 - DNA, 4001 bp, Homo sapiens
tgaagaggcccctgggctctggccggaaagtaacaggcagagcagctggagctccccaaccgaccccaggcaatgaggtgcaaagtcccctggcttaatgtgtgacacagcaagtgctccacaaacaaggcaaccatgcagaaagtcgcacactttgggggaaatgaacttagggggcgcagtgcaaacacaatctgcacagcctacactgccccaaaatctgacaattctcagccattcaacccagtgggaactcctgcctatggccatgccctagtctgagaggagagtgccatacacgcaaactttgaaataaagggaacttgatttgggggagagaagcccaggataggactgagaccccttggggggaacagatggagaggtctgtgggtcattgatgctcatcatcttctccaggcattatactcatcacccctttgtgtgtgaaccattgtataaggtaagggaaacaccgaactaacttcctaccctcacaggtttgggacttaatgaacacataggctacagttttctttgctgagaaactggaacacaagtatggaatagtggagtcatgggggtgaccagggtgaaagatgcctgatctctgaagcacagggtcatttgtatttccaaggagttaacctcttgtggtgaaatgaggccagtcaggtttcctcaactatcaacgtctccaacaatcacccaacacaacagaaagagatacagaagaagggctgttggggatctctgaccagaggccaaagaaaagggacacacaaggggcttggttcttacccagccgccgttctcctggatccaaggctctaggtggtcattcaggtaagtggccatccaagctgcgatccgactcaccaatacctgcatctccttgtctacgctttccacgcacagtgccccgccgaaggagaaaaaggccacaatgcgaccccagtttaccccatcccggaagagttcattcactacctgttcaaagctctgatatgctgtccctggggtgatgtggagctgggatgtcaggtcactgaatgcccgccggtaccgcagttcaaactcgtcgcctgcctccctcagcgcttgctttactgctgccatggggatcacctcccgggcatccaaactgctgctgtggccagtggctccattcaccgcggggctgtctgccaggtgccaggatgggttgccattgatggcactgggggtctccatctccgattcagtcccttctggggcctcagtcctgttctcttccacatcactaaactgactccagctgtatcctttctgggaaagcttgtaggagagaaagtcaaccaccagctcccggttgctctgagacatttttataatagggatgggctcaaccagtccattgtccaaaacacctgctcactcactgagtctcgtctctggttagtgattctcttctaagatccaaagccaagataagattctgaagggagagaaagagcttcaggaaaaaaaaataattaatatgcatgccatttaccctaaaaattccattccccctccaggtaccagaactggtttctttgtgggtcttacgaaggtctgggtctaggttccaagatacttcacttaagtcaaatcgaaagcaccagtggactctgaatctcccaccagccttttctacccccgtcttctccgaaatgccttcctcggaaagtcactccctgggcagtcccccccgccccactcccgctcccccgcaccacctacattcaaatccgccttaggcaaaggcaggcaggtgcagcccccggaagatcttttgtatcacaggtcgggagaggaggtggctgcggggatgccggtaactcagccggcctcgcggtggctggcaaaaaaaccagctccggccggagggatcatgcgacccggcaggctgggagcccagaaggcgacacaggaattgcgaagctcaggaaccagccccctcgcttgcttcctcctccatcgcccggatcgagggcggccgctccgcagccgcggcctcctgccacccgggagcccagccccctctctcttgcacgccccttggctctccgcctcctactgggagccaggagtactctcccggaggtggctggtatggatttagttggtttttgtttttcttttttctatttaagcaccagcccagggtgaggtggaggcgtccgaaaccctaaagggacttctcaatggggttcaaggtttcagtgagggacgcagggagggggaaactgcctcagatctgcaatctgactttgggaaggccacccccaggcctgtctgtgatgttgaaggccggagacccccaacaaatgccgctggtttgctctgaattccccaaaggcccagaacgtggcagttggggattgccgggtcctccattccccgcccggacacaatggccgccggcgccctgcacaaagactgggtgagggtgaggcgctgggcctctcctcaggtcaggaagaggggtcgaggcctgctcgacggccccacagctgagaccacgttttcctggggacaggcccaaagtggctttctggcgcccccgggagggctccggggccgggggctgcacctctccggagcccagggtgggccggctgcggcctagcggcttctcgagctcactaggccgggtacccgccgagccaccgccccgttgctaggcaaccgccctcccccgggggcgccccctagaccttcctgagaggaggggcctcgcccccggcggtccgccccagcgcagccaatcagcgagcccagccggcacggaagcgggacggcgaaggctcctattgggcgcaacggctgtcacgcacaggggaggcggcgctctcacctgcgagccccgcgagccgtggggggccacatcccccttcatcggcccggtagcttccagacgcaagagctcttcgcggccgagttccgcgccgcggacccgggccggcctacctggctgccggcctacctggctgactgctcgcgccgtctctcccgaacaagccggcctcagtttcccctgaagagacaggggaacttgcaagctcagtcacttccggtgccgcggcaacgcgcgcgagcccgagacgcaaagggagtgcgcgccttgagtgactggcatcaggaccggggagagatcgccccctcgcggtagatctggggaatcgggaggcgcaaaaaatcaacatttataatcacatttccatttattcattcagtcagtcagtcagtcactcatcagtcaatcagcctatttcatccgtccgtcagtttatatatagaagaagcatcgccttgtggttaagcactttgtctggattctaactctgctagttaggcaagtttctcaactgctctgtgcttcaatgtcctcaattgtaaaatgggtaatagtaccaacctctctcgttgagctattgtgatgattaagagagttattaattgtaaactccataggacaggccgggcgcggtggctcacgcccgtaatcccagcactttgggaggccgaggcgggcggatcacctgaggttaggagttcaagaccagcgtggccaatgtggtgaaaccccgtctctactaaaaatacaaaaaattagctgggcgtggtggcgcatgcctgtaatcccagctactcgggaggctgaggcagcagactcgcttacaggagaatcgtttacaggcgtgagccaccgcgccccgccaatttccttacaccctgaaccacacagtgtgttatcaaatgttttatccttgccaattagatgggtaaaaaccgaaggcactttcatatttctttttttattatgaatgaagttgagcaatttgtcatattttttagtctttctttggagggtggtggatcttgtattggtgaattttcttcatattgtttacccctttttcaggtggtctttctgttgaactctttcctcatttttttttttttttttgttattg

SEQ ID NO: 1561648 - DNA, 4001 bp, Homo sapiens
caggcccatccgtgtcctggctcagggcccaggctctctccctggcagccagcgaggtgatcttgccagagctatcccaactgctgcctccctggctgccagcatcaccttggctacctgcagagacactcctgccactgcctcactggtggggagagctccctcctgttgcaacactgattaatataagatgagtggaaaagcaaagggagggcaaatacagagggccaggccgtgcaaaggagaagtccgtttctgcagcattgataccaggtcccacgtcaatctctctgaataatctggccctcgcagtttctctttggagaaatttgagatacgcttcccagcagctgggtcaaagggcctttgaatacagcgcctcattgcatatcccttcccacctgcactggtgttgcagaccatggggggcacctcatctctcccctacctcaagggggcttctctgcaggagcttacagaatggctttagctttctctgcccccctatgtcccctacaacgtattctagtgactcagtcctgggccctcctggctcaagggaagtccatatatccatgagtggttgtaggagggttgccggcatgacccagctaacttactgaatcaccttttcagatttggtgccttcttccaggtctcttgcctgggaccttcatgcgcctaacagtctcttttgctgttttatttgaagcatagaattgtagcctgagtctttcctcagtttattttgtgattgatcctccttaccaagtgtttatcgtggttccagtgtgtgtgttggggggtgattctaaagaacactgcttgtgagtcacgctgctctgttaataaacctgttatgcaggaaaacccagctgaaaggcagatccaagctgctcactcccagctgttagtaagtggatacaatggccttttcattgggtatgaattttagtctattatattttctttagaaactaaaatcagctcatgagaagttaaagtaatgctgactttgtttcataagaaataaaaactcgactcaggaggaccccagccattatttgtggctcacattctctaaacttcatctgaaaagctgatattccagattccttacatctctccaagatggctagcatcttatacacacaaagatgggggggggttttactcagcaagaaaaatatttattttcctttttttttttaggagaaaaatacttgtctcttcaacctcattaatttttatgatgcgtaaaattttttcattacattagccaaaaagactctggactgaataaagtatagcacccaaaccatttaaaatggcttcctgactgggaagacactgcagtcatctcagggaagtttctggccttgggaaaaacaaatggaactttggccgttcaagaagggaaactcaagaatccaggccttgcgtgctgctcttttttctctgaaagcttttggaagtggagccacactttatttaccgaatatgcacttcttgtttcttgtaaccatggtgctttagttgagtgtgtcttatgtcagactactactgagccaatatttatcattttagaaatttccatgagtcataaaacaaatgtgcaacccgcttgctgtaccttctacgggagtttctttcctagagttctttaaagcaaaaagaaaaaatgctaaacctagaatccaacacttgccgtttatcagaacacttacatactttctccagcatggaggctccttctgtgaaatttgaaaatccattcagctcacatccaaggtgtgctgcctgctgcctgaggtaccctgcctacccaggactccaaaaccctctccagagggccaggtctgggctgagaaagaaaggaggctttagaggtttgcagagaggaagtgactcactggctcaaggggtgggagggaaggctttccacaggatagagaatataaatgagcaagcaattccttccacttccagcatggaaaattttactaggggaccacctcttaatgactgggcctgaatttagtgaccactcacctccactcccccttccaaaaagaagagtaaagaaaaaaaaaaaagcaggaccaattgcaagatgtgatgttgtttgcctcatttacacgtaaggatgttgaagctaatgctgtttgatctcttgtgtcaatcagctccctttgcccagacatggatagttgggagaaccacattaagtctacaatctagaaaactacagcaatttattgcttttgccattaaaaaacaacaacaacaacaacaacaaaaacaagtcctctagagccctgttttgtctagagcccaaggcctagagtttataaatcaaaatttaagagactgcgttagtattactagaacaggatacttcacgaattgctaagactgtgccaggcactcagtatctcttctgtggagtgcaagcatcaccttttagagttaaaagggtcaaattagtcaacatcttgagtttacaggtgaggacaaggagtcccaaaggggtgcaccttgcagaggtcctatggctacttaacagtagggctaggcaagactagaatttgtgtcatccagagcacgagtccccacccctgggccatgaaccagtattggtctgtggcctgttaggaatgcggcgagtgagcatgaccacctgagctccacctcctgtcagatcagcggcggcattagattctcataggagtgggaaccctattgtggactgtgcatgcaatgaatctaggttgcacgctccttgtgagaatctaactaatgccagatgatctgagatggaacagtttcatcctgaaaccaatcccccgccaaccatccccctgccaccccgtctgtggaaaaattgtcttccacaaaaccagtccttgatgccaaaaatgttggggacctcttatctagagtcaaatacctcaccgaaggactggcagtggaaatattggagcaaaacagttacagtaaaaggcactcaaatttcaaatcatgaccattggcctttggctatctgtttttggtgtttgttttccttgaatacaactcagagttccctcatcaggaagagctgggtttctttggctgaaccatcatttgacatccctcctgctacccccgagaagacaggaaaattaggaggtaagccagagcagaccccaaagaaaataaaaaaacagggaggaaacccattacatatctacatctatcttatgtatcttggtccatagggtctaattttttttggtaggacatcaggcattctcttcctccaaatatccaactttgaataaaccctccagccatctcttccatattcatatttgccaacataagtgacgaatgatgtcattaacaaacactcacttccttcctctgtggatgctccactcatcaaagatccagtaacatctccctggtgtgatctgctgcaccaggtaggatcctgagaattcccaagggaacttgggccaagtttatcttggcatttctgttttcacttgtgatctccttattcatcttcatattcctggtagctaacatggccgcagctggcacacagtaggacctcaggaaacatcctcaaatctaaatgaaaaaatgttcagttagatttgacagtggcttcccattgtgaatataaacaagttgcccacctgcatgcactggtatcacctccatatcccagcagggcttcagcactgccctgacattacctggcagcctctggggtgggcgctttgctggttctgagtttttcctgccctgtagttgcagcgggtgaggcagaagtctgcagggaataatgggacgagctggggaaaaatgagtcccaaccagagagcttgccacaaccagcccattgctgtctgtgacatgctttttcctcctctgactgtcactttcctccctttcttaaccaccgtgtgaaacagtcctttcattttttctaaagtgacttattctgagct

SEQ ID NO: 1561649 - DNA, 4001 bp, Homo sapiens
ccagcccatagttaaataatttttttaaagatataaaaagatgttctgttaaaagtctccttcccacctctgtctcccaattgctcagttcctactcacttatctccctcaggtagccagtgtcattggggcatgtgcctgtgtgtgtgtctgtgtgtgtgtgtctttgtgtgtgtcctgaaattctttttatgcaagcaaaaaaaaaactctactctcctccccttttaaaagactacatgacaataacatacttttttccactgcatagtattccattacatggaggaagcacctgtctccttttaatgggcatttatttggttccaggcttattgcagatcctgctgcagtgagtatctttgcaggcatgccattgcacacctgctggagtgtacctgttgcagtgagtatctttgcagccatgccattgcacacctgctggagtgtacctgctgcagtattggtggaggcatgccattgcacacctgctggagtgcatcctataatacattcctcaaagtagccttctgagtcaaagagcacacacatttataacttgaaaaaatgttgacaaattgcatcttttttttaacagctcctatgtgattttaacacattactcaatctgtgggaggggagaccatgccctggaccagtgctgcttagtcaacatttaactttttaaactgaaaatcacctggggagcttgttaaaatgcagattctgattctggagttctagggtgggcccaagaatctgtatttctagcaaactcccgggtgatgccaatactgctggtccatggaccgcactttgagtatcaagacactagaggacacatactgagcataattcccaggtgtcagctgctatgccatgaaggcaattagacttagcatgcccaggacctaaattccagtcccgggacagcagttcgccagctgaggggccttgctggccaaatccctacattttctgagcctcagtcgcctcatctgtaaaacaggtgcagtaaagataagtatgtaaggattaaataacatcggtacatctcaaaaccaatgtgctgagcaaaagaagccagacaatagagtacatcccgtaagattctatttttgtggaactgtagaataggcaaagtcaatctatggtgatagaaatcagaatgggtgcctccggtctggggcaaaggggactgactgggaaaggggaggagggaactttcaggggtagtggaaatatctcacttgttttcgtggtaacacgggtatatacatttgtcaaaactcactgaactatgcacttcaaatctgtgcattttataacatgtaagttataccaaaatttaaaaatagatgaaaagtaaatgatacaacttcgtgtaaactgtgacgtgccatcaaaacagaagccagtcttagcttaaggaaatgtgccacctgcgtgcagggatgaggtcatcgatcgacaggggaccagagacggcgctccacccctgcatggtagcagcgtgctcccagccccgcgccgccgggacggcccacgccctgcctcggtttcccccgatggccgccgcttacttgcttcggaactcgtcgagcgcgcgctgcgcctcggtgccctggcgctccagccgggcgcgctcggcctccaggtcccggacgcgctggcggttgctctcgacttggcgggcgagggcgtcctcgggcccggccagctcgcccaggcgctggaaggcatccagctgcctccggagcccggcatggcgctgctcgagggcgcgggcccgctggacgtgggcggccacgcgctcgccgagcccctgcagcgccgccaggctcgttgccccagcccagccctcgtcggccgggcgctcgggctcggcggcgcgcgaagcctcgtcggcgtgctcgtactgctccttgcgggtctggaagacgtagctgcgccggtacatggctgctctggcgcgggcgcgcgggcggcgccgagccggctctccaggaggcccccggcgcagcccgcagcccgctaaataaacaccggaggcccccggcgcgctgctgggacgttccagagccgatcagcagttgggcgccacgctgggcccgggcgcgggagaagaaaagagcagcggcccgctttgtgcggcggattagcggcccatacagctccggggttggaaggttacgctgggcaatgaggtttttgttccgtgattgttcaggcctgttgcttttgattgaatggagggtcaggggacacgggagccatgacgctcttttcactggttccactggggactgtgaaggaatccccaagcgaactctttaaacttggactagctcaagagcccagggcttgtcactttgtctcctcttgcattcaaactcaattgtagaactctttaacaatgccattttttttttctgattacttaagcaattcttttttttttcttttggtcttttttatttccaattgctcggttatgcatgcaattctttttcataatcataacatgacgtttaggacccttctgtatagcagaggttcttaaccatggatgcaaaataaaatggcatgtctccattaagtagtgaggtgtggcgcaagtaatttcttagtaatacccgtgcataaaagcctacaataacttaggagacatgcacggttatgtttttataattcacccatgctctgatggagtttgacatgctttcttgaatggaaaaaacaaatagagccccacccatgggcctgtaataggtggttcacgcctgtaatcctagcactttgggaggccgaggcgggcggatcacctgagttcgaggccagcctggccaacatggtgaaactccgtctctactaaaaataccaaaattagccaggcgtggtggcgtgtgccagtaatcccagctacctgggaggctgaggcaggagaatcgctggaacctgggaggcggaggctgcagtgagccgagatcgccccactgcactccagcctgggtaacagagtgagactccgtctcaaaaaaaaaaaaaaaaagaaaaagaaaaaaagattgcttttttctttttctttttttaacataaaatgtaatacaaaaaaattttaataaaaaatgagatggggtcttgctatgttgcccaggcaggactcaaactcctgggctcaagtgatccgccattaattggccaaccctcaattcgagaataataaaggattttgtgccattatgttccattttaatttttattatggaactaatagttggattttaaggacaagcttttaaaatatatatatataattaatagctagactttgacaaatttaaaagtaaatttaagaaaagaaattaataccacttgatgagaatgtttctgaatgtaaatattttgtcatatctccaactttaaaaataagtatcaaaagggttgttttcttaaaaggattagtagtaccatataattactaactatatggattgtgtgtgattatactacaaattaaagtcatagttatcaaagatagagaaagaaaattacacagatctttgtggagtttattattacaccaaaatattacctcaagataatagattccgtctggaataaagctctgcaaggccctaaactgtgctggtggcatggttattgttctattttcttaaaccatttaaaattagatttggccaggtgcagtggaccacacctctaatccagaactttgggaggccaaagtgggaggatctcttgaggccaggagttcaagacgagccttggcaacatagtgagacccccatttcttttatttataaaaataaaaataataaataaaaatacataaaatgtaattgtatggtcaaattgaggataaccacatgaatatttttgtaggtgcacatataccatgctgatagcatggtaaattgacttcaggcttcctcacgagagcaaaaccaacatatagcaagagttataaaatcatttgt

SEQ ID NO: 1561650 - DNA, 4001 bp, Homo sapiens
aagttatgataaactgatatataagtttgataaattgtaaaacatcttcagatactggttcacttattcaatacttattaaacacctactatgtatcaggggctatgccagttcatacatacgcatcttaaataccccatgacctcaaggaactcccagctatctggtagtaatggaaaatgcacataaataattacagagctacagtaattgtagggaaaaaaccatgaaacctcctaactcaaagtatagcatctgcatctcctggggccatctaagactccacccctcaaccccggaatctgcagtttaacaaggatctcaggtgatttggatctttattaagatttgagaggtggccgggcgctcggtgtctaaggcctgtaatctcagcactttgggaggccaaggtggccagatcacctgaggtcgggagttcaagaccagcctgaccaacacggagaaaccttatctctactaaaaatacaaaattagccgggtgtggtggcgcatgcctgtaatcccagctactcgggaggttgaggcaggagaatcgcttgaacccgagaggcggaggttgcagtgacccgagatcgcaccattgcactacagtctgggcaacaagagtgaaactcagtctcaaaaaaaaaaaaaaaagatttgagaagtgatgaactctgggattatagaaggaactaggggggtgaaggagttgtaaggggtacggggcacgaaaaaaaaaaaaagaaggaactactattgatccttgggaagtggtaagagaagtcttcagatgcgaagggtgataggaacatcccaggctgaaaaaataagcaggcccatgatcaaggtagttagaactagtaagaggtgttctggaatgagaagtttcgtctgggaggggcagtgggcacttaggaagatatgggagatagggcagaaaaagtaggctgaggccagaggcagacgggccagactgacctgctgagggttatggaggaagccacagcaaattttaagcaagaatgtaacaagaccagtcttatgtttggacctaactctggtggcagagtggaggacgaaatgcaggagaggctggagcaagcaggcaggcatgtatccttaaatgagcaccattcacttttggactagaaaggaagtctgaatattaagaagtgtaagggccacagggtcctaggcaggcagaaaagcaaagggttccagctgcaggaggatacaggggggttccttctcagttcaggagtgtggtctcggactggcatcttcagcatcacctaggagttgttagaaatgcccattctcaagcatcatcttagaagcagtgagggaaccttggggatggggcacacaaatctagctttgaacaacttttccaggtgattctgatgcatgctaaagaaccactgctctagcccgccaaaaatcatgtctcaggtggtaaaggcttagaactgcacaacttactgtcttttttaaaaagaacgagggtaatgagaaatgggttcctatgttgagtggggcagaacaaaagccacatacaacctagattttacgtagtgccggaaaaaaaaatactgaccatcttgtccaaaagtctcatatttggagaattaaaatagttttggtcgaggccatgatgttctcggtaacctaaattaatttataaaattctttgttccctttatttcccacaaaaacacccgcagcaaaaacgctgggattcatctgggccctctgaaaaccgtgtttccgacgcaaccgcccattagaaaaacacaattccaaattaaaaacccggagaactgagcggcggggctggcgccaccgtcccgggacagcgcggcctttcccagccacacccctgcgcgccgccggcctccttccccggcagttcccaaagataaataaatgctccttgtttttccagacctgaaattaacggtgactcacagagcactctgcatggccacggtcgcctcgggaaggaggaaaaatgtgcagacttttttcccctcacgcgagggcaggacaagccagactgggccaatcaggggagggcggcgggaatcgcaccaaagtaggtaaaaaatgcgggaggcgtccccgctgccgcggcccgcgactccgctcccgtgggtcctcccccagtgcgttccccctcctcgggccctgccctcccaacccccaacatctctctccttccaccactgtgtccctctccctcacctctccccttgcccccacctcccccactaagtgccccctcgcccctccccccacatccccctcctctccccacactgtcccctctccctcacctcttccctcccctctccatcctcctcctcccccaactatgtgcccctcgcctctcccctccaaatccccctccttcccacactctgtacccctctcccccggctctcccctccttttcccctccacggcctcgccccgccccagcggcaggcacacctggccaggtggctgcctccccgcgcgggccatgcctgcacagtgggtggggcgtcaggtggccccgccgaggaggcgaaggaaggccacccctcccccatcatcttttgcccgcccctcgccagcaggagccagcccagtccgccttctagcctcctgcagaccagagaggacgcacccccacccctaaacactttctggtgaggcggaccctgccccgcagccttcagcagatgagggaagctcccctccgagactctggatagccgccgggggggcgttgcctggccggctggttgcgtagcaacggcaggcggtgcgtgacgtgcgcagccgcgttccgtcctgaggcgcgcccgccccggggtaagctcgcgccgccgcgtcagctcagcgctgggtctctcggtcccgcagccgtgaggaggacggtctgcatactcgctgcccgccggctccctcccccgcgtccctgcgaccgccgcggcgaagatggtgagtaggagggaggccgaggcgtgggccgaggcggccgggagcagtgtgtctctggggcgccgcggagtcggggctaagggggtgagccgtgcctcagcccggggagggacccggtccggctgcagtgtccgggctgcgggtgagggggggtctctgggcctccgtctcccgccgtcctggctgggcccccgcgccccggggtggatccgcggctgttgcgcagctcccagctggggcgaggccgccgccctgagcgtggcctctgcgggtgtctccagacccggccttgcaacaactggctggggtcgagcgcccccacccgctctgtgaaatccatccgggggtctgcacaccgaggccggggagtggggggcggggggcgtcggaatccggccaccgtccttgttggcgtgggtttccccagagctggcgctgaggcgcttggtgacttgtgcgcgttccagcccttgaggtctgtccatctcaataaggaagataaagcctttatggaacagtcctagagcacggaatgatcgctaacgagcaggatcctggcatgatttagaacggggtggccttgcagctcctttgtttttttctttttatctggcaatcggcttccagcagcactctcgtcgtgcttgtcaagcttggcagtgtctgttttaacccttccctgcccgatctgtccgtgtatggttagaattttttttctgacctgtagacagttggactctgccagaacttggtgcgcaaggtgtgggcatgatgctgggatgctgatacaaccaaatttaagagctttaaaaaccattaaaatactggagtcaccagaaagtaaacaggtgctcattagtatattctatatgatggacattttgcttaatttacatattttccccctttacactgtcactctaattagctatttaaaaacgtattctcaactgaactatcagttggaacattttgtcgttttcgttagtgtgcacacactgttaccattt

SEQ ID NO: 1561651 - DNA, 4001 bp, Homo sapiens
tccgttcacacccggcggggcacggggcccgcagcagcttactcacccgtagcccggcctcctccctcggaagggagaggggatcggtggggagggggtttgctggacaccagggctagacggggccctcccctgaccgtcagggttaagtagggcgcgggctgtgaggaccctcctccacgcagccccccgaggcagagggcccgcaaagcggtctccatccaactccaccccgcggacgtcccaggcagcggatggcggcgggggggggaggccaggggacatttaggggacaaattcctcagacttcgaggcagccggcgacggcgtccaattcccaaataaatagaacaaactcctacttggaaaaggccttccccggggtcttcctgcgcccgcggtccagctcctctgcagacggccatcgtgggctctccgcagggctgcggagtctcggagtcaccgaggtgggaggtgccggccacgcgcgtcctcaggaacagagcactgccctgcagtttagcacgaagggccggctggagcgggagcgcgaggcccactgcaagaggatcaggagccagtaagtccggcttttcttcgtctccacctttcgtgcgcccggggccaggaccgcctgtccggaatctgaccagtgcccgtcctcgccgtggccctgggaccccgcggtggtcttcttttggggacgaacggcagtgcccgaaggatgctctacccacccccgttcctagacttgctgggtcccgacaatacccagtgggtgccgcgagttcccgggcgcagagtccagcgtccggctctcgagctcaatcccgcgccccgacggccttggcgcttcccgctgcgctaaactgtccaccgcgcacaggctggaagcgaagtcgggccccctcctcctggtctgcagggtccctccaggcctttcctgtccgggcagagagacagtcacaggggcgatcggaggacgcgtgcgggagggccgggggcccgcgcggtcacggcttctcgtgacagtgtttgcaaagcgcggagggcgtcccggagaaggcggcgcacttgtcagggcagggccccagggcggcgcctgcggagaaggggcacacagtggcctggccgaagggcgtcaagggcgcggcgtttacgggcgcggccaggccctggccctggttgaggaaggccaccaggcgccgcatctcgtccagggcctgcgcctgcatgaggatatagttcttggcgagcagcagcgtggcgatcttggagagcttgcgcaccgacgggctgtgcgcgtaggggatgacggctcgcagcccgtccagcgcgtcgtttaggtcgtgcatgcgccgccgctcgcgcgcgttgatgctgagccgcagagaccgctgctctcgcggccgccgccgcccgtccgccgcgctccctggcccgcgccgccgccgccgctgctcgaaggcgtcgtcctcgtccccgctctgttcgccgctgctctccgccgcctgagctggggcgcgaggtgcaggcgccgcggggaggtcgccgcccgggcccggagtgccgtagccgcgggccgcttcgggttctcgcgccgccccgtaggcgagacccgcagccgccgccgcgtagccgtggcttagtgccaggtacgcgtcccccgacagcgacttgagctcggccatggccgcgccgcctgggctcgggggctcgccgggtgggcggatgctcatgtgggtgagcagcccccgaggccggcccgagcccgccgctgccgctgccgctgcgatgaggctcccggctctgcgcgtcggtctggcttgcctgcgggtcccagagcctcggcgcccgctgcctcctccgcctcttccttctctcccacctcctctccctcccagccgcgacgcgcagggggcgggctctacctccccctcgcccccgcttcggttttaagccgcggaggcgcccggtgggacctcgctgctgtccaatcaggggggaccgggtgagctcctcttcctggagccgggctccaccagcgccgcaggctcacaggccgggggtgggggctctggaccgaggggcggcgcggggcggcgcggggcggcgcgcgcggtcctggagcgctagtacttgcttctcgactccccggccgccgcctccggccgccccggggattccgccaccaaacgcacgcgtcccaggtgggcacccgcctcggtccgtctttgagtctgaccctagcgcaagagtccctggcgacacgcaggggccagagcgggggggcgcgccgcaatagcagcagcgccagcgccaacaccctgtcccgctgaggggccgcttcgggtcggggtcagggtcgtgggcgctctggtgcagccgcggcgcagcgtgtacccggagcccgcacactccctgctcggggcgccctgtggccaggcttgaggggcagagtgagagggagtttctagaacctgttgaaaaacgccacgagcgttgcaggccggggagggcgggaaggtggagggcagcgcggcctggggctccccgggggtgggaggggagctctgtgagctgcaggaccgcctcttccctgccagccgcttcctgggcatctatcagcgaaacgcgtgaggcttggtgggctttcccggagcctccgaacccctggggtccagccacactggatgggaatgtggccagcctcggactcgccttttcagtcctcttccaaccccgcatgaaggccagaaccccagcccttctcccaggtgggaacctgcctggaggcccggccgagtgctgaggctagagtgtgctgagggatagtggcttctccggtcctggcttgggtgggagactgggccaccctggcctatggcacgaggtggagcggcccgtcgggcccttctgtgtgacctgggaagggccgcataccctccctgttctccaggctccgccccaggaggagccacagcgatggggcagtgtgcgcagccccgggaggggagtgggagctgcacgtgtgtggggcggatgtgctgtctggaaggttctgggaacgcagcagtgaccggcctgtccggtggttccctgccaggtgcggggtgtgaggagacagatgcatggataagtctccgtgggaaactcaggcctttgtcctggcggaggggaatgggtctgaggcagcctctgccgggctggcggcctgtctggctgcgcgtcctgcagcaccggcctcacccccagcacacgcccgccaggagcgcaggggccccgaggatggaagcgtctgtctgaggcgctgtcctgggaccccaccccgccttcggggctgatgcacagaccgggaattgaggatacctggtgtggaggaggccgctgtgtttgggcctgggtctgaagggtgagtgggtgtcattgtggccacgggccggggtcgggggagcattcaggtggccggaggaggcctggcacagggaagggcagtgaggggcccgggtggggccaggagatagaggggcgggaccaggcctgtgggacagtttgaatcacgcggggagtttggtctttatgggaagaaaggcgccgtggccattcggagagccactctggcactgctgccggtgcggtccggggctgcggggcctcctcctgggcctgaactgcagggctggtgggggccatgggggaaggtggctccacaggtccccggagctgggggagcaggaggatggggttgaccaggagggaaagctatggagctggagaatgcaggaggcccccgaggggaggtgcagccagcgctggtggggaggcctctgaggggtacgcggtaattgacatcacgggtgtgggtgagagtggctttcaaagcatcggctggagcagggtccccattaaagccagagacgctgacgccatggggctggggttggggctgggccggggctttgggaggtccgaactccccagcagggagccagggctctggg

SEQ ID NO: 1561652 - DNA, 4001 bp, Homo sapiens
tggccccagccaagtcccacccagtccccgggcccccggtgtgtccttccaaggctatgagagcttcagctggaggggagctcccaggtggcaagaaggaggagggggtgggcagggggcttggtgggggatgtcacttgtacctcattagcatcaaaggtgaaaaggggacaagggtgactggggtgccggccaggatgggcgagaatgttcaggaaaggactgagctggcatttgcattgttcccagagtgagcagtgggggccccccagggcttggtacatctatagccctggggcttcaggagccagaagggcccctccccaggtctctgcttccccaagatggattcccagtgagaagaagaagggaggctgccctagaaggccagtctggggccaggcttgcttttaggaactcatgcctccctttgggggtgggggacccgtcatctctctacctcctggcgaccccgtcccctcatcggcatccatgcgatacgtcacctgccactgacatcacaggtttgggctgcatcgggcactggacctctaccagccccaaagaccccggctctgcacctgccatgcctcttgcctggcctttgcctcctgagccttggacttccagggaggtgggtgagctgggcctgccccttcacgccacggcttctgactgtcccagccactgtccccccgaccagctgtcttaagttggtccagccttaccaggatggtgccccgccagagcccactgctgacaatgaccatggctgtgccagtatttgtaaagccctcggtgggccctgctgccctgtccttcagccaggaagtggcagagctgggacctgaactcaggtctgaccacatggtctgcagctgtagggcagaggagcaggcccgggccaagactaggataggtactccggggacttgattcagttggggaagaccagacagtagctgcaggttggggcctggagaaattccccacaggctgagcatccaggaccttctggctgaccactgcctgccttggtcaccctgatcctgttctttaaacatctcctctccctgtgcagaacagcagcggggaaggtgagggccccaggcaatgtcagccccacccacttctatcacaaaggggtacttgtgcaccaagctggcggcctccacagctgagaccctcagactgtggccagaggcagcccctcctcacatcccacggtctgaaacactcagccagcagagactccgggggagggtgtcaggcacgagcccatgggcactggaggggcttgcaggaccactgctccgtcatcaggccagacccttcctgttgggggatggatgctacggaggaggcagagccctgggctggaagggtccagaatcgtgcccaggcccacggcaggaaggcccccccgcccgggactgacctgtgtggaagaagccggcagcagccagcagctcgggtggcacctcagcagtcagcggccagtcatagaaggaggccagacgcaactcctcagagcccatgccggggaaggcaggccccctggacaaggtggccccggcgccctcctcctcttcctcctctgtcaggggccgcagctggcccaggatctgcccatccacgtggtcccaggctctgcaggtgtccaggcctaggacagggctgcccagagagcggggtccacagcgctcctgcgtgggaccatcaccggctgcccagtggctcggctgtggtccacggtgcaggcacttggcactgtctttaggtcccatggagggaacactggctctgaccaggtttgcagcagaaatgggggctgatggccaatctcagaatatgcccagctggcccttctggagctcctgacccccggggcccaccctggggacagcagggataggcacaggcctgccaccagacaccctgggaggggagtatcccagggcccacagctttctggaagtggccagggtggcctctggggtcacatgctctgtgcagcgggggcgtgtcacggggcccctggcagggttgcggatgccgctgactgcacgtgggcaggccacgtctctctgaacaagacgggaaggaactgagcatggagacccctccccaggctggtgtctgccccagggctgtgggggaggggttggggagctggagatgatggctccaaggtcaggcgcccagggcagcctccggaagcagagaaggctcaaggaaggacatgtgagctgtgctgcctgtgcaggcaggggccgtgacctcccaccttgcgggggtgactctagcctcacaggggcctagggctgcgtcacgcagagcagggaggcaggtcacccggctgttctctgaaacatccctctgccccaaggggcctctgcaggtctgggagcagctcttgtcctcaggccaggaagatcagagcaaaaagaagggcccgagctgccctcacctcccgctcccccttcccccatctccctccacctccctccataccagcctccccaggtagccaagggagaggctctgatgcccccaaaagaggagtactcagtgttggcactggaatcggagttcctgaggtctgctgtgaccctggctgccggtccaagctccacactgtgccacactgccaaaccccacagtgagggaacagggaggaggacttaaccccagagaagccaggggcagaacaggaaccccagggacacctgggcgggacaaaaaggacagctggatggggcccagacttcgacaccccccaacccccgactgagccctcaaccccagcaaacccagctcatccacccggctggccctaaaagccccctgtcatccttcagccactctcccctgctgttccgtcctggatgggagcgtgcaggctcacagagtttggaagaataaagaggagtcgcacgctgcagggccgctggttgccacggggagcgcaggtgggcaggagagggttagctgcagtgaaaaccgtccctgagctcacctggaagcctggcccgttctcttcccactgctgagccgcatagacccagctgctgcccaccacactttcacacctgccccccgacccccactcacggcgggggctggggctgcacccgccctcccaggaggcctctggtgactgttctggtcatactcaggccagtgttgccaggccccagcgagacccccaaccctttcctatgcaaggcccagagccacctggtttcctgcagaaatcaaagtgaagggtgtggctggaaacccctcccaggctcttaaggcctctggggtgtctgcaggccctgctgaggatagagcccagaagccagggctgcagggcgcagagggagaggcagcaggaagctcaggggcataggaggggagggctgtcgggaaagggcctgagggccagcaaaggagttaggctagacacaaggtagaacttcccagtgtgttttctgggatgatctcagggtacctcgccttcgccccctctctgtcctccagtgcccacctcgccttcgccccctctctgtcctccagtgcccacctcgccttcaccccctctctgtcctccagcgcccacctcgcctttgccccctctctgtcctccagcgtccaccacaccttcgccccctccctgtcctccagcgaccacctcgccttcacccccacgtcctccagcgcccacctcgccttcgccccctccctgtcctccaccgccccctcagcacagcggttacctttggtcacttcagcaaaaccccgggtgtgggcctggggccctttcaggaggacgtgggcctcaagctgggtggatttgctgcctggttcccagtctgcccgcagtgcaccggggaggtgggaagaggggccactgtctccagcctgcttcttccaggggagagacacatgcagcacccaggtttgctctgaactctcaagctggggaccctctgaggtgggcaggcagcagaggc

SEQ ID NO: 1561653 - DNA, 4001 bp, Homo sapiens
acaggtgagagacccttgagactaatactccaggatgttagtttcttagcctaacgaactgaagttaagtccagaggtgtttaggtaccatgacttttaggggtgcagggtgctatgtgacactgttacctttatctgtggaatatttgaattgtcactgaaggaagggatgtctgctgtcagggaagggcaggggcaagttccttgagcttgggcaacggattactgttggatcggggagcaggtttgctgtgagccatttactagatatctattttgaaatgtgtatctcctcaggagccaacaccccaaagggagattctgaatttgcagttaacttcccccccccaccgcccccaccccccctcagagatttaaacgtgtgcactcatgcacatacacaaaacactagtcaaacaacaatctcttttccccccggtaacctctgacttcctctatatgccccagagacacgttgtcaccatcttccctgggagtgatcctgtttatcctcccctccccgacttgccctcccacagggcccatgcatgccccagcaggatccagattcctgagcatttccagagcaggaagtcagagaggcaggcaacgcgtggttcttggtatatcgcacagggacaggcttgaaatggaatgcatgtgtttcaaagataggagaacaacaacaaaaaaagacagtctaacccagattcctctttgaaacaacatattacagattaaaggttaaactgtttttggcagcaactctaacaagactaatttcagatatggaattgacctggtcactggaaaccgaccaggcttcccgtgatcaaatcttttaacagatttgcttgacattaattagtctctgatttaaaacaaacaagcaaacaagatctaacacttggcattagcacttaagctggaacttttttttggtcccagctttggtgttgccgtccagaaggctgacgggatgactggaccatgtcaggcagggcagagaagccgtccccaacacaccagttccctgaaagggatagacgatccaaacctataaacagaaaggctgtttctttccgaggacagaccccagtctcccaacattcggcgatgaaatgggacacggaggcctggaaggaaactaaaggagatttggaaaggggaaggaaaaaacaactgtcccccatcccccatgcttcctttccaggccattagtgcgccaggcattccgttccttcagctgcccttgagggccactccccacgtctatagaaggaaagggaagggatgtccacccttgatgtaaagttggagggagtaagaagcgcccgcgactcttagcagagcgtcagcctatcaccccagacaccgaagcggagcctcaggagaccctctctcccctcacccccacgtccccccacctcccccccaaaaaagcaactaaagcaacgcaactaaactgatggggacagaatgacaggcctctcacaagctgggcaccctgccgtggaacccggggctgcagagatggtggtcgcgctcccagccccgtgcccccggctctgcctgtctcatcctgcaagggcgctgaccttggacaaggccagagccagcacccaggagtactatgacccacctccgggctgggaagggaccccccaaggcccaggctaggtccaatcacggcaatcacctgaagccggacaggggcgccctgccttcccggggtatgcggaaggaaaaccccagtgacggggacccggcgacgcctaaggtgacccagaagggacaatatggcggcgcggccgcatggagggcctctcatcccgccccaagcaggttgacgccacggtacctgcaagccctgccatggcgccgccgccactgtcgccgtctgccgcagcctgcctccacctcagctcgccaccgacgccgcaggaagccggggagacgcccccttagtcttctagtcgagccggccgaggacccatcctgggatcgggctgtctaccgcaaacgcctgatcacaaggtccgaagtgggggctcatcctcgccccatttcccgtaaatatcagccacagaccacctttgaggactttgtatgcacttttacaaaactctgggagccccgagatcttcaagcccgaataatttttatcaggcgcagtgtggacagccccgaagcgcggccgggtcccctcatgcatatgcagcagattgtgatccttactccgtgagcgctgggcgggccgggttgtgttcatgttggtgaacccgcttcgttcttgcccgcgtggatggtccgtggactccgggaaaaccttctcgtggctcaaagtccaccccctccctagcgtttcatcatgcagccaaggctcaggagctgaaaggtccgggctcagaacttgggactgccttgggtcaggcctcggctcccccacttgccccgtaccttgggccagcgagcccctcgcccaccccgacccggcttctgttgaaatgcccaccttagggcttttatgaggcttgaatgagtccgtgtagtcatttattagctaattaagcatattccttgggcgcttactgtacccaagcgcagtgctaagggcaggtagagtcggtaacctgggtctgtccctgacctcaaggcactgccagtctaatggcgggtaggcggggagacagtcatataatcactgtatattagtgactttaatcaatacataattacacatcatgggaagtgctgtgagaagaagtagagagtgttaggagaaattaatggagtactaatgtagggaaagggtggaacctccttgggaagatggcatttaggttgagaaacaaaggacgattagggtaagagtgagaggggaaatgttctaggcagaaagaacatttgtcccagatctggagctgggaagcggcagagttggggtgaggtgagcacagaagaaaacaggtcagctacatactgaatttggcttttctcttgagagtcagggaagccattttcatcaggaagaggatagcaaattaggatttctgaaaggccacccaggccgcatggcttggaaagcactcaggagtgggtgtaggcagaccagttaggaggtggttgcagctttccagacaaaagccaatgctgactcagacagggtggtagcttggggaggtgaagggaagggtggaagattggacttgggtggatgtggaggcattggcaataactcctcgctaggttttagccttgagtaaatgaaagggtaaaagattccttgaccaagacaataaagcctgaaagaggaacggactgagggggaagatcaagttcggctttgagaagttaagtttgaaatgtcggggcaacatgcaggcagagagggtgagtaggcaggtttatgtgacacagaagctgcgaacggaggctggggcaggagatacatatttgggggccatcaatacaaaggtcatggtgctgggtgagaacgcaagtgaaagaaggtggagagaaaagaagaggaggatccgggaaaggagactaagaagcagtggccagtggggtagaaagaggaccaagtgagtgtgggtcctagagaggaggtttcaggaaggagggagtgctcagtggggctgatgctgttgagaacagaaatggagccgttggggtttgggaataaagaaggttggtggactgtatcttttatgttgcaagttaaacacacaactacatcaagtggcttaaaaaaataagtagcctgccactcagtggctaggcagtgtcatcaaggactgaggttcattttatcttctgtccttgtgctggtttatgctcatggccacaagatggctatccagttcctgaggtcacatccaaagcaaggagatgtccatttctcctccagctgagactcaaaacaggcctgaatgtggcctcccaccatcctgctgcttacaggctaaaggatcaatgcatccatggcagccacaccc

SEQ ID NO: 1561654 - DNA, 4001 bp, Homo sapiens
attaaacattttattctgatagagagcaatgcgaagaattgaaaatgactagtgttttactgcacagcccttagtcacagtgctgaacgtcccctttgcctaaaccatcattgctcccagaagactttgcccccacaaggccaaggacagagcagatcggttgggaaggaattgggaatagctctgtgggactccagcaacaggtgagagacccttgagactaatactccaggatgttagtttcttagcctaacgaactgaagttaagtccagaggtgtttaggtaccatgacttttaggggtgcagggtgctatgtgacactgttacctttatctgtggaatatttgaattgtcactgaaggaagggatgtctgctgtcagggaagggcaggggcaagttccttgagcttgggcaacggattactgttggatcggggagcaggtttgctgtgagccatttactagatatctattttgaaatgtgtatctcctcaggagccaacaccccaaagggagattctgaatttgcagttaacttcccccccccaccgcccccaccccccctcagagatttaaacgtgtgcactcatgcacatacacaaaacactagtcaaacaacaatctcttttccccccggtaacctctgacttcctctatatgccccagagacacgttgtcaccatcttccctgggagtgatcctgtttatcctcccctccccgacttgccctcccacagggcccatgcatgccccagcaggatccagattcctgagcatttccagagcaggaagtcagagaggcaggcaacgcgtggttcttggtatatcgcacagggacaggcttgaaatggaatgcatgtgtttcaaagataggagaacaacaacaaaaaaagacagtctaacccagattcctctttgaaacaacatattacagattaaaggttaaactgtttttggcagcaactctaacaagactaatttcagatatggaattgacctggtcactggaaaccgaccaggcttcccgtgatcaaatcttttaacagatttgcttgacattaattagtctctgatttaaaacaaacaagcaaacaagatctaacacttggcattagcacttaagctggaacttttttttggtcccagctttggtgttgccgtccagaaggctgacgggatgactggaccatgtcaggcagggcagagaagccgtccccaacacaccagttccctgaaagggatagacgatccaaacctataaacagaaaggctgtttctttccgaggacagaccccagtctcccaacattcggcgatgaaatgggacacggaggcctggaaggaaactaaaggagatttggaaaggggaaggaaaaaacaactgtcccccatcccccatgcttcctttccaggccattagtgcgccaggcattccgttccttcagctgcccttgagggccactccccacgtctatagaaggaaagggaagggatgtccacccttgatgtaaagttggagggagtaagaagcgcccgcgactcttagcagagcgtcagcctatcaccccagacaccgaagcggagcctcaggagaccctctctcccctcacccccacgtccccccacctcccccccaaaaaagcaactaaagcaacgcaactaaactgatggggacagaatgacaggcctctcacaagctgggcaccctgccgtggaacccggggctgcagagatggtggtcgcgctcccagccccgtgcccccggctctgcctgtctcatcctgcaagggcgctgaccttggacaaggccagagccagcacccaggagtactatgacccacctccgggctgggaagggaccccccaaggcccaggctaggtccaatcacggcaatcacctgaagccggacaggggcgccctgccttcccggggtatgcggaaggaaaaccccagtgacggggacccggcgacgcctaaggtgacccagaagggacaatatggcggcgcggccgcatggagggcctctcatcccgccccaagcaggttgacgccacggtacctgcaagccctgccatggcgccgccgccactgtcgccgtctgccgcagcctgcctccacctcagctcgccaccgacgccgcaggaagccggggagacgcccccttagtcttctagtcgagccggccgaggacccatcctgggatcgggctgtctaccgcaaacgcctgatcacaaggtccgaagtgggggctcatcctcgccccatttcccgtaaatatcagccacagaccacctttgaggactttgtatgcacttttacaaaactctgggagccccgagatcttcaagcccgaataatttttatcaggcgcagtgtggacagccccgaagcgcggccgggtcccctcatgcatatgcagcagattgtgatccttactccgtgagcgctgggcgggccgggttgtgttcatgttggtgaacccgcttcgttcttgcccgcgtggatggtccgtggactccgggaaaaccttctcgtggctcaaagtccaccccctccctagcgtttcatcatgcagccaaggctcaggagctgaaaggtccgggctcagaacttgggactgccttgggtcaggcctcggctcccccacttgccccgtaccttgggccagcgagcccctcgcccaccccgacccggcttctgttgaaatgcccaccttagggcttttatgaggcttgaatgagtccgtgtagtcatttattagctaattaagcatattccttgggcgcttactgtacccaagcgcagtgctaagggcaggtagagtcggtaacctgggtctgtccctgacctcaaggcactgccagtctaatggcgggtaggcggggagacagtcatataatcactgtatattagtgactttaatcaatacataattacacatcatgggaagtgctgtgagaagaagtagagagtgttaggagaaattaatggagtactaatgtagggaaagggtggaacctccttgggaagatggcatttaggttgagaaacaaaggacgattagggtaagagtgagaggggaaatgttctaggcagaaagaacatttgtcccagatctggagctgggaagcggcagagttggggtgaggtgagcacagaagaaaacaggtcagctacatactgaatttggcttttctcttgagagtcagggaagccattttcatcaggaagaggatagcaaattaggatttctgaaaggccacccaggccgcatggcttggaaagcactcaggagtgggtgtaggcagaccagttaggaggtggttgcagctttccagacaaaagccaatgctgactcagacagggtggtagcttggggaggtgaagggaagggtggaagattggacttgggtggatgtggaggcattggcaataactcctcgctaggttttagccttgagtaaatgaaagggtaaaagattccttgaccaagacaataaagcctgaaagaggaacggactgagggggaagatcaagttcggctttgagaagttaagtttgaaatgtcggggcaacatgcaggcagagagggtgagtaggcaggtttatgtgacacagaagctgcgaacggaggctggggcaggagatacatatttgggggccatcaatacaaaggtcatggtgctgggtgagaacgcaagtgaaagaaggtggagagaaaagaagaggaggatccgggaaaggagactaagaagcagtggccagtggggtagaaagaggaccaagtgagtgtgggtcctagagaggaggtttcaggaaggagggagtgctcagtggggctgatgctgttgagaacagaaatggagccgttggggtttgggaataaagaaggttggtggactgtatcttttatgttgcaagttaaacacacaactacatcaagtggcttaaaaaaataagtagcctgccactcagtggctaggcagtgtcatcaaggact

SEQ ID NO: 1561655 - DNA, 4001 bp, Homo sapiens
tagatggtccaaacacaccttgtttataaaattttttccacaaactataccattaaacattttattctgatagagagcaatgcgaagaattgaaaatgactagtgttttactgcacagcccttagtcacagtgctgaacgtcccctttgcctaaaccatcattgctcccagaagactttgcccccacaaggccaaggacagagcagatcggttgggaaggaattgggaatagctctgtgggactccagcaacaggtgagagacccttgagactaatactccaggatgttagtttcttagcctaacgaactgaagttaagtccagaggtgtttaggtaccatgacttttaggggtgcagggtgctatgtgacactgttacctttatctgtggaatatttgaattgtcactgaaggaagggatgtctgctgtcagggaagggcaggggcaagttccttgagcttgggcaacggattactgttggatcggggagcaggtttgctgtgagccatttactagatatctattttgaaatgtgtatctcctcaggagccaacaccccaaagggagattctgaatttgcagttaacttcccccccccaccgcccccaccccccctcagagatttaaacgtgtgcactcatgcacatacacaaaacactagtcaaacaacaatctcttttccccccggtaacctctgacttcctctatatgccccagagacacgttgtcaccatcttccctgggagtgatcctgtttatcctcccctccccgacttgccctcccacagggcccatgcatgccccagcaggatccagattcctgagcatttccagagcaggaagtcagagaggcaggcaacgcgtggttcttggtatatcgcacagggacaggcttgaaatggaatgcatgtgtttcaaagataggagaacaacaacaaaaaaagacagtctaacccagattcctctttgaaacaacatattacagattaaaggttaaactgtttttggcagcaactctaacaagactaatttcagatatggaattgacctggtcactggaaaccgaccaggcttcccgtgatcaaatcttttaacagatttgcttgacattaattagtctctgatttaaaacaaacaagcaaacaagatctaacacttggcattagcacttaagctggaacttttttttggtcccagctttggtgttgccgtccagaaggctgacgggatgactggaccatgtcaggcagggcagagaagccgtccccaacacaccagttccctgaaagggatagacgatccaaacctataaacagaaaggctgtttctttccgaggacagaccccagtctcccaacattcggcgatgaaatgggacacggaggcctggaaggaaactaaaggagatttggaaaggggaaggaaaaaacaactgtcccccatcccccatgcttcctttccaggccattagtgcgccaggcattccgttccttcagctgcccttgagggccactccccacgtctatagaaggaaagggaagggatgtccacccttgatgtaaagttggagggagtaagaagcgcccgcgactcttagcagagcgtcagcctatcaccccagacaccgaagcggagcctcaggagaccctctctcccctcacccccacgtccccccacctcccccccaaaaaagcaactaaagcaacgcaactaaactgatggggacagaatgacaggcctctcacaagctgggcaccctgccgtggaacccggggctgcagagatggtggtcgcgctcccagccccgtgcccccggctctgcctgtctcatcctgcaagggcgctgaccttggacaaggccagagccagcacccaggagtactatgacccacctccgggctgggaagggaccccccaaggcccaggctaggtccaatcacggcaatcacctgaagccggacaggggcgccctgccttcccggggtatgcggaaggaaaaccccagtgacggggacccggcgacgcctaaggtgacccagaagggacaatatggcggcgcggccgcatggagggcctctcatcccgccccaagcaggttgacgccacggtacctgcaagccctgccatggcgccgccgccactgtcgccgtctgccgcagcctgcctccacctcagctcgccaccgacgccgcaggaagccggggagacgcccccttagtcttctagtcgagccggccgaggacccatcctgggatcgggctgtctaccgcaaacgcctgatcacaaggtccgaagtgggggctcatcctcgccccatttcccgtaaatatcagccacagaccacctttgaggactttgtatgcacttttacaaaactctgggagccccgagatcttcaagcccgaataatttttatcaggcgcagtgtggacagccccgaagcgcggccgggtcccctcatgcatatgcagcagattgtgatccttactccgtgagcgctgggcgggccgggttgtgttcatgttggtgaacccgcttcgttcttgcccgcgtggatggtccgtggactccgggaaaaccttctcgtggctcaaagtccaccccctccctagcgtttcatcatgcagccaaggctcaggagctgaaaggtccgggctcagaacttgggactgccttgggtcaggcctcggctcccccacttgccccgtaccttgggccagcgagcccctcgcccaccccgacccggcttctgttgaaatgcccaccttagggcttttatgaggcttgaatgagtccgtgtagtcatttattagctaattaagcatattccttgggcgcttactgtacccaagcgcagtgctaagggcaggtagagtcggtaacctgggtctgtccctgacctcaaggcactgccagtctaatggcgggtaggcggggagacagtcatataatcactgtatattagtgactttaatcaatacataattacacatcatgggaagtgctgtgagaagaagtagagagtgttaggagaaattaatggagtactaatgtagggaaagggtggaacctccttgggaagatggcatttaggttgagaaacaaaggacgattagggtaagagtgagaggggaaatgttctaggcagaaagaacatttgtcccagatctggagctgggaagcggcagagttggggtgaggtgagcacagaagaaaacaggtcagctacatactgaatttggcttttctcttgagagtcagggaagccattttcatcaggaagaggatagcaaattaggatttctgaaaggccacccaggccgcatggcttggaaagcactcaggagtgggtgtaggcagaccagttaggaggtggttgcagctttccagacaaaagccaatgctgactcagacagggtggtagcttggggaggtgaagggaagggtggaagattggacttgggtggatgtggaggcattggcaataactcctcgctaggttttagccttgagtaaatgaaagggtaaaagattccttgaccaagacaataaagcctgaaagaggaacggactgagggggaagatcaagttcggctttgagaagttaagtttgaaatgtcggggcaacatgcaggcagagagggtgagtaggcaggtttatgtgacacagaagctgcgaacggaggctggggcaggagatacatatttgggggccatcaatacaaaggtcatggtgctgggtgagaacgcaagtgaaagaaggtggagagaaaagaagaggaggatccgggaaaggagactaagaagcagtggccagtggggtagaaagaggaccaagtgagtgtgggtcctagagaggaggtttcaggaaggagggagtgctcagtggggctgatgctgttgagaacagaaatggagccgttggggtttgggaataaagaaggttggtggactgtatcttttatgttgcaagttaaacacacaactacatcaagtggctt
